United States Patent Application Publication US 2012/0005773 A1 - sequence listing, part 4

SEQ ID NO: 13004 - protein, 752 aa, Guillardia theta
MNRLIVDEINQNADDNSVVYLNSNKIDNLKLFRGDTILIKTKKKKDTVCIIMSDDNCELEKIRINKTVRENLNIGIGDIVTIHHFTDLKFGKRIHVLPFKDSILGYNGNIFEDFLKPYFLDAYRPIKKGDVFNIKSGNNTFDFRVIEIDPVDYCIVGPDTIIFCEGEPLDRLDTVDYEKITYESIGGCQKQLSQIRELVELPLKHPQLFNTVGIKPPRGVLMYGPSGCGKTLIAKAVANETGAFLYSINGPEIMSKLAGESESNLKKAFDEAEKNSPSIIFIDEIDSIAPKRDKSQGEVERRIVSHLLTLLDGINLNSQVVVIACTNRPNSVDQALRRFGRFDREIDISVPDDKGRLEILQIHTKNMLIDNSVDLEAICKETYGFVGADLAQLCTEAALLCIKESIENFDLEEENIPLVVLNSLRVSQDHFKLALDQSNPSAFRETAVEIPNITWEDIGGLENVKRELQETVQYPVEHPEKFEKFGMQPSKGVLFYGPPGCGKTLLAKAIANECQANFISIKGPELLTMWFGESENNVREVFDKARQASPCVLFFDELDSIARARGSSGSDGGGAGDRVINQILTEIDGVGVRKNVFVIGATNRPDILDPAIMRPGRLDQLVYIPLPDRKSRIQIFRATLRKSPLSKEIDLEVLSRATSGFSGADITEICQRACKLAIRESIFKDIQFAKNSESIVSNNEKYIDPVPEITKEHFLEAMKYARRSVSDSDIRKYEMFAQKLQTSRGFSKEIKF

SEQ ID NO: 13005 - protein, 750 aa, Guillardia theta
MAIKNSINENSKEITKNKIEEDLNEIIKKIDIKPEMYIKKNYLEIIDNKKIYIKKHLINEKEIFFKNLKILYSRYELFQLFLSDLIFENEMNKSEYNIILKKVLKIHENLFDRGLKNLLGYLDINKSYDISKNIKPKLFNNFEKNKKCNAQKIERKKNLKNFKNPKKIFSWILFKYFPILTWLQEYNINNFLKDDIISGITVGVMLIAQGMAYAKLAGLPPEYGLYSSGIPLFIYPLFGSSKHLGFGPVAIVSLLVSQITLSTNSAGHEYSTSEKITFSLLMAFSVGIVQISMGIVQIGFIVNFISHPVIAGFTTAAAFVIILSQIQHLLGFSVQKSHYPLFTLISYLININKFKWQPFFFGSANIFCLQMVKLINKNYKLELPGPILCVILSILITQTFKLNRFGITIQNKIPKGFPKIRGPIFNEFTKVAPVVLTISFINFLETIAIASKIGEIHGYKIVPDQELIGSGMTNLCGSFLSAFPMAGSFSRTAVLSQVGGKTQIAGLTTGIVIVLTYLFFTPLFTFLPNVTLASIILVSVINLIDYKEASNLLKIRFLDFFAFMISFISTFFIGVEWGIAIAIGVSLLIVLWFSINPTVSILGRIPGTVVYKDLKWYKDCIYTPGGILLRMDAPLFFVNSSVLRKKLKEKEDEYKNCNPVNLFYTLIDCRGMADIDSTGLELLNEIKEKFKKRKIFFGLANVNERVRKLLNKIDFENGSYHSMFFLRIHDGVEAAIKWKLLEIKNLSNNL

SEQ ID NO: 13006 - protein, 158 aa, Guillardia theta
MDQEQYNIINDNGASETTPIKAGNCKKGGLLVIKGNPCKIIDISTSKTGKHGHAKAIITAVDIFTGKKYQESAPTSHNLDQPNLTKTEYQLIHIEEDGFVSLMDEDGNIREDLSLDLKNDEIHVKIKNEFDQSKEIVVTVMKCLQKEKIISFKENNKI

SEQ ID NO: 13007 - protein, 650 aa, Guillardia theta
MTNKVDNCAIGIDLGTTYSCVGIWQHDRVEIIANDQGNRTTPSYVAFTETERLIGDSAKNQVAMNPHNTVFDAKRLIGRRFQDPAVQDDIKHFPFKVICKDGDKPAIEVKFKGETKVFAPEEISAMVLMKMKEIAESFLGKDVKNAVITVPAYFNDSQRQATKDAGAITGLNVLRIINEPTAAAIAYGLDKKTAGSKSERNVLIFDLGGGTFDVSLLTIEEGIFEVKATAGDTHLGGEDFDSRLVNYFVSEFKRKFKKDVTTNARSLRRLRTACERAKRTLSSTTQTTVEIDSLVDGIDFYSSITRAKFEELCMDLFRGTLDPVEKVLRDSKIAKSEIDDVVLVGGSTRIPKVQQLLIDFFNGKELCKNINPDEAVAYGAAVQAAILSGDTSEKMQDLLLLDVTPLSLGLETAGGVMTVLIKRNTTIPTKKTQVFSTYADNQPGVLIQVFEGERSRTKDNNLLGKFELTGIPPAPRGVPQIEVTFDIDANGILNVSACDKSTGKSNKITITNDKGRLSKEEIERMVEEAEKYKNEDEKTRQKIEAKNNLENYAYNIRNTIRDEKLKDKIDENEKKLLEEKIREILEFVENNEDLEKEDYEEKEKELKNMSNPIISKIYQQGSGVDPSMFSQNNEQNGENDNAGPKIEEVD

SEQ ID NO: 13008 - protein, 365 aa, Guillardia theta
MRKQYVLLCCCKKNTLKNLYFSYYTKFFIKSKTKKILKWVILQIFKFSDNNKIYFFKYFNSNNKRNLYKNSFIMKHNIINYRVKVNINNTKKNIYFDYVFINKNCFICNYSSNFGESCLKNNQDCEFEYSINNKKYNFDDFNFLNIFIYKKFLKLHEFYVNYETIQSLIGYINFKIMLNYLKFYFVFKEYFIIKIQKSLLKITKDKYYIEQTVLFLDTKNHKTIFRNISSYKHNLGVTLVSKLPIFTILFEYRGFLVHNYFSDNFERFYKNTNLDNYLFLIDDLLIIDATIIGNIARFVNHSCLPNCNTKISVHGCNKHIIIINLSHILISTEINYNYRILNEYFHTRKNECFCYEIVCNKYLEL

SEQ ID NO: 13009 - protein, 472 aa, Guillardia theta
MNKLFSIKIGPYYLGKTLGVGSFGKVKLGEHELCGQKVAVKILNRKKIKNLKMEEKVKREICILKLFMHPHIIRLYEVIETPTDIFVVTEYITGGELFDYIVERGRLNEDESRKFFQQMISGIEYCHNHMVVHRDLKPENILLDAHLNVKIADFGLSNIMKDGNFLKTSCGSPNYAAPEVINGKSYLGPEVDVWSCGVIMYALLCGSLPFDDENIPNLFKKIKSGIYILPGYLSDLSRDMIAKMLITNPLLRITINEIRDHPWFNSRLPKYLSFPTFKKNFVIQKKLNIDDNILELVSNKTFLSKKYIKLGIMKHERNSTAIIYHLIRESITPFDMITVDNSYIRDIIKKENVIKKSNEKEHNTSLHQAFLGIESPRENLKDILNEIQRAIKTFRSKTHNLNHFSVIIVINTNSLFETKYKKKKEIILRTTTILIQIFKRSMKYLIDLQKINGDSFFFLSTCNFIKQELNLK

SEQ ID NO: 13010 - protein, 271 aa, Sinorhizobium meliloti 1021
MRREGLMNISRRIAISVLGAAIVAGLVAPAAAQTVETIKSAGTVKVGMLVDFPPFGIMDANNQPDGYDADVAKLLAKELGVEVTIVPVTGPNRIPYLQSNQVDLLVASLGITEERAKNVDFSQPYAGISIGVFGAADLAVTKPEDLAGKTIGVARASTQDTATTKIAPQDANIQRFDDDASAVQALLSGQVELIGVSNVVAAQIEAAAPGRFNQKLQLSQQVQGIAVRKGSSEMLKFVNGFLDKVKADGQLNAIHEKWLGSPLPEFVTEAK

SEQ ID NO: 13011 - protein, 317 aa, Sinorhizobium meliloti 1021
MEFRNVKPDLLLVEPMMPFVMDELQRNYSVHRLYQAADRPALEAALPSIRAVATGGGAGLSNEWMEKLPSLGIIAINGVGTDKVDLARARRRNIDVTTTPGVLADDVADLGIALMLAVLRRVGDGDRLVREGRWAAGEQLPLGHSPKGKRIGVLGLGQIGRALASRAEAFGMSVRYWNRSTLSGVDWIAHQSPVDLARDSDVLAVCVAASAATQNIVDASLLQALGPEGIVVNVARGNVVDEDALIEALKSGTIAGAGLDVFVNEPAIRSEFHTTPNTVLMPHQGSATVETRMAMGKLVLANLAAHFAGEKAPNTVN

SEQ ID NO: 13012 - protein, 69 aa, Sinorhizobium meliloti 1021
MTTGTVKWFNSTKGFGFIAPDDGSADVFVHISAVERAGMNSIVEGQKLGFELERDNKSGKMSAGQLRAA

SEQ ID NO: 13013 - protein, 463 aa, Sinorhizobium meliloti 1021
MSRLVIVSNRVPVPDKGGIAPAGGLAVALKVALEEHGGIWMGWSGRSSGENEPEPLAQLHQGNITYALTDLTDTDVGEYYHGFANRVLWPICHYRLDLAEYGRKEMAGYFRVNRFFAHRLAPLVRPDDVIWVHDYHLIPLAAELRQMGLKNRIGFFLHIPWPPADVLFTMPVHEEIMRGLSHYDVVGFQTDHDLENFAGCLRREGIGDELGGGRFSAYGRVFKGGIYAIGIETAAFAEFAKKALTNKTVRKARESIEHRSLIIGVDRLDYSKGITQRIDAFERFILANPAQQGRVTYLQITPKSRSEVPEYEAMQRTVAEQAGRVNGALGAVDWVPIRYINRSVGRHILAGLYRLGKVGLVTPLRDGMNLVAKEYVAAQDPDDPGVLVLSRFAGAARDLKGALLVNPYDIEGTANAMARALSMPLEERKDRWKTMMDHLLEHDVSRWCRDFLNDLATSPDPSG

SEQ ID NO: 13014 - protein, 315 aa, Sinorhizobium meliloti 1021
MPKIELLQVGPYPSWDEERLNANFTMHRYFEAADKAAFLAEHGAAIRGIATRGELGANWAMIEALPRLEIISVYGVGYDAVDLAAARERGIRVTNTPDVLTKDVADLGVAMMLAHARGMIGGETWVKSGDWAKKGLYPLKRRVHGKRAGVLGLGRIGFEVAKRLAGFDMEIAYSDTGAKDFARDWSFIADPVELAARSDFLFVTLAASAETRHIVGRRVIEALGPDGMLINISRASNIDEEALLDALESKVLGAAALDVFEGEPNLNPRFLALDNVLLQPHMASGTAETRKAMGQLVFDNLSAHFGGRPLPTPVL

SEQ ID NO: 13015 - protein, 430 aa, Sinorhizobium meliloti 1021
MTKTLFGGLTRRSVLKTTATAAMVGAARTLLPSGAFAQGAGPETAKATLGFIALTDSAPLIIAKEKGLFDKYGMTEVEVVKQASWGTTRDNLVLGSAGAGIDGAHILTPMPYLISTGKVTQNNQPLPMAILARLNLDAQAISVGAAYADLKVGIDASVLKDAFAKKKAGGEAAKVAMTFPGGTHDLWIRYWLAAAGIDPDKDVETIVVPPPQMVANMKVGTMDCFCVGEPWNEQLVNQKIGYTAVNTAEIWAEHPEKSFAMRADWVEKNPRAVKALVMAIEEAAQWCDDMANKDELAKIVGKRSWFNVPPKDIVDRLKGEYDYGNGKIVENSPHFMKFWREHASYPFQSHDAWFLTENIRWGKLASDTDIKGLIAKVNREDIWREAAKDLGISDIPASTSRGPETFFDGKVFDPANPETYLKSLAISRIA

SEQ ID NO: 13016 - protein, 353 aa, Sinorhizobium meliloti 1021
MTQFKQLSFWSDAEPLECVTRTPEAPNVVTFSFQSPSGALFNHDPGQFVTLELPAPGGPLYRTYTISSAPSRPTALTITVKAQDGSTGTRWMLDNLHKGMRIRAIGPAGKFSIVHHPADKYLFISAGSGITPMVAMTTWLYDSGREPDVVFINCARRPSEIILRDRMELMASRIVGIDLKWVVEEPDPFRSWTGYRGMFNQIMLGLMAQDYLEREVFCCGPEPFMRAVREALAGLGYDMSRYHQESFTAEPGHAEDVPEDVIPDEQNHAEIAFALSGVTTRCSETDTILAAAKAAGLVIPSGCSMGICGTCKVRKTEGQVHMVHNGGITDEDVEDGYILACCSKPLRRVSVEA

SEQ ID NO: 13017 - protein, 403 aa, Sinorhizobium meliloti 1021
MLTQKTKDIVKATAPVLAQHGYAIIQHFYKRMFQAHPELKNIFNMAHQERGEQQQALARAVYAYAANIENPESLSAVLKDIAHKHASLGVRPEQYPIVGEHLLASIKEVLGDAATDEIISAWAQAYGNLADILAGMESELYERSEERAGGWAGWRRFIVREKNPESDVITSFVLEPADGGPVADFEPGQYTSVAVQVPKLGYQQIRQYSLSDSPNGRSYRISVKREDGGLGTPGYVSSLLHDEINVGDELKLAAPYGNFYIDVSATTPIVLISGGVGLTPMVSMLKKALQTPPRKVVFVHGARNSAVHAMRDRLKEASRTYPDFKLFIFYDEPLPTDIEGRDYDFAGLVDVEKVKDSILLDDADYYICGPVPFMRMQHDKLLGLGITEARIHYEVFGPDLFAE

SEQ ID NO: 13018 - protein, 215 aa, Sinorhizobium meliloti 1021
MSDADLDRMLAHATARRVPQGDAVFEQGQRATSFFLLLHGRLKVTQVTEDGQQIIVRVVHPGDLFGFAKALQRSDYPGTATAATESLALSWPTDLWPQFVEQNPHLAVSTMQTIGQRLEEAHTRIREMSTQEVERRVAHAVLRLSRQAGKQEKGGVRIDFPISRQDIAEMTGTTLHTVSRILSAWEQKGLVEGGRQKLIICDLSGLAALADGGRD

SEQ ID NO: 13019 - protein, 396 aa, Sinorhizobium meliloti 1021
MNKQDPVVIVGQARTPLGSFQGELKDLSAADLGAAAIVDALKRAGLAPDAVDEVMFGCVLTAGQGQAPARQAALGAGLPPGVGATTVNKMCGSGMKAAMLAHDLIKAESASIVVAGGMESMTNAPYLLDRARQGYRIGHQKVLDHMFLDGLEDAYDKGRLMGSFAEDCAEAYQFTRSAQDEYAIASLEKAQKASADGSFAEEIVPLSIASGKGERTVNLDEQPQKARLDKIPLLKPAFRDGGTITAANASSISDGAAALVLMRRSAADKQGIGPLAVICGHATHADAPSLFPTAPIGAIKALCRRIGWDIGEVDLFEINEAFAVVPMAAMRELGLDAEKVNVHGGACALGHPIGASGARVIVTLVNALRRRGLRRGIASVCIGGGEATAVAVEISG

SEQ ID NO: 13020 - protein, 588 aa, Sinorhizobium meliloti 1021
MLDTAKTRWHPVAASYDLPFRHIFHAQLLGREFAVWRADDGYVNIWENRCLHRGVRLSIGINDGRELKCQYHGWRYSNRTAGCTYIPAHPADAPARTITNRTFASVERYGLVWTAEEPQGDVPEVTGLAEGDLLTLRGIPVNAPADVVVAALTGYRFQPNGRLEGRAADMSLKASDGFSVALTAREEGAETLAVFFVQPVDSNRSVIRGVLDSSPRGAERLTVLHHHNERLSKLREIVEREAQAAPQPAPLEPVIERVSPELAELPEMTAHGRKATIRVTVARKWMAADGIAAFELRPIKGLLPTFQPGAHIDVHMPNGLIRQYSITNGPGESDSYVIGVKLERESKGGSRCMHETLRAGDVLAISEPRNNFPLRRDAEKTIFVAGGIGATPLIAMAQALKNQSLDFAFHYFAQNQAQLAFPEKTALLGEALKPQLGLDPEGTEAKLKDILSGYRPGMHVYLCGPGPMLEAARRIAAEVGWPETAVHFEYFKNTNTIDDSSSFEVALARSCVTFKVPAGRTILDVMREVGIDMPSSCEQGACGTCLATVIEGEPDHQDVYLNDAERKSGTKIMTCVSRAKSARLVLDL

SEQ ID NO: 13021 - protein, 354 aa, Sinorhizobium meliloti 1021
MLMEASFPFSLSAANQQPCYRGGPATLVCKAVIDETHDSKTFVFEDSQSRSFDFKPGQYISFKFEIEGKLCPRAYSICSTPTRPHNVQITVKRVPGGLVSNWLNDHMRPRMSVEIADIAGRFNYFDIPSRKPLLLSGGSGVTPVMSMLQYITDVVDQVDVEFVHFARTPKDIIFRDQLEFIARRFSNIKVHMVVGETGEETCFRGRMGTISASLMQSLVPDLPQREIFMCGPEGFMKAARAMAAEVPIRAVYEESFGERIPIEEPDKLGGEVYFSLSGKHGTCAPGETILEAALNSGIWIESSCHQGVCGSCKVKLTQGMVDMQDLGGLPACERSEGFVLACCSRPMGSVSIDA

SEQ ID NO: 13022 - protein, 588 aa, Sinorhizobium meliloti 1021
MLEDARTRWHPIAATDDLPLRHVFHGQLLGREFAVWRADDGYVNVWENRCLHRGVRLSIGINDGRELKCQYHGWRYSNRTAGCTYIPAHPADAPARTITNRSFQAVERYGLVWSSEDPRGDLPVVEGIGEDDLLVLRAIPVNASADLVVERLQSYRFQPNSEIAGAGANVELVAATQAAVALRSYQGRAETLGVFFVQPVDSGRSVIRGVVSGRPNDAQLTVVLRCHNEALSTLRADLEREAAALPAPTPIEPIFERVSEELASLPELDSRGRKAAIRVQVARKWQTADGIMAFQLRPVRGLLPTFQPGAHIDVHLPNGLVRQYSLTNGPGETDCFTIGVKLDPASRGGSQCLHDSVREGDVLAISEPRNNFPLRRDALKTIFVAGGIGVTPLLAMAQTLNNQSLDYELHYFAQNEQQLAFSECRQALGDAVKPHLGLSPGDTVKELRRLLSAYLPDTQLYVCGPGPMLESTRSLAAEAGWPEAAVHFEYFKNTNVIDDSSSFEVALARSCLTIKVAAGQSILEAMREAGVDLPSSCEQGACGTCLATVIEGEPDHQDVYLSPSERASGTKIMTCVSRSKSARLVLDA

SEQ ID NO: 13023 - protein, 324 aa, Sinorhizobium meliloti 1021
MRRDRIVKPKVIVTRRWPTEVEDRLTAEFDTRLNETDQPYDRRELRAALEEADAVLPTVTDKISADMLEGGIRAKILGNFGVGFNHIDTAAATKVGLVVTNTPGVLTDATADLAMTLLLMCARRAGEGERELRAGKWTGWRPTHLCGSHVTGKTVGIIGMGRIGQAVARRCHFGFGMDVVFFDSHSIAGLDVPARQLPSVDDVLATADFVSLHCPGGGENYHLIDDDRLACMKWSAFLINTARGDVVDEHALVRALETRRIAGAGLDVFEGEPRVPGRLAERQDVVLLPHLGSATKETRVAMGMRVIENLKAFFSGRSPPDAVC

SEQ ID NO: 13024 - protein, 566 aa, Sinorhizobium meliloti 1021
MRKGAEILADELAVNGAEIVYHVPGESFLTALDSLTTRHPRIRSVSCRHENGAAQMAEAYGKLTGKPGIAFATRSPGATNAVNGVHTAFQDSSPMILIVGQVKRSILEREAFMSYDFRTMFAPMAKWVGQIDDPARIPEFVQRAWATALSGRRGPVVLVVPEDVLEEKCDVAPSARPAVASHAGAPREEDLDRIFAMLAAAAKPLVVVGGSGWSETAREDVQRFATNLGLPVVTTFRRRDIIDHRLHCYVGEIGIGSNPTLLAHIREADFILMLNDALSDVNTIGAGYMEGFTLFSIPRPRQRVVHVMPDHGDLNRVFQVDLALAADNDATARALAGRSATPRAEHADWTSTLRATLMKECEPQPCPGAIDLPGVMGWLRERLPEDAIVTNGVGAYATWSQRYFPHYRLHTQLGPISGSMGYSLPAAISAKIAHPDRVVVEFVGDGCFQMSSEELATAVQYGVNIIIVLFNNGLYGTIRIHEETRLEGRVNGTDLTNPDFLLLAKAYGAHGERVTCTKEFAPAFERCLAAGKPALIELVVDPEAIHCRYSLSDLRARRAARVPHEE

SEQ ID NO: 13025 - protein, 409 aa, Sinorhizobium meliloti 1021
MPNTPWSATSQNLGQDFHNWSGGLRFRPSRLDVPEDEETVAALVRAAARQGRSIRPVGSAHSSSEIYVTDDILVSMAGICGLREHDAQHHRATVGAGSQLTELSKELQAAGMTLSNFGDVATQTVGGAIGTGTHGSGRDFPNLSMMLVGGRLVTAGGEIRTFDVEEEPDFVRALRVSFGTLGILTWTTLKLEPLHDLHRQEWCLAFEPCMEVLDKLSRENRNFDFYWYPRSDEVKIRCLNPPGEEKDYGAFARLAKDETGPPHEVIPQHSDLPHRFEEMEYSMPAEAGPECLGKLRARIKERWRRSVGWRLLFRYIKADDSWLSEAYGRDSVSISLHQNATLPYWDFFLDLEPIMRDHGGRPHWAKKHSLRAAELRPLYPMWDRFLALRQEMDPGGRFLTRYLRGLLGC

SEQ ID NO: 13026 - protein, 310 aa, Sinorhizobium meliloti 1021
MTMLRDITILQAAELPEKTDLELKETFNTVRLPRDASAIGPFLSEYGARIRGIAVRHAHIDAAMLDRLPALEIISSYSAGLDGIDVETAHARGVVVRNTSKILAEDVADLALALSISATRGLMRGHDFVREGKWGESAFPLGRSLRSMKTGIVGLGHIGSAVAARLSVMGAPTAYYGPRRKPVDLPYFDGIGALAAWADLLIVTCPASPETIGLVNAAVLASLGSEGYLVNVSRGTIVDEQALITALAGNGIAGVALDVFEKEPFVPEALRTDPRVVLSPHMGSGTRETRQQMGDSMVAALVEHFESRSA

SEQ ID NO: 13027 - protein, 591 aa, Sinorhizobium meliloti 1021
MCGICGEVRFDGGSPSVTAVSIMADVLAPRGPDASGVVVRGNVGLGHRRLRILDLSDKSQQPMVDSDLGLSLVFNGCIYNFRELRLELEEKGYRFFSSGDTEVILKAWHAWGEECVSRFHGMFAFVIHERDSGRVVMARDRFGIKPLYIAEVQGALRFASALPALVKAGGVDTSIDVAALHNYMTFHAVVPPPRTILNGVRKLPPATLRVYERDGSFEDRRYWDPPYRRQAGDAAISREEWQEQLLDALRIAVKRRMVADVPVGVLLSGGVDSSLIVGLLAEAGQRGLMSFSVGFEEANGEKGDEFVYSDLIAGHFGTDHRKIFVPSADLMGALPGTIAAMSEPMVSYDNVGFYLLSKEVSKHVKVVQSGQGADEVFGGYHWYPPLMNSNDVVADYGKAFRDRSHAVLTTQLSDAWIADHDVSGDLLNEHLLREGAATPVDQALRLDSNVMLVDDPVKRVDNMTMAWGLEARVPFLDHELVELAARMPPEEKLRDGGKGILKDVARRVIPSEVIDRKKGYFPVPQLKYIAGPYLDLIRDTLRSQKARERGLFQDAYLDRLFQEPSDHITPLRGSELWQVGLLEMWLEAQGV

SEQ ID NO: 13028 - protein, 329 aa, Sinorhizobium meliloti 1021
MNVVVSDPILASISRTIATAADGINALAGCLEDNAALRRSFVDAIELVASKRGRVVVAGVGKSGHIGRKIAATLASTGTSAYFVHPTEASHGDLGMITAEDLLILLSWSGETVELGNVLTYAKRFNVPVISVTSNADSTIARNSTIPVVLPKVPEACPHGLAPTTSAMLQLAVGDALAIALLERRGFSAEDFKTFHPGGKLGSQLLLAHELAHSGEAVPLLPIGSPMSEAVIQMSSKGFGVVGVVGGDGELVGVITDGDLRRHMSQSLLLLTVETVMSHMPRVITPGMLASAAMEMMQSQKITVLFLVDDVGRPSGILHVHDLLRAGVA

SEQ ID NO: 13029 - protein, 337 aa, Sinorhizobium meliloti 1021
MNALTHPTADAHAGGTVLESIGRTLTTATNGIKALADHLTSDQAFAGALVDAVELMGDGDGRVVVSGVGKSGHIGRKIAATLASTGTSAYFVHPTEASHGDLGMITAQDALVLLSWSGETAELANMLTYAKRFKVPIISISSNRESTLARNSEIALVLPKVPEACPHGLAPTTSAMLQLAVGDALAIALLERRGFSAEDFKAFHPGGKLGAQLRLVQELAHGTGQMPLLSVGRPMSEAVIEMSAKGFGVVGITDESGKLIGVITDGDLRRHMAGDLLAQPVQEVMSRNPRVVRSEVLASAAMEFLEEHQVTVLFLVDEAGAPVGILHIHDLLRAGVA

SEQ ID NO: 13030 - protein, 280 aa, Sinorhizobium meliloti 1021
MISRFTVAASFVAAVLAAMPAQAQQASSKLDEVLSRGHLILGTGSTNAPWHFKSAEDKLQGFDVDMGRIIAKALFGDPEKIEFVNQSSDARIPNITTGKVDITCQFMTVTGERAQQIAFTIPYYREGVGLMLKADGKYADYEALKAAGSSVTISVLQNVYAEDMVHAALPEATVDQYESVDLIYQALESGRADAAATDQSSLAWYMTQNSGRYKDAGYGWNPQTYACGVRRGDQDWLNFVNTALHEAMTGVEFDFYAKSFKTWFGKDLTPPHIGFPIEYK

SEQ ID NO: 13031 - protein, 392 aa, Sinorhizobium meliloti 1021
MEALLVINAGSSSLKFQIFGIATAGLERQVRAKLDGIATQPRLKATAADGTELINRRLDATAVPDLPEALSVARDWLATLRGFDLRAIGHRVVHGGPDYVRPVLIETTVLDRLASYQDLAPLHQPNNLAPIRLAMDIKPDVPQVACFDTAFHRGRTEHTDCYALPRTFYEQGVRRYGFHGISYEYIAGRLREVAPEVARGRVIVAHLGSGASMCALKDGRSVETTMGFTALDGLPMGTRPGQLDPGVVLHLLTDQGMSAQAVSDLLYHRSGLKGLSGISNDMRELLGSDDPRASFAIDHFVHRCALDAGMLAAALGGLDAFVFTAGIGENSAPIRARVSEGLAWLGAELDPAANDAGASVISKAGSRVALHVMPTDEELMIARHTLAIIRAR

SEQ ID NO: 13032 - protein, 591 aa, Sinorhizobium meliloti 1021
MKMTTEEAFVKVLQMHGIEHAFGIIGSAMMPVSDLFPKAGIRFWDCAHETNAGMMADGFSRATGTMSMAIGQNGPGVTGFITAMKTAYWNHTPLLMVTPQAANKTIGQGGFQEVDQMAMFEEMVCYQEEVRDPSRIPEVLNRVIEKAWRGCAPAQINIPRDFWTQVIDVDLPRIVRFERPAGGPAAIAQAARLLSEAKFPVILNGAGVVIGNAIQESMALAEKLDAPVCCGYQHNDAFPGSHRLSVGPLGYNGSKAAMELISKADVVLALGTRLNPFSTLPGYGIDYWPKDAAIIQVDINADRIGLTKKVTVGICGDAKQVAQQILQQLAPAAGDASREERKALVHQTRSAWLQQLSSMDHEDDDPGTEWNVGARQREPDRMSPRQVWRAIQAVLPKEAIISTDIGNNCAIGNAYPSFEQGRKYLAPGMFGPCGYGFPSIVGAKIGCPDVPVVGFAGDGAFGISMNEMTSIGREGWPAITMVIFRNYQWGAEKRNTTLWYDNNFVGTELNPNLSYAKVADGCGLKGVTVDTPAALTEALAKAIEDQAKGITTFVEVVLNQELGEPFRRDAMKKPVAVAGIDRADMRTQRRM

SEQ ID NO: 13033 - protein, 330 aa, Sinorhizobium meliloti 1021
MKPLDRIIDAARKAPRHVVLPEGEDPRIVAGAVQARREGLAAITLVGNREVITQRLAALDAIPQEFRIEDPACSPLTDDFATAYLERRRSKGVDAAAARAAVLSPLTFAAMMVREGIADGTVGGAVATTADTVRAALQVIGRAPGVGLVSSFFLMMLCEPHHARKGAFVFADCGLVVDPDAAGLADIARMSAKSYEMLAGERAKVAMLSFSTGGSAAHERVSKVVEATGMARRAEPDLIIDGELQFDSAFVEAVCLTKAPHSALRGEANVFVFPNLDAANIGYKIAQRIGGATAIGPILQGLSRPANDLSRGCTAADVFHMIAVTVVQAA

SEQ ID NO: 13034 - protein, 645 aa, Sinorhizobium meliloti 1021
MCGFGGYLGSIRDGKPLLERMTAAIGHRGPDERGIFTAPGAGLGHVRLSIVGLGDGQQPMSNPSGELTIAFNGEIFNYVELRDELRARGRQFRTSSDTEVILHLYEEMGEDCLSLLNGDFAFAIWDARRRRMMLARDRMGVRPLFHTLKGGTLYFASEVKALLEVPGVSAEIDPIALDQIFTLWAPIAPRTPFRDIHELEPGHLMIADQNGTTTRPYWQLDYPDRDERPAYAEESRAAEELRALLTDATRIRMRADVPVGAYLSGGLDSSIISALAAGMTSQGLRTFSVTFDSAEHDESAFQEEMAAALGTEHRAVACRAGDIARDFPDVIRFTEKPIIRTAPAPLYKLSGLVREAGLKVVLTGEGADEVFAGYDIFKEARVRRFCGRQPGSRIRPHLFRKLYPYLPGLQQQSAEYLAAFFGAGDVALDDPLFSHRPRLKGTAATKMFFSSDLRAELTGYDAAEELVSRLPAAFGRWHPLHQAQYLESRFLLPGYILSSQGDRMAMAHGIEGRFPFLDHRLVEFAAKLPPEMKLRGLVEKHILREATKDLLPPAIGRRTKQPYRAPDSHSFSGAGELDYVRSAMSEDAVAAGGLFNAKAVTKLYEKCQSRPASGFRDNAAFVGVLSTQLWLQTFTGTSLRKAEAA

SEQ ID NO: 13035 - protein, 344 aa, Sinorhizobium meliloti 1021
MTKYKLEYIWLDGYTPVPNLRGKTQIKEFDAFPTLEQLPLWGFDGSSTQQAEGRSSDCVLKPVAVYPDPVRTNGALVMCEVMMPDGKTPHPSNTRATVLDDESAWFGFEQEYFFYKNGRPLGFPEQGYPAPQGPYYTGVGYKNVGDIARQIVEEHLDICLAAGINHEGINAEVAKGQWEFQVFGKGSKKAADEVWLARYLLLRLTEKYGIDVEFHCKPLGDTDWNGSGMHANFSTAYLREVGGKDYFEALMAAFEKNLHDHINVYGPDNHLRLTGKHETAPWDKFSYGVADRGASIRVPHSFVNNGYRGYLEDRRPNSQGDPYQIASVILKTISSVPTAVAKVA

SEQ ID NO: 13036 - protein, 400 aa, Sinorhizobium meliloti 1021
MREAYICDYIRTPIGRFGGSLASVRADDLGAIPLKALMDRNRSVDWEAVDDVIFGCANQAGEDNRNIARMSLLLAGLPVAVPGTTINRLCGSGMDAVIAAARAIKCGEAELMIAGGVESMSRAPFVLPKAESAFSRNAEIYDTTIGWRFVNPLMKAQYGVDSMPETGENVAEDYKVSREDQDAFALRSQAKAAAAQANGRLASEIVAVTIPQRKGGPVVIDRDEHPRATTIEALAGLKTPFREGGTVTAGNASGVNDGAAALIIASEEAARKHGLRPMARILGGASAGVPPRIMGMGPVPASQRLMTRLGATQDRFDVIELNEAFASQGLAVLRALGIADDDPRVNRNGGAIALGHPLGMSGARITGTAALELAETGGRTSLSTMCIGVGQGIAVALERV

SEQ ID NO: 13037 - protein, 292 aa, Musa acuminata AAA Group
RHEAVILPVKFPQFFTGKRRPWRAFLLYGPPGTGKSYLAKAVATEADSTFFSISSSDLVSKWMGESEKLVANLFQMARENAPSIIFIDEIDSLCGQRGEGNESEASRRIKTELLVQMQGVGNNDEKVLVLAATNTPYALDQAIRRRFDKRIYIPLPDLKARQHMFKVHLGDTPHNLTEKDFEYLARRTEGFSGSDISVCVKDVLFEPVRKAQDATFFCKTSDGMWVPCGPKQPGAVQTTLQELAAKGLGAKILPPPITRNDFEKVLARQRPTVSKADLEVHERFTKEFGEEG

SEQ ID NO: 13038 - protein, 326 aa, Physcomitrella patens subsp. patens
MSDYLSPSARAIKPSGIRRFFDLANSRKDVITLGVGEPDFVTPWHVRDACVASLEAGKTQYTSNAGTPELRGAIGQYLNDSFSVAYDPAKEILVTVGGSEAIDLALRALISPGDEILVPEPSYISYSPITTLSGGVAVGVETFAEHAFKLQADTLRAAITPRSKILILSYPSNPTGGIMTYEDWLPIAKVVEEHDLVVISDEIYAELTYGSKHVSFASMPGMKDRTILVSGFSKAFAMTGWRIGYACGHPELIGTMLKIHQYTVMCASNMAQVAALEALTNGMEEMYRMMESYNQRRRLVVKGLRDIGLQCHEPQGAFYAFPSIAS

SEQ ID NO: 13039 - protein, 302 aa, Haemophilus influenzae Rd KW20
MTEQFDKTYCGFIAIVGRPNVGKSTLLNKILGQKISITSRKAQTTRHRIVGIKTEGAYQEIYVDTPGLHIEEKRAINRLMNRAASSAIGDVDLIIFVVDGTHWNADDEMVLNKLRNAKAPVVLAINKVDNIKNKDDLLPFITDLSSKFNFAHIVPISAQRGNNVHELEKIVRQSLREGVHHFPEDYVTDRSQRFMASEIIREKLMRFTGEELPYSVTVEIEQFKVNERGTYEINGLILVEREGQKKMVIGAGGQKIKTIGMEARADMERLFDNKVHLELWVKVKSGWADDERALRSLGYMDE

SEQ ID NO: 13040 - protein, 587 aa, Haemophilus influenzae Rd KW20
MQEQKLQENDFSTLQTFKRLWPMIKPFKAGLIVSGVALVFNALADSGLIYLLKPLLDDGFGKANHSFLKMMAFVVVGMIILRGITNFISNYCLAWVSGKVVMTMRRRLFKHLMFMPVSFFDQNSTGRLLSRITYDSQMIASSSSGSLITIVREGAYIISLFAVMFYTSWELTIVLFIIGPIIAVLIRLVSKIFRRLSKNLQDSMGELTSATEQMLKGHKVVLSFGGQHVEEVHFNHVSNDMRRKSMKMVTANSISDPVVQVIASLALATVLYLATTPLIAEDNLSAGSFTVVFSSMLAMMRPLKSLTAVNAQFQSGMAACQTLFAILDLEPEKDDGAYKAEPAKGELEFKNVSFAYQGKDELALNNISFSVPAGKTVALVGRSGSGKSTIANLVTRFYDIEQGEILLDGVNIQDYRLSNLRENCAVVSQQVHLFNDTIANNIAYAAQDKYSREEIIAAAKAAYALEFIEKLPQVFDTVIGENGTSLSGGQRQRLAIARALLRNSPVLILDEATSALDTESERAIQSALEELKKDRTVVVIAHRLSTIENADEILVIDHGEIRERGNHKTLLEQNGAYKQLHSMQFTG

SEQ ID NO: 13041 - protein, 815 aa, Haemophilus influenzae Rd KW20
MRVLKFGGTSLANPERFSQAAKLIEQAHLEEQAAGVLSAPAKITNHLVALSEKAALNQSTDTHFNEAIEIFYNIINGLHTENNQFDLNGTKALIDAEFVQIKGLLEEIRQAGKVEDAVKATIDCRGEKLSIAMMKAWFEARGYSVHIVDPVKQLLAKGGYLESSVEIEESTKRVDAANIAKDKVVLMAGFTAGNEKGELVLLGRNGSDYSAACLAACLGASVCEIWTDVDGVYTCDPRLVPDARLLPTLSYREAMELSYFGAKVIHPRTIGPLLPQNIPCVIKNTGNPSAPGSIIDGNVKSESLQVKGITNLDNLAMFNVSGPGMQGMVGMASRVFSAMSGAGISVILITQSSSEYSISFCVPVKSAEVAKTVLETEFANELNEHQLEPIEVIKDLSIISVVGDGMKQAKGIAARFFSALAQANISIVAIAQGSSERSISAVVPQNKAIEAVKATHQALFNNKKVVDMFLVGVGGVGGELIEQVKRQKEYLAKKNVEIRVCAIANSNRMLLDENGLNLEDWKNDLENATQPSDFDVLLSFIKLHHVVNPVFVDCTSAESVAGLYARALKEGFHVVTPNKKANTRELVYYNELRQNAQASQHKFLYETNVGAGLPVIENLQNLLAAGDELEYFEGILSGSLSFIFGKLEEGLSLSEVTALAREKGFTEPDPRDDLSGQDVARKLLILAREAGIELELSDVEVEGVLPKGFSDGKSADEFMAMLPQLDEEFKTRVATAKAEGKVLRYVGKISEGKCKVSIVAVDLNNPLYKVKDGENALAFYTRYYQPIPLLLRGYGAGNAVTAAGIFADILRTLQH

SEQ ID NO: 13042 - protein, 411 aa, Haemophilus influenzae Rd KW20
MSDSVILALGIAAFTVIVLVLVAIILFAKSKLVDSGDITIDINDDPEKAITLPAGGKLLGALASKGIFVSSACGGGGSCGQCIVKVKNGGGEILPTELSHINKREAKEGYRLACQVNVKGNMEVELPEEIFGVKKWECTVISNDNKATFIKELKLAIPEGEEVPFRAGGYIQIEAEPHVVNYKDFDIPEEYHEDWDKYDLWRYVSKVDEHIIRAYSMASYPEEKGIIMLNVRIATPPPRQPDAPPGQMSSYIWSLKAGDKVTISGPFGEFFAKETDAEMVFIGGGAGMAPMRSHIFDQLKRLHSKRKMSFWYGARSKREIFYQEDFDQLQAENPNFVWHVALSDALPEDNWTGYTGFIHNVLYENYLKNHEAPEDCEYYMCGPPVMNAAVIKMLKDLGVEDENILLDDFGG

SEQ ID NO: 13043 - protein, 284 aa, Haemophilus influenzae Rd KW20
MASENQKLSSVALTPVEATDYAENTATYKANKRPFLSFMSGISAGACIALAFVFYTTTQTASAGAPWGLTKLVGGLVFSLGVIMVVILGSELFTSSTLTLVARVGGRITTTQMIRNWIVVYLGNFVGGLFIAAVIWFSGQTMAANGQWGLTILATAQHKIHHTWFEAFNLGILCNIMVCVAVWMSYSGKTVTDKAFIMIMPIGLFVASGFEHCVANMFMIPMGIITAHFSTPEFWQQIGVDPMKYADLDLYHFIVKNLIPVTLGNIVGGAICIGVFQRYLTKTH

SEQ ID NO: 13044 - protein, 286 aa, Haemophilus influenzae Rd KW20
  misc_feature (80)..(80): Xaa can be any naturally occurring amino acid
  unsure (1)..(286): unsure at all Xaa locations
MLRPKKQSLKPKLKHRPFLKWAGGKFRLTDEINKAFPNKKNCLIEPFVGAGAVFLNSNFERYILADINPDLINLFNIVKXNVDGYIEDCKPIFFADDANTPDYYYAKRRQFNASTEPFERSIIFLYLNRFGFNGLCRYNSKNEFNVPFGAYKTHYFPEDELRYFAHKAQSAVFLCCDFQKTFEFADKDSVIYCDPPYAPLQQETNFTGYAGNEFGLAQQRALADLAKSIQKEKQISILISNHDTKFTREIYNGAKFKRVKVQRSISQNPEKRVKVKELIAIFGARK

SEQ ID NO: 13045 - protein, 613 aa, Haemophilus influenzae Rd KW20
MTDKITFNDLGLPEFILKAVSDLGFETPSPIQQSCIPHLLNGNDVLGMAQTGSGKTAAFALPLLAQIDPSEKHPQMLVMAPTRELAIQVADACELFVKYAQGTRIVTLYGGQRYDIQLRALKQGAQVVVGTPGRILDHIRRGTLNLSELRFIVLDEADEMLRMGFIDDVETVMAELPENHQTALFSATMPEPIRRITKRFMNDPQEVKIKVNNENAPDIDQSCWYVHGVRKNEALLRFLEVEDFDAAIIFARTKTGTLDITELLEKNGFRSAALNGDMTQQLREQTLDRLRNGSLDIVVATDVAARGIDIERISLVVNYDIPLDAESYVHRIGRTGRAGRSGRALLFVEPRERRLLRNIEHLMKKGINEVELPNHLVLQECRRKKFVAKITKQLEHHDLEQYRSLLEDLFTADQDQENIAAAMLMLLQGKQKLILPPDPPMEKRRRERNDRGDRRENPRSAERRGERKGYGNPQPMDLYRIEVGRADGVEVRHIVGAIANEGDINSRYIGHIKLYDDYTTVELPQGMPKELLQQFAKTRVLNKQMQMSFLGAVKSDNSRGSDDFNGKRKGRGGDFRGERGRERGNDNRGNRKFNEKSNRTFSDKPRRDRRSSF

SEQ ID NO: 13046 - protein, 410 aa, Haemophilus influenzae Rd KW20
MTNKVSLDKSKIKFVLFEGVHQSALDTLHAAGYTNIDYYKKALDGDELKEAIKDVHFIGLRSRTHLTAEMIEAAPKLIAVGCFCIGTNQVDLNAAKARGIPVFNAPFSNTRSVAELVLGEILLLMRNVPQANAEVHRGVWNKSATGSHEVRGKKLGIIGYGHIGSQLSIIAESLGMDVYFYDIENKLPLGNAKQVRSLEELLSSCDVVSLHVPELPSTKNLMNVARIAQLKQGAILINAARGTVVDIDALAQALKDGKLQGAAIDVFPVEPASINEEFISPLREFDNVILTPHIGGSTAEAQENIGFEVAGKFVKYSDNGSTLSSVNFPEVSLPEHEGTKRLLHIHENRPGILNKLNQIFVEANLNIAAQYLQTDPKIGYVVVDVETNDASPLLTKLKEIDGTIRARVLY

SEQ ID NO: 13047 - protein, 362 aa, Haemophilus influenzae Rd KW20
MQPTLFIDRDGTLIDEPKTDFQIDSLEKLKLEPKVIPALLRLKAKYRFVIVSNQDGLGTDAFPQTDFDKPHNVMMALFESQGITFDEVLICPHKPEENCLCRKPKIKLLDHYIRKNLFDIDRSFVIGDRETDVQLAENLGIRAIQYDPQKMNWDLIAEKLLGETVTNCGKRPPRFAEVIRQTKETDIKVQVWLDEAGVNEIKTGVGFFDHMLDQIATHGGFRMNVQCKGDLWIDEHHTVEDTALALGQALKQAVGDKRGIARFGFVLPMDECKAECALDLSGRPWIKFNACFKRDKVGDFSTELTEHFFQSLAFSMLATLHLNVTGNNDHHKIESLFKAFGRTLRQAIRIEGNEMPSSKGVL

SEQ ID NO: 13048 - protein, 328 aa, Haemophilus influenzae Rd KW20
MLHFAHIFQNKVHTMNITKPFPLPTGYFGIPLGLAALSLAWFHLENLFPAARMVSDVLGIVASAVWILFILMYAYKLRYYFEEVRAEYHSPVRFSFIALIPITTMLVGDILYRWNPLIAEVLIWIGTIGQLLFSTLRVSELWQGGVFEQKSTHPSFYLPAVAANFTSASSLALLGYHDLGYLFFGAGMIAWIIFEPVLLQHLRISSLEPQFRATMGIVLAPAFVCVSAYLSINHGEVDTLAKILWGYGFLQLFFLLRLFPWIVEKGLNIGLWAFSFGLASMANSATAFYHGNVLQGVSIFAFVFSNVMIGLLVLMTIYKLTKGQFFLK

SEQ ID NO: 13049 - protein, 330 aa, Haemophilus influenzae Rd KW20
MKKTFILQQQEISFVKNTFTQNLIEQLGIIEVQGPILSQVGNGMQDNLSGIEKAVQVNVKCIPNAVFEVVHSLAKWKRHTLARFNFKEDEGLFVHMKALRPDEDSLDPTHSVYVDQWDWEKVIPEGRRNFAYLKETVNSIYRAIRLTELAVEARFDIPSILPKQITFVHSEDLVKRYPDLSSKERENAICKEYGAVFLIGIGGKLSDGKPHDGRAPDYDDWTTESENGYKGLNGDILVWNDQLGKAFELSSMGIRVDESALRLQVGLTGDEDHLKMDWHQDLLNGKLPLTIGGGIGQSRLAMLLLRKKHIGEVQSSVWPKEMLEEFSNIL

SEQ ID NO: 13050 - protein, 184 aa, Haemophilus influenzae Rd KW20
MNKAIFLDRDGTLNIDYGYVHEIDNFKFIDGVIDALRELKKMGYMLVLVTNQSGIARGYFSEDQFLQLTEWMDWSLAEQDVDLDGIYYCPHHSEGKGEYKEDCDCRKPKSGMLLQAIKELKIDPTQSIMVGDKVEDLKAGIGAKVKMNVLVRTGKPVTGEGEGIADYVLDSIVDLPRILKRLKK

SEQ ID NO: 13051 - protein, 393 aa, Haemophilus influenzae Rd KW20
MENVVIVSAVRTPIGSFNGALSSVSAVDLGAIVIQEAIKRANIESALVNEVIMGNVLQAGLGQNPARQAALKAGIEKEIPSLTINKVCGSGLKSVALGAQSIISGDADIVVVGGMENMSQAPYLLDSKVRQGVKMGNLTLRDTMIEDGLTCASNHYHMGITAENIAEQYGISRQAQDELALRSQTLASQAVQLGVFDKEIVPVMVKTRKGDIIVSRDEYPKADTTAEGLAKLKPAFKKEGTVTAGNASGINDGAAALILVSESKAHALGLKAIAKIRSYASGGVDPSVMGLGPVPATQKALKKAGINLDDIDLIEANEAFASQFLGVGKDLNLDMNKTNIHGGAIALGHPIGASGARILVTLLHNLIEKDKKLGLATLCIGGGQGISMIVERL

SEQ ID NO: 13052 - protein, 390 aa, Haemophilus influenzae Rd KW20
MKFIDESLIRIEAGDGGNGCVSFRREKFIPKGGPDGGDGGDGGDVYLQADENLNTLIDYRFNKRFAAERGENGRSSDCTGRRGKDIILPVPVGTRAIDNDTKETLGDLTQHGQKMLVAKGGYHGLGNTRFKSSVNRAPRQKTMGTPGEKRDLLLELMLLADVGMLGLPNAGKSTFIRAVSAAKPKVADYPFTTLVPSLGVVKVDDSHSFVVADIPGLIEGAADGAGLGIRFLKHLERCRVLIHLVDIAPIDGSNPADNMAIIESELFQYSEKLSEKPRWLVFNKIDTMSDEEAEERAREIAEQLGWEEDYYFISAATGKNVSPLCRDIMDFIIANPREAETQQVAPEEVKFKWEDYHQERLAEHQFDDDEDWDDDWSEEDDEGIEFIYKP

SEQ ID NO: 13053 - protein, 484 aa, Haemophilus influenzae Rd KW20
MNLGIILPLIIYLTFVFGAAIFAYVKRTKGDFLTEYYVGNRSMTGFVLAMTTASTYASASSFVGGPGAAYKYGLGWVLLAMIQVPVVWLALGALGKKFALLSRETNALTINDLFFYRYKNKYLVWLSSLALLLAFFAAMTVQFIGGARLLETTIGISYTQALLLFALTVGIYTFIGGFRAVVLTDTIQGTVMIFGTIILLIGTIYALGGVESAVNKLTEIDPDLVTPYGPNGMLDFQFMASFWILVCFGVVGLPHTAVRCMAFKDSKALHRGMLIGTIVLSIIMLGMHLAGALGRAVIPNLTVSDQVIPTLMIKVLPPIVAGIFLAAPMSAIMSTIDAQLIQSSSIFVKDLYLSAKPEAAKNEKKVSYFSSIITLILTALLIFAALNPPDMIIWLNLFAFGGLEAAFLWVIVLGIYWDKANAYGALSSMIIGLGSYILLTQLGIKLFNFHQIVPSLVFGLIAFLVGNKLGERRIEKTQLKVTAL

SEQ ID NO: 13054 - protein, 541 aa, Haemophilus influenzae Rd KW20
MDSRRSLLVLALIFISFLVYQQWQLDKNPPVQTEQTTSITATSDVPASSPSNSQAIADSQTRGRIITLENDVFRLKIDTLGGDVISSELLKYDAELDSKTPFELLKDTKEHIYIAQSGLIGKNGIDTRSGRAQYQIEGDNFKLAEGQESLSVPLLFEKDGVTYQKIFVLKRGSYDLGVDYKIDNQSGQAIEVEPYGQLKHSIVESSGNVAMPTYTGGAYSSSETNYKKYSFSDMQDNNLSIDTKAGWVAVLQHYFVSAWIPNQDVNNQLYTITDSKNNVASIGYRGSVVTIPAGSQETITSSLWTGPKLQNQMATVANNLDLTVDYGWAWFIAKPLFWLLTFIQGIVSNWGLAIICVTIVVKAILYPLTKAQYTSMAKMRILQPKMQEMRERFGDDRQRMSQEMMKLYKEEKVNPLGGCLPILLQMPIFIALYWTFLEAVELRHAPFFGWIQDLSAQDPYYILPILMGISMFLLQKMSPTPVTDPTQQKVMNFMPLVFMFFFLWFPSGLVLYWLVSNLITIAQQQLIYRGLEKKGLHSRKK

SEQ ID NO: 13055 - protein, 301 aa, Haemophilus influenzae Rd KW20
MENQNYSVAVIGLGSMGMGAAVSCINAGLTTYGIDLNPVALEKLKAAGAKAVAANGYDFAHELDAVVILVVNAAQANAVLFGENGIAKKLKAGTAVMVSSTMAAQDAQIISQKLTELGLIMLDAPVSGGAAKALKGEMTVMASGSKQAFELLQPVLDATAAKVYNIGEEIGLGATVKIVHQLLAGVHIAAGAEAMALASKAGIPLDVMYDVVTNAAGNSWMFENRMKHVVEGDYTPLSMVDIFVKDLGLVNDTAKSLHFPLHLASTAYSMFTEASNAGYGKEDDSAVIKIFSGVSLPKKGA

SEQ ID NO: 13056 - protein, 711 aa, Haemophilus influenzae Rd KW20
MSRTIILIPVSTGVGLTSISLGLIHSLEQKGTKVAFMKPVSQPSTGEDKLDRTTSIIRTSTSLETAEPFMLSVAESLIGQNQSDVLLEKIVANHQQLTKNNDIVVVEGLIPTRKHGYANSINYEIAQALDAEIVLVAAPATETPTELKDRVEAAASLFGGKNNPNLLGVVVNKFNAPVDESGRTRPDLAEIFDSFQHNHISETEVNKLFAGSAIKLLACVPWNANLIATRAIDLVKHLGASIINEGEINRRIRGITFCARSLPNMVEHFRAGSLLVASADRPDVLVAAALAASNGIEIGGILLTGGYKIDAQINKLCRPTFEKAKLPIFRIEGNTWQTALSLQSFNLEVPVDDKERIENIKQYISQHFNADFINNLVADSSRLPRLSPPAFRFQLTELARAAKKRIVLPEGDEPRTIKAAVLCAERGIAECVLLADPASVQRVAEAQGVKLGKGITIINPADVRENYVDRLVELRKAKGMTETAAREQLEDTVVLGTMMLEANEVDGLVSGAVHTTANTIRPPMQIIKTAPGSSIVSSIFFMLLPDQVLVYGDCAVNPDPTAEQLAEIAIQSADSAKAFGIDPKVAMISYSTGTSGSGADVEKVKEATRIAKEKRPDLLIDGPLQYDAAVMEDVARSKAPNSPVAGKATVFVFPDLNTGNTTYKAVQRSADLVSIGPMLQGMRKPVNDLSRGALVDDIVYTIALTAIQATQ

SEQ ID NO: 13057 - protein, 401 aa, Haemophilus influenzae Rd KW20
MSKLVLILNCGSSSLKFAILDPATGEEKLSGLAEAFFLPEARIKWKLNGEKGNADLGAGAAHTEALNFIASNILNDELKNSIAAIGHRIVHGGEKYTQSVIVTDEVVKGIEDAAQFAPLHNPAHLIGIREAFKAFPHLKDKNVVVFDTAFHQTMPEEAFLYALPYSLYKEHGVRRYGAHGTSHYFVSREVAKYVGKPADQVNAIICHLGNGGSVSVVRNGQCIDTSMGLTPLEGLVMGTRCGDIDPAIVFYLYKTLGMSMDQIEETLVKKSGLLGLTEVTSDCRYAEDNYDDESKPETRRALNVYSYRLAKYIGAYMAVLGDDHLDAIAFTGGIGENSAHVRELALNHLKLFGIKIDNERNLATRFGKDGVITTDDSAFKAIVLPTNEELVIAQDTAKLCF

SEQ ID NO: 13058 - protein, 635 aa, Haemophilus influenzae Rd KW20
MGKIIGIDLGTTNSCVAVMDGDKARVIENAEGARTTPSIIAYTDNETLVGQPAKRQAITNPKNTLFAIKRLIGRRFESEEVQRDIKIMPFEITRADNGDAWVNVKGDKLAPPQISAEVLKKMKKTAEDFLGESVTEAVITVPAYFNDAQRQATIDAGKIAGLDVKRIINEPTAAALAFGLGSSKENQVIAVYDLGGGTFDISIIEIDNFDGEQTFEVLATGGNTHLGGEDFDNRVIDYIIDEFKKEQNIDLRNDAMALQRVKEAAEKAKIELSSAQSTEVNLPYITADATGPKHLALNITRAKLEALVEDLVASSIESLKAVLKDADKGVSEIHDIILVGGQTRMPLVQQKVAEFFGKEARKDVNPDEAVAIGAAVQGGVLKGDVKDVLLLDVTPLSLGIETMGGVMTTLIEKNTTIPTKKSQVFSTAEDNQSAVTIHVLQGERKRAADNKSLGQFNLEGINPAPRGMPQIEVTFDIDANGVINVSAKDKNTGKEQQIRIQASSGLSDEEIQQMVRDAEANADADRKFEEVVQARNQADGIAHATRKQIAEAGDALSVADKEKIEAAVAELETAAKGEDKAEIEAKIEAVIKASEPLMQAVQAKAQQAGGEQPQQSSAKDDGVVDAEFEEVKDNK

SEQ ID NO: 13059 - protein, 756 aa, Haemophilus influenzae Rd KW20
MTEQLRQAALDFHEFPIPGKIEVTPTKSLATQRDLALAYSPGVAEPCLEIEKDPAASYKYTARGNLVAVISNGTAVLGLGNIGALAGKPVMEGKGVLFKKFAGINVFDIEVNEHDPDKLVDIIASLEPTFGGVNLEDIKAPECFYIEQKLRERMNIPVFHDDQHGTAIISAAAIINSLRIVGKKIEDVRLVASGAGAASIACLNLLLSLGMKRENITVCDSKGVVYKGRDDKMDQTKKEYAIEDNGWRKLADAIPNADIFLGCSAAGALTQDMVKSMAAHPIILALANPNPEITPPEAKAVRPDAIVCTGRSDYPNQVNNVLCFPFIFRGALDVGATTINEEMKRAAVYAIADLALEEQNEVVTSAYGGEGATFGADYVIPRPFDPRLIVRIAPAVAKAAMESGVATRPIQNWDAYVEKLTQFVYKTSLFMRPIFSQAKSAKQRIILAEGEENKALHATQEVISMGLANPILIGRRSVIEEKIKKLGLRLTAGVDFEIVDNEDNPRYEECWKHYYELTKRKGITPAIAKRVVRSNTTVLASTLLSLGYADALVCGLFGSYGKHLASIRDIIGLKDGVKTAAALNSLVLPTGNVFLTDTHVNSNPTAEELAEITLMAAEEIHRFGIEPAVALLSHSNFGSSDSLGAPKMREVLQIVKERNPHLMIDGEMRGDLAMNEAHRKELMPDSPLKGSANLLVFPDLSASRISYSLLRGTTTAITVGPILMGMNKSAHILNPGASVRRIINMIAYAAVKAQQE

SEQ ID NO: 13060 - protein, 557 aa, Haemophilus influenzae Rd KW20
MMSHTETSLGAENTRTHNFITQIIDEDLASGKHKSVHTRFPPEPNGYLHIGHAKSICLNFGLAKEYQGLCNLRFDDTNPVKEDVEYVDSIKADVEWLGFKWEGEPRYASDYFDALYGYAVELIKKGLAYVDELSPDEMREYRGTLTEPGKNSPYRDRTIEENLALFEKMKNGEFAEGKASLRAKIDMASPFMVMREPVIYRIKFSSHHQTGDKWCIYPMYDFTHCISDAIERITHSICTLEFQDNRRLYDWVLENISIERPLPHQYEFSRLNLEGTLTSKRKLLKLVNDEIVDGWNDPRMPTISGLRRRGYTPASLREFCRRIGVTKQDNVVEYSALEACIREDLNENAPRAMAVIDPVRVVIENFESEAVLTAPNHPNRPELGERQLPFTKELYIDRADFREEANKQYKRLVLGKEVRLRNAYVIKAERVEKDANGEITTIFCTYDPETLGKNPADGRKVKGVIHWVSAVNNHPAEFRLYDRLFTVPNPGAEDDIESVLNPNSLVIKQGFVEQSLANAEAEKGYQFEREGYFCADSKDSRPEHLVFNLTVSLKEGF

SEQ ID NO: 13061 - protein, 512 aa, Haemophilus influenzae Rd KW20
MLIGVPRELLENESRVAATPKTVQQILKLGFDVIVEHDAGFKASFEDQAFLEAGAKIGTSAEIWQSDIIFKVNAPTDEEIAQMKEGAALVSFIWRMQNPELMKKLTAKKINVLAMDAVPRISRAQALDALSSMANISGYRAVIEAAHEFGSFFTGQITAAGKVPPAKVLVIGAGVAGLAAIGAANSLGAIVRAFDSRPEVKEQVQSMGASFLEIDFKEEGGSGDGYAKVMSEEFNRRAMELYAEQAKEVDIIITTAAIPGKPAPRLITKEMVDSMKPGSVIVDLAAATGGNCEYTQAGKVVTTENQVKVIGYTDFPSRLPTQSSQLYGTNLVNLLKLLCKEKDGNINIDFEDVVLRGVTVVRDGEEIPPAQIQVSAQPKQETKAAPVAEKKESKPTDPRVKYGVMAGVGVLFLWLASVAPAAFLSHFTVFVLACVVGYYVVWNVSHALHTPLMAVTNAISGIIIVGALLQIRQPTGNLFIDALAFVAILVASINIFGGFRVTQRMLAMFRKG

SEQ ID NO: 13062 - protein, 72 aa, Haemophilus influenzae Rd KW20
MEIGIVKWFNNAKGFGFISAEGVDADIFAHYSVIEMDGYRSLKAGQKVQFEVLHSDKGSHATKIIPIADTQE

SEQ ID NO: 13063 - protein, 404 aa, Haemophilus influenzae Rd KW20
MSYTFSTYETLALASLVLLLGYFLVKRINVLKTFNIPEPVVGGFIVAIGLLIWHKIDGTSFNFDKNLQTTMMLVFFTSIGLSANFSRLIKGGKPLVVFLFIAALLIFGQNVIGIASSMALGIHPAYGLLAGSVTLTGGHGTGAAWADTFAHQFNLQGATEIAIACATFGLVFGGIIGGPVARFLLNRQKQGENPENDEVDDIQEAFEHPTYKRKITARSLIETIAMISVCLLIGQYLDVQTKGTALQLPTFVWCLFTGVIVRNILTNIFRFQVAESAIDVLGSVGLSIFLAIALMSLRLWELAGLAIDVLIVLAIQVAFMAAFAIFITYRAMGKDYDAVVLSAGHCGFGLGATPTAIANMQAVTSRFGPSHKAFLIVPMVGAFFIDLINAALLKVSFAVVNILA

SEQ ID NO: 13064 - protein, 573 aa, Haemophilus influenzae Rd KW20
MKKLSGAEMVVQSLRDEGVEYVFGYPGGAVLDIYDAIHTLGGIEHILVRHEQAAVHMADGYARSTGKVGCVLVTSGPGATNAITGILTAYTDSVPMVIISGQVMSNLIGSDAFQECDMLGISRPVVKHSFIVKKAEDIPSTLKKAFYIASTGRPGPVVVDIPKDTVNPNFKYPYEYPEYVELRSYNPTVNGHKGQIKKALKALLVAKKPILFVGGGAITAECSEQLIQFAQRLNLPVTSSLMGLGAYPSTDKQFLGMLGMHGTLEANTAMHESDLILGIGVRFDDRTTNNLEKYCPNAKVIHIDIDPTSISKNVPVAIPIVGNAKNVLEEFLGLLNEEGLKSQTDLESWWQEINQWKAKKCLEFDRTSGVIKPQQVVEAVYRLTKGQAYVASDVGQHQMFAALHYPFDEPRHWINSGGAGTMGFGFPAALGVKLAHPEGTVVCVTGDGSIQMNIQELSTATQYGIPVVIICLNNHFLGMVKQWQDLIYSGRHSQTYMNSLPDFAKLAESYGHVGIKIATPDELESKLQEAFSIKNKLVFVDINVDESEHVYPMQIRGGAMNEMILSKPQEETN

SEQ ID NO: 13065 - protein, 315 aa, Haemophilus influenzae Rd KW20
MPDIKLFAGNATPELAKRISERLYISLGDATVARFSDGEIQVQINENVRGADVFIIQSTCAPTNDNLMELVVMVDALRRASAGRITAVIPYFGYARQDRRVRSARVPITAKVVADLLSIVGIDRVLTCDLHAEQIQGFFDVPVDNVFGSPVLIHDILKKSDLKNPIVVSPDIGGVVRARAVAKLLNDTDMAIIDKRRPRANVAQVMHIIGDVADRDCILVDDMIDTGGTLCKAAEALKERGAKRVFAYATHAVFSGAAAKNLASDAIDEVVVTDTIPLSEEMKAIGKVRVLTLSSMLAEAIRRISNEESISAMFN

SEQ ID NO: 13066 - protein, 564 aa, Haemophilus influenzae Rd KW20
MSVQQLISRLTDIVGSRYIITDPTKTEAYRSGYRFGTGNALAVVRPATLLEFWNIVKVCVEHDVIVINQAANTGLTGGSTPDGNDYDRDIVVINTMRIDGIQLINNASQVICLPGSTLNELENQLKPFGREPHSVIGSSCIGASVIGGICNNSGGALVQRGPAYTEMALYAQLNEKGELELKNHLGIDLGETPEEILTNLQEKRYQVKDIRQDCGHGHDHYYCNYVRQVDEGSPARFNADPARHYEASGCAGKLAVFAVRLDTFPLEKETAVFYIGTNQTSVLSDIRRHMLVNFEVLPISGEYIHRDAFDIAAKYGKDTFWVIKKFGTHWLPKLFSLKSNVDRIGKKFFFLPQHLSDKFMQTVSKFIPEHLPQSLWDYRNKYEHHLIIKMGGKGIQEAREYLESYIADGSKGGYFECNAIETQAAMLHRFAVASAAIRYRAIHEKEVEEIVALDVALRRNDQDWFEVLPPEIDNRIISKLYYGHFMCHVFHQDYIVKKGYDYEELEYEMLKLLDKRGAQYPAEHNVGHLYEAKPTLRKFYKELDPTNSFNPGIGKTTRKKYWAE

SEQ ID NO: 13067 - protein, 337 aa, Haemophilus influenzae Rd KW20
MPNFSFVFFYDSAKITPISTALLGRRMNYLKIAQDSLSVESNALLQLSQRLGDDFNQVIDLILACEGRLVIGGIGKSGLIGKKMVATFASTGTPSFFLHPTEAFHGDLGMLKPIDIVMLISYSGETDDVNKLIPSLKNFGNKIIAVTSNKNSTLARHADYVLDITVEREVCPNNLAPTTSALVTLALGDALAVSLITARNFQPADFAKFHPGGSLGRRLLCKVKDQMQTRLPTILPTTNFTDCLTVMNEGRMGVALVMENEQLKGIITDGDIRRALTANGAGTLNKTAKDFMTSSPKTIHQDEFLSKAEDFMKAKKIHSLVVVNDENHVVGLVEFSS

SEQ ID NO: 13068 - protein, 444 aa, Haemophilus influenzae Rd KW20
MSNTILQNLPKGQKVGIAFSGGLDTSAALLWMRQKGAVPYAYTANLGQPDEDDYNAIPKKAMAYGAENARLIDCRAQLAHEGIAAIQCGAFHISTGGIPYFNTTPLGRAVTGTMLVAAMKEDDVNIWGDGSTFKGNDIERFYRYGLLTNPNLKIYKPWLDVQFIEELGGRLEMSQFLIENGFDYKMSVEKAYSTDSNMLGATHEAKDLEQLSTGMKIVKPIMGVAFWDEKVEIKPETVTVTFEDGVPVALNGKHFDNAVDLILEANRIGGRHGLGMSDQIENRIIEAKSRGIYEAPGMALLHIAYERLVTGIHNEDTIEQYRINGIRLGRLLYQGRWFDPQALMLRETAQRWVAKAITGTVTLELRRGNDFTILNTESPNLTYEAERLSMEKVEDAPFDPIDRIGQLTMRNLDVSDTRGKLGIYAQTGLLSAIKDSVLPQLGKK

SEQ ID NO: 13069 - protein, 181 aa, Lilium longiflorum
MAFQGTTQKCMACTKTVYLVDKLTADNRIYHKACFRCHHCKGTLKLGNYNSFEGVLYCRPHYDQLFKRTGSLEKSFEGTPKIVKPEKPIGTENANKVSGAFAGTKEKCVGCQKTVYPIERVTVNGTCYHKSCFKCAHGGCTISPSNYIAHEGTLYCKHHHIQLIKEKGNLSQLEGTVAETA

SEQ ID NO: 13070 - protein, 87 aa, Streptogyna americana
KPSMVVNQPRVEVGGNDMRTFYTLVMVDPDAPSPSDPNLREYLHWLVTDIPGTTGAAFGQEVMCYESPRPTMGIHRFVFVLFQQLGR

SEQ ID NO: 13071 - protein, 391 aa, Synechocystis sp. PCC 6803
MKIYLDYSATTPPRQEVKAAVQSFLDQSWGNPASLHHWGNRAALALETARLQVAQLLNASHPDSIVFTSGGTEANHLAIFGVTRNYPSPQHLIISTVEHSAIAEPVRWLENQGWQVTRLGVNAQGRVNPLELEQAIQSNTVLISVIYGQSEVGTLQPIEELGRIARQRHIPFHTDAVQVAGRCPVDVKRLPVDLLSLSSHKLYGIQGAGALYIHPDLAIGPLLMGGGQEQGLRSGTPPLPAIVGLGIAAKLAHHELAEEMTRLQTLRDRCFDLLADCEFLTPTGDRLYRLPHHVSFVVQSRRHCTAGLTGKQLVRALNREGIAISAGAACNSGKLNPSPVLLAMGYQEQQALAGIRLTFGRETTMADIETTARTIKQVFAQLCPQLTSIQG

SEQ ID NO: 13072 - protein, 306 aa, Synechocystis sp. PCC 6803
MHSPNKFTSGPKQFLESEAITSYADAAVVVVPIPYEATTSYRKGCEHGPEAVLEASDQLEAYDEELGTSPCHDLGIYTCAPLADSNKHPALAGDAMVTEVCDGIAPFVEDGKFVVAIGGEHAITTGVVRAMQRGTSEPFTVVQIDAHGDMRDKFEGSCHNHACVMRRVLELGLPTLPIAIRAICQEEADLIREKNIPVFWAREMADNPNWINEAIASITTQKVFLTIDMDGFDPGFMPGVGTPEPGGLGWYEGLNFFRRLFQTKQVIGCDLMELAPVRGSVVSEFSTAKLAYKLMGYWGESQRKKL

SEQ ID NO: 13073 - protein, 298 aa, Synechocystis sp. PCC 6803
MKKFACLALSVLLSGAASLPSWAGEVLDRIEQTGVINAGTRKDAVPFAYVDDQGEWVGFSIDLLELIRQEAEARLGKPIKLNMVEATADNRFDLITNQTIDLECASSTFTWNRTAVVDFSVSYFADGTKIITGVDSDLESADSLAGRAIGVIPDTTNAKAILDFQPGATIVEVKDQADGMAKLEAGEIEAFAGDGIVLAGLKKTSDNPQQWKVVPNFPYQYEAYACLLPKDDSDWRNLVNYSLVKYMEGVISDQTAAVEIYERWFDEETGVAPYPRETINDYYQGIVDSFEWIPIVSY

SEQ ID NO: 13074 - protein, 566 aa, Synechocystis sp. PCC 6803
MIKQIFPIFQWLPNYHPSWLKADVVAGLTLAAYAIPVALAYGSLAGLPSEVGLYCYMLGAVGYAFFGTSRQLALGPTSAISILVGVSLAPLANDDAGRYLILASSTAILVAIICLLAWLLKLSQIVNFISEPILTGFKAGAALQIASTQLPKLFGVPSGGSNFFSRIWDLFHHWQEIQPATLLVGGLALVLLVMGDRLWPSKPISLMVVILAIVVMGITNLLEQGVKVVGEIPQGLPSFGMPHWSFSDLDSLLPLALACFLLSYIEGISTARSFAIKHHYRINPEQELLAIGAANLAAGLGQGYPIAGGLSQSAVNEKAGAKTPLAIIITACIIAIVLLFFTGLFSNLPEAILGSVVLVAVKGLINIPELQHLKKIAPLEFKVSLIALFGVLCFGVLQGVLLAAIASILFLIHIISYPSSAVLGRIPGSDQFSDLERHPENLVISGVLIYRINGPILYFNINNIESDLFNHLAQQQEPVELVIFEMGTSPGIDTPAARWFKTLSQSLNQQGITLKLVNASGFVRDRLRAEGLEGEVGTFRRLDTVDSLISEFNCQRYSDLPHTEND

SEQ ID NO: 13075 - protein, 483 aa, Synechocystis sp. PCC 6803
MVNLNQQDLPLVNALKALAQQPDTPFYAPGHKRGQGISPSFKQWLGPNLFQADLPELPELDNLFAPTGAIAKAQELAADLWGAEHTWFSVNGSTAGIVAAILATCGDGDKILLPRNVHQAAIAGIIHAGAVPIFLEPEVNPDWDLALGVTEETLSKALQEHDDAKAVFLLNPTYHGVVGDLQKLIKLSHRVNLPVIVDEAHGAHFAFHPSLPRPALELGADIVIQSTHKMLGALSQCAMIHGQGNLINPPRISQCLQLIQSTSPNYVLLASLDDARHQMANGGREKMAELLNFTLHYRQQLSQIPGLTLLEITKPLPGALILDPTRITVDVTAWGMSGFEVDDLLREKFQITAELPTLRQLSFIVSIGNQAQDLGHLLEALTQLAPTNPQQPFHLTLPVLPGTILAMTPRRAAHAAQKSVTVNEAIGKISAGLLCPYPPGIPVLVPGEIITPEAIAFLTEVLNLGGTISGLASEELTHLAVVN

SEQ ID NO: 13076 - protein, 360 aa, Synechocystis sp. PCC 6803; identical to SEQ ID NO: 467

SEQ ID NO: 13077 - protein, 368 aa, Synechocystis sp. PCC 6803
MQFIDQAEIEVQGGKGGDGMVSFRREKYVPAGGPSGGNGGRGGSVIFEADANLQTLLDFRYARIFKAEDGKKGGSSNCTGANGKDVVVQVPCGTMVYDLDGECLLGDLVSPGQRLCVAAGGKGGLGNQHFLSNRNRAPEYALPGLEGEQRQLRLELKLLAEVGIIGLPNAGKSTLIAALSAARPKIADYPFTTLVPNLGVVRKPTGDGTVFADIPGLIEGAAAGIGLGHEFLRHIERTRLLLHVLDVTAGDPIANFRVIQQELDAYGRGITEKPQIIALNKIDALDGEMIGEIETELKRFSTAPCLHISAATRRGLDDLMQLVWQWLDEMAAADAEAQRLLELELQAQAAMNNPFNSDVPIDGVTYSS

SEQ ID NO: 13078 - protein, 442 aa, Synechocystis sp. PCC 6803
MKPKNFPLARYVLGAMLAFLFVGVAQAQTETTSIAEVTYAINNLFLLAAAVLVLFMQAGFAMLEAGLSSHKNTVNVLFKNTFDVCVGVLLYFLFGYSLMYGENPVLGGFFGWGGFGITNNLDNVEGLSPQVDWLFQAAFAATAATIVSGAVMGRMYFKAYLIYSAVITGLVYPISGHWKWGGGWLDKLGFHDFAGSLLVHSVGGFAALAAVVVMGPRIGRFEGNKINSLGYQGITSSSLGVFILWVGWYGFNPGSQLAFVGALNTNTTMLIAVNTTLSAAAGGLAALAFDWITENKRKPNLLVTLNGILGGLVGITAGCDTVSNWSAIAIGVVAGILSVLGTKLLDRLRIDDGVGAWPVHGLCGIWGGIAVGIFSTNVEHKLSAQIVGSLVIPFWAFITMFFLFYVMDLWGILRVKPSQEKVGLDIVEHGQTEKGVEIAFED

SEQ ID NO: 13079 - protein, 107 aa, Synechocystis sp. PCC 6803
MNPETKARIDQLVTANKVMVFMKGTKLMPQCGFSNNVVQILNMLGIPFETLDVLADAEIRQGIKEYSNWPTIPQVYVNGEFVGGSDIMIELYQNGELQEMLEVALAS

SEQ ID NO: 13080 - protein, 413 aa, Synechocystis sp. PCC 6803
MKFLILNAGSSSQKSCLYELTGDRLPETIPEPLWEAFIDWTVLANQGRLTVETAGQKQVIILETGDRQQGIARMLDTLVTGDDAVLKSLAEIDLVGHRVVHGGTDHAEATLITPEVQQAIADLIPLAPAHNPAHLEGIEAISALLVLGEVPQIAVFDTAFHRTIPTPAAEYPIPQAWTNLGIRRYGFHGTSHKYCAQKTAEILGKPLADLKLITCHIGNGASLTAIKNGVSIDTTMGFTPLEGLMMGARSGSIDPAILLFLQETQGLTPAEINTTLNKKSGLLGVSGLSADLRTILQAKAEGNEQAQLAYVMYIHRFRSCLGQMIASLEGLDTLVFTAGVGENAATVRADVCQAFEFLGLKLDPELNNRSPRDTVISHSDSLVTVLIVHTEEDWAIAQDCWHWWHSQGQRKQS

SEQ ID NO: 13081 - protein, 390 aa, Synechocystis sp. PCC 6803
MSDATPFRPPSEAEEALIKETRLPLTGWQQEVDQGLTYGLEAAASIKDRSIPTFSRGELPHYAGINTFMKAPYLEDVREVGKYDVAIVGVPHDSGTTYRPGTRFGPQGIRRISALYTPYNFEMGVDLREQISLCDVGDIFTIPANNEKSFDQISKGIAHIFSSGAFPIILGGDHSIGFPTVRGICRHLGDKKVGIIHFDRHVDTQETDLDERMHTCPWFHATNMANAPAKNLVQLGIGGWQVPRQGVKVCRERATNILTVTDITEMSLDAAADFAIARATDGTDCVWISFDIDCIDAGFVPGTGWPEPGGLLPREALYLLKRIIRETNVCGMEVVEVSPPYDISDMTSLMATRVICDTMAHLVVSGQLPRTEKPAYIHAEANMAVDEPWQ

SEQ ID NO: 13082 - protein, 446 aa, Synechocystis sp. PCC 6803
MSNFSRSTRRKFMFTAGAAAIGGVVLHGCTSPTTTSTGTGTGSSTDQAISPLVEGENAPEVTTAKLGFIALTDAAPLIIAKEKGFYAKYGMPDVEVLKQASWGTTRDNLVLGSASGGIDGAHILTPMPYLITMGTVTDGKPTPMYILARLNVNGQGIQLGNNYKDLKVGTDAAPLKEAFAKVTDPKVAMTFPGGTHDMWIRYWLAAGGMEPGKDFSTIVVPPAQMVANVKVNAMESFCVGEPWPLQTVNQGVGYQALTTGQLWKDHPEKAFGMRADWVDQNPKAAKALLMAVMEAQQWCDQAENKEEMCQILSKREWFKVPFEDIIDRSKGIYNFGNGQETFEDQEIMQKYWVDNASYPYKSHDQWFLTENIRWGYLPASTDTKAIVDKVNREDLWREAAQALEVPADQIPSSPSRGIETFFDGITFDPENPQAYLDSLKIKSIKA

SEQ ID NO: 13083 - protein, 530 aa, Synechocystis sp. PCC 6803
MTIAAPKTTVAPEMKPTTPKKIGVPRESFDQECRVAMTPDTAQKLQKLGFDLLLETGAGAKADFADRLYESLGCGIVDGRQTLFEQADIILKVRPPSPAEVEELPAGKALISFIWPAQNPELLEKLAAKNITVLAMDAVPRISRAQKLDALSSMANIAGYRAIIEAANRFGRFFTGQITAAGKVPPAKVLVIGAGVAGLAAIGAAKSLGAIVRAFDTRPVVKEQVESLGGEFLLLDFKEDGTGQGGYAKVMSEEFIAAEMALFAAQAKEVDIIITTALIPGRPAPKLITEPMVKSMRAGSVVVDLAAEQGGNCEVTKPGEVYEYEGVTIIGYTDLPSRMASQSSQLYGTNLWHLLKDMGGSEAFKVDVEDEVIRGALVSHEGKITWPPPKLNPPSPVQPAKPTVTVVESEAKSAKKSGSGNFLWLALAAIALVGIGIGAPTSFLSHFTVFVLACVVGWQLIWNVAPALHTPLMSVTNAISGIIIIGGMLQISGPLNSPTTILGAIAILVGTINIAGGFLVTQRMLKMFRK

SEQ ID NO: 13084 - protein, 382 aa, Synechocystis sp. PCC 6803
MICSATPDRPCKPAGKATTGQDCKIFNPLRVINSGSPGPTLTPWRMPKVIESDCDNVCNSSLLYRGKSRSILDWTQTFWLINAMLKQFSATFIGLLLATVGAQAAIAETVMEKIIRTGNLTIGANLDNVPFSYINDNNEVVGYSIDIADRIREEVGKELGRDVVLQIVEVQDMSDALPKLKTGELDIVCDTAFTWERDRYVDFTVSYAVAGIQLLVPNDTPINSRETLMGRRVAMVPNTIVEDAVKIVQNEIEVVPVTSVRAGMEALKKGTVDAVAGDGIQLAGLRQVLDMPDTKVIPQPAETRYGVGCMVREDNPGFLRLANRALVRLAEGYVQGDPEDVAIVDKWIGTEGIVPVDNDNLRQFFNYLVITHEQVMEPKNGQ

SEQ ID NO: 13085 - protein, 697 aa, Synechocystis sp. PCC 6803
MTSSLYLSTTEARSGKSLVVLGILDLILKKTTRIAYFRPIIQDPVNGKHDNNIILVLENFRLQQTYTDSFGLYFHEAVSLASDGAIDQVLDRILAKYRHLADQVDFILCEGSDYLGEESAFEFDLNTTIAKMLNCPILLLGNAMGNTIADSLQPIDMALNSYDQESCQVVGVIINRVQPELATEIQAQLEQRYGDRPMVLGTIPQDIMLKSLRLREIVSGLNAQVLSGADLLDNLVYHHLVVAMHIAHALHWLHEKNTLIITPGDRGDIILGVMQAHRSLNYPSIAGILLTADYHPEPAIMKLIEGLPDAPPLLLTSTHTHETSARLETLHPALSPTDNYKIRHSIALFQQQIDGEKLLNYLKTIRSKGITPKLFLYNLVQAATAAQRHIVLPEGEEIRILKAAASLINHGIVRLTLLGNIEAIEQTVKINHIDLDLSKVRLINPKTSPDRERYAETYYQLRKHKGVTLAMARDILTDISYFGTMMVHLGEADGMVSGSVNTTQHTVRPALQIIKTQPGFSLVSSVFFMCLEDRVLVYGDCAVNPDPNAEQLAEIALTSAATAKNFGIEPRVALLSYSSGSSGQGADVEKVRQATAIAKEREPDLALEGPIQYDAAVDSTVAAQKMPGSAVAGKATVFIFPDLNTGNNTYKAVQRETKAIAIGPILQGLNKPVNDLSRGCLVEDIINTVVITALQVK

SEQ ID NO: 13086 - protein, 309 aa, Synechocystis sp. PCC 6803
MKIKQAIAKPFLKWAGGKGKLIEQLVNCFPLEITTGQLTKYAEPFIGGGALYFHVAQNYPQIEKFFISDCNQQLVLAYQTIQQNVDDLIDFLRRLQQKYYCFNQDERKDFFYQQRLKFNQNVTGINLEKFSKLWIEQTGLLIFLNRTCFNGLFRVNSKGEFNVPFGDYKNPKICDAENLKLVANLLARTEIRFGDFTSSNNFIDASTFVYFDPPYRPLNKTSSFNSYGKANFNDNEQLRLAEYYQSLNNKNAKLMLSNSDPKNINSDDNFFDDLYRGFQIARIDALRMINSQADKRGAIKEILVVNYHR

SEQ ID NO: 13087 - protein, 554 aa, Synechocystis sp. PCC 6803
MNLAWLQGLSLGLLSPPAPALLIFRSFTMAKVLVSDSIDQVGIDILKQVAQVDVKTGLSEAEIIDIVPEYDAIMLRSATKVTEKIIQAGSQLKIIGRAGVGVDNIDVPAATRQGIVVVNSPEGNTIAAAEHALAMMMALARHIPDANKSVKESKWERKQFIGTEVYKKTLGVVGLGKIGSHVAGVAKAMGMKLLAYDPFISQERADQIGCTLVDLDLLFSEADFITLHIPKTPETANLINAETLAKMKPTARIINCSRGGIIDEEALVTAIETAQIGGAALDVFAQEPLGESRLREFSNVILTPHLGASTEEAQVNVAVDVAEQIRDVLLGLPARSAVNIPGLTPDVMEKLRPYLKLAETLGTLVGQLAGGRIDRLTVCLQGDLAEYTNSQPLVVAAIKGLLSQALRERVNYVNAAIEAKERGIRVIETKDASVRDYSGSLHLKATGTMGEHSATGALLSNGEIRITDVDEFPINVPPNNYMLFTLHRDMPGIIGKIGSLLGSFNVNIASMQVGRKIVRGDAIMALSLDDPLPDGLLSEITKVAGIRDAYTVKL

SEQ ID NO: 13088 - protein, 409 aa, Synechocystis sp. PCC 6803
MAAHPNPWHWKTIMRDVFIVAAKRTPLGRFGGSLTNFSAADLGAHVMKSVLAQAGVGGDQLDLYIMGNVLRAGHGQLIPRQAALKAEIPDTVDGYAVDMVCSSAMMSVINAALTIRAGEGDLILAGGTESMSQTGFYLSHRARWGYKFLMGAPENLTDLLLHDGLTDSTNGEGMGEQTEKLAAEHGFSRIELDEVACLSQQRAAHATESGYFDSEIAPIEITSRKGTQVLASDEGIRSDTTVESLGKLRSAFAKDGVLTAGNCSQITDGAAALLLASGEAVEKYQLKPLAKILGGSWAAGTPSRFPELPITASQKLLAKLDKTLADFDLFENNEAFSVSNLLFERRLGVDRDKLNVNGGAIALGHPIGASGARIMVTLLYALQQRDKTLGLAALCHGTGGGTAIALERV

SEQ ID NO: 13089 - protein, 621 aa, Synechocystis sp. PCC 6803
MVASIPNPKTNFLKTVPSQRQTGAYILMDSLKRHGVKHIFGYPGGAILPIYDELYRFEAAGEIEHILVRHEQGASHAADGYARATGKVGVCFGTSGPGATNLVTGIANAHLDSVPMVVITGQVGRAMIGSDAFQEIDIFGITLPIVKHSYVVRSAADMARIVTEAFHLASTGRPGPVLIDIPKDVGLEECEYIPLDPGDVNLPGYRPTVKGNPRQINAALQLLEQARNPLLYVGGGAIAANAHAQVQEFAERFQLPVTTTLMGIGAFDENHPLSVGMLGMHGTAYANFAVSECDLLIAVGARFDDRVTGKLDEFASRAKVIHIDIDPAEVGKNRAPDVPIVGDVRHVLEQLLQRARELDYPTHPHTTQAWLNRIDHWRTDYPLQVPHYEDTIAPQEVVHEIGRQAPDAYYTTDVGQHQMWAAQFLNNGPRRWISSAGLGTMGFGLPAAMGAKVGVGDEAVICISGDASFQMNLQELGTLAQYDIQVKTIILNNGWQGMVRQWQQTFYEERYSASNMSQGMPDINLLCEAYGIKGITVRKREDLAPAIAEMLAHNGPVVMDVVVKKDENCYPMIAPGMSNAQMLGLPEVPVRDNGPRMVECNHCQTQNFITHRFCSGCGAKL

SEQ ID NO: 13090 - protein, 550 aa, Synechocystis sp. PCC 6803
MGQMNTADLLVQCLENEDVEYIFGVPGEENLHILEALKNSPIRFITTRHEQGAAFMADVYGRLTGKAGVCLSTLGPGATNLMTGVADANLDGAPLVAITGQVGTDRMHIESHQYLDLVAMFDPVTKWTRQIVRPSITPEVVRKAFKLAQSEKPGATHIDLPENIAAMPVDGKPLRRDSREKVYAAFRTLGTAANAISKAKNPIILAGNGTIRAEASEALTEFATSLNIPVANTFMGKGTMPYTHPLSLWTVGLQQRDHITCAFEKSDLVIAVGYDLIEYSPKKWNPTGDLPIIHIGATPAEIDSSYIPQVEVVGDITDSLMDLLKRCDRQGKPTPYGASLRAEIRAEYECYANDTGFPVKPQKIIYDLRQVMGPDDVVISDVGAHKMWMARHYHCDSPNTCLISNGFAAMGIAIPGAIAAKLVYPERNIVAVTGDGGFMMNCQELETAMRVGTPFVTLIFNDNGYGLIEWKQINQFGESSFIKFGNPDFVKFAESMGLKGYRVEAAADLIPILKEALAQPVPTVIDCPVDYRENIRFSQKAGELACEIWE

SEQ ID NO: 13091 - protein, 225 aa, Synechocystis sp. PCC 6803
MDQSLTQDRPLAAVFRRLGSELMPPVVETFDRSKTIFFPGDPAERVYFLLKGAVKLSRVYEAGEEITVALLRENSVFGVLSLVTGQRSDRFYHAVAFTPVELLSAPIEQVEQALKEHPDLSLLMLQGLSSRILQTEMMIETLAHRDMGSRLVSFLLILCRDFGVPAPDGIRIDLKLSHQAIAEAIGSTRVTVTRLLGDLREGNMISITKKKITVHNPVALSQQFT

SEQ ID NO: 13092 - protein, 318 aa, Synechocystis sp. PCC 6803
MKWKVLVTCPPMLHTLEHCQTRFEQEQLDVVAPTITQQLSEAELCEQIADFDGVIAGDDPFTARVLTIGKQGKLKALAKWGIGVDAIDLAAAKQLGILTSNTPNVFGDEVADVAIGYLILLARELHCIDQAVRQGEWLKIRGHSLRGKTAGIIGVGSIGQAIAVRLQSMGLKLLGYDPHPISADFCEQTGLHPVPLQDVLQQADCLFLACNLTPDNFHLLNADTFDQMKPGVWLINVARGGLVDQAALIETLQTGKVAKAALDVFEQEPLAADSPLTQLPQVILGSHNGSNTREAVLKVNQLAIDNLVRDLQRATSGD

SEQ ID NO: 13093 - protein, 384 aa, Synechocystis sp. PCC 6803
MDFGIGFISTNIMLPILDFFFGIVHSYGFAIIALTLVIRLGLYPLSAGQIRNMRKMRITQPLMKERQEEIQKRYKDDPAKQQEEMAKVMKEFGNPLAGCLPLLLQMPILFALFATLRGSPFSDINYTVDLQILPQEQVERIVPQTFSTKPQNIYVDEALHYPIAVFLPGGKMLGVGEKTQLEIQSTEGKAFNQVIPEKNSQILTPTYSVTKGEDRISVNPDGTIEALVPGDATVQVTIPGIAARTGFLFIKALGQVGVTGENGEINWDILGMIVFFGFSIYLNQELSGASGGGAPNAQAQQQQTINKITPILFSGMFLFFPLPAGVLMYIVMANVFQTIQTLILMREPLPENLQKLLDEQQKATQGRESLPFEKKSSKKKEKTS

SEQ ID NO: 13094 - protein, 296 aa, Synechocystis sp. PCC 6803; identical to SEQ ID NO: 454

SEQ ID NO: 13095 - protein, 385 aa, Synechocystis sp. PCC 6803
MAPSISPVTQPLVSMAIAPTVVIRSALAKAGEHLQKLGSKGLVVTGSHSAELGEKSLQTLQKNYGLTLPLASYLPDCAESSLEQLRRRVHQEQPDFILGIGGGKALDTAKLLAHQTQLAIATVPTSAATCAGWTALANVYSETGAFRYDVALDRCPDLLIVDYELIQRAEPRLLVAGIGDAIAKWYEASVSSGQSSDTFTVAAVQQARILRDILFQKSAEALAQPGSETWREVVDASLLMAGVIGGLGGANCRTVAAHAVHNGLTQLPQAHHALHGEKVAYGILVQLRLEELVSGNQLAATARRQLLSFYDEIGLPKTLQDLGLGRISLEELRQTAEFTCLPNSDIHRLPFTVTPETLMAAMVSTLVEEQGTRQLFAQIQDNSGL

SEQ ID NO: 13096 - protein, 499 aa, Synechocystis sp. PCC 6803
MNSSLVILYHREPYDEVRENGKTVYREKKSPNGILPTLKSFFADAEQSTWVAWKQVSPKQKDDFQADMSIEGLGDRCTVRRVPLTAEQVKNFYHITSKEAFWPILHSFPWQFTYDSSDWDNFQHINRLFAEAACADADDNALFWVHDYNLWLAPLYIRQLKPNAKIAFFHHTPFPSVDIFNILPWREAIVESLLACDLCGFHIPRYVENFVAVARSLKPVEITRRVVVDQAFTPYGTALAEPELTTQLRYGDRLINLDAFPVGTNPANIRAIVAKESVQQKVAEIKQDLGGKRLIVSAGRVDYVKGTKEMLMCYERLLERRPELQGEISLVVPVAKAAEGMRIYRNAQNEIERLAGKINGRFAKLSWTPVMLFTSPLAYEELIALFCAADIAWITPLRDGLNLVAKEYVVAKNGEEGVLILSEFAGCAVELPDAVLTNPYASSRMDESIDQALAMDKDEQKKRMGRMYAAIKRYDVQQWANHLLREAYADVVLGEPPQM

SEQ ID NO: 13097 - protein, 234 aa, Synechocystis sp. PCC 6803
MVDDEASIRRILETRLSMIGYEVVTAADGEEAIATFHESDPDLVVLDVMMPKLDGYGVCQELRKESDIPIIMLTALGDVADRITGLELGADDYVVKPFSPKELEARIRSVLRRVDKNGMPGIPSSGVLQIATIRIDTNKRQVYKGDERIRLTGMEFSLLELLVSRSGEPFSRSEILQEVWGYTPERHVDTRVVDVHISRLRAKLEEDPSNPELILTARGTGYLFQRILEPGEEP

SEQ ID NO: 13098 - protein, 413 aa, Synechocystis sp. PCC 6803
MYSPGYVATSSRQSDAGNRLFVYEVIGLSQSTMTDGLDYPIRRSGSTFITVPLKRMNQEMRRITRMGGKIVSIKPLEGDSPLPHTEGIAKPSQSEGSGSEAVANPAPESNKTMTTTPKEKKADDIPVNIYRPKTPYIGKVLENYPLVREGAIGTVQHLTFDLSAGDLRYLEGQSIGIIPPGEDDKGKPHKLRLYSIASTRHGDFGDDKTVSLCVRQLEYQNEAGETVQGVCSTYLCNIKEGDDIAITGPVGKEMLLPPDEDANIVMLATGTGIAPFRAFLWRMFKEQHEDYKFKGLAWLIFGIPKSENILYKDDLEKMAAEFPDNFRLTYAISREQQNAEGGRMYIQHRVAENAEELWNLMQNPKTHTYMCGLKGMEPGIDEAFTALAEQNGKEWTTFQREMKKEHRWHVETY

SEQ ID NO: 13099 - protein, 154 aa, Dendrobium crumenatum
STRHSLHGGPSTLGNPLEGFQFGPHSISHPRSSISGEISAFSDARFDWRETPEAHVFKADLPGLKKEEVKVELEEEEEWRALRISGERKREKKEKGDTWHRIERSSGNFLRRFRLPENAKVDGVRAAMVNGVLTVTVPKEEVKKINVKSIGISG

SEQ ID NO: 13100 - protein, 372 aa, Synechocystis sp. PCC 6803; identical to SEQ ID NO: 458

SEQ ID NO: 13101 - protein, 68 aa, Capsicum annuum
IVDMPGLKSGDIKVQVEEENVLLISGERKREEEKEGAKYIRMERRVGKFMRKFTLPENANTDAILQFV

SEQ ID NO: 13102 - protein, 315 aa, Synechocystis sp. PCC 6803
MDIPNTTATIATIPQAPAGFRSGFVAIVGRPNVGKSTLMNQLVGQKIAITSPVAQTTRNRLQGIITTPSSQIILLDTPGIHKPHHELGRVLVKNAIQAIHSVDLVVFLVDSSATLGRGDRFVVDLLQKTDGPVVVGLNKQDQQPPDQREELNASYETLTENHGWPCFKFSALTGEGLSNFQSALEARLDPGPYYYPPDLVTDQPERFIMAELIREQILLLTRQEVPHSVAIAIEKVEETPERTNVFAAITVERGSQKGIIIGQKGSMLQAIGTAARQQIQKLISGDVYLKLFVKVEPKWRQSRQQLLEFGYRVEE

SEQ ID NO: 13103 - protein, 636 aa, Synechocystis sp. PCC 6803
MGKVVGIDLGTTNSCVAVMEGGKPTVIANAEGFRTTPSVVGYAKNGDRLVGQIAKRQAVMNPGNTFYSVKRFIGRKFDEITNEATEVAYSVVKDGNGNVKLDCPAQGKQFAPEEISAQVLRKLVDDASKYLGETVTQAVITVPAYFNDSQRQATKDAGKIAGIEVLRIINEPTAASLAYGLDKKDNETILVFDLGGGTFDVSILEVGEGVFEVLATSGDTHLGGDDFDKKIVDFLAGEFQKAEGIDLRKDKQALQRLTEAAEKAKIELSGVSQTEINLPFITATQDGPKHLDTTLSRAKFEEICSDLIDRCGIPVENAIRDAKIDKSALDEIVLVGGSTRIPAVQEVVKKILGKDPNQGVNPDEVVAVGAAIQGGVLSGEVKDILLLDVSPLSLGVETLGGVMTKIIPRNTTIPTKKSETFSTAVDGQSNVEIHVLQGEREMANDNKSLGTFRLDGIPPAPRGVPQIEVTFDIDANGILNVTAKDRGTGKEQSISITGASTLPDTEVDRMVKEAESNAAADKERREKIDRKNQADSLVYQAEKQITELGDKVPAADKIKAEGLIKDLKEAVAQEDDAKIQTVMPELQQVLYSIGSNMYQQAGAEAGVGAPGAGPEAGTSSGGGDDVIDAEFSEPEK

SEQ ID NO: 13104 - protein, 294 aa, Arachis hypogaea
  misc_feature (1)..(1): Xaa can be any naturally occurring amino acid
  unsure (1)..(294): unsure at all Xaa locations
XLSSNFYATKCPNALSTIKSAVNSAVAKEARMGASLLRLHFHDCFVQGCDASVLLDDTSNFTGEKTAGPNANSIRGFEVIDTIKSQVESLCPGVVSCADILAVAARDSVVALGGASWNVLLGRRDSTTASLSSANSDLPAPFFNLSGLISAFSNKGFTTKELVTLSGAHTIGQAQCTAFRTRIYNESNIDPTYAKSLQANCPSVGGDTNLSPFDVTTPNKFDNAYYINLRNKKGLLHSDQQLFNGVSTDSQVTAYSNNAATFNTDFGNAMIKMGNLSPLTGTSGQIRTNCRKTN

SEQ ID NO: 13105 - protein, 386 aa, Synechocystis sp. PCC 6803
MERPLYFDNHATTALDPRVLEAMLPYLTEQYGNAGSAHFYGWQASAAIKQARQEIAETMGAQPEEIIFTSGATEANNLAIRGVAEAYFAQGKHLVTVETEHQAVLAPCRYLETLGFEVTYLSVQSSGLVDLTELEKALRPDTILVSVMAANNEIGVLQPLKEIGALCRQRSIIFHCDGAQALGKIPLDVHQLNIDLLSFTGHKIHGPKGIGGLYRRQNPGVRLAPQLLGGGQEGNFRSGTLPVPLIVGLAKALTIAGETLVSEGDRQRQLRDQLWQGLAKISGVVLNGDYEQRLPGNLNVSITGVDPKALLTTLQPRLALSSGSACSSYRTEASHVLYALGRDKTSAQASLRFGLSRFTTEIEIDQAIAIVTDTVARLRADASNQS

SEQ ID NO: 13106 - protein, 627 aa, Synechocystis sp. PCC 6803
MKFSWRTALLWSLPLLVVGFFFWQGSFGGADANLGSNTANTRMTYGRFLEYVDAGRITSVDLYENGRTAIVQVSDPEVDRTLRSRVDLPTNAPELIARLRDSNIRLDSHPVRNNGMVWGFVGNLIFPVLLIASLFFLFRRSSNMPGGPGQAMNFGKSKARFQMDAKTGVMFDDVAGIDEAKEELQEVVTFLKQPERFTAVGAKIPKGVLLVGPPGTGKTLLAKAIAGEAGVPFFSISGSEFVEMFVGVGASRVRDLFKKAKENAPCLIFIDEIDAVGRQRGAGIGGGNDEREQTLNQLLTEMDGFEGNTGIIIIAATNRPDVLDSALMRPGRFDRQVMVDAPDYSGRKEILEVHARNKKLAPEVSIDSIARRTPGFSGADLANLLNEAAILTARRRKSAITLLEIDDAVDRVVAGMEGTPLVDSKSKRLIAYHEVGHAIVGTLLKDHDPVQKVTLIPRGQAQGLTWFTPNEEQGLTTKAQLMARIAGAMGGRAAEEEVFGDDEVTTGAGGDLQQVTEMARQMVTRFGMSNLGPISLESSGGEVFLGGGLMNRSEYSEEVATRIDAQVRQLAEQGHQMARKIVQEQREVVDRLVDLLIEKETIDGEEFRQIVAEYAEVPVKEQLIPQL

SEQ ID NO: 13107 - protein, 290 aa, Synechocystis sp. PCC 6803
MNVSKIAVFGLGVMGSPMAQNLVKNGYQTVGYNRTLERPSVQEAAKAGVKVVTSIAVAAANADIILTCVGDEKDVQQLILGSGGIAEYAKPQALIIDCSTIGKTAAYELATNLKLQGLRFLDAPVTGGDVGAINGTLTIMVGGDISDFEEALPVLKSIGEKIVHCGPSGSGQAVKLCNQVLCGIHAIAAAEAIQLSEQLGIAPELVIDTCGSGAAGSWALTNLAPKMSEADFAPGFMVKHLLKDLRLVREAAENGPLPGVTLAESLFTSVQLLGGEDQGSQAIIRAYREA

SEQ ID NO: 13108 - protein, 389 aa, Synechocystis sp. PCC 6803
MRLTQRVSQVVPSITLEITAKAKAMRTEGIDVLSFTAGEPDFTTPPHIVEAAKLALDEGKTRYGPAAGEPALRQAIAKKLREKNNLPYEAANILVTNGGKHSLFNLMLAMIEQGDEVIIPAPYWLSYPEMVRLAEGTPVIVNTTAATDYKITPEQLRQAITSKSKLFVLNSPSNPTGAVYTPAEIRALAAVILEYEDLYVVSDEIYERILYDGTEHLSIGAVNDEIFQRTIISNGFAKSYSMTGWRVGYLAGELPLIQACSTIQGHSTSNVCTFAQYGAIAALENPQTCVETMVKAFTERRQVIVEGINQIAGLSCPNPKGAFYVFVDIAKTGLNSLEFSARLLESHQVAVIPGAAFGADDCVRFSYATDMDTIKQGLAELERFVSTLA

SEQ ID NO: 13109 - protein, 275 aa, Synechocystis sp. PCC 6803
MLLKSAFTWLALTFTTGLVAIAPVQAETVLERVARTGELRAGTRTDAVPFGFEMANGEMEGYGVDLMALIALKLAEEMGKTITVDLDRVDLQSRFEAIASGELDIVCEATTITQDRLELVDFSAPFFISGAKFLMKQGSVEGFNINGTLEGIPIAYIQNTTTFDIIPKIYPLAQWVPVQDREEGIAKLDGGQVKAVVSDGILLVGELLKQGKNPAEYALGPYQPITTELYACILPQGDGDWKRFVDEVISSTENHDLLQEWFNIDQTNVVRVDPL

SEQ ID NO: 13110 - protein, 502 aa, Synechocystis sp. PCC 6803
MANKFETVKATKDGLAVRAELEHFAQIGWENIPEEDRDLRLKWLGIFFRPVTPGEFMLRFRIPHGLLTSQQLQVIGDIINRYGDRGNGDITTRQNLQVRGIKIEDIPDIFSKLESCGLTSVQSGMDNVRNITGSPVAGLEKDELIDTRDLVQGVQDMITNGGRGNPEFTNLPRKFNIAIEGSRDNSVHAEINDVAFVPAYREGILGFNVVVGGFFSSRRCEAAIPLDAWVQPDQQVVDLCRSILEIYRDHGLRANRQKSRLMWLIDEWGVAKFREEVAAKLPFPLLTAAPKDELDWDKRDHLGVHPQKQAGLNYVGLHVPVGRLYANDFFELSRLADTYGSGEVRLTVEQNLILVNVPDEKLEALLAEPLLTKFRVDPHNLQRSVVSCTGAQFCKFALIETKNRALAMVAALEKELTVPKPVRIHWTGCPNSCGQPQVADIGLMGTKVRKDGKTVDGADVYLGGKVGKDAHLGTCVHKSIPCDELQPLLAQILIEQFGAVRR

SEQ ID NO: 13111 - protein, 256 aa, Synechocystis sp. PCC 6803
MSQTILSIKNLTASVDGNQILKGVNLEIKAGEVHAIMGRNGSGKSTLSKVITGHPDYEITGGEIIYQGQDLSALEPHERALAGIFLAFQYPLEIPGVSNLDFLRIAYNAKRKHLGLEELDTFDFEDLIQEKLDVVKMNPAFLERSLNEGFSGGEKKRNEILQMAILEPTLSILDEIDSGLDIDALRIVSEGVNFLKNPDNATLVITHYQRLLNYIIPDHIHVMYDGKIVMSGGKELALELEEKGYDFLDEQVLAPI

SEQ ID NO: 13112 - protein, 492 aa, Synechocystis sp. PCC 6803
MTNTLTSTFADLGLSEKRCQLLADIGFEAPTQIQTEAIPLLLSGRDMLAQSQTGTGKTAAFALPLMDRIDPEGDLQALILTPTRELAQQVAEAMKDFSHERRLFILNVYGGQSIERQIRSLERGVQIVVGTPGRVIDLIDRKKLKLETIQWVVLDEADEMLSMGFIDDVKTILRKTPPTRQTACFSATMPREIKELVNQFLNDPALVTVKQTQSTPTRIEQQLYHVPRGWSKAKALQPILEMEDPESAIIFVRTKQTAADLTSRLQEAGHSVDEYHGNLSQSQRERLVHRFRDGKIKLVVATDIAARGLDVNNLSHVVNFDLPDNAETYIHRIGRTGRAGKTGKAIALVEPIDRRLLRSIENRLKQQIEVCTIPNRSQVEAKRIEKLQEQLKEALTGERMASFLPLVRELSDEYDAQAIAAAALQMIYDQSCPHWMKSDWEVPEVDFNKPVLRRGRNAGGGQNKSGGGYQGKPGKPRRSSGGRRPAYSDRQQ

SEQ ID NO: 13113 - protein, 333 aa, Synechocystis sp. PCC 6803
MSAVSRIATLTRQSMLSALSDNNRLRLFSGSSNPSLSQEVARYLGMDIGPMLRKRFADGELYIQIQESIRGGDVYLIQPCCHPVNDNLMELLIMIDACRRASARQITAVLPYYGYARADRKTAGRESISAKLVANLITGAGAQRVLAMDLHSAQIQGYFDIPCDHMYGSPVIIDYLKSKQLTDLVVVSPDVGGVARARAFAKKLNDAPLAIIDKRRQSHNVAEVLNLIGDVDGKTAVLVDDMIDTAGTLSEGSRLLRAQGARQVYACATHAVFSEPAINRLSGGLFEEVIVTNTIPVPDDHHFPQLTILSVANLIGEAIWRIHEESSVSSMFR

SEQ ID NO: 13114 - protein, 507 aa, Synechocystis sp. PCC 6803
MSNSILSKLNVGERSPVNRTHSSRTEAEKSSLFRFVRRKINSPWLACVPLTALIVAIWNAAAIAQDTEIVNITVETVNENVATLQGTLNAIWILIAAILVIFMNAGFGMLETGLCRQKNAVNILTKNLIVFALATIAYWAIGFSLMFGSSGNPFVGFGGFFLSGDHTNYGLSPFPEGLPVAVFFLFQVAFSATAATIVSGAVAERIKFNEFLIFSVLLVGIAYPITGHWVWDAGGWLYTMGFMDFAGSTVVHSVGGWAALAGAFLLGPRLGKFVDGRPGAIPGHNMGFAMLGCLILWIGWFGFNPGSQLAADQACAYIAVTTNLAASAGGLTATFTSWLKDGKPDLTMVINGVLAGLVGITAGCAGVSYWGSVIIGGIAGILVVYSVAFFDKIKIDDPVGAISVHLVNGVWGTLAVGFFNMEKGLFYGGGINQLIIQIVGILAIGAFTAIFSFVVWAILKQTMGIRVSGEEEMIGLDIGEHGMEAYTGFVKETDSFGSAVSGATVPE

SEQ ID NO: 13115 - protein, 541 aa, Synechocystis sp. PCC 6803
MTSIDTLWLLLCAGLVFFMQAGFMCLESGLTRSKNSINVAIKNFADFGISVALFWSFGFSIMFGLSQGGWWGTGYSFVDVGGEPTLAVFFLFQAMFCGTATTIISGAAAERLKFSAYLLVAGLASGLIYPLFGDWAWNGLATVAGIETTGGWLENLGFRDFAGSTVVHSVGAWIGLATILVVGPRQGRFPKTGKTLKIQGSNMPFSVLGTLILWFGWLGFNGGSTFGLTPEVPGIMVNTVLAGVGGMLMAGLISLLQDKMIQVEPLMNGSLAGLVAITASANVVMTPIAMVIGATGSAIAYLVGKKMLHWGVDDAVDAVAVHGGAGVWGTLCVGLFGQLPLVDTGLNRWQQCGVQLLGIGVCTLWAFGLAWVFLTLLNRVFALRISPEDEEIGLNVSEHQATTETYELFQVMDRQAKTHDLSLRVPVNPFTEVGHIAGRYNQVMDAFEARHHRSVEDLAQIYYVTAAIAAAIENNSFKADQLGLEEVTNRADELGALARTIQQMAEMLQQRDQELIAVKQQLVLQQQKQHHGNGESVDLSP

SEQ ID NO: 13116 - protein, 600 aa, Synechocystis sp. PCC 6803
MALIVQKFGGTSVGTVERIQAVAQRIKRTVQGGNSLVVVVSAMGKSTDVLVDLAQQISPNPCRREMDMLLSTGEQVSIALLSLALQEIDQPAISLTGAQVGIVTEAEHSRARILEIRPDRLEHHLREGKVVVVAGFQGISSVEHLEITTLGRGGSDTSAVALAAALKADFCEIYTDVPGILTTDPRLVPEAQLMAEITCDEMLELASLGAKVLHPRAVEIARNYGIPLVVRSSWSDEPGTKVVAPPVQNRSLVGLEIAKAVDGVEYDADQAKVALLRVPDRPGVASKLFRDIAQQQVDIDLIIQSIHDGNSNDIAFTVVKDLLNTAEAVTSAIAPALRSYPEADQEAEIIVEKGIAKIAIAGAGMIGRPGIAAKMFKTLADVGVNIEMISTSEVKVSCVIDQRDADRAIAALSNAFGVTLSPPKNQTDTSHLPAVRGVALDQDQAQIAIRHVPDRPGMAAQLFTALAEANISVDMIIQSQRCRINQGTPCRDIAFMVAEGDSSQAEAILQPLIKDWLDAAIVVNKAIAKVSIVGSGMIGHPGVAAHFFAALAQENINIEMIATSEIKISCVVPQDRGVDALKAAHSAFNLAGTKTVTVPA

SEQ ID NO: 13117 - protein, 1556 aa, Synechocystis sp. PCC 6803
MSFQYPLLAPMTNSSVATNSNQPFLGQPWLVEERDACGVGFIANLRGKPDHTLVEQALKALGCMEHRGGCSADNDSGDGAGVMTAIPRELLAQWFNTRNLPMPDGDRLGVGMVFLPQEPSAREVARAYVEEVVRLEKLTVLGWREVPVNSDVLGIQAKNNQPHIEQILVTCPEGCAGDELDRRLYIARSIIGKKLAEDFYVCSFSCRTIVYKGMVRSIILGEFYLDLKNPGYTSNFAVYHRRFSTNTMPKWPLAQPMRLLGHNGEINTLLGNINWMAAREKELEVSGWTKAELEALTPIVNQANSDSYNLDSALELLVRTGRSPLEAAMILVPEAYKNQPALKDYPEISDFHDYYSGLQEPWDGPALLVFSDGKIVGAGLDRNGLRPARYCITKDDYIVLGSEAGVVDLPEVDIVEKGRLAPGQMIAVDLAEQKILKNYQIKQQAAQKYPYGEWIKIQRQTVASDSFAEKTLFNDAQTVLQQQAAFGYTAEDVEMVVVPMASQGKEPTFCMGDDTPLAVLSHKPRLLYDYFKQRFAQVTNPPIDPLRENLVMSLAMFLGKRGNLLEPKAESARTIKLRSPLVNEVELQAIKTGQLQVAEVSTLYDLDGVNSLETALDNLVKTAIATVQAGAEILVLTDRPNGAILTENQSFIPPLLAVGAVHHHLIRAGLRLKASLIVDTAQCWSTHHFACLVGYGASAICPYLALESVRQWWLDEKTQKLMENGRLDRIDLPTALKNYRQSVEAGLFKILSKMGISLLASYHGAQIFEAIGLGAELVEYAFAGTTSRVGGLTIADVAGEVMVFHGMAFPEMAKKLENFGFVNYRPGGEYHMNSPEMSKSLHKAVAAYKVGGNGNNGEAYDHYELYRQYLKDRPVTALRDLLDFNADQPAISLEEVESVESIVKRFCTGGMSLGALSREAHETLAIAMNRLGAKSNSGEGGEDVVRYLTLDDVDSEGNSPTLPHLHGLQNGDTANSAIKQIASGRFGVTPEYLMSGKQLEIKMAQGAKPGEGGQLPGKKVSEYIAMLRRSKPGVTLISPPPHHDIYSIEDLAQLIYDLHQINPEAQVSVKLVAEIGIGTIAAGVAKANADIIQISGHDGGTGASPLSSIKHAGSPWELGVTEVHRVLMENQLRDRVLLRADGGLKTGWDVVMAALMGAEEYGFGSIAMIAEGCIMARVCHTNNCPVGVATQQERLRQRFKGVPGQVVNFFYFIAEEVRSLLAHLGYRSLDDIIGRTDLLKVRSDVQLSKTQNLTLDCLLNLPDTKQNRQWLNHEPVHSNGPVLDDDILADPDIQEAINHQTTATKTYRLVNTDRTVGTRLSGAIAKKYGNNGFEGNITLNFQGAAGQSFGAFNLDGMTLHLQGEANDYVGKGMNGGEIVIVPHPQASFAPEDNVIIGNTCLYGATGGNLYANGRAGERFAVRNSVGKAVIEGAGDHCCEYMTGGVIVVLGPVGRNVGAGMTGGLAYFLDEVGDLPEKINPEIITLQRITASKGEEQLKSLITAHVEHTGSPKGKAILANWSDYLGKFWQAVPPSEKDSPEANGDVSLTGEKTLTSV

SEQ ID NO: 13118 - protein, 194 aa, Synechocystis sp. PCC 6803
MSAYLFNQENEPDESDSITLYDEAGRPLDCYVENSLEQEDAQYLLLMPVDIPVVIIAWEEDDDETEDAEAILLEDQEEISGIFADAKAVLAELDLSLKYTAYTLTVSGELPPIEDEDILTLEIEGNDPAGEMEEEELQFLASFYHEEERYSIYTPLAPLLFLAKAISETQIELVHPDNDELKHILEELLFEDAD

SEQ ID NO: 13119 - protein, 400 aa, Synechocystis sp. PCC 6803
MGRAKKVVLAYSGGVDTSVCIPYLMHEWGVEEVITLAADLGQGDELGPIQEKALRCGAVESLVIDGKEEFVKEYAFRSIQANALYENRYPLSTALARPLIAKMLVEAAEKYGADAVAHGCTGKGNDQVRFDISIMALNPNLKVLAPAREWKMSREETIAYGERYGVESPVKKSSPYSIDRNILGRSIEAGPLEDPMTEPTEEIYLMTKAIADTPDEPEYVDIGFEKGIPVSLNGVMLDPVTLVERLNEIAGNHGVGRLDMVENRVVGIKSREIYEAPALLVLIDAHRDLESLTQTADVTHYKNTVEEIYSQLIYRGLWYSPLKEALDAFIVKTQERVTGMVRVKFFKGNANVAGRKSDYSIYDAELATYGMEDQFDHKAAEGFIYIWGLPTKVWAQKMRG

SEQ ID NO: 13120 - protein, 538 aa, Datura metel
MGNCNACIRPEEASKADPQTKPKKSRERRPNPYSGSPAPIRVLKDFFPKTRISDKYILGRELGRGEFGVTYLCTDRETREALACKSISKKKLRTAVDIEDVRREVAIMSSLPDHPNIVKLRATYEDNEAVHLVMELCEGGELFDRIVARGHYRERAAAGVARTVAEVVRMCHANGVMHRDLKPENFLFANKKEHSALKAIDFGLSVFFKPGERFSEIVGSPYYMAPEVLKRNYGPEVDIWSAGVILYILLCGVPPFWAETEQGVALAILRGVIDFKREPWPQVSEKAKSLVRQMLEPDPKKRLTAQQVLDHPWIQNAKKASNVPLGDIVRTRLKQFSIMNRFKKKALRVIAEHLKLEEIEVIREMFALMDSDGDGKITYDELKAGLRKVGSQLAEAEMKLLMDVADVDGNGVLDYGEFVAIIIHLQRMENDEHFRRAFMFFDKDGSGYIELDELQEALADESGACDTDVLNEIMSEVDTDKDGQISYEEFVAMMKTGTDWRKASRQYSRERFKSLSVNLMKDGSLQLQDVLSGQTVIV

SEQ ID NO: 13121 - protein, 266 aa, Solanum tuberosum
MNSTSMSSLGVRKGSWTDEEDFLLRKCIDKYGEGKWHLVPARAGLNRCRKSCRLRWLNYLRPHIKRGDFAPDEVDLILRLHKLLGNRWSLIAGRLPGRTANDVKNYWNTNLLRSKVNITTKFVPHEKINNKCGEITKNEIIKPQPRKYFSSTKKNITNNIVIVDKEEHCKEIISEKQTPDALMENVDQWWTNLLENCNDDVEEEEEEAVTNYEKTLTSLLNGEGNSMQQGQISHESWGDFSLNLPPMQLGENDDFSAEIDLWNLLD

SEQ ID NO: 13122 - protein, 274 aa, Solanum tuberosum
MNTPMCASLGVRKGSWTEQEDFLLRKCIQIYGEGKWHLVPARAGLNRCRKSCRLRWLNYLRPHIKRGDFAPDEVDLILRLHKLLGNRKWSLIAGRLPGRTANDVKNYWNTHFQKKLNIIAPPPPPRPRPNHHLQIKHKSIAVNKNEIIRPQPRNFSNVKKNNSHWCNNKSMITNTLDKDDKRCKEIVVNISEKPTGENTSSIDDGVQWWTNLLENCNEIEEEVAVTNFEKTPTMLLHEEISPPLINGEGNSMQQGQSHDWDDFSTDIDLWNLLN

SEQ ID NO: 13123 - protein, 447 aa, Poncirus trifoliata
IGGGVGGGIALALVVGFCVFAASRCRRQGKDPSSSDAQSGWLPLSLYGNSHSAGSAKTNTTGSYASSLPSNLCRHFSFAEIKAATNNFDEALLLGVGGFGKVYRGEIDGATTKVAIKRGNPLSEQGVHEFQTEIEMLSKLRHRHLVSLIGYCEENCEMILVYDYMAYGTLREHLYKTQKPPLPWKQRLEICIGAARGLHYLHTGAKHTIIHRDVKTTNILLDEKWVAKVSDFGLSKTGPTLDHTHVSTVVKGSFGYLDPEYFRRQQLTEKSDVYSFGVVLFEILCARPALNPTLPKEQVSLAEWAAHCHKKGILEQIMDPYLKGKIAPECFKKFAETAMKCVSDQGIERPSMGDVLWNLEFALQLQESAEESGKVPGGGMDIEEGAFDVDCKGKKDPNACSGFNGNITDSRSTGMSMSIGGRSLASEDSDGLTPSAVFSQIMNPKGR

SEQ ID NO: 13124 - protein, 292 aa, Vibrio campbellii AND4
MAKLKVAFIGLGVMGYPMAGYLSRAGFDTKVYNRTSAKADKWVKEYQGKACDTPREASENCDIVFVCVGNDDDVRSVVYGDEGILAGLKADAVLVDHTTTSADLAVELTKACDKYGNHFIDAPVSGGQAGAENGVLTIMCGGEQTIFERVSPVMGVYAKQVTLLGENGQGQRCKMVNQICIGGVLQGLSEALLLAQKSGLDIAQVVETLKHGAAGSWQMENRANTMAEGKFDFGFAIDWMRKDLGFCLQEAERVGLDLPLTKRVDKQYAALQRDGLGRMDTSVLIKAVAKNQ

SEQ ID NO: 13125 - protein, 605 aa, Vibrio campbellii AND4
MSQSVLSQINVFPVKSVGGVSLSSAWVEKQGLSFDRRFMIATSDGSMVTARKFPQMVTIKSALLPDGVVFTSLGEEPLTIRYQDFKMQEAPATVWKDSFTAYTTTDEADDWFSKVLGLRVELLFTGEQSNRVRDKLGHNVSFADGYPVLVISEASLEELNRRSAEQHSMDQFRTNLVVSDTTPFEEDTWKRIRIGEVEFESVKPCERCILTTVNTQRGTFRESKEPLKTLQEFRANERGGVFFGQNLVALNQGIIRSGDHVEVLEYKEPEFYPDNSPKRMTLTCVEREEIARDFVTLWLEPREGQLPTYLPGQHLPIVVEVDGQTIGRRYTLSSSPSRPGRYAISVKRVSGGRVSNALLDNLQIGDVLEAETPDGQFHLKAHAVQPLLLMSAGSGVTPMLSMVRYLADHNQLDDVVFYHQCSSEIDIPCKDELNELKRQNPGLDVKICLTQPSIDWFGLKGRVSLSHIKQIKDVEHRQVFVCGPDGFMQKAKNLLLKKGLPEGNYHQEAFGVAMAAAKPEKSVEIEFNGVKWMGNNQQTLLEQVENAGKHITNSCRAGLCGACEVQLESGLVDHPDLPALSAEERAMGKVLACCAIPQTDVTLKD

SEQ ID NO: 13126 - protein, 402 aa, Vibrio campbellii AND4
MEKVFIVAAKRTPIGAFGGSLKNTSAGNLAAIAIKGALEAASLPADKVDEVIVGNVVSAGQGMGVGRQASMYAGIPDSVPAYGVNMVCGSGMKAVMDGVSHIRSGDVEVVVAAGVEVMSQIPFIVPSTVRDGNKMGNMELKDLLISDGLTDVYNQYHMGVTAENVAKEAGLSRQQQDEYALSSQQKAVAAIEAGKFKDEIVPVEVKQRRETLVFDTDEYPKANATLEGLSKLRPAFDREGTVTAGNASGINDGASAIILASESAVQAHGLTPIAEVVSYAQSGLDPKIMGLGPVESVNKALQKAELKISDIDVYELNEAFAAQALGVIQKLAETNQVPVSSIYDKANFNGGAIALGHPLGASGNRILVTLVHELNKQDGQYGVASLCVGGGMGTAVIVKAVK

SEQ ID NO: 13127 - protein, 69 aa, Vibrio campbellii AND4
MSQKTTGTVKWFNETKGFGFIQQENGPDVFAHFSAIQGDGFKTLAEGQKVEFEVTQGQKGPQAEKITVL

SEQ ID NO: 13128 - protein, 619 aa, Vibrio campbellii AND4
MQDSVIQFRDLSLNDSILSALDGMGFVSPTPIQAAAIPHLLEGADALGKAQTGTGKTAAFSLPLLNKLDLDQRKPQAIVLAPTRELAIQVAAEMKNLGKNIKGLKVLEIYGGASIVDQMRALKNGAHVIVGTPGRVQDLINRERLHLDEVKTFVLDEADEMLNMGFVDDVTAIMEHSPDSAQRVLFSATMPPMLKSICERFLRSPVTVDVAGKNHTVDKVQQQFWVVKGVEKDEAMSRLLETEETDASIVFVRTRQDTERLADWLSARGFKAAALHGDIPQSLRERTVDHIKKGVIDILVATDVVARGLDVPRINHVFNYDIPFDVESYIHRIGRTGRAGRKGKAILLVRTNQIRMLRTIERVTKSSMEEIQLPLRDQVAEARLNKLAAELEAEKEHKALDKFVDLVEKLQTSLEIEPATLAAMLLKRQQGKRPLFYVGEDPMVEAIERDKQRRKDRREGGREGGREGGRSYNNQDWDTYQLQVGREQGVQVKDIVGALANELGLGKGSIGAIKLAQGHTFVQLPKAMTSDAANKLSKLRIRQKDVGAVVCDFDDFRESRGRREGGRRDGGGYRGNREGGNRGNREGGERRFDRNRGGDNRGAYRGERGHGRGRRTQEA

SEQ ID NO: 13129 - protein, 397 aa, Vibrio campbellii AND4
MSNSFVLVINSGSSSLKFAVIDSQSGDAVLSGLGECFGLSDARMSWKFNGEKKDIAIEGDDNHHKIAIGKLVGLTEDLGLAQEIVAVGHRIVHGGEKFTQTVRITEEVTAEIEKLADLAPLHNPAGAIGIRAAIEAFPSLPQFAVFDTAFHQTMPQRAFTGAIAKELYVDFGIRRYGFHGTSHYFVSREAAKMINKPVEKSSFISVHLGNGASVCAINNGESVDTSMGFTPLSGLMMGTRCGDLDPGIIEYLLKKGWSQEKVFNSLNKASGFLGVSGLTSDARGILEAMEEGHEGAALAFQVFTYRVSKYIASYLAALDSFDGIIFTGGIGENSMPIRREILGNLKLLGFVEDVKGNEAARFGNAGVIATSELLSAKALVIPTNEEWVIAQQSVELL

SEQ ID NO: 13130 - protein, 417 aa, Vibrio campbellii AND4
MICKAVSYRQKDEIMGNDIWIVSAKRTPIGRFQGQLQGYSAPQLGAFAIKAAMDASRINQVDEVYMGCVLPAGCGQAPARQAALGAGLPHDIGCTTINKVCGSGMKSVMLAYDLIKAGSIRSAVAGGMESMTNAPYLLKGSRNGMRMGHQTTHDHMFLDGLQDAYEGHLMGVYAQQVADRLAFTREQMDEWATLSATRALEAQNQRLFDDEISPIEITTRHSVSTLDYDEHPRSIKLDKIAQLRPAFDDNGSVTAANSSAISDGAAALVLMDSQAAQHRGLLPIAVIKGHSTHARKPAEFTLAPVFAIEQLLSQLDWSIDEVDLWEINEAFAVVTQIAVRQLGIDTDKVNIKGGACALGHPIGASGARILVTLIHSLRQLQLLGVDGDKNNKKVMRGIASLCIGGGEATAIGIEIPL

SEQ ID NO: 13131 - protein, 534 aa, Vibrio campbellii AND4
MSNRTHSMKTSTTSVLSNESQAEHQDISAAEKSLDKFGLSNPALWYSGGFITLFVATALYDDELLSKLVNTGFAWSVNIFGPYWQLLLLLTFLIGLGLAAGRTGKVIIGGTTQPEMDGFRWVAIIFCTLLAGGGVFWAAAEPIAHYVNPPPLYGTQDDLHQVAVNALSQSFMHWGFLAWSIVGSLTSIVVMHLHYDKGLPLKPRILLYPILGERALRGQTGALIDACCIVAVAAGTIGPIGFLGLQVSYALNVLFDIPDGFTTQLIIILFAIVLYTVSALSGLNRGMQMLSRYNVILALALMVYILLFGPTDFIFNGYIQGVGTMLDNFIPMATYRGDEGWLSWWTVFFWGWFLGYGPMMAIFVARISRGRSIRQIITTISIVAPLTTCFWFTIVGGSGLAFEIDNPGSVSAAFEGFNLPGALLAVTQQLPMPMLVSILFLVLTTIFIVTTGDSMTYTISVVVSGETEPNAFIRTFWGAAMGVTALILISLGSGGISALQSFIVITAVPVSLILLPSLWNAPQIAIKMAKEQGL

SEQ ID NO: 13132 - protein, 588 aa, Vibrio campbellii AND4
MSRKNNKNLSILLKLNTFIAPHKWRVAAALFALFATASLTLSVGYGVRILIDQGFAQQSQQELNNAIQFIIGVTLCIAAGTFFRFYLVSSVGERVSADIRLAVFNHVISLHPSYFETNSSGDIMSRITTDTTLLQSIIGSSFSMAMRSAIMCVGAIIMLFATNFKLTLIVLASVPLVLVPILIYGRRVRTLSRKSQDTMADVGSYAGEAIEHIKTVQSFSSEQHERAAFAVEVEKAYEVGRQRVKQRAILISGVIVIVFSAIAGMLWVGGSDVIQGKMSGGDLAAFVFYAIMVASSTATISEVMGELQRAAGATERLIEILQVESDINTPINHLPITDAMPAEIKFESVNFNYPSRPDQPAIKGLNLTAEQGKVLAMVGPSGAGKTTLFELLQRFYDPQQGLVLFGGEDIRRFNPNDLRHQMALVPQQPALFSHDVFHNIRYGNPNATDEQVIEAAKKAHAHEFIEKLPDGYYSFLGERGVRLSGGQKQRIAIARAILKDPKILLLDEATSALDSESEYHVQQALEALMTDRTTLIIAHRLSTIQHADKIAVLDGGELIDIGNHQSLMQSCELYQRLVALQFNTNHSK

SEQ ID NO: 13133 - protein, 272 aa, Vibrio campbellii AND4
MKLFKTTITALLGIAIALPSLANEKAATPNVDQIKERGTLRVGMSTFVPWAMRNKQGELIGFEIDVAKRLAADSGLKVEFVPTAWDGIIPALLAKKFDVIIGGMSITPERSKSVLFTEPYSHSGVQVAANTKLAEGFSEFSDFNSRRVKIAVRRGAYTVQVARETFPKAKLLQFDDDAQAFQEVLNGNAHAVIASSPKPEHESIKHADKLFTPFSERLSKGNEAFAVRLGEEDKKAFFNQWIAARTKDGWLDERYEYWFSTLDWKDQVAQGQ

SEQ ID NO: 13134 - protein, 488 aa, Vibrio campbellii AND4
MTVTSSQNHQYFSPKEMMAEAEKFALSKANKTSSMTLGLATMAGAFIGLAFLFYITVTTGSGGTGWGLSRLAGGLAFSMGLILIVICGGELFTSSVLSSISWANKQISFGKMLSIWGKVYVGNFIGAMLLLALVSAAGMYQMDAGQWGLNALNIAQHKLHHTLMQAFALGILCNLLVCLAVWLTFSSANAMTKAVMTIMPVAMFVSSGFEHCVANMFMIPLGIVISNFAPESFWTAVGVPASQYADLNIGNFITANLIPVTLGNIVGGAVLVGLANWCIYRRPEMKAAEIEAEEVASVTSTTALTSVKESAIKNVSMVKDIMNPSPLTLNPEMPVSTALDMLLDNHLTSAPVIGIDNRLVGFLSAHDVMVDLWCQDYLPTKEQTVVDLMSRDVVAIEANERLVDVVEFLCIDKDQLYPTTSMGMTTRVTSLSLEERAKSIKVNKPQILPVLENGLMVGVVTRNEVLKALRPIYAERLDRVEEDVLVTA

SEQ ID NO: 13135 - protein, 482 aa, Vibrio campbellii AND4
ALFLIAALVLDAHTAKTALDGIKLKIISSFDWLFIISGNIFVIFCLALIVSPMGKIRLGGRDAVADYSFMSWLAMLFAAGMGIGLMFWSVAEPVAYFTGWYETPLGVEANTPEAAKLALGATMFHWGLHPWAIYGVVALSLAFFTYNKGLPLSMRSIFYPLLGDRAWGWAGHVVDILAVVATLFGLATSLGLGAQQAASGIHHVFGVEPGLGLQIVVITVVTLLAVVSVIRGIDGGVKVISNINMVIAFLLLILVTLIGWAVTLGTIPTTLMAYLENLVPLSNPFGRTDEAWFQGWTVFYWAWWISWSPFVGMFIARVSRGRTVREFLTAVLIVPTVVTLIWMSTFGGIAIDQVINNVGELGANGLTDVSLAMFQMFDVLPYGNVLSIIAVVLVLVFFITSSDSGSLVIDSITAGGKVDAPVLQRVFWAFMEGAIAVALLWVGGSEAVQALQAGAISTALPFTFVLLAMCVSLLMGMRTERP

SEQ ID NO: 13136 - protein, 199 aa, Vibrio campbellii AND4
MVISKSALLQNFQFHLPTGYHHESLGRLAHLKGTSLRDAAVLIGFVERKEGMQVILTKRADHLRHHPGQISFPGGKYETHDCSLVNTALREAEEEIGLDEKYIKVFGQLPKLPTISQFNVTPFLAFVSADYKTRIDPNEVASVFEVPANHILNPDKLYSTKFKLRNTHHRVFAIPYQQHFIWGMTAQIIESVQKHVIPR

SEQ ID NO: 13137 - protein, 357 aa, Vibrio campbellii AND4
MSKQQKILFIDRDGTLIVEPPVDFQVDRLDKLKLEPFVIPSLLSLQDAGYRLVMVTNQDGLGTDSYPQADFDAPHNMMMEIFESQGVKFDDVLICPHFDEDNCSCRKPRLGLVKEYLQGGKVDFQNSVVIGDRQTDLQLAENMAIRGIQYNSATMGWKQILQDLTVTARVAEVIRTTKETDIKVAVNLDEQGDNDISTGLGFFDHMLDQIATHGGFQMVCKVEGDLHIDDHHTVEDTALALGQALKEALGDKRGIGRFGFSLPMDECLAQCALDLSGRPYLKFDAQFSREQVGDLSTEMVVHFFRSLTDTLACTLHLSSSGNNDHHIIESLFKAFGRTLRQAIKVEGTELPSSKGVL

SEQ ID NO: 13138 - protein, 69 aa, Vibrio campbellii AND4
MSKVTGSVKWFNESKGFGFLTQDDGGKDVFVHFNAIVSDGFKTLAEGQKVSFKVEEGQKGPQATEVTPL

SEQ ID NO: 13139 - protein, 70 aa, Vibrio campbellii AND4
MSNKTTGSVKWFNESKGFGFITPDNGGSDLFVHFKSIASEGFKTLTEGQKVSFNVEQGNKGPQAGNVTPA

SEQ ID NO: 13140 - protein, 527 aa, Vibrio campbellii AND4
MSNMTNAASHAPVKEADYSAIHPPSLLKRLELTNPVFWLSGSFLSVFVLLALTNTDSLTAMVNAGSGFATQYFGAFWQVLLLLNFLIGLAIALGRTGYVRLGGLAKPDIDTFKWLSIVLCTLLAGGGVFWAAAEPIAHFVSAPPLYGEASPRASAINALSQSFMHWGFLAWAILGCLSSIVLMHLHYDKGLPLKPRTLLYPVLGDRAINGWIGDVVDACSIIAVAAGTIGPIGFLGLQISYALNSLFGLPDTFMTQSIVIVAAILMYTLSALSGVSKGIQLVSRYNIVLSVALIGYLLFFGPTSFIIDGYVQGIGGMVDNFFPMALYRGDTAWLSGWTVFFWGWFIGYGPMMAIFIARISRGRTIRQLVLSISIAAPLITCFWFSIVGGSGLAFELESPGLISSAFEGFNLPAVLLAITSELPYPMVISVLFLILTTTFIVTTGDSMTYTISVVMTGSDEPNAVIRSFWGIMMGAVAIALISMGSGGISALQSFIVITAVPVSFILLPSIWKAPSIAKRMAKEQGLV

SEQ ID NO: 13141 - protein, 497 aa, Vibrio campbellii AND4
MIENSFAITTTFVAYLLIMVAIGVYAYKRTSNSSDYFLGGRSLGPWPAALSAGASDMSGWLLLGLPGYAYAAGVEAFWLAGGLLLGTWLNWLISAKRLRTYSIQTDALTLPEFLSRRFNDKSKLIQTISAFFILLFFLFYTSSGLVAGGKLFETVFGLDYSIAVIVGTVCVVSYTLFGGFLAVSWTDLVQGLLMSAALMIVPVAVMEGGLGQLATDMHNINPELLTLWNDVKGKPLSAIAIISLMAWGLGYFGQPHILARFKASRSNKDLTTARHIAVGWTTLSMAGAMLVGLVGLVWVTGHPGTQVDDGEKIFMLLVNTVFHPVIAGVLLAAILAAVMSTADSQLLVSSSALAEDFYKQVIKPDATSEEVVMIGRVGVIVISLIALFLAMTPDSSVLSLVSYAWAGFGAAFGPAVVLSLYWSNMNRNGALAGILVGGLTIVIWKQLTGGWFEVYEIVPGIIFSTVTIVIVSKLTGGAAQEVLDQHKEYKKKLVELD

SEQ ID NO: 13142 - protein, 411 aa, Vibrio campbellii AND4
MNHLISVGALESFLVAISVLFLGHFINAKLPILKKFNIPEPIVGGLIVACIITALHFNGVDLQFDLPLQNTFMLMFFATVGLAANYTQLMKGGAKVFIFLAVASFYIIIQNGIGVSMAAALGLDPLMGLIAGSITLSGGHGTGAAWSQTFQDVYGLNNVLEIAMASATFGLIIGGIIGSPVAQRLVEKNNIESEYGPGGRDAKTHEKFPELVTYNEYEEDKVTAKKVVEKLFFLLICVTGAKYVEQWVSTLDIQWLMIPDFVYALFIGVIITNFLEVTKVRKLDTETVDMLGTVSLSLFLAMALMSLKLWNIFDLAIPFLVILGVQSVVLAIFTYYVTFKVMGSNYDAAVISGGHCGFGLGATPTAVMNMGSIVNRFGPSPQAFMVVPIVGAFFIDIVNLIILQGYISFLG

SEQ ID NO: 13143 - protein, 894 aa, Vibrio campbellii AND4
MAMININLSSLIQRLHPIAKVALEDAAALAVSEKATEVQIEHYLLSLLERPNSDFDVLLSHFDCSENLLRQSVRSTLDTNAKGNGSKPVFSALLIEWLQESWLVSSLDLSATQIRSGALLLTLVSNPLRYGQHGYASILEAVNPDSLKRNFAELTNHSIESQVATSEKTQAREDGSALSKFTTDFTGKARKGEIDPVFCRDQEIRQIVDILARRRKNNPIAVGEPGVGKTAVVEGLALKIVQGDVPDNLKGVELYGLDMGLLQAGASVKGEFEKRLNAVLDEVKNSPTPIILFIDEAHTLVGGGNQAGGSDAANLLKPALARGEVKTIAATTWSEYKKYFEKDPALARRFQLVKLDEPSPEQAALIIRGLRPAYEKSHSVYVRDDAITAAAALSARYISGRQLPDKAIDVLDTACARVNISLNAIPASVETLQQELAAQQRELEALERDALQQTGDKHSLANIPDLKLAMEATKEELAEQEAQWHKEKEQIQQMIALRSRLHELVFGQADEEELATEEESEQEQDVSPYAEMDEEAVRIAISACQEQLEAIRDGNPLVHFEVGPDEVSHVISDWTGIPMGKMLQDEAETTLKLKESLSQCIKGQEFAIDALSEGIQTAKAGLGNPDAPTGVFLLVGPSGVGKTETARAIADQMFGGERFMTTINMSEFQEKHTVSRLIGSPPGYVGYGEGGMLTEAVRQRPYSVVLLDEVEKADPEVLNLFYQVFDKGTLNDGEGRTIDFKNTLIIMTSNLATHEIESLVNQSKDIDANIIAEAIRPTLNQHFKPALLARMSVLPFVPLSDEAMTEIIHHKLNKVSQRLQSHHKLSLSYEESLVEFVLSNCRLAETGARNIDAVINRQLLPQLSTQLLVHDKDDSHTQIAVSVDEQGTLTYAFS

SEQ ID NO: 13144 - protein, 634 aa, Vibrio campbellii AND4
MKNAFSLIDKPTFFGAIALLLSIVFPLILFPAEGAEWIALAKTFMTDKLGFLYLALGLAAFVFMIYVVFSDMGQIKLGDPDEKPEFTTASWAAMLFCGGIGASILYWGCIEWAYYYQSPPFQLEAGSEEAVRWAATYGLFHWGPIAWSIYLIPALPIAYFFYVRKQPVLKVSSALMPVLGEERSKGSAGKIVDVLFIFGLLGGAATSLGLAAPLIGEGLHYLFGMPKNTYSQVLVLLICTVIFAYSSYAGMEKGIKVLSNINFWGAMGLLAFVLAVGPTIFMLETGLDSIGRMLSNFFVMATWAEPFGGYGSFDNTNFPQDWTIFYWAWWLVFAPSMGLFVARISRGRTIKQMVSGSIFFGSLGCFLFFMILGNYGLSLQLSGELDVVGILNTEGATAAIFSMLDALPMSYLVIAVFTLLCIIFTATTFDSISYILASVVQNNVTEEPMRWNRMFWAFTLSFLPTVLMFMGGLSTLQTAAIVGGLPLLGISIMLMVSAVRATTLDIRHQEDYVEPTINIEELPEFDPWSTEGMAMAKFESARDAAQEAAEEERHALAKLMQLRKRIRAFALEHNDDNEFADHHLPQEMQEELQTLLDSVAKAKERKLELSETAQQSRAEFNQIVAQSATYAAAL

SEQ ID NO: 13145 - protein, 374 aa, Vibrio campbellii AND4
MIIGVPKEIKNHEYRVGMIPASVRELISHGHQVLVETNAGTGIGFTDDDYIAVGASILSTATDVFAKADMIVKVKEPQAVERAMLREGQILFTYLHLAPDFPQTDELIKSKAVCIAYETVTDNMGRLPLLAPMSEVAGRMSIQAGAQTLEKSHGGRGLLLGGVPGVEPAKVVVVGGGVVGANAARMAVGLRADVTILDRNVDTLRKLDEEFQGRAKVVYSTEDAIEKHVLEADLVIGAVLIPGAAAPKLVTKEHIAKMKPGAAVVDVAIDQGGCFETSHATTHAEPTYIVDDVVHYCVANMPGAVARTSTFALNNATLPYIVKLANKGYREALIEDKGFLEGLNVIHGKVTCKEVAESFELEYIEPAQAIAMFN

SEQ ID NO: 13146 - protein, 72 aa, Vibrio campbellii AND4
MATGTVKWFNNAKGFGFICSDEEEGDIFAHYSTIQMDGYRTLKAGQQVSYEIEKGPKGSHASSVVPIECQAK

SEQ ID NO: 13147 - protein, 391 aa, Vibrio campbellii AND4
MTNQTRNVVVVDCLRTPMGRSKGGAFRHTRAEDLSARLMKGILARNPQVNPSEIEDIYWGCVQQTLEQGFNIARNAALLAGLPIEIGAVTVNRLCGSSMQALHDGTRAIMTGDAEICLIGGVEHMGHVPMNHGVDFHPGMSKTVAKAAGMMGLTAEMLGKLHGISREQQDEFAARSHARAQAATLEGRFKNEILPIEGHAADGTLFTLDYDEVIRPETSVEGLSQLRPVFDPANGTVTAGTSSALSDGASAMLIMSEEKANQLGLKIRARIKAMAIAGCDPSIMGYGPVPATQKALKRAGLSMEDMDLVELNEAFAAQSLPCAKDLGLLDVMDEKVNLNGGAIALGHPLGCSGSRISTTLINLMEAKDAKYGLATMCIGLGQGIATVFERP

SEQ ID NO: 13148 - protein, 69 aa, Vibrio campbellii AND4
MSNKATGTVKWFNEAKGFGFISQESGDDLFVHFRSILGDGFKKLVEGEQVSFTVGHGPKGLQAENVMAI

SEQ ID NO: 13149 - protein, 69 aa, Vibrio campbellii AND4
MSNKATGTVKWFNEAKGFGFISQESGDDLFVHFRSILGDGFKKLVEGEKVSFTVGHGPKGLQAENVTAL

SEQ ID NO: 13150 - protein, 407 aa, Vibrio campbellii AND4
MDIILGVVMFTLIVLALVLVILFAKSKLVPTGDITISVNDDPSLAIVTQPGSKLLSALAGAGVFVSSACGGGGSCGQCRVKVKSGGGDILPTELDHITKGEAREGERLACQVAMKTDMDIELPEEIFGVKKWECTVISNDNKATFIKELKLQIPDGESVPFRAGGYIQIEAPAHHVKYADYDIPEEYRQDWDKFNLFRYESKVNEETIRAYSMANYPEEHGIIMLNVRIATPPPNNPEVAPGIMSSFIWSLKEGDKCTISGPFGEFFAKDTDAEMVFVGGGAGMAPMRSHIFDQLKRLHSKRKMSFWYGARSKREMFYVEDFDGLAAENDNFVWHCALSDPLPEDNWDGYTGFIHNVLYENYLRDHEAPEDCEYYMCGPPMMNAAVIGMLKDLGVEDENILLDDFGG

SEQ ID NO: 13151 - protein, 860 aa, Vibrio campbellii AND4
MRLDRFTSKFQIAISDAQSLALGRDHQYIEPVHLMVALLDQNGSPIRPLLTMLDVDVSHLRSKLSEMLDRLPKVSGIGGDVQLSSSMGTLFNLCDKVAQKRQDSYISSEVFLLAAIEDRGPLGQLMKEIGLTEQKVSQAIEKIRGGQKVNDPNAEELRQALEKFTIDLTERAEQGKLDPVIGRDDEIRRTIQVLQRRTKNNPVIIGEPGVGKTAIVEGLAQRIINNEVPEGLRGRRVLSLDMGALVAGAKYRGEFEERLKSVLNELAKEEGNVILFIDELHTMVGAGKGEGSMDAGNMLKPALARGELHCVGATTLDEYRQYIEKDAALERRFQKVLVDEPSVEDTIAILRGLKERYELHHHVEITDPAIVAAASLSHRYVSDRQLPDKAIDLIDEAASSIRLQIDSKPESLDKLERKIIQLKIEQQALSNENDDASEKRLDVLNEELNEKEREYAELEEVWNAEKAALSGTQHIKSELEQARMDMDFARRAGDLNRMSELQYGRIPELEKQLDLATQAEMQEMTLLRNKVTDNEIAEVLSKQTGIPVSKMLEAEKEKLLHMEDVLHKRVIGQAEAVEVVSNAIRRSRAGLSDPNKPIGSFLFLGPTGVGKTELCKTLASFMFDSEDAMVRIDMSEFMEKHSVARLVGAPPGYVGYEEGGYLTEAVRRKPYSVILLDEVEKAHPDVFNILLQVLDDGRLTDGQGRTVDFRNTVVIMTSNLGSARIQENFATLDYQGIKNEVMDVVSKHFRPEFLNRVDESVVFHPLGQEHIKSIASIQLEHLAKRLEEKGYQLEVSEKALELISQVGFDPVYGARPLKRAIQQNVENPLAKSILAGQIVPDEKVQLIVNNDQIIAHQPSH

SEQ ID NO: 13152 - protein, 404 aa, Vibrio campbellii AND4
MKLPIYLDYSATCPVDPRVAEKMVQYMTMDGTFGNPASRSHRYGWQAEEAVDTAREQIADLLNADPREIVFTSGATESDNLAIKGAAHFYAKKGKHVITCKTEHKAVLDPCRQLEREGFEVTYLQPESNGLIDLDKLQAAMREDTVLVSIMHVNNEIGVIQDIAGIGELCRARKIVFHVDAAQSVGKLPIDVQELKVDLISFSAHKAYGPKGIGALYVRRKPRIRLEAQMHGGGHERGFRSGTLPTHQIVGMGEAFRLAKEDMQKDYEHALALRNRLLDGVKDLEAVTVNGDLEQRVPHNLNVSFAFVEGESLLMSLKDLAVSSGSACTSASLEPSYVLRALGLDDELAHSSVRFSFGRFTTEAEIDYAIEQIRVAVTKLRDMSPLWDMYKEGVDLSTVEWAHH

SEQ ID NO: 13153 - protein, 70 aa, Vibrio campbellii AND4
MSNKATGSVKWFNESKGFGFLTQDNGGADVFVHFQAIVSEGFKTLVEGQKVSFSVEQGPKGLQAANVVAG

SEQ ID NO: 13154 - protein, 638 aa, Vibrio campbellii AND4
MGKIIGIDLGTTNSCVAVLDGDKPRVIENAEGERTTASVVAYTDGETLVGQPAKRQAVTNPTNTLFAIKRLIGRRFEDEEVQRDIEIMPYKIVKADNGDAWVEAQGQKMAAPQVSAEILKKMKKTAEDFLGEEVTGAVVTVPAYFNDAQRQATKDAGRIAGLDVKRIINEPTAAALAYGLDKQGGDRTIAVYDLGGGTFDISIIEIDEVEGEKTFEVLATNGDTHLGGEDFDNRMINYLVEEFKKEQGIDLKTDPLAMQRVKEAAEKAKIELSSTSQTDVNLPYVTADATGPKHMNVKVTRAKLESLVEDLVQRSLEPLKVALADADLSVGDITDVILVGGQTRMPMVQEKVAEFFGKEARRDVNPDEAVAMGAAVQGGVLAGDVKDVLLLDVTPLSFGIETMGGVMTKLIEKNTTIPTKADQVFSTAEDNQSAVTIHVLQGERKQATYNKSLGQFNLEGIQPAPRGMPQIEVTFDLDADGILNVSAKDKATGKEQKITIQASGGLSDEEIEKMVQEAEANKEADKKFEELVTARNQADQMIHGTRKQVEEAGEALPADEKEKIEAAISELEEARKGDDKEAIDAKVQALMAAAQKLMEIAQQQAQAQQAQGADADAQQAQDDDVVDAEFEEVKDDKK

SEQ ID NO: 13155 - protein, 556 aa, Vibrio campbellii AND4
MSEADARPSNFIRQIIDKDLADGKHTSVHTRFPPEPNGYLHIGHAKSICLNFGIAQDYQGQCNLRFDDTNPEKEDIEYVESIKKDVNWLGFEWDGEVCYSSNYFDKLYEYAIELINKGLAYVDELSPEQIREYRGTLTAPGKPSPYRDRPIEENLALFEKMRAGEFEEGKACLRAKIDMGSSFMVMRDPVIYRVRFATHHQTGDKWCIYPMYDFTHCISDALEGITHSICTLEFMDNRRLYDWVLDNITIDSRPHQYEFSRLNLEYTVMSKRKLNQLVTENLVDGWDDPRMPTVSGLRRRGFTSASIREFCKRIGVTKQENMIEFGSLESCIRDDLNENAPRAMAVLDPVKLVIENFEEDAVETLTVANHPNKPEMGEREVPFTREVWIEREDFREEANKKYKRLVLGKEVRLRGAYVIKAKRIEKDAEGKITTIFCTYDADTLGKNPADGRKVKGVIHWVSADKALPAEIRLYDRLFTVPNPAAADDFAATINPESLVVLNGFVEPSLATSEAEKGYQFERTGYFCADSKDSSANKLVFNRTVGLRDTWAKIETQ

SEQ ID NO: 13156 - protein, 554 aa, Vibrio campbellii AND4
MCSVFGILDIKSDAAALRPIALEMSKKLRHRGPDWSGIYSSQRAILAHERLAIVGLNSGAQPLYSPDNKLILAVNGEIYNHKEIRARYEGKYEFQTDSDCEVILALYQDMGADLLEELNGIFAFVLYDEEKDEYLVGRDHIGIIPLYQGYDEHGNYFVASEMKALVPVCKTVSEFPPGCHYSSKDTEPQRYYTRDWNEYAAVQGNSTSKEELTEALEAAVKRQLMTDVPYGVLLSGGLDSSITSAVAKRFAAMRIEDDEKSEAWWPQLHSFAVGLEGAPDLKAAREVADQIGTVHHEMTYTIQEGLDAIRDVIYHIETYDVTTIRASTPMFLMGRKIKAMGIKMVLSGEGADEIFGGYLYFHKAPNAKEFHEETVRKLLALNMFDCARANKSLAAWGVEGRVPFLDKEFIDVAMRLNPTDKMCGNGKMEKHILRECFEHYLPESIAWRQKEQFSDGVGYSWIDTLKEVAEQKVTDQQMETAQFRFPYNTPTTKEGYVYREIFEELFPLPSAAECVPGGPSVACSSAKAIEWDESFQNCVDPSGRAVQTVHNDAY

SEQ ID NO: 13157 - protein, 391 aa, Vibrio campbellii AND4
MKFVDEAVVKVQAGDGGNGVVSFWREKFITKGGPDGGDGGDGGDVYIQADENLNTLIDYRFQRFYEGERGENGRGGNCTGKRGKDIILRVPVGTRAVDIHTNEIVAEVAEHGKKVMIAKGGWHGLGNTRFKSSVNRAPRQRTLGTKGEIREIRLELLLLADVGMLGLPNAGKSTFIRAVSAAKPKVADYPFTTLIPSLGVVSVVPEKSFVVADIPGLIEGAADGAGLGIRFLKHLERCRVLLHMIDIMPVDQSDPVQNALTIIDELEQYSEKLAGKPRWLVFNKTDLMLEEEANEKIQEILDALGWEDEYFKISAINRNGTKDLCYKLADFMENLPREEEEVAEEDKVNFMWDDYHKDAMAGKDVITEEDDDDWDDWDDEEDDGHVVYVRD

SEQ ID NO: 13158 - protein, 394 aa, Vibrio campbellii AND4
MISNKTIDIVKATAPIIAETGPKLTAHFYDRMFTHNPELKDIFNMSNQRNGDQREALFNAICAYAANIDNLPALLGAVEKIAHKHTSFMITEDQYQIVGTHLLATIDELLSPGQEVLDAWAEAYGVLANVFIQREEQIYQENAALQGGWRGLREFELVGKQLESENICSFVFKPTDGDKVSEYKPGQYLGIYINSDKFDNQEIRQYSLSSAVQEDTYRISVKREEGGKVSNYLHDELNIGDKVQLAAPAGDFFMDVDAATPVVLVSAGVGLTPTLSMLESLSEHQAPVTWVHAAENGQQHAFKHHVNQLVNAKENMNSLVWYNQPTAEDKIGEDFNFSGFVNLNEIEVALKQDKVQVYFCGPVGFMQHVAKQLLDLGVPQEQFHYECFGPHKVV

SEQ ID NO: 13159 - protein, 802 aa, Vibrio campbellii AND4
MSVQRQLHKFGGSSLANPKCYQRVVSILKEYSAENDLVVVSAAGKTTNRLIEFLDGLDNDGRIAHEALQGLRQFQTELVEALLEGQVKAQLLALLQDEFSTLAELTVPLTDTQKAAVLGHGEVWSSRLLAALLSQEDLPAVAQDSRVFLRAEAGTQPEVDRARSYELIKDALIQHKHKRVIITGFMAQNQAGETVLLGRNGSDYSATIIGALAEVSSVTIWSDVAGVYSADPRLVSDACLLPLLRLDEASELARLAAPVLHSRTLQPVAQSAMDLNLKCSYQPESGSTRIERVLASGRGAKIITSLDDVLLVQLSFLHGHDFDRAQKEVLQALKRVQLEPLAFEAQEDQCTLRLAYTAEIAGGALAYLQDLAVEAEIKLKEGYSLVAAVGAGVTKNANHCFGFYQQLKRAPVEFISEAESGLSLVAVLRRAEVEELVQSIHSQLFQAQKRVAIALCGKGNIGSSWLSLFAEQKEELEKRHGMSFDLVAVVDSQTYWFDENGIDAETVAQRFNDESIENDGDWLTKLSAVQNFDEAVVLDVTASKDLATRYVEVAQQGIHLISANKVAGSAGSQYYHKVQDAFAKIGRHWLYNATVGAGLPINHTVRDLRESGDDIVAISGVFSGTLSWLFQQFDGSVSFAELVDLAWQQGLTEPDPRADLDGSDVMRKLVILARESGLDIEPENVKVESLVPEELRELSLDAFFDRADVLSEMLQARLVKALRNDQVLRYVARLERNGNATVGVEALSREHALANLLPCDNIFAIESKWYKDNPLVIRGPGAGREVTAGAIQSDLNRLAGLF

SEQ ID NO: 13160 - protein, 111 aa, Vibrio campbellii AND4
METIDKIKQQISENTILLYMKGSPKLPSCGFSSQASQALMACGEKFAYVDILQNPDIRAELPIYAQWPTFPQLWVEGELIGGCDIILEMFQKGELQPLIKEAAARVDGDAE

SEQ ID NO: 13161 - protein, 721 aa, Vibrio campbellii AND4
MSRTIMLIPASAGVGLTSVSMGVLRAMERKGVKVSFYKPISQPRSGGDQPDLTSTIVGCNSDMKIGQPLAMSVAENLIGNDNMDELLETVVERYNQINKDADVTLIEGLVPTRKHPFANQVNAEIAATLGAEIVLVATPGTDNPAQLKERIEVACSNFGGTKNKNISGVIINKLNAPVDEAGRTRPDLSEIFDDADSAKQNEMKVMEIFNTSPIRVLGCVPWSIDLIATRATDMAKHLNADIINEGEINTRRIKSITFCARSLPNMIAHFRPGSLLVTSADRPDVIVAASLAAMNGVDIGAILLTGGYDIPEEIEGLCKPAFETGLPIFKAQGNTWQTSLNLQSFSIEVPADDKERIEFINEHVAGHIDGNWIESMTEGTQKSRRLSPPAFRYQLTEFARKAGKRIVLPEGDEPRTVKAAAICAERGIAECVLLGNPDEIRRVAEQQGVTLGAGVTIINSDEVRENYVARLVELRGAKGMTEVVAREKLQDSVFLGTMMLENNEVDGLVSGAVHTTANTIVPPFQIIKTAPDASIVSSVFFMLLPDQVLVYGDCAINPDPTAEQLAEIAIQSADSAAAFGIDPRVAMISYSTGESGKGADVDKVREATKIAQEKRPDLVIDGPLQYDAAIMENVAASKAPNSPVAGKATVFVFPDLNTGNTTYKAVQRSADLVSIGPMLQGMRKPVNDLSRGALVDDIVYTVALTAIQADQADQAREKVVN

SEQ ID NO: 13162 - protein, 398 aa, Vibrio campbellii AND4
MSKLVLVLNCGSSSLKFAVVDAETGAEHLSGLAECLHLPEARIKWKLDGKHEAQLGDGAAHEEALAFMVETILASKPELKANLGAIGHRIVHGGEQFTQSALITDEVLKGIQDAATFAPLHNPAHIIGIEAAMHNFPELKNVAVFDTAFHQTMPEESYLYALPYNLYKEHGIRRYGMHGTSHLFITREVAGLLNKPVEEVNIINCHLGNGASVCAIKNGQSVDTSMGLTPLEGLVMGTRCGDIDPAIVFHLHDALGYSVEQINNMLTKESGLAGLTEVTSDCRFVEDNYGKKEEATRAMDVFCHRLAKYVAGYTASMEGRLDAITFTGGIGENSGPIREMVLNRLGIFGIEVDGESNLKARFGGEGTITTANSRIPAMVISTNEELVIAEDTARLTGL

SEQ ID NO: 13163 - protein, 449 aa, Vibrio campbellii AND4
MSAFNVAKFGGTSVANFEAMSRCSTIIKNNPNTRLVVSSACSGVTNLLVELANGVQDQEHRAEVLQKLADIHESILARLQDAAKTATEVYEILDTVTSLAEAASIQASSKLTDHLVACGELMSTHVLAQLMREKGLNAVRFDIRDILKTDGNFGCAEPNVETIAQRAQEKLVPLCQQYVVITQGFIGSDEEGNTTTLGRGGSDYSAALIAEGVKAAGLEIWTDVPGIYTTDPRIASKAAPIPEISFSEASEMANFGAKILHPSTLVPALRHDIPVFVGSSKEPEKGGTWIRHQVESSPLFRALTLRDNQTMVTLRSVNMFHAYGFLAKVFEILAKHKISVDLITTSEISVSLTLDQTDTSGGAPQLPQAVREELEELCKVEVEHDLCLVALIGNNMSECKGYAKQVFGTLEDFNLRMICYGASPHNLCFLVHESVSRQAIQKLHTELFE

SEQ ID NO: 13164 - protein, 320 aa, Vibrio campbellii AND4
MSLPKVVFLDRATIPAQIQVPRPSFAHDWMEYELTSPEQVVERLTDADIVISNKVVLDQAVLTQLPKLKMIAIAATGFNNVDVNFCTKQNIAVANVRGYATRSVPEHVIAMLFALRRNVFGYHQDIAAGEWQRNKQFCFFTHPIGDIAGSTLGVIGSGALGQATAQLAKALGMNVLFAERKGVTECREGYHAFNQVLEQADAITLHCPLHDETRNLIGEAELKRMKPTSILINTGRGGLVDEQALVDGLKQREIAAAGVDVFTQEPADESNPLVANIHLPNLLLTPHVAWGSDSSIQRLAEILIENVNAFARGESLNRLA

SEQ ID NO: 13165 - protein, 409 aa, Vibrio campbellii AND4
MAKVSLEKEKIKILLLEGLHPSSVEVLQAAGYNNIEYHKGSLPEEELIEAVKDVHFIGIRSRTNLSEEVINAANKLVAIGCFCIGTNQVDLEAAAKRGVPVFNAPFSNTRSVAELVLGQILLLLRGIPEKNALAHRGIWKKSADASYEARGKRLGIIGYGHIGTQLGIIAENLGMRVYYYDIENKLSLGNATQLFTMSELLNKCDVVSLHVPETPETKNMMSEEEFARMKPGAIFINAARGTVVDIPALCHSLESGHISGAAIDVFPVEPKTNADAFESPLQKFDNVILTPHVGGSTQEAQENIGVEVSGKLAKYSDNGSTLSSVNFPEVSLPEHRECSRLLHIHKNRPGILTQINTIFAEDGINIAGQYLQTAAEIGYVVIDVETSRAEEALVKLKGIEGTIRARILH

SEQ ID NO: 13166 - protein, 320 aa, Vibrio campbellii AND4
MADKEFDIDAFFASNGEVSSPENQHCGFIAIVGRPNVGKSTLLNKILGQKISITSRKPQTTRHRIMGVDTDGDYQAIYVDTPGLHIEEKRAINRLMNRAANSSLSDVNLVFFLVDGTHWTNDDEMVLTKLQKSNFPVVLCVNKVDNVQDRNEVMQHMMEMSKRMDFVDVVPISAKHGKNIEVLRKHVRDHLPEATHHFPEEYVTDRSQRFMASEIVREKLMRFTGEELPYSVTVEIERFDYNPDTDGFHINALILVERHGQKKMVIGKGGEKIKTIGREARLDMEELFGRKVYLETWVKVKSGWADDERALRSLGYIDDL

SEQ ID NO: 13167 - protein, 308 aa, Vibrio campbellii AND4
MARPIIAKAQVEVARKVGADALCHGCTGKGNDQVRFEGAFAALAPDLHVIAPWREWDLVSREACLDYLAERNIPCSASLTKIYSRDANAWHISTEGGVLEETWNAPNEDCWVWTVAPEQAPNEAEYITLKVAKGEVVEVDGETMTPYNALVYLNEKGAKHGVGRIDIVENRLVGMKSRGCYETPGGTIMMEALRAVEQLVLDKSSFEFREELGLKASHLVYDGRWFTPLCTSILAASEALAQDVNGEVVVKLYKGQATVTQKRSDNSLYTEAFATFGEDEVYDQSHAEGFIRLYSLSSRIRALNSQKQ

SEQ ID NO: 13168 - protein, 233 aa, Vibrio campbellii AND4
MKKQRAFLKWAGGKYGLVEDIQRHLPPARKLVEPFVGAGSVFLNTDYDHYLLADINPDLINLYNLLKERPEEYISEAKRWFVAENNRKEAYLAIRAEFNKTDDVMHRSLAFLYMNRFGFNGLCRYNKKGGFNVPFGSYKKPYFPEAELEFFAEKASKATFVCEGYPETFSRARKGCVVYCDPPYAPLSNTANFTSYAGNGFILWMTKRHWLILQREPQLNVVSLCLFQTTTPH

SEQ ID NO: 13169 - protein, 306 aa, Vibrio campbellii AND4
MNDLFTKTDYSLYSNSMSFLRRPYVKNPVSVDADVVVLGVPLDMATSGRPGARMGPDAIRRASVNLAWEGKKFPWDFNVFDKLKVIDAGDLVFDCGDAEDFTYRLEAATNEILKSGKTMLGLGGDHFITLPILRAYAKHHGQMALIHFDAHTDTYANGSSYDHGTMFYHAPKEGLISAKNSVQIGIRTEYAQHDHGFNVINAMQANDMSVTEILAEIHRTVADKPVYVTFDIDCLDPAFAPGTGTPVCGGLNSDKILKIIRGFAGMNIVGMDVVEVSPPYDHSDVTALAGATIALELLYAYASNRG

SEQ ID NO: 13170 - protein, 409 aa, Vibrio campbellii AND4
MELTTTVTELRYALDTFFFLISGALVMWMAAGFAMLEAGLVRSKNTTEILTKNICLYAIACTMFLLVGYNIMYVDNGEGGWLPSFGALIGTQSEGADHSLESDFFFQVVFVATAMSVVSGAVAERMKLWSFLIFSAVLTAFIYPMEGYWTWGGGFLSEAGFSDFAGSGIVHMAGASAALAGVILLGARKGKYGKNGEIHPIPGSNMPLATLGTFILWFGWFGFNGGSQLMVSDFENATAVGQIFLNTNAAAAAGAIAALLVCKTTWGKADLTMVLNGALAGLVAITADPLSPSPLYAVAIGAVSGALVVFSIIALDKAKIDDPVGAISVHGVCGFFGLMVVPLSNADATFGAQLLGAAVIFAWVFGASLVVWAILKATIGIRVSEDEELEGMDMHDCGVGAYPEFVSVK

SEQ ID NO: 13171 - protein, 282 aa, Vibrio campbellii AND4
MSTDFKPAEFVQTMINVGEAKINTSTRDLILRGTMAGIILSLAVVVAITTIVQTGVGVVGALVFPVGFVILSVMGYDLVTGIFGLAPLAKFANRPGITWGRILRCWGLVGLGNLIGSLIVAYLVAISLTGNFSLELNAVAKKFIAVSTARSLGFENMGMDGWITCFVRGIFCNLMVCLGVIGNMTARSVSGRVAMMWFPIFIFFALVFEHAVVNMFLFPLGMILGADFGIATWLNFNLIPTILGNIVGGLVMTCIPLYLTHVKTAPSLNAEQEVKAESVIAK

SEQ ID NO: 13172 - protein, 568 aa, Vibrio campbellii AND4
MKQKPLIDAFVTIVGEENVLTDHIKTKYYRSGFRSGGGTALAVIFPNTVLEQWKVIQQCVDNNCIIIMQAAKTGLTEGSAPSGDDYDRDVVVINITKMKQIFLLDGGKQAVCLPGASLHSLEKELRAVNRAPHSIIGSSSLGATVVGGIANNSGGALVKRGPAYTELALFAQVDKDGQLKLVNHLGIEGLGSTPEEILQNIQEGNFNPDKVIHDERMASDKEYEERIRDISSDIPSRFNADERRLYEASGCAGKLGVFAVRVDSYPIPEKELVFYLGTNDPDKLTKLRKDFLTQFENLPEMGEYLHRDIFNMAEEYGKDVFLSIDLLGTDRLPKLFSLKAKVENVLERIPLVSKYLPDTILYYASKLFPQHLPKRMLEFRDKYEHHLVLKMSDAGIAEAKKYLKEVWAAGHDSDFFVCTPEEGKKAYLHRFAAAGAAIRYETIHRKQVEDIVALDIALRRNDNEWLETLPEEVSKNLVKSLYYGHFICYVFHQDYVFKKGTDTKLMKKLMLEHLNSRGAKYPAEHNVGHLYEAENSLQKFYHQLDPTNTFNPGIGKMDRYKRNCNCCV

SEQ ID NO: 13173 - protein, 314 aa, Vibrio campbellii AND4
MPDMKLFAGNATPELAQRIADRLYISLGDASVSRFSDGEVAVQINENVRGSDVFIIQSTCAPTNDNLMELVVMIDAMRRASAGRITAVIPYFGYARQDRRVRSARVPITAKVVADFLSNVGVDRVLTIDLHAEQIQGFFDVPVDNIFGTPVLLEDMQSRGLENPVVVSPDLGGVVRARATAKALGDIDIAIVDKRRPRANVSEVMNLIGDVEGRDCVIVDDMIDTGGTLCKAAEALKERGAKRVFAYATHAVFSGNAADNIKNSVLDQVIVTDSISLSKEMAATGKVTTLSLSRMLAEAIRRISNEESISAMFN

SEQ ID NO: 13174 - protein, 540 aa, Vibrio campbellii AND4
MDSQRNILLIALALVSFMLFQKWQVAKNPAPQAIEQAQSSSTLPAPSFADELDPVPGQQQASAKTITVTTDVLTLSIDTLGGDVVHANLNKYSAELDSSDPFVLLKDTKGHQFIAQSGLVGPQGIDLSSTNRPSYKVSADSFTLPDGQDELRVPMTFTANGIEYIKTYVFERGSYALNVEYDIVNNSGNNATLGMYAHLRQNLMDDGGSITMPTYRGGAYSTEDVRYKKYSFDDMQDRNLSINLADGKGWAAMIQHYFAAAWIPRDEPGTNLYTRVIGNLGDIGVRIPNKTIATGDQTTFKATLWVGPKLQNEMAAVAPNLDLVVDYGWLWFLAKPLHSLLAFIQSFVGNWGIAIVCLTFIVRGAMYPLTKAQYTSMAKMRMLQPKLQAMRERIGDDRQRMSQEMMELYKKEKVNPLGGCLPLVLQMPIFISLYWALMESVELRHSPFFGWIHDLSAQDPYYILPVLMGVSMFIIQKMSPTTVTDPMQQKIMTFMPLMFTFFFFMFPSGLVLYWLVSNIVTLIQQTLIYKSLEKKGLHTK

SEQ ID NO: 13175 - protein, 323 aa, Vibrio campbellii AND4
MSTQFDFRAAAKQVLDIEISALQQLDQYFDHQFEQACDLILSNNGKVVVMGMGKSGHIGTKIAATLASTGTSAFFVHPGEAAHGDLGMISAGDIVIAISNSGESHEILSLFPVLKRLNIKIISMTGKPASNMAKLSDLHLQITVPKEACPLGLAPTSSTTATLVMGDALAVALLQARGFRAEDFALSHPGGTLGKKLLLKLSDIMHFGNALPKVPPNALIRDALLEISEKGLGMTAIVDEHDAMLGIFTDGDLRRTLDKRIDIHTTTIDEVMTQSPTTAHPEMLAVEGLNLMQDKNINALILCDDNKIVGALNMHDLLKAGVM

SEQ ID NO: 13176 - protein, 518 aa, Vibrio campbellii AND4
MQIGVPREILAGESRVAASPKSVEQLIKLGFDVVIESQAGVLASFDDAAYQAAGAKIVSSKEVWLSGLILKVNAPLVDKEKGIDEIASLQDGATLVSFIWPAQNAELMEKLSSKSINVLAMDSVPRISRAQALDALSSMANIAGYRAVVEAAHEFGRFFTGQITAAGKVPPAKVLVAGAGVAGLAAIGAAGSLGAIVRSFDVRPEVKEQVESMGAEFLTVDFKEDSGLGDGYAKEMSDEFNKKAAELYAEQAKDVDIIITTALIPGKPAPTLITKEMVDSMKAGSVIVDLAAANGGNCEYTVKDQVFATANGVKIVGYTDMVSRLPTQSSQLYATNLVNLLKLLCKEKDGNININFEDVVIRGVTVVKEGEITWPAPPIQVSAQSQAKVQEPIKPDPKVETPTSPVKKFGALAIGLGAFAWVASVAPAAFLSHFTVFVLACVVGYYVVWNVTHALHTPLMSVTNAISGIIVVGALLQIGQGNGVVTFLSFIAVLIASINIFGGFTVTKRMLEMFRKDK

SEQ ID NO: 13177 - protein, 404 aa, Vibrio campbellii AND4
MQNIGMSSKLDNVCYDIRGPVLKHAKRMEEEGHKILKLNIGNPAPFGFDAPDEILVDVIRNLPTSQGYCDSKGIYSARKAVVQYYQRKGILSLDVEDVYVGNGVSELIVMAMQALLNNGDEMLIPAPDYPLWTASVALSGGKPVHYLCDEGADWYPDLEDIKKKITPKTRGIVLINPNNPTGAVYSRDFLLEVIEIARQHNLIIFADEIYDKVLYDGATHTSVATLTEDVLVMTFNGLSKAYRVCGFRGGWMFLTGPKHLAQGYINGLELLSSMRLCANVPMQHAIQTALGGYQSINELILPGGRLLEQRNRAYELINQIPGVSCVKPKGAMYLFPKIDTKMYNIKNDQQMVLDFLKQEKVLLVQGSGFNWPKPDHFRIVTLPHVEDLEIAISRFERFLTTYSQ

SEQ ID NO: 13178 - protein, 350 aa, Dehalococcoides sp. VS
MDLPCGTRNFSYKTDMAIFRTKTHWAMLIGFLILLFSLPFNISSYWLGIMNLIGITIVAAAGLNILMGYCGQLSVGHAGFIAVGAYTTAILASKLGVPFPFDMIASGIMAGLVGMLFGLPSLRVKGFYLAISTIAAQFIIIWVINHWSSLTGGFNGIVIPPINLFNFDFTTQGSQYFIIMLVAVLAIFFMKNIARTRIGRAFVAIRDNDLAAEVMGINVFKYKLLAFFIGCFLAGVAGSLMAHWIGYLTAENFTLSDSILYVGIVIIGGLGTGVGPIFGTLFIRLLQQGVQYVSPLMGSAFPQLPSGFAAGLGPMVFGLAIVLFLVLEPRGLAHRWQLFKSSYRYWPFSY

SEQ ID NO: 13179 - protein, 569 aa, Dehalococcoides sp. VS
MKLTGAQIVCESLLKEGADVIFGYPGGVLLPLYDTFPQYPALRHILTRHEQGAAHAADGFARVTGKVGVCLATSGPGATNLITGIANAYMDSIPMVAITGQVTRNLIGKDAFQEIDITGITLPITKQNYLVTRASALADTIKEAFYLARTGRPGPVLIDIPKDVFIEQAEFEYPDEPDLPGYKPVIKGNLMQIQKAAKLIETAEKPVIIAGHGVNISGANEELKTLAENCQLPVITTLLGVSSFPEDHILSYGMLGMHGMAYANMAVAATDLIIAIGMRFDDRVTGKLSSFAPHASVIHIDIDPAEIGKNVRVDVPIVGDVKTVLKSLNKQVECVQHPDWLRQLENWRREHPPLSIRHTDLILPQYIVQQISEATGGNAIVVTGVGQHQMWAAQHYTYIRPNSLVTSGGLGTMGFDLPAALGAKVGCPDETVWCIAGDGGFQMNMQELATIVQERAAVKIAVFNNGYLGMVRQWQDLFYNKNYVATPLGCPDFIKIAEAYGIPALNVKRKEEVRPAIEQAMSAEGPFLLNFVIEPEENVYPMVPPGAALHEVLEEPKKEVSACPRRSIP

SEQ ID NO: 13180 - protein, 251 aa, Dehalococcoides sp. VS
MDSEILLEVKDLHVEVDGREILHGVDLILPAGETHVIFGPNGSGKTTLLMTLMGFPRYKITKGQLIFNGKDITHVPLDERARLGIGISFQRPPVVRGVKLREMVRSSLRTKEDSGVIDELAKKANMINFLERDVNHGFSGGEIKRSELLQLLAQGPDMVLLDEPESGVDLENIALIGSLINDLLEKKHPIRERKRGGLVITHTGHILDYVNARTGYVLCHGRINCTGDPRDMLETIKQNGYQECVECPRKI

SEQ ID NO: 13181 - protein, 127 aa, Dehalococcoides sp. VS
MRIMLKSKIHRATITDACIDYEGSITIDKNLMQVANLLPYEQVHVVNVNNGTRLETYVIEGPAGSGQICLNGAAARMGMKGDKVIILGYSLITEEDTLTHQPNLVYVDGLNRITKVKNGVASQNLEV

SEQ ID NO: 13182 - protein, 526 aa, Dehalococcoides sp. VS
MKKVLVSDALSATGLSPLKEIAQVDVKTGLKPEELVSIVGEYDALLVRSQTQVTADIINAGKKLQVIGRAGVGVDNIDLKAATGNGIIVVNAPTGNTISATEHTLALMLSMARHIPRANASLKSGQWKRNEFVGSELKGKTLGIVGLGNIGSEIAKRALALEMRVIGYDPFISMERAKKLQAELVPFEDLLKQADFITLHVPMTGQTKGLIGPKELEMMKPTVRLINTSRGGIIDEEALATAIKEKRIGGAAIDVFSKEPCTESCLFECDNIIVTPHLGASTAEAQELATSDVVKQVIDVFEGRPARYAVNAPYISAESLPVVGPFMPVARTVGSLVSQLTDGHMKNVTIKYCGELAAYDTTALKALVLGGILEHISEERVNVVNADIVASQRGLGVTEQKESACQNFSSLITVTIDTDNGKSNTVAGSLVRGDVHIVKLNDYWIDIVPTGGYFLFADHIDRPGLIGAAGKITGDADINISYMHLSRQKARGQALMILALDEPLPEKQRQQLLSLQDVQTVQVVKI

SEQ ID NO: 13183 - protein, 410 aa, Dehalococcoides sp. VS
MNQKAVFIDRDGTIVEDVPYCNSPRKIRLLNGAGKAIKRLNDQGYLVILITNQSGVARGYFSEETLGEIHNKLREELDCFGAHLDDIFYCPHHPSEGCTCRKPSTGLIERAIEKHGINNNLSYFIGDRLIDMQAANRTGCKAVLVPYAPPETDYFKSDVTPDSRPSFLAGDFTAAVDWILADAAGEAAVSVIIPTLNEEHNICCVLPRLRRVPGITEVILVDGKSTDRTVENALRLWPEIKVINQPGRGKGNAMRVGFEAACGDIVVTLDADGSLAPEELPRYIEPLFDGYQMVKGSRFCRGGGTSDMPLFRRLGNFVFTKMANLVCGCRYIDLVYGYHAFRRQILGSLCLKSDGFEIDTEMYIRATRKGLKVKEVPSYEAKRLEGAGKLRSFHDGARILRTILRESVHG

SEQ ID NO: 13184 - protein, 398 aa, Dehalococcoides sp. VS
MTSQVGTDKGFISDRAKELKPSGIRKFFDLAAKMGSGAISLGVGEPDFTTPWHIRESAIYALEKGYTMYTSNAGLLELRQEISKYLYQTYKLDYNPETEILITVGSSEALDLVMRATLNPGDEVLMTDPAYVAYPSCVFMSYGNPVQIPTFEANNFEISAADIAPRITPKTRSILLGYPSNPTGAVMPKAKLTEIAKLACEKNLLVVSDEIYDKIIYSGFEHTCFATLPGMRERSVIINGFSKTYAMTGWRIGYAAGPADIIQAMTKIHQHTMLCAPIAAQKAALEALRNGQDDVRLMVEEYDRRRRFIVKSFNDMGLSCFEPKGAFYTFPSVKKTGLSSAEFAEKLLLEEKVAAVPGTAFGDSGEGYLRCCYATSMKDIEEAMKRFRHFLKHNCPGM

SEQ ID NO: 13185 - protein, 383 aa, Dehalococcoides sp. VS
MDELIYLDNAASTPIDPRVVTAMMPYFTRHYGNPSAIHPMGRRADEALETAREQVAALINCQPEEVIFTSGGTESDNLAISGAAMAGRGRHIITSEIEHHAVLEACHALEKKGFKVTYLPVDSFGQVSPKDVEAAITPQTALVSIMAANNVIGTLQPVAEIGAVCRRQGVIFHTDAVQMAGHLPLDVKQDNIDLLSLSAHKFNGPKGVGILYAKGDVPLAPLILGGGQESGLRSGTENVPGIAGLGLAAGIAKLEMAEEAGRVSSLRKKLAEAILGFVSGSRLNGHPQKRLPGNLNISFEGVEGEYLSKELAKQGICVSTGSACSSASHEAPYVLLATGLERDLANCSIRLSLGKMTTPEHIQKTADTLSAVVSQIRRQTPVW

SEQ ID NO: 13186 - protein, 315 aa, Dehalococcoides sp. VS
MDIGAIWDLVILSPMINGMVWLSHNLWGSFGLTVIVLTVVIRLALWPLNRKQLTATKKMQEITVHMEALKKKHGNDRQKLAEEQMKLYKESGVSPTGCLVPMLIQFPIWIALYQAIVRVLAVTPEDFMNLADHLYSWPVVYQTLPLSNHFLWMDLSLPDFALALLVGVSMYVQQKMSTPKAINQQQAAQGQMMSFMMPFMFFFFSLSFPSGLAFYWFVSAIVGIIMQYFITGWGQLEPMAEKVISYFRGGRQVRPGNTYKTEKRTATPSGQLIDSSAKGKQMEGSIDEKGRDERQDGGGSNKTGAKSAKRKPRRS

SEQ ID NO: 13187 - protein, 500 aa, Dehalococcoides sp. VS
MKTFLPSKFIVDRIEDRCIKCKVCITQCSFDTHYYDEDDDQIKVRNQNCVGCHRCVTFCPTNALVVRNNPLEYRQNANWTPEMIEDIFKQAETGGVLLTGMGMDKAKPIYWDKLLINASQVTNPSIDPLREPMELTTYLGRRPEKAAFDNCGNVKENITPLVKIDVPVMFSAMSYGAISLNVHRSLAQAAKNMGTMWNTGEGGLHSSLMEFKDNTIVQVASGRYGVQNDYLNSGRIVEIKIGQGAKPGIGGHLPGEKVSADVSLTRMIPMGTDAISPAPQHDIYSIEDLSQLIYALKEATRYRVPISVKIAAVHNVSAIASGIVRAGADIVTIDGMRGATGAAPKVIRDNVGIPIELALAAVDSRLREEGIRNQASLVISGGIRNSGDVFKAIALGADAVNIGTAALVALGCHLCQQCHTGKCAWGICTSDLALTKRINPEIGAKRLSNLLRGWSLEIKDMLGGLGVNAIESLRGNRLHLRGVGLSAEELKILGVRAAGE

SEQ ID NO: 13188 - protein, 405 aa, Dehalococcoides sp. VS
MAIVVHKYGGTSVGDAERIKHVAKRIIAARQKGSDVVAVVSAMGDTTDDLIALAHKLNDCPEPREMDVLLSTGEIVSSTLLAMALKNMGQDAISLSGQQAGIRTDSAHSKARITGIDPKRIHEELDKGRVVIVAGFQGISDCQDITTLGRGGSDTTAVALAASLGASRCERYTDVDGVYTADPRLIPDARRLSEISYEEMLELSSYGAKIMHPRAVEIGQVYNIPILVASSFNENPGTLIHGGENMEIRNKVSGIAHDFEVAKITILGVPDKPGIAAGLFAPLAKAGVSVDTIVQNSSQDHITDLTFTVTKSDLGKALEVIGPIAKEIQAREVLSDSKIGKVSIIGTGMLNAPGYAARMFKALSDAGINILLISTSEIRITCIIEEDKVKDAVRAIHKAFEMEKD

SEQ ID NO: 13189 - protein, 424 aa, Dehalococcoides sp. VS
MFDRVEIRIKAGDGGSGKVSFRREKFVPYGGPDGGDGGDGGNVYLEADSGLYSLLNFKHKRVHKAANGENGMGSRCTGHNGADLVIKVPVGTVATIVEENGQKRVLADLAADGDRTLVARGGQGGLGNTHFVSSTNQAPMLAQKGQPGGEYDLILELKLIADVAIIGYPNVGKSSLLSLLTAAKPRVANYPFTTLSPVMGVIQRPEGAFVMAEVPGLIEDAHLGRGLGHDFLRHISRTRMVIHLLDGTSDNPIDDMIKVNSELYLYDASLSERPQVVAVNKIDDELVQLRREELTEIFKEAGLEVFFISALTGEGVEVLLTKVAEKLAILKAADAPETEIDQEIKVFRPAPKGKMGFRITRLEDGWQVEAPEIERIIEHSDIEDLEVRRQIMVLLKHRNVQQALIKAGAVIGQKIITGRMEWYL

SEQ ID NO: 13190 - protein, 499 aa, Dehalococcoides sp. VS
MILTYLPFLIFGGLLIFIFTQARGANNQAVSFGRSKAKLFNMDKPTITFANVAGVDEAKQEVGEVVEFLKSREKFQALGARIPKGILLIGPPGTGKTLLAKAIAGEAGVPFFSISGSEFVEMFVGVGASRVRDLFDQAKKNAPCIIFIDEIDAVGRQRGAGLGGGHDEREQTLNQILVEMDGFDTDTSVIVIAATNRPDILDPALLRPGRFDRRVVLDKPDITGREAILKIHAKGKPLADTVNLENLAKQTVGFSGADLANLLNEAAILAARKNRKVVETEDLEESIDRVIAGPERKSRRISTQEKEVTAYHETGHGLVLRLVQGADPVHKISIVARGMTLGHTRQLPNEDRYLMTRSQFKAMMAGLLAGYVAEELTFKELSTGASDDLRRATDIAHKMVTSYGMSDKLGPRTFGNKEEMVFLGREISEQKDYGEKVADMIDEEVRGLIEEAHQKAKTILTENKNRLKFIAEKLVEKETLEGVDLENLFVGELPISESA

SEQ ID NO: 13191 - protein, 324 aa, Dehalococcoides sp. VS
MLVNGNLTEELKIFTGNANPDLAKAVADYLKVQMGKCEVFQFSNENIFVRIQESVRQKDVYVIQPTCSPVNQSIMELLIMMDALKRASSERITAVLPYYGYGRTDKKDQPRVPITARLIADLLTTAGASRILTVDLHAPQIQGFFDMPVDELTAENLLANYFKKKKIEDLVVVATDVGISKKARDFAAKLDAPLAIIEKRRMGNNDITRTINIIGDVEGKNALTFDDEIDTAGSLVGNVNILISKGVKEVYSCATHPVLSGPAIQRIAASPIKELVVTDSIPLTPPKKIDKITILSIAPLIGEAIYRIHTGNSIGEMYDQMQME

SEQ ID NO: 13192 - protein, 636 aa, Dehalococcoides sp. VS
MGKVVGIDLGTTNSEVAVMQGGEPVVIPSAEGSTLIPSVVAINKNGERIVGRQAKNQAILNPENTVYSIKRFMGRKWGEPAGRELPVEADAKRKPYKVIQGNNNEVRVVMGDKDFSPPEVSAMILQKLKSDAEAYLGEKVTEAVITVPAYFNDAQRQATKDAGAIAGLKVLRIINEPTAAALAYGLDKKKDETIAVYDLGGGTFDISILELGEGTFQVKSTAGDTHLGGDDFDQKIIDWLIAEYKKDQGIDLSKDKTALQRLKEAAEKAKIELSTVQQTEINLPFITADASGPKHLNIILTRAKLEQMVMDLVDKSLEPCRQALKDSGKTASEINEVILVGGQTRMPLVQQKVKEFFGKEPNKGVNPDEVVAIGAAIQAGVLKGEVSDVLLLDVIPLTLGIETLGGVSTSLITRNTTIPTSKSQVFSTAADNQPSVEIHVLQGERPMAADNRTLGRFMLDGILPAPRGVPQIEVTFDIDANGILSVKAKDKGTGREQKITITASSGLSKEEVEKMTREAEAHAAEDNKRKEEIEARNVADNLAYNAEKTLRDNKDKIPVELNTELESKIAAVRTALQGTDVEAIKKTTQELSTALQSVGSTVYGKQQEGASAQGEPSAEGKKADDEGTVEGEFREV

SEQ ID NO: 13193 - protein, 637 aa, Dehalococcoides sp. VS
MSQNRNTPRTQMPVSGGPMGGGMHMGGGPMGGMRMAHSGEKARNFKDTMASLLKYLTPYRFTLIIALVLAILGTVFTIIGPKLLGNATTKLFEGLVSKVTNAAGAGIDFTYIGNIVLILVGLYAISAICSYIMGYIMTGVSIKVTYDLRKQIAEKINRLPMKFFDNKTYGEVLSHVTNDVDLISNTLTQSMSQMVTSIVTILGVLVMMFTINWVMALASLIIVPVSIGLISMIVGRSQKYFRKQQDYLGHINGHVEEMYSAHNVMKAFNGEEKAIAKFKGLNEELYGAAWKSQFFSSIMMPMMNFIGNLSYVVVCILGGFLAIQKTIQVGDILAFVQYVRSFTQPLAQTANIINVLQSTAAAAERIFEFLGEGEEVPEPSNPVSLKDISGAVSFKDVSFGYSPTKTIIKDFNADIKPGQRVAIVGPTGAGKTTMVKLLMRFYDVNSGAILVDGVNIQNIKRQEYRNAFGMVLQDTWLFNGSIMDNIRFGKLDATDEEVYTAAKTAYVDHFIHTLPSGYEMIMNEESSNISQGQKQLLTIARAVLANPKILILDEATSSVDTRTEMLIQQAMENLMKGRTAFIIAHRLSTIRNADIILVMKNGEIVEQGNHTKLLEANGFYASLYNSQFESGMSEADS

SEQ ID NO: 13194 - protein, 601 aa, Dehalococcoides sp. VS
MSRTHPSDEPANKPASSSRDLWRLIRTGRPSPVALSIAALAAIASVAGTLWFPVQTKQMIDGFGHGQIDVWAMVGLVAILAAAALLNAASAYLLARVGYQLVARLRQSLIDKLLRLPVSSFDRESSGERVSRVVRDCESISELIARQAVNLLTGVLLLAGSIVVLLLLDVRLTLALIGSIGAAFAIMIPIAFLLDGLSRRIQDRTARFSGILTHIFQEIRLVKAFTAEPRERERSRGEIDGLMRLGLRVARVNVLLEPLMSLAMTLAIIVILVYGAARVAAGEITVGTLTAFILYIFNVATPLMQLTHFTAELQKAKGASARIAAILLEDEEQTRPGTAERLPGQVLEFHDVSFAYDGRDAAVLRGIDLRFEPGRTVALVGTSGSGKTTLLSLIERFYEPSGGRILYGGRPIGEFDLRQWRGSIGYVAQSAPVMPGSVRDNIAYGLDGEFDDEQLRSAARRAGALEFIEKMPQGFDTQLIEQGNNLSGGQRQRIAIARMFLRDPDILILDEATSALDSETEHQVKLALDELMRGRTNIIVAHRLSTVMHADRICFLDAGRISGMGSHVELLATHPHYARLVERQFRHPAESEPASELALAT

SEQ ID NO: 13195 - protein, 356 aa, Dehalococcoides sp. VS
MRIGVPKETKTLEGRVALVPAAAGDLVKRGHEVWLEQDAGVKSGFKDADYTRLGVKIAPDAAALYEKGELIVKVKEPIAGDLQHLRKDHLLFCYLHLAAEPALTKHLLDIGLTGVAFETVELPNGDLPLLAPMSVIAGKIGVQVGTHLLHQPMSGKGKLLGGLPSTERGKVVVFGAGKAGGASAALAAAAGANVTVFEMRQDRMDEMMRLGNNVTALYPYHDVVAREVASADLVIGAVLITGAKAPHVMTREMLREMEDGSVVVDIAIDQGGCFETSRPTTWKEPTYVEEGVTHFCVTNMPGAVPQTSSQAICAAILPWVNKLAAGSDWRNNPALVRGINVEGGKIVHPALQDMKL

SEQ ID NO: 13196 - protein, 848 aa, Dehalococcoides sp. VS
IDRVNRARAPYKRWLKQGMTYLHSELIDPNLAAEPFDHETLAGFQKLFQLTREEREQVLRPLAEIEQEATGSMGDDVPMAVLSQQVRPLYDHFRQAFAQVTNPPIDPLREDCVMSLATQIGREGNVFVDGPGNVGHIHLNSPVLAQRKLRQLLAMSPYDQSHRYIDLNYTAEEGLKAALLRLCREAEDATRDGIVLLIVSDRRPRRDALMMHALLATGAIHQHLVRVGLRCEANLIIETGTARDPHHFACLIGFGATAVYPYLAYQTLHDLGARGILRTKHGEVAQIGRSYRRAIKKGLLKIISKMGIATIGSYRGAQLFEIIGLDKEVVELCFTGTPSRISGAGFELLQGDDETLADIAWNPNRLPEIGGLLKYTPGGEYHLFNPDVVTRLQRAVGSGEWSDWQHYAEAVNERPTAALRDLLELEADPARAIPLEDVESVEAIVRRFDSAAMSLGALSPEAHEALAIAMNRLGGRSNSGEGGEDPARYRSDKVSKIKQIASGRFGVTPEYLVNAEVLQIKVAQGAKPGEGGQLPGHKVNELIARLRYAMPGIGLISPPPHHDIYSIEDLAQLIHDLRQVNPEALISVKLVSHAGVGTIATGVAKAGADLITVSGHDGGTGASPLSSIRYAGTPWELGLAEARQALIGNDLRERVILQTDGGLKSGLDVVKAALLGAESFGFGTAPMIALGCKYLRICHLNTAPPAWPLRTTRCAATISPACRNGSRTSSACSPRKCGIGWPRWACARSAKSSAAPTCCANATATARASIGSTCRRCWPAPAWPTVATAGCRRHRPNPKAWRCNSTPNWPRRSRTRPAASTATRSATPTAASARACPGASPEHTVTAA

SEQ ID NO: 13197 - protein, 179 aa, Dehalococcoides sp. VS
MDGGRIVLRTTAGARYAEHETPILGNTCLYGATGGELYAAGRAGERFGVRNSGATAVVEGAGDHCCEYMTGGVVAVLGRTGLNFGAGFTGGMAYVLDVERDFVDRYNHELIDILRISADGFEHHRSHLHDLLETHVALTGSAWARRILDEMRDYLGKFWLVKPKAASLESLAETLRSAA

SEQ ID NO: 13198 - protein, 403 aa, Dehalococcoides sp. VS
KVVLAYSGGLDTSAAVKWLQEKYGMDVIAVTIDVGNEKDFTLIKEKALKVGAKKAYVRDVCKEFAEDYIWKAIKANAMYEGVYPLATALARPLIAKVMVDIALEEGATAIAHGCTGKGNDQVRFDVGINTLAPHLKIIAPARQWGMTREQTMEYAQKWGIPVPISVKNPFSIDENLWGRSIECGLLEDPWNEPIPEVFAWTRPVEATPDAPEYLEVEFEQGVPVAVNGEKLSPLALIQKVHDIAGLHGVGRIDHVENRLVGIKSREIYEAPAAVVLIAAHQALEAMTLSKSQLRFKQMVEATYSDIIYNGLWFSALRQDLDAFIDSSQRFVSGTVRLKLSKGSFRVVGRKSPYSLYHKGMATYDKGDQFDPSSAVGFITLWGLQAKLQAQLQPILGEEKGNKS

SEQ ID NO: 13199 - protein, 307 aa, Dehalococcoides sp. VS
MSRTYSPVSLIGAPTDVGAGHRGARLRPEALRIAGLGEALVARGVDVVDRGNLDGPRNPWQKPVAGYRHLAEVVAWNRAVMDAVGAELRIGRLPILLGGDHCLGLGSITAVARHCRDNGKQLRVLWLDAHADFNTSQVTPSGNIHGMPVSCLCGIGPDELTRLGGDAPAMRPDEIRQIGIRSVDPGEKQLIQQHGLDVYDMRYIDEIGMRRVMEEALEGMDENTHLHVSFDVDFLDPSIAPGVGTTVPGGPNYREAQLVMEMIADSGRLGSLDIVELNPILDKRNRTAKLAVDLVESLFGKSTLMRD

SEQ ID NO: 13200 - protein, 192 aa, Zea mays
MLRLQLPQSHRVIFLQYLSATDPLVMARVLQDVLDTFTPTIPLRITYNNSQVLAGAELKPSAVISKPRVDIGGNDMRTFYTLVLIDPDAPSPSHPSLREYLHWMVTDIPETTSVNFGQELVFYERPDPRSGIHRLVFVLFRQLGRGTVFAPEMRQNFNCRSFARQYHLSIASATHFNCQREGGSGGRRFREE

SEQ ID NO: 13201 - protein, 175 aa, Zea mays
MSATDHLVMARVIQDVLDPFTPTIPLRITYNNRLLLPSAELKPSAVVSKPRVDIGGSDMRAFYTLVLIDPDAPSPSHPSLREYLHWMVTDIPETTSVNFGQELIFYERPDPRSGIHRLVFVLFRQLGRGTVFAPEMRHNFNCRSFARQYHLSIATATHFNCQREGGSGGRRFREE

SEQ ID NO: 13202 - protein, 177 aa, Zea mays
MSDVEPLVLAHVIRDVLDSFAPSIGLRITYNSRLLLSGVELKPSAVVNKPRVDVGGTDLRVFYTLVLVDPDAPSPSNPSLREYLHWMVIDIPGTTGASFGQELMFYERPEPRSGIHRMVFVLFRQLGRGTVFAPDMRHNFNCKSFARQYHLDVVAATYFNCQREAGSGGRRFRPESS

SEQ ID NO: 13203 - protein, 174 aa, Zea mays
MSRDPLVVGNVVGDILDPFIKSASLRVLYNNRELTNGSEFRPSQVAYEPRIEIAGYDMRTLYTLVMVDPDSPSPSNPTKREYLHWLVTDIPESTDVSFGNEVVSYESPKPSAGIHRFVFVLFRQSVRQTIYAPGWRQNFNTRDFSALYNLGPPVASVFFNCQRENGCGGRRYIR

SEQ ID NO: 13204 - protein, 177 aa, Zea mays
MFNMSRDPLVVGNVVGDIVDPFITTASLRVFYNNKEMTNGSDLKPSQVMNEPRVHVGGRDMRTLYTLVMVDPDAPSPSNPTKRENLHWLVTDIPETTDASFGNEIVPYESPRPIAGIHRFAFVLFRQSVRQTTYAPGWRSNFNTRDFAAIYGLGSPVAAVYFNCQRENGCGGRRYIR

SEQ ID NO: 13205 - protein, 173 aa, Zea mays
MSRGRDPLALSQVIGDVLDPFIKSATMRINYGDKEITNGTGLRASAVLNAPHVEIEGHDQTNLYTLVMVDPDAPSPSKPEYREYLHWLVTDIPEARDICSGNEIVPYESPRPPAGIHRIVFVLFKQQARQTVYAPGWRQNFNIRDFSAIYNLGAPVAALYFNCQKESGVGGRR

SEQ ID NO: 13206 - protein, 175 aa, Zea mays
MSRDPLVVGHVVGDILDPFTKAASLKVLYNNKELTNGSELKPSQVANEPRVEIIGGRDMSNLYTLVMVDPDSPSPSNPTKREYLHWLVTDIPESANASYGNEIVSYENPKPTAGIHRFVFVLFRQSVQQTVYAPGWRQNFNTRDFSAFYNLGPPVAAVFFNCQRENGCGGRRYIR

SEQ ID NO: 13207 - protein, 174 aa, Zea mays
MSRDPLVVGHVVGDILDPFIKTASLKVLYNNKELTNGSDLKPSQVASEPRVEIGGRDMRNLYTLVMVDPDSPSPSNPTNREYLHWLVTDIPESANASYRNEIVSYENPKPSAGIHRFVFVLFRQSVQQTVYAPGWRQNFNTRDFSALYNLGPPVAAVFFNCQRENGCGGRRYIR

SEQ ID NO: 13208 - protein, 126 aa, Medicago truncatula
MESPDLSPPQIDTSRPSLGFPLGTALLLLIIFSLSGIFSCCYHWEKFRSLHQSLSHLEAAQAHTQSPPSKSKPHSTETEGEKKGQSLTVLMPGDEVPKFIAMPCPCQHSRLEEIIVNIEKPSSKPP

SEQ ID NO: 13209 - protein, 243 aa, Citrus unshiu
MGRGRVELKRIENKINRQVTFAKRRNGLLKKAYELSVLCDAEVALIIFSNRGKLYEFCSSSSMLKTLERYQKCSYGAVEVNKPAKELESSYREYLKLKTRFESLQRTQRNLLGEDLGPLNSKELEQLERQLESSLKHVRSTKTQYMLDQLSDLQNKEQLLLDTNRALTIKLDEINAKTQLRPSWEGGEQQLGYNPQHAQTQGLFQPIECNPTLQIGYNPSCSDQMTATSHAQQVSGFIPGWML

SEQ ID NO: 13210 - protein, 806 aa, Neurospora crassa
MEFNIDDLPVLFPYPRIYPEQYAYMVDLKKTLDAGGNCVLEMPSGTGKTVTLLSLIVAYQQYYPEHRKLIYCSRTMSEIEKALVELRALMKFRAERLGHEEEFRGLGLTSRKNLCLHPSVKREKSGAIVDARCRSLTAGFVKEKREKGENVETCVYHDNLDLLEPHNLIPNGIWTLDGLMRYGEEKKQCPYFTARRMMQHCNVIIYSYHYLLDPKIAERVSKDLSKDCIVVFDEAHNIDNVCIESLSTDITQDSLMRATRGAQNLEAKISEMKDSDQEKLQSEYEKLVEGLKGLDEGRQEDAFMANPTLPDDLLKEAVPGNIRRAEHFVAFLRRFIEYLKTRMKVRQVISETPPSFLAHLKEYTFIEKKPLRFCAERLTSLVRTLELTNIEDYRPLQEVATFATLVATYEKGFLLILEPYESDTAKTPNPVLHFTCLDAAIAIKPVFDRFSSVIITSGTISPLEMYPKMLNFETVVQESYAMTLARRSFLPMIVTRGSDQASISTSFQVRNEPSVVRNYGNLLTEFARITPDGMVVFFPSYLYMESIISMWQGMGILDEVWKHKLILVETPDAQETSLALETYRTACCNGRGAILLCVARGKVSEGIDFDHQYGRTVLCIGVPFQYTESRILKARLEFLRETYRIRENDFLSFDAMRHAAQCLGRVLRGKDDYGVMVLADRRFMKKRAQLPKWINQAFLEANTNLSTDMAVGNARAFLKQMAQPFSAKDQEGVSIWGMEDLKRHQEKMAEDMIVELKTAREEEERERKRREEEERRRFEEERDRVSDYEMDEDDEAEMMALDARIG

SEQ ID NO: 13211 - protein, 1062 aa, Neurospora crassa
MWSWSGLRPTLVLNASTSLSPGSRIIARLLATYSTGATAPVPPTVPYKQLTVGVPRETYPNERRVALTPQNVAFLLKKGFGKVLVEKGAGAEAEFHDSAYATAGATLVESASDVWNNADIVLKVRGPSVAEAEMLKEGQTIISFLQPAQNKPLVEKLASRNATVFAMDMIPRISRAQVFDALSSMANIAGYKAVLEASNVFGRFLTGQVTAAGKIPPCKVLVIGAGVAGLSAIATARRMGAIVRGFDTRSAAREQVQSLGAEFIEVELQEDGSGAGGYAKEMSPEFIAAEMKLFTEQAQEVDMIITTALIPGKPAPKLITKAMVEIMKPGSVIVDLAAEAGGNCEVTQPGKLINYKDVKIIGEKTGYTDLPSRLPTQSSTLYSNNITKFLLSMAPNNQEYGIDLQDEVVRGAIVINKGNILPPAPRPAPPPAPAATPTTAKEAEVVALTPFQKASREVGLVTSGMGAALALGKLTGPLFMGNAFTFALASLIGYRVVWGVQPALHSPLMSVTNAISGMVGVGGLFILGGGYLPETIPQAFGAASVLLAFVNISGGFVITKRMLDMFRRATDPPEYPWLYAVPAALFGGGFIAAAASGAAGLVQAGYLVSSVLCITSLSSLASQTTARLGNTLGMLGVGSGVLASLLAAGFSPEVLTQFGGLAAIGGILGLLIGKRITPTDLPQTVAALHSVVGLAAVLTSIGSVMADVNHITTLHLVTAYLGVLIGGVTFTGSIVAFLKLAGKMSSKPTILPGRHLINSGLLASNVATMGAFVTMAPGSPAIAAGALAANTVLSFLKGYTTTAAIGGADMPVVITVLNAYSGFALVAEGFMLDNPLLTTVGALIGVSGSILSYIMCVAMNRSLTNVLFGGISAPTTTEYKIEGSITQTNVEDTAEALTNAETVIIVVGYGMAVAKAQYAISDITQMLRSKGIKVRFAIHPVAGRMPGQCNVLLAEASVPYDIVLEMDEINDDFGETDLTLVIGANDTVNPIALEPGSSIAGMPVLHAWKSKQVVVMKRGLASGYADVPNPMFYMPGTKMLFGDARVTTEGKVVCHMNKVQLY

SEQ ID NO: 13212 - protein, 269 aa, Photorhabdus luminescens
DLVILDVTASEELARCYRDFASYGFHVISANKIAGASSSSDYRLIRDAFAKTGRHWFYNATVGAGLPINHTVRDLRESGDTILSISGIFSGTLSWLFLQFDGSVPFSDLVEQAWQQGLTEPDPRIDLSGQDVMRKLIILAREAGYEIEPEQVRVESLVPKEAASGSIEQFFDNSGAINEQMVQRLAAAQEMGMVLRYVARFNANGKAKVGVEAVRPDHPLASLLPCDNVFAIESRWYRDNPLVIRGPGAGRDVTAGAIQSDLNRLSQRL

SEQ ID NO: 13213 - protein, 552 aa, Sarcina ventriculi
MKITIAEYLLKRLKEVNVEHMFGVPGDYNLGFLDYVEDSKDIEWVGSCNELNAGYAADGYARLRGFGVILTTYGVGSLSAINATTGSFAENVPVLHISGVPSALVQQNRKLVHHSTARGEFDTFERMFREITEFQSIISEYNAAEEIDRVIESIYKYQLPGYIELPVDIVSKEIEIDEMKPLNLTMRSNEKTLEKFVNDVKEMVASSKGQHILADYEVLRAKAEKELEGFINEAKIPVNTLSIGKTAVSESNPYFAGLFSGETSSDLVKELCKASDIVLLFGVKFIDTTTAGFRYINKDVKMIEIGLTDCRIGETIYTGLYIKDVIKALTDAKIKFHNDVKVEREAVEKFVPTDAKLTQDRYFKQMEAFLKPNDVLVGETGTSYSGACNMRFPEGSSFVGQGSWMSIGYATPAVLGTHLADKSRRNILLSGDGSFQLTVQEVSTMIRQKLNTVLFVVNNDGYTIERLIHGPEREYNHIQMWQYAELVKTLATERDIQPTCFKVTTEKELAAAMEEINKGTEGIAFVEVVMDKMDAPKSLRQEASLFSSQNNY

SEQ ID NO: 13214 - protein, 411 aa, Hevea brasiliensis
MSPSSDSINPRDVCIVGVARTPMGGFLGSLSSFSATKLGSIAIQAALKRANVDPSLVQEVFFGNVLSANLGQAPARQAALGAGIPNSVICTTINKVCASGMKATMLAALTIQVGINDIVVAGGMESMSNAPKYLAEARRGSRLGHDTIIDGMLKDGLWDVYNDFGMGVCAEICADQHNITREEKDSYAIRSFERGNSAQNGGVFSWEIVPVEVSGGRGKSVMVVDKDEGLIKFDAAKLRKLRPISRIGSVTAGNASIISDGAAALVLVSGEKAIELGLQVIARIRGYGDAAQAPELFTTAPALAIPKAISNAGLEASQIDYYEINEAFSVVALANQKILGLNPEKLNVHGGAVSLGHPLGCSGARILVTLLGVLRHKNGKYGVASICNGGGGASALVLELMSVGRVGRSLL

SEQ ID NO: 13215 - protein, 232 aa, Hevea brasiliensis
MAPAAATAVAAEIKPRDVCIVGVARTPMGGFLGSLCTLSATKLGSIAIEAALKRANVDPSLVQEVFFGNVLSANLGQAPARQAALGAGIPNSVVCTTVNKVCASGMKATMLAAQSIQLGINDVVVAGGMESMSNAPKYLAEARKGSRLGHDSLVDGMLKDGLWDVYNDVGMGSCAEICADNHSITREDQDKFAIHSFERGIAAQESGAFAWEIVPVEVSKGQGGNYDWHVGC

SEQ ID NO: 13216 - protein, 1122 aa, Arabidopsis thaliana
MSGSRPTQSSEGSRRSRHSARIIAQTTVDAKLHADFEESGSSFDYSTSVRVTGPVVENQPPRSDKVTTTYLHHIQKGKLIQPFGCLLALDEKTFKVIAYSENASELLTMASHAVPSVGEHPVLGIGTDIRSLFTAPSASALQKALGFGDVSLLNPILVHCRTSAKPFYAIIHRVTGSIIIDFEPVKPYEVPMTAAGALQSYKLAAKAITRLQSLPSGSMERLCDTMVQEVFELTGYDRVMAYKFHEDDHGEVVSEVTKPGLEPYLGLHYPATDIPQAARFLFMKNKVRMIVDCNAKHARVLQDEKLSFDLTLCGSTLRAPHSCHLQYMANMDSIASLVMAVVVNEEDGEGDAPDATTQPQKRKRLWGLVVCHNTTPRFVPFPLRYACEFLAQVFAIHVNKEVELDNQMVEKNILRTQTLLCDMLMRDAPLGIVSQSPNIMDLVKCDGAALLYKDKIWKLGTTPSEFHLQEIASWLCEYHMDSTGLSTDSLHDAGFPRALSLGDSVCGMAAVRISSKDMIFWFRSHTAGEVRWGGAKHDPDDRDDARRMHPRSSFKAFLEVVKTRSLPWKDYEMDAIHSLQLILRNAFKDSETTDVNTKVIYSKLNDLKIDGIQELEAVTSEMVRLIETATVPILAVDSDGLVNGWNTKIAELTGLSVDEAIGKHFLTLVEDSSVEIVKRMLENALEGTEEQNVQFEIKTHLSRADAGPISLVVNACASRDLHENVVGVCFVAHDLTGQKTVMDKFTRIEGDYKAIIQNPNPLIPPIFGTDEFGWCTEWNPAMSKLTGLKREEVIDKMLLGEVFGTQKSCCRLKNQEAFVNLGIVLNNAVTSQDPDKVSFAFFTRGGKYVECLLCVSKKLDRKGVVTGVFCFLQLASHELQQALHVQRLAERTAVKRLKALAYIKRQIRNPLSGIMFTRKMIEGTELGPEQRRILQTSALCQKQLSKILDDSDLESIIEGCLDLEMKEFTLNEVLTASTSQVMMKSNGKSVRITNETGEEVMSDTLYGDSIRLQQVLADFMLMAVNFTPSGGQLTVSASLRKDQLGRSVHLANLEIRLTHTGAGIPEFLLNQMFGTEEDVSEEGLSLMVSRKLVKLMNGDVQYLRQAGKSSFIITAELAAANK

SEQ ID NO: 13217 - protein, 308 aa, Salmonella typhimurium LT2
MLELQEASRLPERLGDDFVRAANIIIHCEGKVIVSGIGKSGHIGKKIAATLASTGTPAFFVHPAEALHGDLGMIESRDVMLFISYSGGAKELDLIIPRLEDKSVALLAMTGKLHSPLGRAAKAVLDISVEREACPMHLAPTSSTVNTLMMGDALAMAVMQARGFNEEDFARSHPAGALGARLLNNVHHLMRQGDAIPQVMLATSVMDAMLELSRTGLGLVAVCDEQHVVKGVFTDGDLRRWLVGGGALTTPVSEAMTPNGITLQAQSRAIDAKELLMKRKITAAPVVDENGKLTGAINLQDFYQAGII

SEQ ID NO: 13218 - protein, 469 aa, Salmonella typhimurium LT2
MHKNALKQKPISLSVNQAGFYSMTTILKHLPAGQRIGIAFSGGLDTSAALLWMRQKGAVPYAYTANLGQPDEDDYDAIPRRAMEYGAENARLIDCRKQLVAEGIAAIQCGAFHNTTGGLTYFNTTPLGRAVTGTMLVAAMKEDGVNIWGDGSTYKGNDIERFYRYGLLTNAELQIYKPWLDTDFIDELGGRHEMSEFMIACGFDYKMSVEKAYSTDSNMLGATHEAKDLEFLNSSVKIVNPIMGVKFWDESVKIPAEVVTVRFEQGHPVALNGKTFSDDVEMMLEANRIGGRHGLGMSDQIENRIIEAKSRGIYEAPGMALLHIAYERLLTGIHNEDTIEQYHSHGRQLGKLLYQGRWFDSQALMLRDGLQRWVASQITGEVTLELRRGNDYSILNTVSDNLTYKAERLTMEKGESVFSPDDRIGQLTMRNLDITDTREKLFGYAKAGLLTASSATGLPQVENLENKGK

SEQ ID NO: 13219 - protein, 158 aa, Oryza sativa Japonica Group
MGFLSFAGRVLFAAAFLLSAYQEFSEFGVDGGPAAKALQPKFNTIVANISTRTGLVVPHIELKHTVAAMISLKGLGGLLFILSSSLGAYLLLFHLAFITPVVHDFYNYDIESAEFVQLFTKFAQNCALVGALLFFLAMKNSIPKRQPNRKKAPKPKST

SEQ ID NO: 13220 - protein, 485 aa, Corynebacterium glutamicum
MDDSNSFVVVANRLPVDMTVHPDGSYSISPSPGGLVTGLSPVLEQHRGCWVGWPGTVDVAPEPFRTDTGVLLHPVVLTASDYEGFYEGFSNATLWPLFHDLIVTPVYNTDWWHAFREVNLKFAEAVSQVAAHGATVWVQDYQLLLVPGILRQMRPDLKIGFFLHIPFPSPDLSRQLPWREEIVRGMLGADLVGFHLLQNAENFLALTQQVAGTAGSHVGQPDTLQVSGEALVREIGAHVETADGRRVSVGAFPISIDVEMFGEASKSAVLDLLKTLDEPETVFLGVDRLDYTKGILQRLLAFEELLESGALEADKAVLLQVATPSRERIDHYRVSRSQVEEAVGRINGRFGRMGRPVVHYLHRSLSKNDLQVLYTAADVMLVTPFKDGMNLVAKEFVANHRDGTGALVLSEFAGAATELTGAILCNPFDVESIKRQMVAAVHDLKHNPESAATRMKTNSEQVYTHDVNVWANSFLDCLAQSGENS

SEQ ID NO: 13221 - protein, 803 aa, Catharanthus roseus
MRILIQEMLIRTLFFFYLIISSLEFTPENNYLINCGSFNDTSIDDRIFLADNLNSTVLSTPETIFANSSNSNSVLDLYKSARIFNGSSQYNFSINKKGWHWIRLHFFPFPISNEKFNLSSAKFSVFAQNFTLLKDFQPLNNVPVVKEFSLNVNSNNLLLKFTPSRNSLAFLNGLEVISLPDELIPFSIGNQNLEKNALETVVRVNMGNVTVSSKDDPLGRIWLSDYNYLSNVNLVVFVSNIHLVNYTKGEEKVSENIGPSSVYGTGTKLHSVFDPNTQINATWLFNVDSGFGYFIRFHFCNLLNPIPNNNFFFNVFLNSEFVVKDLNLSTSGAPMYKDVVVVTNVVPQIRISVGPSNVRNSYPDGILNGLEIMKISTSDGSLAAVDADFPSSSSSSKLKVWIIVSLAIGISLILVVFTVVFLFRRRKRHVMIHSTPDHLTEEDDSNSSIFSRSKIGYRFPLAVVQEATDNFSENRVIGIGGFGKVYKGVFKDGTKVAVKRGISCSSSKQGLSEFRTEVELLSQFRHRHLVSLIGYCDEKNEMIIIYEFMENGTLRDHLYGSDKPKLNWRKRVEICIGSAKGLHYLHTGTMKRIIHRDVKSANILLDENLMAKVADFGVSKTGPDHFDQTHVSTAVKGSFGYLDPEYLTMQKLTEKSDVYSFGVVMLEILTGRPVIDPSKPREMVNLVEWAMKCSRKGEEIVDSDIVNEVRPESLIKFQETAEKCLAERGVDRPTMGDVLWNLECALQLQGKQKENEQPEEMRDVSATEISLGSMADLAAVSMSKVFSELVKAQGTRSEFGSAP

SEQ ID NO: 13222 - protein, 214 aa, Gentiana triflora
MANSPTPIDIEMNINNNNSKAACNSGDVQVRKGPWTMEEDMILINYIANHGEGVWNSLARSAGLKRTGKSCRLRWLNYLRPDVRRGNITPEEQLLIMELHAKWGNRWSKIAKHLPGRTDNEIKNFWRTRIQKQMKHVENSSVGQSSEQTEAPSTSHEASTAAAATATTAHDAVEAYSPQSYTANMESFQNPFPPDQSNDNVWSMEDLWSMNLLN

SEQ ID NO: 13223 - protein, 200 aa, Gentiana triflora
MDKKGSNINSSSKDPEVRKGPWTMEEDLILINYIANHGEGVWNSLARSAGLKRTGKSCRLRWLNYLRPDVRRGNITPEEQLLIMELHAKWGNRWSKIAKHLPGRTDNEIKNFWRTRIQKHMKQAENYAGQSSSEQNERVASTSMQTSAATAPHELMMETQSPPSNYTMDHLPEAFQNPFPTESNDNLWSMEDLWSLHLLN

SEQ ID NO: 13224 - protein, 876 aa, Solanum lycopersicum
MLSRSCFNLLNLDDCSVTDRARIPKLMNVPGIITDFGGGGGEEEKGEVSPGVKNGSRRIIVANQLPVKAFCKDEKEGKKWCFEWDRYALDTLILQLKDGLSPDLEIVYVGCLKADVELNDQEEVANFLWEKFRCVPTFLSLDLINKYYHGFCKHYLWPLFHYMLPLTSSHGVRFDRSNWLAYVSANKIFADKVYEVINPDDDYVWIQDYHLMILPTMLRKKYSRIKVGFFLHSPFPSSEIYRTLPVRDEILRALLNCDLVGFQTFDYARHFLSCCSRMLGLDYQSKRGYIGIDYFGRTVTIKILPVGIHMGQIQNVMSLPDTAKKAKELKEKYEGKIVLLGIDDMDVFKGIGLKFLAMGHLLEQSPSLRGRVVLVQITNPPRSRGNDIREVEEEVKKIASEINTKYGKPGYEPIVCINGPVSTQDKIAHYAISECVVVNAVRDGMNLVPYEYTVSRESNSNLDKALGPGFNGGRRKSMIVVSEFIGCSPSLSGAIRVNPWDIESVATGMTSGAMMNDREKELRHEKHYRYVSSHDVAYWARSFDQDLKRACEDHYHKRCWGIGLGLGFRVVALGPNFKKLSVAHIVSSYKLTNSRLILLDYDGTMLPEDKVDKAPSQEVISVLNGLCSDPKNIVFIVSGRGRDTLSKWFSPCAELGLSAEHGYFTRWRKDSDWESRLVPADTEWKKVVLPIMKKYTEATDGSSIEQKESALVWHHLEADPDFGIWQAKELLDHLESVLANEPVVVKRGQHIVEVKPQDVSKGLVFQSLLASMKSKGKSPDFVLCIGDDRSDEDMFESIASSLDNSSLPDNAEVFACTVGQKPSMAKYYLDDPAEVIKMLQGLSAASTAMQLPPKSPVHQLASVEDLSLVKNHASFV

SEQ ID NO: 13225 - protein, 177 aa, Citrus unshiu
MSSRERDPLIVGRVVGDVLDNFTRTIPMRITYSNKDVNNGRELKPSEVLNQPRVEIGGDDLRTFYTLVMVDPDAPSPSDPSLREYLHWLVTDIPATTGASFGQEIVNYESPSPTMGIHRFVFVLFRQLGRQTVYAPGWRQNFSTRDFAELYNLGPPVAAVYFNCQRESGSGGRPVRR

SEQ ID NO: 13226 - protein, 177 aa, Citrus unshiu
MSSRDRDPLILGRVVGDVLDNFTRTIPMRITYLNKDVNNGRELKPSEVLNQPRVEIGGDDLRTFYTLVMVDPDAPSPSDPSLREYLHWLVTDIPATTGASFGQDIVNYESPRPTMGIHRFVFVLFRQLGRQTVYAPGWRQNFSTRDFAELYNLGPPVAAVYFNCQRESGSGGRTMTR

SEQ ID NO: 13227 - protein, 663 aa, Brassica oleracea var. acephala
MATDSAMFASSRRRQSPSLEAFLSPVDLSDVPLLRTLSSTSSEIVSCFSNARFSFQRRNTRSLIRKVQVIAVLLQHLAPESSLDPTAVLCFKELYLLLHHSKFLLRYCAHSSKLWLLLQSPSLSSFFHDLSKDYSTLLDVLLPAESLCLNDDVREQVQLLHMQHYVDDNNDETLRNRLYSFLDEFENGSVPNSEELSFFFFEKLGIKDPTSYRDEIEFLEEKIKTYGCDLEPTRSVINGFVDITRYVMFLLFKIEDSNEIKKQRKGLISEEIENTFTTLPKDFICSISLNIMNDPVVIVSTGQTYDRSSIARWIHQEGRSTCPKTGQKLVDLSFVPNLALRHLTTLWCQVNGLSHDSPPPKESLPKVFQTRASTEANKAAISILVRNLAHGSELAAGEIRVLTRTVTETRTLIVEAGAIPYLRSLLKSENAVAQENAVASIFNLSIDEANRSLIMEEHDCLEPIMSVLVSGLTMRAKEIATAALYTLSSVHDYKKTIANADGCIESLALVLRNGTVRGKKDAVYALHSLWLHPDNCSLVVKRGGVSALVGALGEESVAEKVACVLGVMATESLGAESIGREETVVTGLMELMRCGRPLGKEKAIATLLQLCTLGGAVVTEKVVKTPALAVLTRKLLLTGTDRAKRKAVSLSKVCKGCDQKTQR

SEQ ID NO: 13228 - protein, 453 aa, Persea americana
MDNKGGILMQRFELGRLLGQGTFAKVYHARNLKSSQSVAIKVIDKEKVLKVGMIDQIKREIATMRLASHPNVVQLYEVMATKTKIYFVLEYVKGGELFNKVAKGKLKEDVARKYFQQLVSAVDFCHSRGVYHRDLKPENLLVDENENLKVTDFGLSALAESKRQDGLLHTTCGTPAYVAPEVISRKGYDGAKADIWSCGVILFVLLAGYLPFHDSNLMELYRKVGKAEYKCPNWFPPEVRRLLARILDPNPNTRISIAKIKDNSWFKRGFEAKFAKGETKSKELAPLDTDAAFASSDTGVAARKPELVKPQHLNAFDIISLSAGFDLSGLFEDTNCRKEARFASKQPASTIISKLEDIAKRLRLKVKKKDEGILKLEGSKEGRKGVLSIDAEIFVVNPSFHLVEVKKSSGDTLEYQKLWNQDMRPALTDIVWAWQGDQQQQQESLVCSQGQSL

SEQ ID NO: 13229 - protein, 453 aa, Persea americana
MDNKGGILMQRFELGRLLGQGTFAKVYHARNLKSSQSVAIKVIDKEKVLKVGMIDQIKREIATMRLASHPNVVQLYEVMATKTKIYFVLEYVKGGELFNKVAKGKLKEDVARKYFQQLVSAVDFCHSRGVYHRDLKPENLLVDENENLKVTDFGLSALAESKRQDGLLHTTCGTPAYVAPEVISRKGYDGAKADIWSCGVILFVLLAGYLPFHDSNLMELYRKVGKAEYKCPNWFPPEVRRLLARILDPNPNTRISIAKIKDNSWFKRGFEAKFAKGETKSKELAPLDTDAAFASSDAGVAARKPELVKPQHLNAFDIISLSAGFDLSGLFEDTNCRKEARFASKQPASTIISKLEDIAKRLRLKVKKKDEGILKLEGSKEGRKGVLSIDAEIFVVNPSFHLVEVKKSSGDTLEYQKLWNQDMRPALTDIVWAWQGDQQQQQESLVCSQGQSL

SEQ ID NO: 13230 - protein, 453 aa, Persea americana
MDNKGGILMQRFELGRLLGQGTFAKVYHARNLKSSQSVAIKVIDKEKVLKVGMIDQIKREISTMRLASHPNVVQLYEVMATKTKIYFVLEYVKGGELFNKVAKGKLKEDVAWKYFQQLVSAVDFCHSRGVYHRDLKPENLLVDENENLKVTDFGLSALAESKRQDGLLHTTCGTPAYVAPEVISRKGYDGAKADIWSCGVILFVLLAGYLPFHDSNLMELYRKVGKAEYKCPNWFPPEVRRLLARILDPNPNTRISIVKIKDNSWFKRGFEAKFTKGETKSKELAPLDTDAAFASSDTGVAARKPELVKPQNLNAFDIISLSAGFDLSGLFEDTNCRKEARFASKQPASAIISKLEDIAKRLRLKVKKKDEGILKLEGSKEGRKGVLSIDAEIFVVNPSFHLVEVKKSSGDTLEYQKLWNQDMRPALTDIVWAWQGDQQQQQESLVCSLGQSL

SEQ ID NO: 13231 - protein, 453 aa, Persea americana
MDNKGGILMQRFELGRLLGQGTFAKVYHARNLKSSQSVAIKVIDKEKVLKVGMIDQIKREISTMRLASHPNVVQLYEVMATKTKIYFVLEYVKGGELFNKVAKGKLKEDVAWKYFQQLVSAVDFCHSRGVYHRDLKPENLLVDENENLKVTDFGLSALAESKRQDGLLHTTCGTPAYVAPEVISRKGYDGAKADIWSCGVILFVLLAGYLPFHDSNLMELYRKVGKAEYKCPNWFPPEVRRLLARILDPNPNTRISIVKIKDNSWFKRGFEAKFTKGETKSKELAPLDTDAAFASSDTGVAARKPELVKPQNLNAFDIISLSAGFDLSGLFEDTNCRKEARFASKQPALAIISKLEDIAKRLRLKVKKKDEGILKLEGSKEGRKGVLSIDAEIFVVNPSFHLVEVKKSSGDTLEYQKLWNQDMRPALTDIVWAWQGDQQQQQESLVCSLGQSL

SEQ ID NO: 13232 - protein, 453 aa, Persea americana
MDNKGGILMQRFELGRLLGQGTFAKVYHARNLKSSQSVAIKVIDKEKVLKVGMIDQIKREISTMRLASHPNVVQLYEVMATKTKIYFVLEYVKGGELFNKVAKGKLKEDVAWKYFQQLVSAVDFCHSRGVYHRDLKPENLLVDENENLKVTDFGLSALAESKRQDGLLHTTCGTPAYVAPEVISRKGYDGAKADIWSCGVILFVLLAGYLPFHDSNLMELYRKVGKAEYKCPNWFPPEVRRLLARILDPNPNTRISIVKIKDNSWFKRGFEAKFTKGETKSKELAPLDTDAAFASSDTGVAARKPELVKPQNLNAFDIISLSAGFDLSGLFEDTNCRKEARFASKQPASAIISKLEDIAKRLRLKVKKKDEGILKLKGSKEGRKGVLSIDAEVFVVNPSFHLVEVKKSSGDTLEYQKLWNQDMRPALTDIVWAWQGDQQQQQESLVCSLGQSL

SEQ ID NO: 13233 - protein, 453 aa, Persea americana
MDNKGGILMQRFELGRLLGQGTFAKVYHARNLKSSQSVAIKVIDKEKVLKVGMIDQIKREIATMRLASHPNVVQLYEVMATKTKIYFVLEYVKGGELFNKVAKGKLKEDVARKYFQQLVSAVDFCHSRGVYHRDLKPENLLLDENENLKVTDFGLSALAESKRQDGLLHTTCGTPAYVAPEVISRKGYDGAKADIWSCGVILFVLLAGYLPFHDSNLMELYRKVGKAEYKCPNWFPPEVRRLLARILDPNPNTRISIAKIKDNSWFKRGFEAKFAKGETKSKELAPLDTDAAFASSDTGVAARKPELVKPQHLNAFDIISLSAGFDLSGLFEDTNCRKEARFASKQPASTIISKLEDIAKRLRLKVKKKDEGILKLEGSKEGRKGVLSIDAEIFVVNPSFHLVEVKKSSGDTLEYQKLWNQDMRPALTDIVWAWQGDQQQQQESLVCSQGQSL

SEQ ID NO: 13234 - protein, 453 aa, Persea americana
MDNKGGILMQRFELGRLLGQGTFAKVYHARNLKSNQSVAIKVIDKEKVLKVGMIDQIKREISTMRLASHPNVVQLYEVMATKTKIYFVLEYVKGGELFNKVAKGKLKEDVARKYFQQLVSAVDFCHSRGVYHRDLKPENLLVDENENLKVTDFGLSALAESKRQDGLLHTTCGTPAYVAPEVISRKGYDGAKADIWSCGVILFVLLAGYLPFHDSNLMELYRKVGKAEYKCPNWFPPEVRRLLARILDQNPNTRISIAKIKDNSWFKRGFEAKFAKGETKFKELAPLNTDAAFASSDTGVAARKPELVKPQNLNAFDIISLSAGFDLSGLFEDTNCRKEARFASKQPASTIISKLEDIAKRLRLKVKKKDEGILKLEGSKEGRKGVLSIDAEIFVVNPSFHLVEVKKSSGDTLEYQKLWNQDMRPALTDIVWAWQGDQQQQQESLVGSQGQSL

SEQ ID NO: 13235 - protein, 453 aa, Persea americana
MDNKGGILMQRFELGRLLGQGTFAKVYHARNLKSSQSVAIKVIDKEKVLKVGMIDQIKREIATMRLASHPNVVQLYEVMATKTKIYFVLEYVKGGELFNKVAKGKLKEDVARKYFQQLVSAVDFCHSRGVYHRDLKPENLLVDENENLKVTDFGLSALAESKRQDGLLHTTCGTPAYVAPEVISRKGYDGAKADIWSCGVILFVLLAGYLPFHDSNLMELYRKVGKAEYKCPNWFPPEVRRLLARILDPNPNTRISIAKIKDNSWFKRGFEAKFAKGETKSKELAPLDTDAAFASSDAGVAARKPELVKPQHLNAFDIISLSAGFDLSGLFEDTNCRKEARFASKQPASTIISKLEDIAKRLRLKVKKKDEGILKLEGSKEGRKGVLSIDAEIFVVNPSFHLVEVKKSSGDTLEYQKLWNQDMRPALTDIVWAWQGDQQQQRESLVCSQGQSL

SEQ ID NO: 13236 - protein, 453 aa, Persea americana
MDNKGGILMQRFELGRLLGQGTFAKVYHARNLKSSQSVAIKVIDKEKVLKVGMIDQIKREISTMRLASHPNVVQLYEVMATKTKIYFVLEYVKGGELFNKVAKGKLKEDVAWKYFQQLVSAVDFCHSRGVYHRDLKPENLLVDENENLKVTDFGLSALAESKRQDGLLHTTCGTPAYVAPEVISRKGYDGAKADIWSCGVILFVLLAGYLPFHDSNLMELYRKVGKAEYKCPNWFPPEVRRLLARILDPNPNTRISIVKIKDNSWFKRGFEAKFTKGETKSKELAPLDTDAAFASTDTGVAARKPELVKPQNLNAFDIISLSAGFDLSGLFEDTNCRKEARFASKQPASTIISKLEDIAKRLRLKVKKKDEGILKLEGSKEGRKGVLSIDAEIFVVNPSFHLVEVKKSSGDTLEYQKLWNQDMRPALTDIVWAWQGDQQQQQESLVGSQGQSL

SEQ ID NO: 13237 - protein, 453 aa, Persea americana
MDNKGGILMERFELGRLLGQGTFAKVYHARNLKSSQSVAIKVIDKEKVLKVGMIDQIKREIATMRLASHPNVVQLYEVMATKTKIYFVLEYVKGGELFNKVAKGKLKEDVARKYFQQLVSAVDFCHSRGVYHRDLKPENLLVDENENLKVTDFGLSALAESKRQDGLLHTTCGTPAYVAPEVISRKGYDGAKADIWSCGVILFVLLAGYLPFHDSNLMELYRKVGKAEYKCPNWFPPEVRRLLARILDPNPNTRISIAKIKDNSWFKRGFEAKFAKGETKSKELAPLDTDAAFASSDTGVAARKPELVKPQHLNAFDIISLSAGFDLSGLFEDTNCRKEARFASKQPASTIISKLEDIAKRLRLKVKKKDEGILKLEGSKEGRKGVLSIDAEIFVVNPSFHLVEVKKSSGDTLEYQKLWNQEMRPALTDIVWAWQGDQQQQQESLVCSQGQSL

SEQ ID NO: 13238 - protein, 453 aa, Persea americana
MDNKGGILMQRFELGRLLGQGTFAKVYHARNLKSSQSVAIKVIDKEKVLKVGMIDQIKREIATMRLASHPNVVQLYEVMATKTKIYFVLEYVKGGELFNKVAKGKLKEDVARKYFQQLVSAVDFCHSRGVYHRDLKPENLLVDENENLKVTDFGLSALAESKRQDGLLHTTCGTPAYVAPEVISRKGYDGAKADIWSCGVILFVLLAGYLPFHDSNLMELYRKVGKAEYKCPNWFPPEVRRLLARILDPNPNTRISIAKIKDNSWFKRGFEAKSAKGETKSKELAPLDTDAAFASSDTGVAARKPELVKPQHLNAFDIISLSAGFDLSGLFEDTNCRKEARFASKQPASTIISKLEDIAKRLRLKVKKKDEGILKLEGSKEGRKGVLSIDAEIFVVNPSFHLVEVKKSSGDTLEYQKLWNQDMRPALTDIVWAWQGDQQQQQESLVCSQGQSL

SEQ ID NO: 13239 - protein, 453 aa, Persea americana
MDNKGGILMQRFELGRLLGQGTFAKVYHARNLKSSQSVAIKVIDKDKVLKVGMIDQIKREIATMRLASHPNVVQLYEVMATKTKIYFVLEYVKGGELFNKVAKGKLKEDVARKYFQRLVSAVDFCHSRGVYHRDLKPENLLVDENENLKVTDFGLSALAESKRQDGLLHTTCGTPAYVAPEVISRKGYDGAKADIWSCGVILFVLLAGYLPFHDSNLMELYRKVGKAEYKCPNWFPPEVRRLLARILDPNPNTRISIAKIKDNSWFKRGFEAKFAKGETKSKELAPLDTDAAFASSDTGVAARKPELVKPQHLNAFDIISLSAGFDLSGLFEDTNCRKEARFASKQPASTIISKLEDIAKRLRLKVKKKDEGILKLEGSKEGRKGVVSIDAEIFVVNPSFHLVEVKKSSGDTLEYQKLWNQDMRPALTDIVWAWQGDQQQQQESLVCSQGQSL

SEQ ID NO: 13240 - protein, 453 aa, Persea americana
MDNKGGILMQRFELGRLLGQGTFAKVYHARNLKSSQSVAIKVIDKEKVLKVGMIDQIKREIATMRLASHPNVVQLYEVMATKTKIYFVLEYVKGGELFNKVAKGKLKEDVARKYFQQLVSAVDFCHSRGVYHRDLKPENLLVDENENLKVTDFGLSALAESKRQDGLLHTTCGTPAYVAPEVISRKGYDGAKADIWSCGVILFVLLAGYLPFHDSNLMELYRKVGKAEYKCPNWFPPEVRRLLARILDPNPNTRISIAKIKDNSWFKRGFEAKFTKGETKSKELAPLDTDAAFASSDTGVAARKPELVKPQHLNAFDIISLSAGFDLSGLFEDTNCRKEARFASKQPASTIISKLEDIAKRLRLKVKKKDEGILKLEGSKEGRKGVLSIDAEIFVVNPSFHLVEVKKSSGDTLEYQKLWNQDMRPALTDIVWAWQGDQQQQQESLVCSQGQSL

SEQ ID NO: 13241 - protein, 139 aa, Streptomyces collinus
MYREMLKSKIHRATVTQADLHYVGSLTLDSTLMAAANLLPGEKVDVVDIDNGARLSTYVIEGPAGSGVVGINGAAARLISPGDLVIVISYAAMTEEQARAYRPSVVFVDDGNRPQHVGSDPAEAPDGADDLIRGDTVDA

SEQ ID NO: 13242 - protein, 438 aa, Clostridium botulinum
GKVIVAKFGGSSLSDSALFRKVRSIIYDNENRRYIVPSAPGKRFKKDYKITDLLYLCHAHRESGISFDDVFKHIEERYLNLAKELRVKVDIKNKLEEIKREIEAGASRDFAASRGEYLNGLILADYLNYQFIDAAEIIHFKKYGSLDLRKTEKAIKEKIKNVKKAVIPGFYGALPDGTIKTFSRGGSDVTGAIVARAVEASLYENWTDVSGFLMADPNIINDPKPIEVISYKELRELSYMGAKVLHEESIFPVRDVKIPINIKNTNRAEDKGTLIVDDDKALNYTGSITGIAGKKGFTVIAIHKMLMNSELGFCRKLLSILEENGVAFENIPSGIDSVSLVIEDSQLGNKLDIILEEIKRQCNPDSLEVHVNMALIATVGNGMNRTKGISAKIFKGLLEEDVNIRMINQGSSEINIIVGVENDDFERAIRGIYNTFIK

SEQ ID NO: 13243 - protein, 436 aa, Clostridium botulinum
VIVAKFGGSSLSDSDLFRKVRSIIYDNENRRYIVPSAPGKRFKKDYKITDLLYLCHAHRESGISFDDVFKHIEERYLNLAKELRVKVDIKNKLEEIKREIEAGASRDFAASRGEYLNGLILADYLNYQFIDAAEIIHFKKYGSLDLRKTEKAIKEKIKNVKKAVIPGFYGALPDGTIKTFSRGGSDVTGAIVARAVEASLYENWTDVSGFLMADPNIINDPKPIEVISYKELRELSYMGAKVLHEESIFPVRDVKIPINIKNTNRAEDKGTLIVDDDKALNYTGSITGIAGKKGFTVIAIHKMLMNSELGFCRKLLSILEENGVAFENIPSGIDSVSLVIEDSQLGNKLDIILEEIKRQCNPDSLEVHVNMALIATVGNGMNRTKGISAKIFKGLLEEDVNIRMINQGSSEINIIVGVENDDFERAIRGIYNTFIK

SEQ ID NO: 13244 - protein, 438 aa, Clostridium botulinum
GKVIVAKFGGSSLSDSELFRKVRSIIYDNENRRYIVPSAPGKRFKKDYKITDLLYLCHAHRESGISFDDVFKHIEERYLNLAKELRVKVDIKNKLEEIKREIEAGASRDFAASRGEYLNGLILADYLNYQFIDAAEIIHFKKYGSLDLRKTEKAIKEKIKNVKKAVIPGFYGALPDGTIKTFSRGGSDVTGAIVARAVEASLYENWTDVSGFLMADPNIINDPKPIEVISYKELRELSYMGAKVLHEESIFPVRDVKIPINIKNTNRAEDKGTLIVDDDKALNYTGSITGIAGKKGFTVIAIHKMLMNSELGFCRKLLSILEENGVAFENIPSGIDSVSLVIEDSQLGNKLDIILEEIKRQCNPDSLEVHVNMALIATVGNGMNRTKGISAKIFKGLLEEDVNIRMINQGSSEINIIVGVENDDFERAIRGIYNTFIK

SEQ ID NO: 13245 - protein, 437 aa, Clostridium botulinum
KVIVAKFGGSSLSDSELFRKVRSIIYDNENRRYIVPSAPGKRFKKDYKITDLLYLCHAHRESGISFDDVFKHIEERYLNLAKELRVKVDIKNKLEEIKREIEAGASRDFAASRGEYLNGLILADYLNYQFIDAAEIIHFKKYGSLDLRKTEKAIKEKIKNVKKAVIPGFYGALPDGTIKTFSRGGSDVTGAIVARAVEASLYENWTDVSGFLMADPNIINDPKPIEVISYKELRELSYMGAKVLHEESIFPVRDVKIPINIKNTNRAEDKGTLIVDDDKALNYTGSITGIAGKKGFTVIAIHKMLMNSELGFCRKLLSILEENGVAFENIPSGIDSVSLVIEDSQLGNKLDIILEEIKRQCNPDSLEVHVNMALIATVGNGMNRTKGISAKIFKGLLEEDVNIRMINQGSSEINIIVGVENDDFERAIRGIYNTFIK

SEQ ID NO: 13246 - protein, 438 aa, Clostridium botulinum
GKVIVAKFGGSSLSDSDLFRKVRSIIYDNENRRYIVPSAPGKRFKKDYKITDLLYLCHAHRESGISFDDVFKHIEERYLNLAKELRVKVDIKNKLEEIKREIEAGASRDFAASRGEYLNGLILADYLNYQFIDAAEIIHFKKYGSLDLRKTEKAIKEKIKNVKKAVIPGFYGALPDGTIKTFSRGGSDVTGAIVARAVEASLYENWTDVSGFLMADPNIINDPKPIEVISYKELRELSYMGAKVLHEESIFPVRDVKIPINIKNTNRAEDKGTLIVDDDKALNYTGSITGIAGKKGFTVIAIHKMLMNSELGFCRKLLSILEENGVAFENIPSGIDSVSLVIEDSQLGNKLDIILEEIKRQCNPDSLEVHVNMALIATVGNGMNRTKGISAKIFKGLLEEDVNIRMINQGSSEINIIVGVENDDFERAIRGIYNTFIK

SEQ ID NO: 13247 - protein, 437 aa, Clostridium botulinum
KVIVAKFGGSSLSHSALFRKVRSIIYDNENRRYIVPSAPGKRFKKDYKITDLLYLCHAHRESGISFDDVFKHIEERYLNLAKELRVKVDIKNKLEEIKREIEAGASRDFAASRGEYLNGLILADYLNYQFIDAAEIIHFKKYGSLDLRKTEKAIKEKIKNVKKAVIPGFYGALPDGTIKTFSRGGSDVTGAIVARAVEASLYENWTDVSGFLMADPNIINDPKPIEVISYKELRELSYMGAKVLHEESIFPVRDVKIPINIKNTNRAEDKGTLIVDDDKALNYTGSITGIAGKKGFTVIAIHKMLMNSELGFCRKLLSILEENGVAFENIPSGIDSVSLVIEDSQLGNKLDIILEEIKRQCNPDSLEVHVNMALIATVGNGMNRTKGISAKIFKGLLEEDVNIRMINQGSSEINIIVGVENDDFERAIRGIYNTFIK

SEQ ID NO: 13248 - protein, 316 aa, Clostridium botulinum
HKVSVHQKYIVEDVKEEFVVDYLYKAIKSEALYEQDYMLGTSFARPLMAKKLVEIAHKEQAKYICHGCTGKGNDQVRFEVGVKAQDPTIKIIAPWRIWDIKSREDAIDYAKKVGVEVPVTKKKIYSVDRNLWHVSHEGGDLEDLKNEHKEDMYFMVTPPEKAKDEPTYLEIYFKKGVPVKINGEFLNPVDIIDKLNTIGGENGIGIADIIENRLVGMKSRGIYETPAGTLLYAAHKKLESVTLDKYTYQYKKLVSAQYGELVYNGLWFTALREAIDAFVDKTQENVTGTVKLKLYKGNIKPCSVDTEYALYDEGIS

SEQ ID NO: 13249 - protein, 315 aa, Clostridium botulinum
  misc_feature (9)..(9): Xaa can be any naturally occurring amino acid
  unsure (1)..(315): unsure at all Xaa locations
KVSVHQKYXVEDVKEEFVVDYLYKAIKSEALYEQDYMLGTSFARPLMAKKLVEIAHKEQAKYICHGCTGKGNDQVRFEVGVKAQDPTIKIIAPWRIWDIKSREDAIDYAKKVGVEVPVTKKKIYSVDRNLWHVSHEGGDLEDLKNEHKEDMYFMVTPPEKAKDEPTYLEIYFKKGVPVKINGEFLNPVDIIDKLNTIGGENGIGIADIIENRLVGMKSRGIYETPAGTLLYAAHKKLESVTLDKYTYQYKKLVSAQYGELVYNGLWFTALREAIDAFVDKTQENVTGTVKLKLYKGNIKPCSVDTEYALYDEGIS

SEQ ID NO: 13250 - protein, 319 aa, Clostridium botulinum
KVSVHQKYIVEDVKEEFVVDYLYKAIKSEALYEQDYMLGTSFARPLMAKKLVEIAHKEQAKYICHGCTGKGNDQVRFEVGVKAQDPTIKIIAPWRIWDIKSREDAIDYAKKVGVEVPVTKKKIYSVDRNLWHVSHEGGDLEDLKNEHKEDMYFMVTPPEKAKDEPTYLEIYFKKGVPVKINGEFLNPVDIIDKLNTIGGENGIGIADIIENRLVGMKSRGIYETPAGTLLYAAHKKLESVTLDKYTYQYKKLVSAQYGELVYNGLWFTALREAIDAFVDKTQENVTGTVKLKLYKGNIKPCSVDTEYALYDEGISSFDV

SEQ ID NO: 13251 - protein, 422 aa, Streptomyces coelicolor
ISEFMSDITVTNWAGNITYTAKELLRPHSLDALRALVADSARVRVLGSGHSFNEIAEPGDGGVLLSLAGLPSVVDVDTAARTVRVGGGVRYAELARVVHARGLALPNMASLPHISVAGSVATGTHGSGVGNGSLASVVREVELVTADGSTVVIARGDERFGGAVTSLGALGVVTSLTLDLEPAYEMEQHVFTELPLAGLDPATFETVMAAAYSVSLFTDWRAPGFRQVWLKRRTDRPLDGFPYAAPAAEKMHPVPGMPAVNCTEQFGVPGPWHERLPHFRAEFTPSSGAELQSEYLMPREHALAALHAMDAIRETLAPVLQTCEIRTVAADAQWLSPAYGRDTVAAHFTWVEDTAAVLPVVRRLEEALVPFAARPHWGKVFTVPAGELRALYPRLADFGALAGALDPAGKFTNAFVRGVLAG

SEQ ID NO: 13252 - protein, 85 aa, Euphorbia esula
LVTDIPATTGANFGQEVVCYESPRPTAGIHRFVFVLFRQLGRQTVYPPGWRQNFNTRDFAELYNLGSPVAAVYFNCQRESGSGGR

SEQ ID NO: 13253 - protein, 574 aa, uncultured Pseudomonas sp.
MELLSGAEMVVRFLRDEGVKHIYGYPGGALLHVYDALFKEPEVEHILVRHEQAATHMADGYARATGKAGVVLVTSGPGATNAITGIATAYMDSIPMVILSGQVPSTMVGTDAFQETDMIGISRPIVKHSFMIKHASEIPEVLKKAFYLAQSGRPGPVVVDIPKDMTNPAEKFEYVYPKKVKLRSYSPAVRGHSGQIRKAAEMLLAAKRPIVYSGGGVILGGGSEALTEIAKSLNLPVTNTLMGLGGFPGTDRQFLGMLGMHGSFTANMAMHHADVIFAVGARFDDRVVNGPAKFCPNAKIIHIDIDPASISKMIKADVPIVGPVDSVLSEMLGILKEIGEQPDKAALDAWWKQIDEWRGNGELFPYDKGDGNVIKPQKVIETLCEVTNGDAFVTSDVGQHQMFAAQYYRFNKPNRWINSGGLGTMGFGFPAAMGVKLNFPDQDVACVTGEGSIQMNIQELSTCMQYGLPVKIVNLNNGVLGMVRQSQDMAYNGRHSHSYVESLPDFIKLAEAYGHVGIRITSLKDLKPKLEEAFAMKDRLVFIDIAVDRSEHVYPMQIKDGSMRDMWLSKTERT

SEQ ID NO: 13254 - protein, 1168 aa, Arabidopsis thaliana
MVSGVGGSGGGRGGEEEPSSSHTPNNRRGGEQAQSSGTKSLRPRSNTESMSKAIQQYTVDARLHAVFEQSGESGKSFDYSQSLKTTTYGSSVPEQQITAYLSRIQRGGYIQPFGCMIAVDESSFRIIGYSENAREMLGLMPQSVPTLEKPEILAMGTDVRSLFTSSSSILLERAFVAREITLLNPVWIHSKNTGKPFYAILHRIDVGVVIDLEPARTEDPALSIAGAVQSQKLAVRAISQLQALPGGDIKLLCDTVVESVRDLTGYDRVMVYKFHEDEHGEVVAESKRDDLEPYIGLHYPATDIPQASRFLFKQNRVRMIVDCNATPVLVVQDDRLTQSMCLVGSTLRAPHGCHSQYMANMGSIASLAMAVIINGNEDDGSNVASGRSSMRLWGLVVCHHTSSRCIPFPLRYACEFLMQAFGLQLNMELQLALQMSEKRVLRTQTLLCDMLLRDSPAGIVTQSPSIMDLVKCDGAAFLYHGKYYPLGVAPSEVQIKDVVEWLLANHADSTGLSTDSLGDAGYPGAAALGDAVCGMAVAYITKRDFLFWFRSHTAKEIKWGGAKHHPEDKDDGQRMHPRSSFQAFLEVVKSRSQPWETAEMDAIHSLQLILRDSFKESEAAMNSKVVDGVVQPCRDMAGEQGIDELGAVAREMVRLIETATVPIFAVDAGGCINGWNAKIAELTGLSVEEAMGKSLVSDLIYKENKATVNKLLSRALRGDEEKNVEVKLKTFSPELQGKAVFVVVNACSSKDYLNNIVGVCFVGQDVTSQKIVMDKFINIQGDYKAIVHSPNPLIPPIFAADENTCCLEWNMAMEKLTGWSRSEVIGKMIVGEVFGSCCMLKGPDALTKFMIVLHNAIGGQDTDKFPFPFFDRNGKFVQALLTANKRVSLEGKVIGAFCFLQIPSPELQQALAVQRRQDTECFTKAKELAYICQVIKNPLSGMRFANSLLEATDLNEDQKQLLETSVSCEKQISRIVGDMDLESIEDGSFVLKREEFFLGSVINAIVSQAMFLLRDRGLQLIRDIPEEIKSIEVFGDQIRIQQLLAEFLLSIIRYAPSQEWVEIHLSQVSKQMADGFAAIRTEFRMACPGEGLPPELVRDMFHSSRWTSPEGLGLSVCRKILKLMNGEVQYIRESERSYFLIILELPVPRKRPLSTASGSGDMMLMMPY

SEQ ID NO: 13255 - protein, 1168 aa, Arabidopsis thaliana
MVSGVGGSGGGRGGEEEPSSSHTPNNRRGGEQAQSSGTKSLRPRSNTESMSKAIQQYTVDARLHAVFEQSGESGKSFDYSQSLKTTTYGSSVPEQQITAYLSRIQRGGYIQPFGCMIAVDESSFRIIGYSENAREMLGLMPQSVPTLEKPEILAMGTDVRSLFTSSSSILLERAFVAREITLLNPVWIHSKNTGKPFYAILHRIDVGVVIDLEPARTEDPALSIAGAVQSQKLAVRAISQLQSLPGGDIKLLCDTVVESVRDLTGYDRVMVYKFHEDEHGEVVAESKRDDLEPYIGLHYPATDIPQASRFLFKQNRVRMIVDCNATPVLVVQDDRLTQSMCLVGSTLRAPHGCHSQYMANMGSIASLAMAVIINGNEDDGSNVASGRSSMRLWGLVVCHHTSSRCIPFPLRYACEFLMQAFGLQLNMELQLALQMSEKRVLRTQTLLCDMLLRDSPAGIVTQSPSIMDLVKCDGAAFLYHGKYYPLGVAPSEVQIKDVVEWLLANHADSTGLSTDSLGDAGYPGAAALGDAVCGMAVAYITKRDFLFWFRSHTAKEIKWGGAKHHPEDKDDGQRMHPRSSFQAFLEVVKSRSQPWETAEMDAIHSLQLILRDSFKESEADMNSKVVDGVVQPCRDMAGEQGIDELGAVAREMVRLIETATVPIFAVDAGGCINGWNAKIAELTGLSVEEAMGKSLVSDLIYKENEATVNKLLSRALRGDEEKNVEVKLKTFTPELQGTAVFVVVNACSSKDYLNNIVGVCFVGQDVTSQKIVMDKFINIQGDYKAIVHSPNPLIPPIFAADENTCCLEWNMAMEKLTGWSRSEVIGKMIVGEVFGSCCMLKGPDALTKFMIVLHNAIGGQDTDKFPFPFFDRNGKFVQALLTANKRVSLEGKVIGAFCFLQIPSPELQQALAVQRRQDTECFTKAKELAYICQVIKNPLSGMRFANSLLEATDLNEDQKQLLETSVSCEKQISRIVGDMDLESIEDGSFVLKREEFFLGSVINAIVSQAMFLLRDRGLQLIRDIPEEIKSIEVFGDQIRIQQLLAEFLLSIIRYAPSQEWVEIHLSQVSKQMADGFAAIRTEFRMACPGEGLPPELVRDMFHSSRWTSPEGLGLSVCRKILKLMNGEVQYIRESERSYFLIILELPVPRKRPLSTASGSGDMMLMMPY

SEQ ID NO: 13256 - protein, 1168 aa, Arabidopsis thaliana
MVSGVGGSGGGRGGEEEPSSSHTPNNRRGGEQAQSSGTKSLRPRSNTESMSKAIQQYTVDARLHAVFEQSGESGKSFDYSQSLKTTTYGSSVPEQQITAYLSRIQRGGYIQPFGCMIAVDESSFRIIGYSENAREMLGLMPQSVPTLEKPEILAMGTDVRSLFTSSSSILLERAFVAREITLLNPVWIHSKNTGKPFYAILHRIDVGVVIDLEPARTEDPALSIAGAVQSQKLAVRAISQLQSLPGGDIKLLCDTVVESVRDLTGYDRVMVYKFHEDEHGEVVAESKRDDLEPYIGLHYPATDIPQASRFLFKQNRVRMIVDCNATPVLVVQDDRLTQSMCLVGSTLRAPHGCHSQYMANMGSIASLAMAVIINGNEDDGSNVASGRSSMRLWGLVVCHHTSSRCIPFPLRYACEFLMQAFGLQLNMELQLALQMSEKRVLRTQTLLCDMLLRDSPAGIVTQSPSIMDLVKCDGAAFLYHGKYYPLGVAPSEVQIKDVVEWLLANHADSTGLSTDSLGDAGYPGAAALGDAVCGMAVAYITKRDFLFWFRSHTAKEIKWGGAKHHPEDKDDGQRMHPRSSFQAFLEVVKSRSQPWETAEMDAIHSLQLILRDSFKESEAAMNSKVVDGVVQPCRDMAGEQGIDELGAVAREMVRLIETATVPIFAVDAGGCINGWNAKIAELTGLSVEEAMGKSLVSDLIYKENEATVNKLLSRALRGDEEKNVEVKLKTFTPELQGKAVFVVVNACSSKDYLNNIVGVCFVGQDVTSQKIVMDKFINIQGDYKAIVHSPNPLIPPIFAADENTCCLEWNMAMEKLTGWSRSEVIGKMIVGEVFGSCCMLKGPDALTKFMIVLHNAIGGQDTDKFPFPFFDRNGKFVQALLTANKRVSLEGKVIGAFCFLQIPSPELQQALAVQRRQDTECFTKAKELAYICQVIKNPLSGMRFANSLLEATDLNEDQKQLLETSVSCEKQISRIVGDMDLESIEDGSFVLKREEFFLGSVINAIVSQAMFLLRDRGLQLIRDIPEEIKSIEVFGDQIRIQQLLAEFLLSIIRYAPSQEWVEIHLSQVSKQMADGFAAIRTEFRMACPGEGLPPELVRDMFHSSRWTSPEGLGLSVCRKILKLMNGEVQYIRESERSYFLIILELPVPRKRPLSTASGSGDMMLMMPY

SEQ ID NO: 13257 - protein, 1168 aa, Arabidopsis thaliana
MVSGVGGSGGGRGGEEEPSSSHTPNNRRGGEQAQSSGTKSLRPRSNTESMSKAIQQYTVDARLHAVFEQSGESGKSFDYSQSLKTTTYGSSVPEQQITAYLSRIQRGGYIQPFGCMIAVDESSFRIIGYSENAREMLGLMPQSVPTLEKPEILAMGTDVRSLFTSSSSILLERAFVAREITLLNPVWIHSKNTGKPFYAILHRIDVGVVIDLEPARTEDPALSIAGAVQSQKLAVRAISQLQALPGGDIKLLCDTVVESVRDLTGYDRVMVYKFHEDEHGEVVAESKRDDLEPYIGLHYPATDIPQASRFLFKQNRVRMIVDCNATPVLVVQDDRLTQSMCLVGSTLRAPHGCHSQYMANMGSIASLAMAVIINGNEDDGSNVASGRSSMRLWGLVVCHHTSSRCIPFPLRYACEFLMQAFGLQLNMELQLALQMSEKRVLRTQTLLCDMLLRDSPAGIVTQSPSIMDLVKCDGAAFLYHGKYYPLGVAPSEVQIKDVVEWLLANHADSTGLSTDSLGDAGYPGAAALGDAVCGMAVAYITKRDFLFWFRSHTAKEIKWGGAKHHPEDKDDGQRMHPRSSFQAFLEVVKSRSQPWETAEMDAIHSLQLILRDSFKESEAAMNSKVVDGVVQPCRDMAGEQGIDELGAVAREMVRLIETATVPIFAVDAGGCINGWNAKIAELTGLSVEEAMGKSLVSDLIYKENEATVNKLLSRALRGDEEKNVEVKLKTFSPELQGKAVFVVVNACSSKDYLNNIVGVCFVGQDVTSQKIVMDKFINIQGDYKAIVHSPNPLIPPIFAADENTCCLEWNMAMEKLTGWSRSEVIGKMIVGEVFGSCCMLKGPDALTKFMIVLHNAIGGQDTDKFPFPFFDRNGKFVQALLTANKRVSLEGKVIGAFCFLQIPSPELQQALAVQRRQDTECFTKAKELAYICQVIKNPLSGMRLANSLLEATDLNEDQKQLLETSVSCEKQISRIVGDMDLESIEDGSFVLKREEFFLGSVINAIVSQAMFLLRDRGLQLIRDIPEEIKSIEVFGDQIRIQQLLAEFLLSIIRYAPSQEWVEIHLSQVSKQMADGFAAIRTEFRMACPGEGLPPELVRDMFHSSRWTSPEGLGLSVCRKILKLMNGEVQYIRESERSYFLIILELPVPRKRPLSTASGSGDMMLMMPY

SEQ ID NO: 13258 - protein, 404 aa, Hevea brasiliensis
MAPVAAAEIKPRDVCIVGVARTPMGGFLGLLSTLPATKLGSIAIEAALKRASVDPSLVQEVFFGNVLSANLGQAPARQAALGAGIPNSVVCTTVNKVCASGMKATMLAAQSIQLGINDVVVAGGMESMSNAPKYLAEARKGSRLGHDSLVDGMLKDGLWDVYNDVGMGSCAEICADNHSITREDQDKFAIHSFERGIAAQESGAFAWEIVPVEVSGGRGKPLTIVDKDEGLGKFDPVKLRKLRPSFKENGGTVTAGNASSISDGAAALILVSGETALKLGLQVIAKIRGYADAAQAPELFTTAPALAIPKTIANAGLDASQVDYYEINEAFAVVALANQKLLGLNPEKVNVHGGAVSLGHPLGCSGARILVTLLGVLRKKNAKYGVGGVCNGGGGASALVVELL

SEQ ID NO: 13259 - protein, 408 aa, Hevea brasiliensis
MAPAAATAVAAEIKPRDVCIVGVARTPMGGFLGSLCTLSATKLGSIAIEAALKRANVDPSLVQEVFFGNVLSANLGQAPARQAALGAGIPNSVVCTTVNKVCASGMKATMLAAQSIQLGINDVVVAGGMESMSNAPKYLAEARKGSRLGHDSLVDGMLKDGLWDVYNDVGMGSCAEICADNHSITREDQDKFAIHSFERGIAAQESGAFAWEIVPVEVSGGRGKPSTIVDKDEGLGKFDPVKLRKLRPSFKENGGTVTAGNASSISDGAAAVILVSGETALKLGLQVIAKIGGYADAAQAPELFTTSPALAIPKTIANGGLDASQVDYYEINEAFAVVALANQKLLGLNPEKINVHGGAVSLGHPLGCSGARILVTLLGVLRQKNGKYGVGGVCNGGGGASALVVELL

SEQ ID NO: 13260 - protein, 621 aa, Lotus japonicus
MKLKTGLLLFFILLLGHVCFHVESNCLKGCDLALASYYILPGVFILQNITTFMQSEIVSSNDAITSYNKDKILNDINIQSFQRLNIPFPCDCIGGEFLGHVFEYSASKGDTYETIANLYYANLTTVDLLKRFNSYDPKNIPVNAKVNVTVNCSCGNSQVSKDYGLFITYPIRPGDTLQDIANQSSLDAGLIQSFNPSVNFSKDSGIAFIPGRDKNGVYVPLYHRWAGLASGAAVGISIAGTFVLLLLAFCMYVRYQKKEEEKAKLPTDISMALSTQDASSSAEYETSGSSGPGTASATGLTSIMVAKSMEFSYQELAKATNNFSLDNKIGQGGFGAVYYAELRGKKTAIKKMDVQASTEFLCELKVLTHVHHLNLVRLIGYCVEGSLFLVYEHIDNGNLGQYLHGSGKEPLPWSSRVQIALDAARGLEYIHEHTVPVYIHRDVKSANILIDKNLRGKVADFGLTKLIEVGNSTLQTRLVGTFGYMPPEYAQYGDISPKIDVYAFGVVLFELISAKNAVLKTGELVAESKGLVALFEEALNKSDPCDALRKLVDPRLGENYPIDSVLKIAQLGRACTRDNPLLRPSMRSLVVALMTLSSLTEDCDDESSYESQTLINLLSVR

SEQ ID NO: 13261 - protein, 319 aa, Pseudomonas putida
MNEELLNVIVRKREIQGADVVVLDLGRADGAALPAFEAGAHVDIHVAPGLVRQYSLCSDPAEVSVYRLGVLKDPASRGGSVQVHEALHEGREVQISAPRNLFPLAKDGKRSILLGGGIGITPMIAMAHALYRQGADFELHYCGRSRSRSAFLDELAKAPFAAQVVTHFDDEDAAQRLDLPSVLGKADAGVHLYTCGPSGFMDWVIAGARAQGFEEAQIHKEYFQVEVDVSGGSFEVVAARSNKTVQVAEGQSILDALAQVGIKIDISCEQGVCGTCMCEVLEGEPDHRDVYLTDEEKAANDQILVCCSRAKTNKLVLDI

SEQ ID NO: 13262 - protein, 228 aa, Streptococcus suis
VSEEQAHELLNDVNYFGVMLVYMGVVEGMVSGAIHSTASTVRPALQIIKTEPGVSKTSGAFLMVKGEERYIFGDCAINIDPDAQTLAEIAINSARTAKMFGIDPKVAMLSYSTKGSGSGPKVDKVVEATKIAQKLRPELDLDGELQFDAAFVPATGKLKAPGSSVAGQATVFIFPGISAGNIGYKIAERMGGFAAVGPVLQGLNQPVNDLSRGCNPDDVYNLTLITAV

SEQ ID NO: 13263 - protein, 355 aa, Pinus pinaster
MNLALAPEMQVSSSSFEGIPDMAVAVQNLGGRRSKPHPTQVQKCPRCDSLNTKFCYYNNYNLSQPRYFCKNCRRYWTKGGALRNVPVGGGCRKNKRSNKRNSDKRPAASSALPASAADNQEAGGASAASSSSSLVNGSDRSSIGFESDCNNTTTSTTTTNTGGATGTPAGVSSGQLFDGMNPINPPPPSLDPQARGALLNSGNNLSSILDPSAYENAQFSCMDPVISSTPDWSRGLSMPWKQQQTLTSLLTDGIRTSLDGFLSQPPPLLEDINSLAEAATRSVFGVKTSAATVPWPSLQEDDNIKAQSLQGLEWQTANGNSSSDAGLLEIQSDLGPWGAGSWPDLGNYGPGSSLP

SEQ ID NO: 13264 - protein, 370 aa, Altoparadisium chapadense
AVQSQKLAVRAISRLQALPGGDVKLLCDTVVEHVRELTGYDRVMVYRFHEDEHGEVVAESRRDNLEPYLGLHYPATDIPQASRFLFRQNRVRMIADCHATPVRVIQDPGLSQPLCLVGSTLRAPHGCHAQYMANMGSIASLVMAVIISSGNDDEQTGRGGISSAMKLWGLVVCHHTSPRFIPFPLRYACEFLMQAFGLQLNMELQLAHQLSEKHILRTQTLLCDMLLRDSPTGIVTQSPSIMDLVKCDGAALYYHGKYYPLGVTPTESQIKDIIEWLTVCHGDSTGLSTDSLADAGYPGAAALGDAVCGMAVAYITPSDYLFWFRSHTAKEIKWGGAKHHPEDKDDGQRMHPRSSFKAFLEVVKSRSLPW

SEQ ID NO: 13265 - protein, 359 aa, Anthaenantia lanata
VRAISRLQALPGGDVKLLCDTVVEHVRELTGYDRVMVYRFHEDEHGEVVAESRRENLEPYLGLHYPATDIPQASRFLFRQNRVRMIADCHATPVRVIQDPGLSQPLCLVGSTLRAPHGCHAQYMANMGSIASLVMAVIISSGGDDEQTGRGGISSAMKLWGLVVCHHTSPRFIPFPLRYACEFLMQAFGLQLNMELQLAHQLSEKHILRTQTLLCDMLLRDSPTGIVTQSPSIMDLVKCDGAALYYHGKYYPLGVSPTESQIKDIIEWLAVCHGDSTGLSTDSLADAGYLGAAALGDAVCGMAVAYITPNDYLFWFRSHTAKEIKWGGAKHHPEDKDDGQRMHPRSSFKAFLEVVKSRS

SEQ ID NO: 13266 - protein, 369 aa, Apochloa euprepes
  misc_feature (4)..(4): Xaa can be any naturally occurring amino acid
  misc_feature (50)..(50): Xaa can be any naturally occurring amino acid
  misc_feature (74)..(74): Xaa can be any naturally occurring amino acid
  misc_feature (93)..(93): Xaa can be any naturally occurring amino acid
  misc_feature (96)..(96): Xaa can be any naturally occurring amino acid
  misc_feature (166)..(166): Xaa can be any naturally occurring amino acid
  unsure (1)..(369): unsure at all Xaa locations
VQSXKLAVRAISRLQALPGGDVKLLCDTVVEHVRELTGYDRVMVYRFHEXEHGEVVAESRRDNLEPYLGLHYPXTDIPQASRFLFRQNRVRMXADXHATPVRVIQDPGLSQPLCLVGSTLRAPHGCHAQYMANMGSIASLVMAVIMSSGADDEQTARGGISSAMKXWGLVVCHHTSPRFIPFPLRYACEFLMQAFGLQLNMELQLAHQLSEKHILRTQTLLCDMLLRDSPTGIVTQSPSIMDLVKCBGAALFYHGKYYPLGVTPTESQIKDIIEWLTVCHGDSTGLSTDSLADAGYLGAAALGDAVCGMAVAYITPSDYLFWFRSHTAKEIKWGGAKHHPEDKDDGQRMHPRSSFKAFLEVVKSRSLPW

SEQ ID NO: 13267 - protein, 355 aa, Arthropogon villosus
  misc_feature (124)..(124): Xaa can be any naturally occurring amino acid
  unsure (1)..(355): unsure at all Xaa locations
LAVRAISRLQALPGGDVKLLCDTVVEHVRELTGYDRVMVYRFHEDEHGEVVAESRRDNLEPYLGLHYPATDIPQASRFLFRQNRVRMIADCHATPVRVIQDPGLSQPLCLVGSTLRSPHGCHAXYMANMGSIASLVMAVIISSGSDDEQTGRSGISSAMKLWGLVVCHHTSPRFIPFPLRYACEFLMQAFGLQLNMELQLAHQLSEKHILRTQTLLCDMLLRDSPTGIVTQSPSIMDLVKCDGAALYYHGKYYPLGVTPTESQIKDIIEWLTVCHGDSTGLSTDSLADAGYPGAAALGDAVCGMAVAYITPSDYLFWFRSHTAKEIKWGGAKHHPEDKDDGQRMHPRSSFKAFRA

SEQ ID NO: 13268 - protein, 365 aa, Axonopus fissifolius
  misc_feature (81)..(81): Xaa can be any naturally occurring amino acid
  misc_feature (151)..(151): Xaa can be any naturally occurring amino acid
  misc_feature (231)..(231): Xaa can be any naturally occurring amino acid
  unsure (1)..(365): unsure at all Xaa locations
KLAVRATSRLQALPCGDVKLLCDTVVEQVRELTGYDRVMVYRFHEDEHGEVVAESRRDNLEPYLGLHYPATDIPQASRFLXRQNRVRMIADCHATPVRVIQDPALSQPLCLVGSTLRSPHECHAQYMANMGSIASLVMAVIVSSGGDDEQXTRGGISSAMKLWGLVVCHHTSPRFIPFPLRYACEFLMQGFGLQLNVELQLAHQMSEKHILRTQTLLCDMLLRDSPTGIVXQSPSIMDLVKCDGAALYYHGKYYPLGVSPTESQIKDIIEWLTVCHGDSTGLSTDSLADAGYLGAAALGDAVCGMAVAYITPSDYLFWFRSHTAKEIKWGGAKHHPEDKDDGQRMHPRSSFKAFLEVVKSRSIPW

SEQ ID NO: 13269 - protein, 362 aa, Canastra lanceolata
  misc_feature (136)..(150): Xaa can be any naturally occurring amino acid
  unsure (1)..(362): unsure at all Xaa locations
AVQSQKLAVRAISRLQALPGGDVKLLCDTVVEHVRELTGYDRVMVYRFHEDEHGEVVAESRRDNLEPYLGLHYPATDIPQASRFLFRQNRVRMIADCHATPVRVIQDPGLSQPLCLVGSTLRAPHGCHAQYMAKMXXXXXXXXXXXXXXXADDEQTARGGISSAMKLWGLVVCHHTSPRFIPFPLRYACEFLMQAFGLQINMELQLAHQLSEKHILRTQTLLCDMLLRDSPTGIVTQSPSIMDLVKCDGAALFYHGNYYPLGVTPTESQIKDIIEWLTVCHGDSTGLSTDSLADAGYLGAAALGDAVCGMAVAYITPSDYLFWFRSHTAKEIKWGGAKHHPEDKDDGQRMHPRSSFKAFLQA

SEQ ID NO: 13270 - protein, 369 aa, Cenchrus ciliaris
  misc_feature (127)..(139): Xaa can be any naturally occurring amino acid
  misc_feature (162)..(162): Xaa can be any naturally occurring amino acid
  misc_feature (264)..(264): Xaa can be any naturally occurring amino acid
  misc_feature (290)..(290): Xaa can be any naturally occurring amino acid
  misc_feature (293)..(293): Xaa can be any naturally occurring amino acid
  misc_feature (352)..(352): Xaa can be any naturally occurring amino acid
  unsure (1)..(369): unsure at all Xaa locations
VQSQKLAVRAISRLQALPGGDVKLLCDTVVEHVRELTGYDRVMVYRFHEDEHGEVVAECRRDNLEPYLGLHYPATDIPQASRFLFRQNRVRMIADCHATPVRVIQDPGLSQPLCLVGSTLRAPHGCXXXXXXXXXXXXXLVMAVIISSGGDDEQTTRGGISXAMKLWGLVVCHHTSPRFIPFPLRYACEFLMQAFGLQLNMELQLAHQLSEKHILRTQTLLCDMLLRDSPTGIVTQSPSIMDLVKCDGAALYYHGKYYPLGVTXTESQIKDIIEWLTVCHGDSTGLSTDXLAXAGYHGAAALGDAVCGMAVAYITPSDYLFWFRSHTAKEIKWGGAKHHPEDKDDGQRMHPXSSFKAFLEVVKSRSLPW

SEQ ID NO: 13271 - protein, 349 aa, Cenchrus myosuroides
DVKLLCDTVVEHVRELTGYDRVMVYRFHEDEHGEVVAECRRDNLEPYLGLHYPATDIPQASRFLFRQNRVRMIADCHATPVRVIQDPGLSQPLCLVGSTLRAPHGCHAQYMANMGSIASLVMAVIISSGGDDEQTTRGGISSAMKLWGLVVCHHTSPRFIPFPLRYACEFLMQAFGLQLNMELQLAHQLSEKHILRTQTLLCDMLLRDSPTGIVTQSPSIMDLVKCDGAALYYHGKYYPLGVTPTESQIKDIIEWLTVCHGDSTGLSTDSLADAGYLGAAALGDAVCGMAVAYITPSDYLFWFRSHTAKEIKWGGAKHHPEDKDDGQRMHPRSSFKAFLEVVKSRSLPW

SEQ ID NO: 13272 - protein, 349 aa, Cenchrus pilosus
DVKLLCDTVVEHVRELTGYDRVMVYRFHEDEHGEVVAECRRDNLEPYLGLHYPATDIPQASRFLFRQNRVRMIADCHAMPVRVIQDPGLSQPLCLVGSTLRAPHGCHAQYMANMGSIASLVMAVIISSGGDDEQATRGGISSAMKLWGLVVCHHTSPRFIPFPLRYACEFLMQAFGLQLNMELQLAHQLSEKHILRTQTLLCDMLLRGSPTGIVTQSPSIMDLVKCDGAALYYHGKYYPLGVTPTESQIKDIIEWLTVCHGDSTGLSTDSLADAGYHGAAALGDAVCGMAVAYITPSDYLFWFRSHTAKEIKWGGAKHHPEDKDDGQRMHPRSSFKAFLEVVKIRSLPW

SEQ ID NO: 13273 - protein, 345 aa, Chasmanthium laxum
LCDTVVEHVRELTGYDRVMVYRFHEDKHGEVVAESRRDGLEPYLGLHYPATDIPQASRFLFRQNRVRMIADCHATAVRVIQDPGLSQPLCLVGSTLRAPHGCHAQYMANMGSIASLVMAVIISSGGDDEQTSLGGISSAMKLWGLVVCHHTSPRFIPFPLRYACEFLMQAFGLQLNMELQLAHQLSEKHILRTQTLLCDMLLRDSPTGIVTQSPSIMDLVKCDGAALYYHGKYYPLGVTPTESQIKDIIEWLTMCHGDSTGLSTDSLADAGYLGAAALGDAVCGMAVAYITPSDYLFWFRSHTAKEIKWGGAKHHPKDKDDGQRMHPRSSFKAFLEVVKSRSLPW

SEQ ID NO: 13274 - protein, 370 aa, Danthoniopsis dinteri
AVQSQKLAVRAISRLQALPGGDVKLLCDTVVEHVRELTGYDRVMVYRFHEDEHGEVVAESRRDDLEPYIGLHYPATDIPQASRFLFRQNRVRMIADCHATPVKVIQDTGLSQPLCLVGSTLRAPHGCHAQYMANMGSIASLVMAVIISSGGDDEQTARGGISSAMKLLGLVVCHHTSPRFIPFPLRYACEFLMQAFGLQLNMELQLAHQLSEKHILRTQTLLCDMLLRDSPTGIVTQSPSIMDLVKCDGAALYYHGKYYPLGVTPTESQIKDIIEWLTLCHGDSTGLSTDSLADAGYLGAAALGDAVCGMAVAYITPSDYLFWFRSHTAKEIKWGGAKHHPEDKDDGQRMHPRSSFKAFLEVVKSRSLPW

SEQ ID NO: 13275 - protein, 369 aa, Dichanthelium sabulorum
VQSQKLAVRAISRLQALPGGDVKLLCDTVVEHVRELTGYDRVMVYRFHEDEHGEVVAECRRDNLEPYLGLHYPATDIPQASRFLLRQNRVRMIADCHATPVRVIQDPGLSQPLCLVGSTLRAPHGCHAQYMANMGSIASLVMAVIISSGGDDEQTARGGISSALKLWGLVVCHHTSLRFIPFPLRYACEFLMQAFGPQLNMELQLAHQLSEKHILRTQTLLCDMLLRDSPTGIVTQSPSIMDLVKCDGAALYYHGKCYPLGVTPTESQIKDIIEWLTLCHGDSTGLSTDSLADAGYLGAAALGDAVCGMAVAYITPSDYLFWFRSHTAKEIKWGGAKHHPEDKDDGQRMHPRSSFKAFLEVVKSRSLPW

SEQ ID NO: 13276 - protein, 360 aa, Digitaria ciliaris
  misc_feature (149)..(150): Xaa can be any naturally occurring amino acid
  unsure (1)..(360): unsure at all Xaa locations
AVRAISRLQALPGGDVKLLCDTVVEHVRELTGYDRVMVYRFHEDEHGEVVAESRRDNLEPYLGLHYPATDIPQASRFLFRQNRVRMIADCHATPVRVIQDPGLSQPLCLVGSTLRAPHGCHAQYMANMGSIASLVIAVIISSGGEDEQXXRGGISSAMKLWGLVVCHHTSQRFIPFPLRYACEFLMQAFGLQLNMELQLAHQMSEKHILRTQTLLCDMLLRDSPTGIVTQSHSIMDLVKCDGAALYYHGKYYPLGVTPTESQIKDIIEWLTVCHGDSTGLSTDSLADAGYHGAAALGDAVCGMAVAYTTSSDYLFWFRSHTAKEIKWGGAKHHPEDKDDGQRMHPRSSFKAFLEVVKSRS

SEQ ID NO: 13277 - protein, 363 aa, Digitaria radicosa
  misc_feature (257)..(257): Xaa can be any naturally occurring amino acid
  misc_feature (346)..(346): Xaa can be any naturally occurring amino acid
  unsure (1)..(363): unsure at all Xaa locations
LAVRAISRLQALPGGDVKLLCDTVVEHVRELTGYDRVMVYRFHEDEHGEVVAECRRDNLEPYLGLHYPATDIPQASRFLFRQNRVRMIANCHATPVRVIQDPGLSQPLCLVGSTLRAPHGCHAQYMANMGSIASLVMAVIISSGGEDEQTARGGISSAMKLWGLVVCHHTSPRFIPFPLRYACEFLMQAFGLQLNMELQLAHQLSEKHILRTQTLLCDMLLRDSPTGIVTQSPSIMDLVKCNGAALYYHGKYYPLGXTPTESQIKDIIEWLTVCHGDSTGLSTDSLADAGYHGAAALGDAVCGMAVAYITSSDYLFWFRSHTAKEIKWGGAKHHPGDKDDGQRMHXRSSFKAFLEVVKSRSIP

SEQ ID NO: 13278 - protein, 362 aa, Digitaria setigera
  misc_feature (54)..(54): Xaa can be any naturally occurring amino acid
  misc_feature (146)..(146): Xaa can be any naturally occurring amino acid
  misc_feature (150)..(150): Xaa can be any naturally occurring amino acid
  misc_feature (153)..(153): Xaa can be any naturally occurring amino acid
  misc_feature (172)..(172): Xaa can be any naturally occurring amino acid
  misc_feature (204)..(204): Xaa can be any naturally occurring amino acid
  misc_feature (262)..(262): Xaa can be any naturally occurring amino acid
  misc_feature (299)..(299): Xaa can be any naturally occurring amino acid
  misc_feature (311)..(311): Xaa can be any naturally occurring amino acid
  unsure (1)..(362): unsure at all Xaa locations
LAVRAISRLQALPGGDVKLLCDTVVEHVRELTGYDRVMVYRFHEDEHGEVVAEXRRDNLEPYLGLHYPATDIPQASRFLFRQNRVRMIADCHATPVRVIQDPGLSQPLCLVGSTLRAPHGCHAQYMANMGSIASLVMAVIISSGGXDEQXARXGVSSAMKLWGLVVCHHTSXRFIPFPLRYACEFLMQAFGLQLNMELQLAHQXSEKHILRTQTLLCDMLLRDSPTGIVTQSPSIMDLVKCDGAALYYHGKYYPLGVTPTEXQIKDIIEWLTVCHGDSTGLSTDSLADAGYHGAAALGXAVCGMAVAYITXSDYLFWFRSHTAKEIKWGGAKHHPEDKDDGQRMHPRSSFKAFLEVVKSRSY

SEQ ID NO: 13279 - protein, 370 aa, Echinochloa colona
  misc_feature (127)..(127): Xaa can be any naturally occurring amino acid
  misc_feature (137)..(138): Xaa can be any naturally occurring amino acid
  unsure (1)..(370): unsure at all Xaa locations
AVQSQKLAVRAISRLQALPGGDVKLLCDTVVEHVRELTGYDRVMVYRFHEDEHGEVVAESRRDNLEPYLGLHYPATDIPQASRFLFRQNRVRMIADCHATPVRVIQDPGLSQPLCLVGSTLRAPHGXHAQYMANMGXXASLVMAVIISSGGDDEQTARGGISSAMKLWGLVVCHHTSPRFIPFPLRYACEFLMQAFGLQLNMELQLAHQLSEKHILRTQTLLCDMLLRDSPTGIVTQSPSIMDLVKCDGAALYYHGKYYPLGVTPTESQIKDIIEWLTVCHGDSTGLSTDSLADAGYLGAAALGDAVCGMAVAYITPSDYLFWFRSHTAKEIKWGGAKHHPEDKDDGQRMHPRSSFKAFLEVVKSRSLPW

SEQ ID NO: 13280 - protein, 367 aa, Echinochloa frumentacea
  misc_feature (101)..(101): Xaa can be any naturally occurring amino acid
  misc_feature (234)..(234): Xaa can be any naturally occurring amino acid
  unsure (1)..(367): unsure at all Xaa locations
QVQSQKLAVRAISRLQALPGGDVKLLCDTVVEHVRELTGYDRVMVYRFHEDEHGEVVAESRRDNLEPYLGLHYPATDIPQASRFLFRQNRVRMIADCHATXVRVIQDPGLSQPLCLVGSTLRAPHGCHAQYMANMGSIASLVMAVIISSGGDDEQTARGGISSAMKLWGLVVCHHTSPRFIPFPLRYACEFLMQAFGLQLNMELQLAHQLSEKHILRTQTLLCDMLLRDSPTGXVTQSPSIMDLVKCDGAALYYHGKYYPLGVTPTESQIKDIIEWLTVCHGDSTGLSTDSLADAGYLGAAALGDAVCGMAVAYITPSDYLFWFRSHTAKEIKWGGAKHHPEDKDDGQRMHPRSSFKAFLEVVKSRS

SEQ ID NO: 13281 - protein, 360 aa, Echinolaena inflexa
AVRAISRLQALPGGDVKLLCDTVVEHVRELTGYDRVMVYRFHEDEHGEVVAESRRDNLEPYLGLHYPATDIPQASRFLFRQNRVRMIADCHATPVRVIQDPGLSQPLCLVGSTLRAPHGCHAQYMANMGSIASLVMAVIISSGGDDEQTARGGISSAMKLWGLVVCHHTSPRFIPFPLRYACEFLMQAFGLQLNMELQLAHQLSEKHILRTQTLLCDMLLRDSPTGIVTQSPSIMDLVKCDGAALYYHGKYYPLGVSPTESQIKDIIEWLTVCHGDSTGLSTDSLADAGYLGAAALGDAVCGMAVAYITPSDYLFWFRSHTAKEIKWGGAKHHPEDKDDGQRMHPRSSFKAFLEVVKSRS

SEQ ID NO: 13282 - protein, 312 aa, Eriochloa punctata
  misc_feature (132)..(132): Xaa can be any naturally occurring amino acid
  misc_feature (286)..(286): Xaa can be any naturally occurring amino acid
  misc_feature (288)..(288): Xaa can be any naturally occurring amino acid
  misc_feature (304)..(304): Xaa can be any naturally occurring amino acid
  unsure (1)..(312): unsure at all Xaa locations
AVQSQKLAVRAISRLQALPGGDVKLLCDTVVEHVRELTGYDRVMVYRFHEDEHGEVVAECRRDNLEPYLGLHYPATDIPQASRFLFRQNRVRMIADCHATPVRVIQDPGLSQPLCLVGSTLRAPHGCHAQFXANMGSIASLVMAVIISSGGDDEHTARGGISSSMKLWGLVVCHHTSPRFIPFPLRYACEFLMQAFGLQLNMELQLAHQLSEKHILRTQTLLCDMLLRDSPTGIVTQSPSIMDLVKCDGAALYYHGKYYPLGVTPTESQIKDIIEWLTVCHGDSTXLXTNSLADAGYHGAVALXDAVCGMAV

SEQ ID NO: 13283 - protein, 349 aa, Gynerium sagittatum
DVKLLCDTVVEHVRELTGYDRVMVYRFHEDEHGEVVAESRRDDLEPYLGLHYPATDIPQASRFLFRQNRVRMIADCHATPVRVIQDPGLSQLLCLVGSTLRAPHGCHAQYMANMGSIASLVMAVIISSGGDDEQTARGGISSAMKLWGLVVCHHTSPRFIPFPLRYACEFLMQAFGLQLNMELQLAHQLSEKHILRTQTLLCDMLLRDSPTGIVTQSPSIMDLVKCDGAALYYHGKFYPLGVTPTESQIKDIIEWLIVCHGDSTGLSTDSLADAGYVGAAALGDAVCGMAVAYITPSDYLFWFRSHTAKEIKWGGAKHHPEDKDDGQRMHPRSSFKAFLEVVKSRSLPW

SEQ ID NO: 13284 - protein, 349 aa, Homolepis glutinosa
VQSQKLAVRAISRLQALPGGDVKLLCDTVVEHVRELTGYDRVMVYRFHEDEHGEVVAESRRDNLEPYLGLHYPATDIPQASRFLFRQNRVRMIADCHATPVRVIQDPGLSQPLCLVGSTLRAPHGCHAQYMANMGSIASLVMAVIISSGGDDEQTGRGGISSAMKLWGLVVCHHTSPRFIPFPLRYACEFLMQAFGLQLNMELQLAHQLSEKHILRTQTLLCDMLLRDSPTGIVTQSPSIMDLVKCDGAALYYHGKYYPLGVTPTESQIKDIIEWLTVCHGDSTGLSTDSLADAGYLGAAALGDAVCGMAVAYITPSDYLFWFRSHTAKEIKWGGAKHHPEDKDDGQRM

SEQ ID NO: 13285 - protein, 361 aa, Homolepis isocalycia
  misc_feature (204)..(204): Xaa can be any naturally occurring amino acid
  misc_feature (211)..(211): Xaa can be any naturally occurring amino acid
  misc_feature (214)..(214): Xaa can be any naturally occurring amino acid
  misc_feature (218)..(218): Xaa can be any naturally occurring amino acid
  misc_feature (224)..(224): Xaa can be any naturally occurring amino acid
  misc_feature (227)..(227): Xaa can be any naturally occurring amino acid
  misc_feature (358)..(358): Xaa can be any naturally occurring amino acid
  misc_feature (360)..(360): Xaa can be any naturally occurring amino acid
  unsure (1)..(361): unsure at all Xaa locations
VQSQKLAVRAISRLQALPGGDVKLLCDTVVEHVRELTGYDRVMVYRFHEDEHGEVVAESRRDNLEPYLGLHYPATDIPQASRFLFRQNRVRMIADCHATPVRVIQDPGLSQPLCLVGSTLRAPQGCHAQYMANMGSIASLVMAVIISSGGDDEQTGRGGISSAMKLWGLVVCHHTSPRFIPFPLRYACEFLMQAFGLQLNMELXLAHQLSXKHXLRTXTLLCDXLLXDSPTGIVTQSPSIMDLVKCDGAALYYHGKYYPLGVTPTESQIKDIIEWLTVCHGDSTGLSTDSLADAGYLGAAALGDAVCGMAVAYITPSDYLFWFRSHTAKEIKWGGAKHHPEDKDDGQRMHPRSSFKAXLXG

SEQ ID NO: 13286 - protein, 352 aa, Hymenachne donacifolia
LAVRAISRLQALPGGDVKLLCDTVVEHVRELTGYDRVMVYRFHEDEHGEVVAESRRDNLEPYLGLHYPATDIPQASRFLFRQNRVRMIADCHATPVRVIQDPGLSQPLCLVGSTLRAPHGCHAQYMANMGSIASLVMAVIISSGGEDEQTGRGGVSSAMKLWGLVVCHHTSPRFIPFPLRYACEFLMQAFGLQLNMELQLAHQLSEKHILRTQTLLCDMLLRDSPTGIVTQSPSIMDLVKCDGAALYYHGKYYPLGVSPTESQIKDIIEWLTVCHGDSTGLSTDSLADAGYLGAAALGDAVCGMAVAYITPSDYLFWFRSHTAKEIKWGGAKHHPEDKBDGQRMHPRSSFKA

SEQ ID NO: 13287 - protein, 369 aa, Ichnanthus pallens
  misc_feature (44)..(44): Xaa can be any naturally occurring amino acid
  misc_feature (163)..(164): Xaa can be any naturally occurring amino acid
  misc_feature (169)..(169): Xaa can be any naturally occurring amino acid
  misc_feature (174)..(174): Xaa can be any naturally occurring amino acid
  misc_feature (209)..(209): Xaa can be any naturally occurring amino acid
  misc_feature (226)..(226): Xaa can be any naturally occurring amino acid
  misc_feature (249)..(249): Xaa can be any naturally occurring amino acid
  misc_feature (348)..(348): Xaa can be any naturally occurring amino acid
  unsure (1)..(369): unsure at all Xaa locations
VQSQKLAVRAISRLQALPGGBVKLLCDTVVEHVRELTGYDRVMXYRFHDDEHGEVVAESRRDNLEPYLGLHYPATDIPQASRFLFRQNRVRMIADCHATPVRVIQDPGLSQQLCLVGSTLRAPHGCHAQYMANMGSIASLVMAVIISSGADDEQTARGGISSXXKLWGXVVCHXTSPRFIPFPLRYACEFLMQAFGLQLNMELQLAHQXSEKHILRTQTLLCDMLXRDSPTGIVTQSPSIMDLVKCDGXALYYHGKYYPLGVTPTESQIKDIIEWLTVCHGDSTGLSTDSLADAGYLGAAALGDAVCGMAVAYITPSDYLFWFRSHTAKEIKWGGAKHHPEDKDDGQXMHPRSSFKAFLEVVKSRSLPW

SEQ ID NO: 13288 - protein, 369 aa, Lasiacis sorghoidea
  misc_feature (43)..(43): Xaa can be any naturally occurring amino acid
  misc_feature (140)..(140): Xaa can be any naturally occurring amino acid
  misc_feature (159)..(159): Xaa can be any naturally occurring amino acid
  misc_feature (254)..(254): Xaa can be any naturally occurring amino acid
  misc_feature (263)..(263): Xaa can be any naturally occurring amino acid
  unsure (1)..(369): unsure at all Xaa locations
VQSQKLAVRAISRLQALPGGDVKLLCDTVVEHVRELTGYDRVXVYRFHEDEHGEVVAECRRDNLEPYLGLHYPATDIPQASRFLFRQBRVRMIADCHATPVRVIQDPGLSQPLCLVGSTLRAPHGCHAQYMANMGSIASXVMAVIISSGGDDEQAARGXISSAMKLWGLVVCHHTSPRFIPFPLRYACEFLMQAFGLQLNMELQLAHQLSEKHILRTQTLLCDMLLRDSPTGIVTQNPSIMDLVKCDGAALYYXGKYYPLGVXPTESQIKDIIEWLTVCHGDSTGLSTDSLADAGYPGAAALGDAVCGMAVAYITPRDYLFWFRSHTAKEIKWGGAKHHPEDKDDGQRMHPRSSFKAFLEVVKSRSLPW

SEQ ID NO: 13289 - protein, 369 aa, Melinis repens
  misc_feature (157)..(157): Xaa can be any naturally occurring amino acid
  misc_feature (279)..(279): Xaa can be any naturally occurring amino acid
  unsure (1)..(369): unsure at all Xaa locations
AVQSQKLAVRAISRLQALPGGDVKLLCDTVVEHVRELTGYDRVMVYRFHEDEHGEVVAECRRDNLEPYLGLHYPATDIPQASRFLFRQNRVRMIADCHATPVRVIQDPGLSQPLCLVGSTLRAPHGCHAQYMANMGSIASLVMAVIISSGGDDEQTXRGGISSAMKLWGLVVCHHTSPRFIPFPLRYACEFLMQAFGLQLNMELQLAHQLSEKHILRTQTLLCDMLLRDSPTGIVTQSPSIMDLVKCDGAALYYHGKYYPLGVTPTESQIKDIIEWLTXCHGDSTGLSTDSLADAGYHGAAALGDAVCGMAVAYITPSDYLFWFRSHTAKEIKWGGAKHHPEDKDDGQRMHPRSSFKAFLEVVQSRSLP

SEQ ID NO: 13290 - protein, 356 aa, Mesosetum chaseae
  misc_feature (288)..(288): Xaa can be any naturally occurring amino acid
  misc_feature (301)..(301): Xaa can be any naturally occurring amino acid
  unsure (1)..(356): unsure at all Xaa locations
KLAVRAISRLQALPGGDVKLLCDTVVEHVRELTGYDRVMVYRFHEDEHGEVVAESRRENLEPYLGLHYPATDIPQASRFLFRQNRVRMIADCHATPVRVIQDPGLSQPLCLVGSTLRAPHGCHAQYMANMGSIASLVMAVIISSGGEDEQTGRGGISSSMKLWGLVVCHHTSPRFIPFPLRYACEFLMQAFGLQLNMELQLAHQLSEKHILRTQTLLCDMLLRDSPTGIVTQSPSIMDLVKCDGAALYYHGKYYPLGVTPTESQIKDIIEWLTVCHGDSTGLSTDSLXDAGYVGAAALGDXVCGMAVAYITSSDYLFWFRSHTAKEIKWGGAKHHPEDKDDGQRMHPRSSFKAFLE

SEQ ID NO: 13291 - protein, 347 aa, Ophiochloa hydrolithica
  misc_feature (109)..(109): Xaa can be any naturally occurring amino acid
  misc_feature (114)..(117): Xaa can be any naturally occurring amino acid
  misc_feature (123)..(123): Xaa can be any naturally occurring amino acid
  unsure (1)..(347): unsure at all Xaa locations
LQALPGGDVKLLCDTVVEQVRELTGYDRVMVYRFHEDEHGEVVAESRRDNLEPYLGLHYPATDIPQASRFLFQQNRVRMIVDCHATPVRVIQDPGLSQPLCLVGSTLRXPHGCXXXXMANMGXIASLVMAVIISSGGDDGQTARGGISSAMKLWGLVVCHHTSPRFIPFSLRYACEFLMQAFGLQLKLELQLAHQMAEKHILRTQTLLCDMLLRDSPIGIVTQSPSIVDLVKCDGAALYYHGKYYPLGVSPTESQIKDIIEWLTVCHGDSTGLSTDSLADAGYLGAAALGDAVCGMAVAYITPSDYLFWFRSHTAKEIKWGGAKHHPEDKDDGQRMHPRSSFKAFLE

SEQ ID NO: 13292 - protein, 355 aa, Oplismenus hirtellus
  misc_feature (229)..(229): Xaa can be any naturally occurring amino acid
  unsure (1)..(355): unsure at all Xaa locations
AVRAISRLQALPGGDVKLLCDTVVEHVRELTGYDRVMVYRFHEDEHGEVVAECRRDNLEPYLGLHYPATDIPQASRFLFRQNRVRMIADCHATPVRVIQDPGLSQSLCLVGSTLRAPHGCHAQYMANMGSIASLVMAVIISSGGDDEQTARGGISSAMKLWGLVVCHHTSPRFIPFPLRYACEFLMQAFGLQLNMELQLAHQLSEKHILRTQTLLCDMLLRDSPTGIVXQSPSIMDLVKCDGAALYYHGKYYPLGVTPTESQIKDIIEWLTVCHGDSTGLSTDSLADAGYPGAAALGDAVCGMAVAYITPSDYLFWFRSHTAKEIKWGGAKHHPEDKDDGQRMHPRSSFKAFLEV

SEQ ID NO: 13293 - protein, 362 aa, Otachyrium versicolor
  misc_feature (165)..(165): Xaa can be any naturally occurring amino acid
  misc_feature (167)..(167): Xaa can be any naturally occurring amino acid
  misc_feature (227)..(227): Xaa can be any naturally occurring amino acid
  misc_feature (231)..(250): Xaa can be any naturally occurring amino acid
  misc_feature (258)..(258): Xaa can be any naturally occurring amino acid
  misc_feature (279)..(279): Xaa can be any naturally occurring amino acid
  misc_feature (284)..(284): Xaa can be any naturally occurring amino acid
  misc_feature (337)..(337): Xaa can be any naturally occurring amino acid
  misc_feature (340)..(340): Xaa can be any naturally occurring amino acid
  unsure (1)..(362): unsure at all Xaa locations
VRAISRLQALPGGDVKLLCDTVVEHVRELTGYDRVMVYRFHEDEHGEVVAESRRDNLEPYLGLHYPATDIPQASRFLFRQNRVRMIADCHATPVRVVQDPGLSQPLCLVGSTLRAPHGCHAQYMANMGSIASLVMAVIISSGGDDEQTGRGGISSAMKLWGLVVXHXTSPRIIPFSLRYACEFLMQAFGLHLIMELHLAHHLSEKHILPTHTLLCDMLLRDSPTGIXTHTXXXXXXXXXXXXXXXXXXXXYPLGVSPXESQIKDIIEWLTVCHGDSTGXSTDSXGDAGYLGAAALGDAVCGMAVAYITPSDYLFWFRSHTAKEIKWGGGKHHPEDKXDGXRMHPRSSFKAFLEVVKSRSNGG

SEQ ID NO: 13294 - protein, 366 aa, Panicum aquaticum
  misc_feature (92)..(92): Xaa can be any naturally occurring amino acid
  misc_feature (264)..(264): Xaa can be any naturally occurring amino acid
  misc_feature (300)..(300): Xaa can be any naturally occurring amino acid
  misc_feature (364)..(364): Xaa can be any naturally occurring amino acid
  unsure (1)..(366): unsure at all Xaa locations
QVQSQKLAVRAISRLQALPGGDVKLLCDTVVEHVRELTGYDRVMVYRFHEDEHGEVVAECRRDNLEPYLGLHYPATDIPQASRFLFRQNRVXMIADCHATPVRVIQDPGLSQPLCLVGSTLRAPHGCHAQYMANMGSIASLVMAVIISSGGDDEQTARGGISSAMKLWGLVVCHHTSPRIIPFPLRYACEFLMQAFGLQLNMELQLAHQLSEKHILRTQTLLCDMLLRDSPTGIVTQSPSIMDLVKCDGAALYYHGKYYPLGVXPTESQIKDIIEWLTVCHGDSTGLSTDSLADAGYHGXAALGDAVCGMAVAYITPSDYLFWFRSHTAKEIKWGGAKHHPEDKDDGQRMHPRSSFKAFLEVVXSR

SEQ ID NO: 13295 - protein, 345 aa, Panicum millegrana
  misc_feature (42)..(42): Xaa can be any naturally occurring amino acid
  misc_feature (147)..(150): Xaa can be any naturally occurring amino acid
  misc_feature (152)..(152): Xaa can be any naturally occurring amino acid
  unsure (1)..(345): unsure at all Xaa locations
VRAISRLQALPGGDVKLLCDTVVEHVRELTGYDRVMVYRFHXDEHGEVVAECRRDNLEPYLGLHYPATDIPQASRFLFRQNRVRMIADCHATPVRVIQDPGLSQPLCLVGSTLRAPHGCHAQYMANMGSIASLVMAVIISSGGDDEXXXXGXFSSAMKLWGLVVCHHTSPRFIPFPLRYACEFLMQAFGLQLNMELQLAHQLSEKHILRTQTLLCDMLLRDSPTGIVTQSPSIMDLVKCDGAALYYHGKYYPLGVTPTESQIKDIIEWLTVCHGDSTGLSTDSLADAGYFGAAALGDAVCGMAVAYITPSDYLFWFRSHTAKEIKWGGAKHHPEDKDDGQRMHPR

SEQ ID NO: 13296 - protein, 336 aa, Panicum ovuliferum
  misc_feature (118)..(119): Xaa can be any naturally occurring amino acid
  misc_feature (125)..(126): Xaa can be any naturally occurring amino acid
  misc_feature (295)..(296): Xaa can be any naturally occurring amino acid
  unsure (1)..(336): unsure at all Xaa locations
RAISRLQALPGGDVKLLCDTVVEHVRELTGYDRVMVYRFHEDEHGEVVAECRRDNLEPYLGLHYPATDIPQASRFLFRQNRVRMIADCHATPVRVIQDPGLSQPLCLVGSTLRAPHGXXAQYMAXXGSIASLVMAVIISSGGDDEQTARSGISSAMKLWGLVVCHHTSPRFIPFPLRYACEFLMQAFGLQLNMELQLAHQLSEKHILRTQTLLCDMLLRDSPTGIVTQSPSIMDLVKCDGAALYYHGKYYPLGVTPTESQIKDIIEWLTVCHGDSTGLSTDSLADAGYLGAAALXXAVCGMAVAYITPSDYLFWFRSHTAKEIKWGGAKHHPEDKD

SEQ ID NO: 13297 - protein, 325 aa, Panicum rudgei
  misc_feature (96)..(96): Xaa can be any naturally occurring amino acid
  misc_feature (100)..(101): Xaa can be any naturally occurring amino acid
  misc_feature (179)..(179): Xaa can be any naturally occurring amino acid
  unsure (1)..(325): unsure at all Xaa locations
TGYDRVMVYRFHEDEHGEVVAECRRDNLEPYLGLHYPATDIPQASRFLFRQNRVRMIADCHATPVRVIQDPGLSQPLCLVGSTLRAPHGCHAQYMXNMGXXASLVMAVIISSGGDDEQTARGSISSAMKLWGLVVCHHTSPRFIPFPLRYACEFLMQAFGLQLNMELQLAHQLSEKHIXRTQTLLCDMLLRDSPTGIVTQSPSIMDLVKCDGAALYYHGKYYPLGVTPTESQIKDIIEWLTVCHGDSTGLSTDSLADAGYHGAAALGDAVCGMAVAYITPSDYLFWFRSHTAKEIKWGGAKHHPEDKDDGQRMHPRSSFKAFLEV

SEQ ID NO: 13298 - protein, 362 aa, Paspalidium geminatum
AVQSQKLAVRAISRLQALPGGDVKLLCDTVVEHVRELTGYDRVMVYRFHEDEHGEVVAECRRDNLEPYLGLHYPATDIPQASRFLFRQNRVRMIADCHATPVRVIQDPGLSQPLCLVGSTLRAPHRCHAQYMANMGSIASLVMAVIISSGGDDEQTTRGGISSAMKLWGLVVCHHTSPRFIPFPLRYACEFLMQAFGLQLNMELQLAHQLSEKHILRTQTLLCDMLLRDSPTGIVTQSPSIMDLVKCDGAALYYHGKYYPLGVTPTESQIKDIIEWLTVCHGDSTGLSTDSLADAGYHGAAALGDAVCGIAVAYITPSDYLFWFRSHTAKEIKWGGAKHHPEDKDDGQRMHPRSSFKAFLEV

SEQ ID NO: 13299 - protein, 369 aa, Pennisetum glaucum
  misc_feature (168)..(168): Xaa can be any naturally occurring amino acid
  misc_feature (189)..(189): Xaa can be any naturally occurring amino acid
  misc_feature (238)..(238): Xaa can be any naturally occurring amino acid
  misc_feature (242)..(242): Xaa can be any naturally occurring amino acid
  misc_feature (253)..(253): Xaa can be any naturally occurring amino acid
  misc_feature (278)..(278): Xaa can be any naturally occurring amino acid
  unsure (1)..(369): unsure at all Xaa locations
AVQSQKLAVRAISRLQALPGGDVKLLCDTVVEHVRELTGYDRVMVYRFHEDEHGEVVAECRRDNLEPYLGLHYPATDIPQASRFLFRQNRVRMIADCHATPVRVIQDPGLSQPLCLVGSTLRAPHECHAQYMANMGSIASLVMAVIISSGGDDEQTTRGGISSAMKLXGLVVCHHTSPRFIPFPLRYAXEFLMQAFGLQLNMELQLAHQLSEKHILRTQTLLCDMLLRDSPTGIVTQXPSIXDLVKCDGAALXYHGKYYPLGVTPTESQIKDIIEWLXVCHGDSTGLSTDSLADAGYHGASALGDAVCGMAVAYITPSDYLFWFRSHTAKEIKWGGAKHHPEDKDDGQRMHPRTSFKAFLEVVKSRSLP

SEQ ID NO: 13300 - protein, 368 aa, Pseudechinolaena polystachya
  misc_feature (19)..(19): Xaa can be any naturally occurring amino acid
  misc_feature (62)..(62): Xaa can be any naturally occurring amino acid
  misc_feature (151)..(152): Xaa can be any naturally occurring amino acid
  misc_feature (213)..(213): Xaa can be any naturally occurring amino acid
  misc_feature (219)..(219): Xaa can be any naturally occurring amino acid
  misc_feature (252)..(252): Xaa can be any naturally occurring amino acid
  misc_feature (256)..(256): Xaa can be any naturally occurring amino acid
  misc_feature (315)..(315): Xaa can be any naturally occurring amino acid
  misc_feature (367)..(367): Xaa can be any naturally occurring amino acid
  unsure (1)..(368): unsure at all Xaa locations
VQSQKLAVRAISRLQALPXGDVKLLCDTVVEHVRELTGYDRVMVYKFHEDEHGEVVAECRRXNLEPYLGLHYPATDIPQASRFLFRQNRVRMIADCHATPVRVVQDPGLPQSLCLVGSTLRAPHGCHAQYMANMGSIASLVMAVIISSGGXXEQTARSSISSSMKLWGLVVCHHTSPRFIPFPLRYACEFLMQAFGLQLNMELQLAHQLSEKXILRTQXLLCDMLLRDSPTGIVTQSPSIMDLVKCDGAALXYHGXYYPLGVTPTESQIKDIIEWLTVCHGDSTGLSTDSLADAGYPGAAALGDAVCGMAVAYIXPSDYLFWFRSHTAKEIKWGGAKHHPEDKDDGQRMHPRSSFKAFLEVVKSRSXP

SEQ ID NO: 13301 - protein, 369 aa, Sacciolepis indica
  misc_feature (38)..(38): Xaa can be any naturally occurring amino acid
  misc_feature (129)..(138): Xaa can be any naturally occurring amino acid
  misc_feature (159)..(160): Xaa can be any naturally occurring amino acid
  misc_feature (176)..(176): Xaa can be any naturally occurring amino acid
  misc_feature (251)..(251): Xaa can be any naturally occurring amino acid
  unsure (1)..(369): unsure at all Xaa locations
VQSQKLAVRAISRLQALPGGDIKLLCDTVVEHVRELTXYDRVMVYRFHEDEHGEVVAECRRDNLEPYLGLHYPATDIPQASRFLFRQNRVRMIADCHATPVRVIQDPGLSQPLCLVGSTLRAPHGCHAXXXXXXXXXXSLVMAVIISSGGDDEQTTRGXXSSAMKLWGLVVCHHTXPRFIPFPLRYACEFLMQAFGLQLNMELQLAHQLSEKHILRTQTLLCDMLLRDSPTGIVTQSPSIMDLVKCDGAAXYYHGKYYPLGVSPTESQIKDIIEWLTVCHGDSTGLSTDSLADAGYLGAATLGDAVCGMAVAYITPSDYLFWFRSHTAKEIKWGGAKHHPEDKDDGQRMHPRSSFKAFLEVVKSRSLPW

SEQ ID NO: 13302 - protein, 369 aa, Setaria palmifolia
  misc_feature (66)..(66): Xaa can be any naturally occurring amino acid
  misc_feature (100)..(100): Xaa can be any naturally occurring amino acid
  misc_feature (120)..(120): Xaa can be any naturally occurring amino acid
  misc_feature (126)..(126): Xaa can be any naturally occurring amino acid
  misc_feature (137)..(138): Xaa can be any naturally occurring amino acid
  misc_feature (163)..(163): Xaa can be any naturally occurring amino acid
  misc_feature (186)..(186): Xaa can be any naturally occurring amino acid
  misc_feature (194)..(194): Xaa can be any naturally occurring amino acid
  misc_feature (262)..(262): Xaa can be any naturally occurring amino acid
  misc_feature (313)..(313): Xaa can be any naturally occurring amino acid
  unsure (1)..(369): unsure at all Xaa locations
AVQSQKLAVRAISRLQALPGGDVKLLCDTVVEHVRELTGYDRVMVYRFHEDEHGEVVAECRRDNLXPYLGLHYPATDIPQASRFLFRQNRVRMIADCHAXPVRVIQDPGLSQPLCLVGSXLRAPHXCHAQYMANMGXXASLVMAVIISSGGDDEQTTRGGISXAMKLWGLVVCHHTSPRFIPFPLXYACEFLMXAFGLQLNMELQLAHQLSEKHILRTQTLLCDMLLRDSPTGIVTQSPSIMDLVKCDGAALYYHGKYYPLXVTPTESQIKDIIEWLTVCHGDSTGLSTDSLADAGYHGAAALGDAVCGMAVXYITPSDYLFWFRSHTAKEIKWGGAKHHPEDKDDGQRMHPRSSFKAFLEVVKSRSQP

SEQ ID NO: 13303 - protein, 370 aa, Setaria verticillata
  misc_feature (72)..(72): Xaa can be any naturally occurring amino acid
  misc_feature (119)..(119): Xaa can be any naturally occurring amino acid
  misc_feature (122)..(122): Xaa can be any naturally occurring amino acid
  unsure (1)..(370): unsure at all Xaa locations
AVQSQKLAVRAISRLQALPGGDVKLLCDTVVEHVRELTGYDRVMVYRFHEDEHGEVVAECRRDNLEPYLGLXYPATDIPQASRFLFRQNRVRMIADCHATPVRVIQDPGLSQPLCLVGXTLXAPHGCHAQYMANMGSIASLVMAVIISSGGDDEQTTRGGISSAMKLWGLVVCHHTSPRFIPFPLRYACEFLMQAFGLQLNMELQLAHQLSEKHILRTQTLLCDMLLRDSPTGIVTQSPSIMDLVKCDGAALYYHGKYYPLGVTPTESQIKDIIEWLTVCHGDSTGLSTDSLADAGYHGAAALGDAVCGMAVAYITPSDYLFWFRSHTAKEIKWGGAKHHPEDKDDGQRMHPRSSFKAFLEVVKSRSLPW

SEQ ID NO: 13304 - protein, 360 aa, Setaria viridis
AVRAISRLQALPGGDVKLLCDTVVEHVRELTGYDRVMVYRFHEDEHGEVVAECRRDNLEPYLGLHYPATDIPQASRFLFRQNRVRMIADCHATPVRVIQDPGLSQPLCLVGSTLRAPHGCHAQYMANMGSIASLVMAVIISSGGDDEQTTRGGISSAMKLWGLVVCHHTSPRFIPFPLRYACEFLMQAFGLQLNMELQLAHQLSEKHILRTQTLLCDMLLRDSPTGIVTQSPSIMDLVKCDGAALYYHGKYYPLGVTPTESQIKDIIEWLTVCHGDSTGLSTDSLADAGYHGAAALGDAVCGMAVAYITPSDYLFWFRSHTAKEIKWGGAKHHPEDKDDGQRMHPRSSFKAFLEVVKSRS

SEQ ID NO: 13305 - protein, 370 aa, Steinchisma hians
AVQSQKLAVRAISRLQALPGGDVKLLCDTVVEHVRELTGYDRVMVYRFHEDEHGEVVAESRRDNLEPYLGLHYPATDIPQASRFLFRQNRVRMIADCHATPVKVEQDPGLSQQLCLVGSTLRAPHGCHAQYMANMGSIASLVMAVIISSGGDDEQTGRGGISSAMKLWGLVVCHHTSPRFIPFPLRYACEFLMQAFGLQLNMELQLAHQLSEKHILRTQTLLCDMLLRDSPTGIVTQSPSIMDLVKCDGAALYYHGKYYPLGVSPTESQIKDIIEWLTVCHGDSTGLSTDSLADAGYLGAAALGDAVCGMAVAYITPSDYLFWFRSHTAKEIKWGGAKHHPEDKDDGQRMHPRSSFKAFLEVVKSRSLPW

SEQ ID NO: 13306 - protein, 358 aa, Steinchisma laxa
  misc_feature (113)..(113): Xaa can be any naturally occurring amino acid
  misc_feature (158)..(158): Xaa can be any naturally occurring amino acid
  misc_feature (189)..(190): Xaa can be any naturally occurring amino acid
  misc_feature (192)..(192): Xaa can be any naturally occurring amino acid
  misc_feature (199)..(199): Xaa can be any naturally occurring amino acid
  misc_feature (205)..(205): Xaa can be any naturally occurring amino acid
  misc_feature (208)..(208): Xaa can be any naturally occurring amino acid
  misc_feature (212)..(215): Xaa can be any naturally occurring amino acid
  misc_feature (217)..(218): Xaa can be any naturally occurring amino acid
  misc_feature (220)..(220): Xaa can be any naturally occurring amino acid
  misc_feature (223)..(223): Xaa can be any naturally occurring amino acid
  misc_feature (228)..(228): Xaa can be any naturally occurring amino acid
  unsure (1)..(358): unsure at all Xaa locations
QVQSQKLAVRAISRLQALPGGDVKLLCDTVVEHVRELTGYDRVMVYRFHEDEHGEVVAESRRDNLEPYLGLHYPATDIPQASRFLFRQNRVRMIADCHATPVKVIQDPGLSQXLCLVGSTLRAPHGCHAQYMANMGSIASLVMAVIISSGGDDEQTGXGGISSAMKLWGLVVCHHTSPRFIPFPLRYAXXFXMQAFGLXLNMELXLAXHLSXXXXLXXQXLLXDMLLXBSPTGIVTQSPSIMDLVKCBGAALYYHGKYYPLGVSPTESQIKDIIEWLTVCHGDSTGLSTDSLADAGYLGAAALGDAVCGMAVAYITPSDYLFWFRSHTAKEIKWGGAKHHPEDKDDGQRMHPRSSFKA

SEQ ID NO: 13307 - protein, 330 aa, Stenotaphrum secundatum
  misc_feature (290)..(290): Xaa can be any naturally occurring amino acid
  unsure (1)..(330): unsure at all Xaa locations
QVQSQKLAVRAISRLQALPGGDIKLLCDTVVEHVRELTGYDRVMVYKFHEDEHGEVVAECRRDDLEPYLGLHYPATDIPQASRFLFRQNRVRMIADCHATLVRVIQDPGLSQPLCLVGSTLRAPHGCHAQYMANMGSIASLVMAVIISSGGDDEQTTRGGISSAMKLWGLVVCHHTSPRFIPFPLRYACEFLMQAFGLQLNMELQLAHQLSEKHILRTQTLLCDMLLRDSPTGIVTQSPSIMDLVKCDGAALYYHGKYYPLGVTPTESQIKDIIEWLTMCHGDSTGLSTXSLADAGYHGAAALGDAVCGMAVAYITPSDYLFWFRSHTAK

SEQ ID NO: 13308 - protein, 369 aa, Streptostachys asperifolia
VQSQKLAVRAISRLQALPGGDVKLLCDTVVEHVRELTGYDRVMVYRFHEDEHGEVVAESRRDNLEPYLGLHYPATDIPQASRFLFRQNRVRMITDCHATPVRVIQDPGLSQPLCLVGSTLRAPHECHAQYMANMGSIASLVMAIIISSGADDEQTSRGGISSAMKLWGLVVCHHTSPRFIPFPLRYACEFLMQAFGLQLNTELQLAHQLSEKHILRTPTLLCDMLLRDSSTGIVTQSPSIMDLVKCDGAALYYHGKYYPLGVTPTESQIKDIIEWLTVCHGDSAGLSTDSLADAGYLGAAALGDAVCGMAVAYITPSDYLFWFRSHTAKEIKWGGAKHHPEDKDDGQRMHPRSSFKAFLEVVKSRSLPW

SEQ ID NO: 13309 - protein, 361 aa, Streptostachys ramosa
  misc_feature (119)..(142): Xaa can be any naturally occurring amino acid
  misc_feature (163)..(163): Xaa can be any naturally occurring amino acid
  unsure (1)..(361): unsure at all Xaa locations
VQSQKLAVRAISRLQALPGGDVKLLCDTVVEHVRELTGYDRVMVYRFHEDEHGEVVAESRRDNLEPYLGLHYPATDIPQASRFLFRQNRVRMIADCHATPVRVIQDPGLSQPLCLVGSXXXXXXXXXXXXXXXXXXXXXXXXAVIISSGGDDEQTARGGISSXMKLWGLVVCHHTSPRFIPFPLRYACEFLMQAFGLQLNMELQLAHQLSEKHILRTQTLLCDMLLRDSPTGIVTQSPSIMDLVKCDGAALYYHGKYYPLGVSPTESQIKDIIEWLTVCHGDSTGLSTDSLADAGYHGAAALGDAVCGMAVAYITPSDYLFWFRSHTAKEIKWGGAKHHPEDKDDGQRMHPRSSFKAFLEG

SEQ ID NO: 13310 - protein, 359 aa, Tatianyx arnacites
VQSQKLAVRAISRLQALPGGDVKLLCDTVVEHVRELTGYDRVMVYRFHEDEHGEVVAESRRDNLEPYLGLHYPATDIPQASRFLFRQNRVRMIADCHATPVRVIQDPELSQPLCLVGSTLRAPHGCHAQYMANMGSIASLVMAVIISSGGDDEQTGRGGISSSMKLWGLVVCHHTSPRFIPFPLRYACEFLMQAFGLQLNMELQLAHQMSEKHILRTQTLLCDMLLRDSPTGIVTQSPSIMDLVKCDGAALYYHGKYYPLGVTPTESQIKDIIEWLTVCHGDSTGLSTDSLADAGYLGAAALGDAVCGMAVAYITPSDYLFWFRSHTAKEIKWGGAKHHPEDKDDGQRMHPRSSFKAFL

SEQ ID NO: 13311 - protein, 358 aa, Urochloa acuminata
RAISRLQALPGGDVKLLCDTVVEHVRELTGYDRVMVYRFHEDEHGEVVAECRRDNLEPYLGLHYPATDIPQASRFLFRQNRVRMIADCHATPVRVIQDPGLSQPLCLVGSTLRAPHGCHAQYMANMGSIASLVMAVIISSGGDDEQTVRSGISSAMKLWGLVVCHHTSPRFIPFPLRYACEFLMQAFGLQLNMELQLAHQLSEKHILRTQTLLCDMLLRDSPTGIVTQSPSIMDLVKCDGAALYYHGKYYPLGVTPTESQIKDIIEWLTVCHGDSTGLSTDSLADAGYHGAAALGDAVCGMAVAYITPSDYLFWFRSHTAKEIKWGGAKHHPEDKDDGQRMHPRSSFKAFLEVVKSRS

SEQ ID NO: 13312 - protein, 349 aa, Zeugites pittieri
  misc_feature (149)..(149): Xaa can be any naturally occurring amino acid
  unsure (1)..(349): unsure at all Xaa locations
DVKLLCDTVVEHVRELTGYDRVRVYRFHEDEHGEVVAESRRDDLDPYLGLHYPATDIPQASRFLFRQNRVRMIADCHATSVRVIQDPGLSQPLCLVGSTLRAPHGCHAQYMANMGSIASLVMAVIISSGGDDEQTARGGISSAIKLWGXVVCHHTSPRFIPFPLRYACEFLMQAFGLQLNMELQLAHQLSEKHILRTQTLLCDMLLRDSPTGIVTQNPSIMDLVKCDGAALYYHGKYYPLGVTPTESQIKDIIDWLNVCHGDSTGLSTDSLADAGYLGAAALGDAVCGMAVAYITPSDYLFWFRSHTGKEIKWGGAKHHPEDKDDGQRMHPRSSFKAFLEVVKSRSLPW

SEQ ID NO: 13313 - protein, 325 aa, Dichanthelium koolauense
AGYDRVMVYRFHEGEHGEVVAECRRDNLEPYLGLHYPATDIPQASRFLFRQNRVRTIADCHATPVRVIQDPGLSQPLCLVGSTLRAPHGCHAQYMANMGSIASLVMAVIISSGGDDEQTARGGISSALKLWGLVVCHHTSPRFIPFPLRYACEFLMQAFGLQLNMELQLAHQLSEKHILRTQTLLCDMLLRDSPTGIVTQSPSIMDLVKCDGAALYYHGKYYPLGVTPTESQIKDIIEWLTLCHRDSTGLSTDSLADAGYLGAAALGDAVCGMAVAYITPSDYLFWFRSHTAKEIKWGGAKHHPEDKDDGQRMHPRSSFKAFLEV

SEQ ID NO: 13314 - protein, 385 aa, Vitis labrusca
MDDAKISELKQFVNSVKSDPSILHNPSLSFFKSYLQSLGARIPAKPDKCGCGTSDHGEHVDAKKTNLCSEDDKFEDDIVESDIELDDTDVVEPDNDPPQKMGDLSIDVTEENQDAAQMLKSKAMEAISEGKLDEARDNLTEAIMLNPSSAILYATRASVYVKLKKPNAAIRDADAALKINPDSAKGYKIRGMARAMLGLWEEAATDLHVASRLDYDEEIALVLKKVEPNARKIEEHRRKYARLCKERELRKYGHQKQQQQAQPHDPEAAAALKDGQVMAIHSSSELETKLKAASKTSRLAILYFTATWCGPCRYISPVFTSLSGKYPKVVFLKVDIDGAQDVAVSWNVSSVPTFFFVKSGKEIDKVVGVDKSALETKIAQYAGQS

SEQ ID NO: 13315 - protein, 358 aa, Cryptococcus neoformans var. neoformans
MSQLIATKRVDLLAPYLALDQGSRVQAEYIWIDAEGGIRSKTMTLDKAPSSVADLKEWNFDGSSTNQAPADNSDVFLRPVAIFKDPFRGGANILVLCECYDNDGTPNKSNYRAHCKKVMDAAKDTEPWFGLEQEYTLFDADGQVFGWPKNGFPGPQGPYYCGVGAGKVFARDFIEAHYRACLYAGIKISGINAEVMPSQWEFQVGPCTGIEMGDHLWMPRFLLLRIGEEWGITPSLHPKPLKGDWNGAGCHSNYSTKDMRTPGKGMAAIEDAIKKLEKKHLEHIAVYGEDNDLRLTGKHETASMTTFSAGVANRGASIRIPRHVGAQGYGYLEDRRPASNVDPYRVTAILVETTVLNN

SEQ ID NO: 13316 - protein, 537 aa, Nicotiana tabacum
GASSLHKKKNACEEESSGNLISSYKQNLLKVKYENDMSFLKDLAETLSSIFSDTPSSSSPQNDRNLNSADRTMDGVATGNERAAYKLKGYFDLAKEEIDKAVRAEEWGLADDAISHYQNAQKILAEGISTPVPSYITSSEQEKVKSYRQKLTKWKSQVSERLQTLSRRAGGTSAVKISAPQTQRLAVSQSSSSARKGESRTAPSSGRGSSVMRVPNSGKDSSVARVPINSISSHKPSQESANGYDPKLVDMINSVIVDRSPSVKWEDIAGLEKAKQALLEMVILPTKRKDLFTGLRRPARGLLLFGPPGTGKTMLAKAVASESEATFFNVSASSLTSKWVGEGEKLVKTLFMVAISRKPSVIFMDEIDSVMSTRTTNENEASRRLKSEFLVQFDGVTSNSDDLVIVIGATNKPQELDDAVLRRLVKRIYIPLPDANVRRQLLKHRLKGKAFSLPGGDLDRLVRDTEGYSGSDLQALCEEAAMMPIRELGANILRVDADQVRGLRYGDFQKAMTVIRPSLQKSKWEELERWNQEFGAN

SEQ ID NO: 13317 - protein, 608 aa, Acinetobacter lwoffii
MLDSILPRFPDAYGKYIEPFFGGGAVFFALQPENAVIADSNPELINLYRTVADDVDAVIVELKKFENTEEMFYEVRSQDRENLSSVEAAARTIYLNKTCFNGLYRVNKKGQFNVPFGKYKNPKILDEDNLRAASILLSKAQIVCSDYLDVLENFAGPNDLIFLDPPYVPISEYSDFKRYTKEQFYLEDHENLAKAYKALSDKGSHVFLTNSNHSIVENLYHGFKYEVIQTKRHISCDSKTRKGEDVIISNTQKNEKFSLNLEKIATLPEKIKLYPSTRYMGSKQKLLPYILGVVEQFNSPILVDLFSGSGIVSYLFKTLGKQVITNDYMNMSHTFTKAMVENNHVILNNEKAKSLLVEKYPIDDFVQKKFKDLYFSDDENLLIDIIRSNIPKLDNEYEQAIARSALIRACMKKRPRGIFTYTGHRYDDGRKDLVLTLEEQFLNAVEAINQSIFDNHQSNISYRKNALDVELPDNCLIYMDPPYYSTCSDNEYVRRYHFVEGLSLDWKEIEIQEHTKTKKFKSYPTPFSSRKDVYVAFDKLFEKYKENILLISYSSNSLPNMDEMLVMLRKYKENVDVIPIDYKYSFGNQATKVGDNRNTVQEYLFVAY

SEQ ID NO: 13318 - protein, 69 aa, Rhizobium sp. NGR234
MMATGTVKWFNATKGFGFIQPDDGSADVFVHISAVERAGLRELKDGQKISYELVKDRKSGKMSADNLQA

SEQ ID NO: 13319 - protein, 464 aa, Rhizobium sp. NGR234
MSRLVIVSNRVPVPDKGGIAPAGGLAVALKVALEEQGGGIWMGWSGKSSGEDEPAPLAQLQQGNITYALTDLTDTDVEEYYHGFANRVLWPICHYRLDLAEYGRKEMAGYFRVNRFFAHRLAPLVKPDDVIWVHDYPLIPLAAELRQMGLENRIGFFLHIPWPPADVLFTMPVHEEIMRGLSHYDVVGFQTDHDLENFASCLRREGIGDALGGGRLSAYGRIFKGGVYAIGIETAAFAEFAKKASTNSTVKKARESIERRSLIIGVDRLDYSKGLTQRIEAFERFILANPAQRGRVTYLQITPKSRSEVPEYEAMQRTVAEQAGRVNGALGAVDWVPMRYINRSVGRRVLAGLYRLGKVGLVTPLRDGKNLVAKEYVAAQDPDDPGVLVLSRFAGAARELQGALLVNPYDIEGTANAMARSLSMPLEERQERWTTMMDQLLEHDVSRWCRDFLNDLTASSDRCG

SEQ ID NO: 13320 - protein, 387 aa, Rhizobium sp. NGR234
MRPIYLDNNATTRVDAEVLQAMLPFFADVFGNASSMHDAGATAGAAINVARRQLQALIGAKFDPEITFTSGGTESNNAAILSGLEAMPERTEIVTSAVEHPAVLTLCTHLEKTRGTKVHKVPVDHQGRLDLDAYQDALTHRVAIVSIMWANNETGTIFPVVKLAEMAKKVGAIFHTDAVQAIGKLPIDLKSTAIDMLSLSAHKFHGPKGVGALYIKRGVPFHALIKGGHQERDRRAGTENTPGIVGLGKAAELALDCMDKDNAIIRSFRDRLEKGLLERVPQVFVMGDPVTRLPNTTSIAFEGVGGEAMQFLLNRHGIACSSGSACTSRSLSTSHVLKAMGTPHRQAVGAVRFSLSGYNCEEDIDRVLRVIPAVVKKLRESRPVFAG

SEQ ID NO: 13321 - protein, 437 aa, Nepenthes alata
MASSLYSFLLALSIVYIFVAPTHSTSRTALNHHHEPKVAGFQIMLEHVDSGKNLTKFELLERAVERGSRRLQRLEAMLNGPSGVETPVYAGDGEYLMNLSIGTPAQPFSAIMDTGSDLIWTQCQPCTQCFNQSTPIFNPQGSSSFSTLPCSSQLCQALQSPTCSNNSCQYTYGYGDGSETQGSMGTETLTFGSVSIPNITFGCGENNQGFGQGNGAGLVGMGRGPLSLPSQLDVTKFSYCMTPIGSSNSSTLLLGSLANSVTAGSPNTTLIQSSQIPTFYYITLNGLSVGSTPLPIDPSVFKLNSNNGTGGIIIDSGTTLTYFVDNAYQAVRQAFISQMNLSVVNGSSSGFDLCFQMPSDQSNLQIPTFVMHFDGGDLVLPSENYFISPSNGLICLAMGSSSQGMSIFGNIQQQNLLVVYDTGNSVVSFLSAQCGAS

SEQ ID NO: 13322 - protein, 173 aa, Magnolia praecocissima
  misc_feature (171)..(171): Xaa can be any naturally occurring amino acid
  unsure (1)..(173): unsure at all Xaa locations
KKAYELSVLCDAEVALIVFSPRGKLYEFGNAGMQKTIDRYLKHSKDTNINKAAVEQNVQLWKYEAAHMSKKIEILEDSKRKLLGESLESCSIEELQHIENQLERSLKNIRGRKSQLYVEQIKQLKEKERILSEENTVLIEKCGLRPQEPSTIQREIVPYDQGTQDQEVELXCT

SEQ ID NO: 13323 - protein, 187 aa, Magnolia praecocissima
  misc_feature (164)..(164): Xaa can be any naturally occurring amino acid
  unsure (1)..(187): unsure at all Xaa locations
ELTVLCDAEVALIVFSPRGKLYEFASSSMHKTIDRYERHAKDISIANKTVEQNVQQWKFEAAHMAKKIEHLEVSKRKLLGEGLGSRPIEELQQIESQLERLSSIRARKTLLFTEQIQQLKEKERFLTEENAILSKKADDLSVQPLQQLSPTQKEIVPYDDETRXPEVETELFIGRPERGKKRYPMKV

SEQ ID NO: 13324 - protein, 231 aa, Magnolia praecocissima
ENKINRQVTFAKRRNGLLKKAYELSVLCDAEVALIIFSNRGKLYEFCSSSSMLKTLERYQKCNYGAPELPVSTRETQSYHQEYLKLKARVEALQRSQRNLLGEDLGPLSGKELETLERQLDISLRQIRSTRTQCMLDQLGDLQRREHMLSEANKTLTRRLEEGAQANQNQVWEPNAHAVDSYNRQQPQQQGDGFFHPLECEPTLHIGYQPDQITIAAPGPSVNNYMPGWLV

SEQ ID NO: 13325 - protein, 212 aa, Magnolia praecocissima
  misc_feature (20)..(20): Xaa can be any naturally occurring amino acid
  misc_feature (180)..(180): Xaa can be any naturally occurring amino acid
  misc_feature (201)..(201): Xaa can be any naturally occurring amino acid
  misc_feature (204)..(204): Xaa can be any naturally occurring amino acid
  unsure (1)..(212): unsure at all Xaa locations
ENKINRQVTFAKRRNGLLKXAHELSVLCDAEVALIIFSTRGKLYEFCSSPSMLQTLERYQKCSYSTLEVSAPTNETQSSYQEYLKLKARVEILQRTQRNLLGEDLGPLSTKELEQLENQLEMSLKQIRSTKTQFMLDQLLDLKEGQCWRKQQGLKRKLEEMVEKSSSAVVGHRCTKHVFXKIANLLILRDSSSLWIANQHXRWXTIPCMKIR

SEQ ID NO: 13326 - protein, 394 aa, Halobacterium sp. NRC-1
MRVVTKFGGTSLGSGDRVERAADSIADAVAAGHEIAVVASAMGNTTDELLDDITFDADEPDRAEIVSMGERTSVRMLKAALAARGVDATFLEPGTTDWPIVTNERGEVDADATAAGVDRLAGRLGDTVPVITGFLAEDPQGNVTTLGRGGSDTTAVMLGRYLDADEVVIVTDVEGIMTGDPQVVEGARNVGRITVDELRNLSFRGAEVIAPSALSFKDDALDVRVIHYQHGDLLSGGTRIEGTFESMIDMRDSPLACLTVAGRAIRNRPGITSALSTALSDSDINVDAVASGMDSMTFYVDESVAERAENILHQEVIAVSELSSVTVTDDIAAIRVLGGELPNRPGVLCRIIDPLADRNINVIDIISSATSVAVFVSWADREPALDVVQNGFGS

SEQ ID NO: 13327 - protein, 1472 aa, Azospirillum brasilense
CGVGFIAAIDGKPRRSVVEKGIEALKAVWHRGAVDADGKTGDGAGIHVAVPQKFFKDHVKVIGHRAPDNKLAVGQVFLPRISLDAQEACRCIVETEILAFGYYIYGWRQVPINVDIIGEKANATRPEIEQIIVGNNKGVSDEQFELDLYIIRRRIEKAVKGEQINDFYICSLSARSIIYKGMFLAEQLTTFYPDLLDERFESDFAIYHQRYSTNTFPTWPLAQPFRMLAHNGEINTVKGNVNWMKAHETRMEHPAFGTHMQDLKPVIGVGLSDSGSLDTVFEVMVRAGRTAPMVKMMLVPQALTSSQTTPDNHKALIQYCNSVMEPWDGPAALAMTDGRWVVGGMDRNGLRPMRYTITTDGLIIGGSETGMVKIDETQVIEKGRLGPGEMIAVDLQSGKLYRDRELKDHLATLKPWDKWVQNTTHLDELVKTASLKGEPSDMDKAELRRRQQAFGLTMEDMELILHPMVEDGKEAIGSMGDDSPIAVLSDKYRGLHHFFRQNFSQVTNPPIDSLRERRVMSLKTRLGNLGNILDEDETQTRLLQLESPVLTTAEFRAMRDYMGDTAAEIDATFPVDGGPEALRDALRRIRQETEDAVRGGATHVILTDEAMGPARAAIPAILATGAVHTHLIRSNLRTFTSLNVRTAEGLDTHYFAVLIGVGATTVNAYLAQEAIAERHRRGLFGSMPLEKGMANYKKAIDDGLLKIMSKMGISVISSYRGGGNFEAIGLSRALVAEHFPAMVSRISGIGLNGIQKKVLEQHATAYNEEVVALPVGGFYRFRKSGDRHGWEGGVIHTLQQAVTNDSYTTFKKYSEQVNKRPPMQLRDLLELRSTKAPVPVDEVESITAIRKRFITPGMSMGALSPEAHGTLNVAMNRIGAKSDSGEGGEDPARFRPDKNGDNWNSAIKQVASGRFGVTAEYLNQCRELEIKVAQGAKPGEGGQLPGFKVTEMIARLRHSTPGVMLISPPPHHDIYSIEDLAQLIYDLKQINPDAKVTVKLVSRSGIGTIAAGVAKANADIILISGNSGGTGASPQTSIKFAGLPWEMGLSEVHQVLTLNRLRHRVRLRTDGGLKTGRDIVIAAMLGAEEFGIGTASLIAMGCIMVRQCHSNTCPVGVCVQDDKLRQKFVGTPEKVVNLFTFLAEEVREILAGLGFRSLNEVIGRTDLLHQVSRGAEHLDDLDLNPRLAQVDPGENARYCTLQGRNEVPDTLDARIVADARPLFEEGEKMQLAYNARNTQRAIGTRLSSMVTRKFGMFGLQPGHITIRLRGTAGQSLGAFAVQGIKLEVMGDANDYVGKGLSGGTIVVRPTTSSPLETNKNTIIGNTVLYGATAGKLFAAGQAGERFAVRNSGATVVVEGCGSNGCEYMTGGTAVILGRVGDNFAAGMTGGMAYVYDLDDSLPLYINDESVIFQRIEVGHYESQLKHLIEEHVTETQSRFAAEILNDWAREVTKFWQVVPKEMLNRLEVPVHL

SEQ ID NO: 13328 - protein, 490 aa, Aspergillus fumigatus
MPTLGGLLKKRRTKDSHTLSKELESSSSPAAAQTQTSPNSADHDHHYQHYDQTHHHQHSASSNPSNNSATPSAAQPHRSSNDNPNRSSGTDQKSEGQTASMQFAVTQPHPSTHHNPRLHHLQQQQQQPQQQSHTSRLHNILHPSHHASSQASTEGHAHSQQANQTEARTTKGKYSLDDFTIQRTLGTGSFGRVHLVQSKHNHRFYAIKVLKKAQVVKMKQVEHTNDERRMLNRVRHPFLITLWGTWQDARNLYMVMDFVEGGELFSLLRKSQRFPNPVAKFYAAEVTLALEYLHSQQIIYRDLKPENLLLDRHGHLKITDFGFAKEVPDITWTLCGTPDYLAPEVVSSKGYNKSVDWWSLGILIFEMLCGFTPFWDSGSPVKIYENILRGRVKYPPYLHPDAVDLLSQLITADLTKRLGNLHGGSEDVKNHPWFAEVTWDRLARKDIDALYVPPIREGQGDASQYDRYPEETEQYGQQGEDVHGHLFPDF

SEQ ID NO: 13329 - protein, 185 aa, Oryza rufipogon
FLLKWFQLYPEFLSNPFYIAGESYAGVYVPTLSHEVVKGLHDGVKPTINFKGYMVGNGVCDTVFDGNALVPFAHGMALISDDIYQEAQTACHGNYWNTTTDKCENALYKVDTSINDLNIYDILEPCYHSKTIKKVTPANTKLPKSFQHLGTTTKPLAVRTRMHGRAWPLRAPVRAGRVPSWQEFA

SEQ ID NO: 13330 - protein, 185 aa, Oryza punctata
FLLKWFQLYPEFLSNPFYIAGESYAGVYVPTLSHEVVKGLHDGVKPTINFKGYMVGNGVCDTVFDGNALVPFAHGMALISDDIYQEAQTACHGNYWNTTTDKCENALYKVDTLISDLNIYDILEPCYHRKSIKEVTPANTKLPKSFQHLGTTDKPLAVRTRMHGRAWPLRAPVRAGRVPSWQEFA

SEQ ID NO: 13331 - protein, 185 aa, Oryza officinalis
FLLKWFQLYPEFLSNPFYIAGESYAGVYVPTLSHEVVKGLHDGVKPTINFKGYMVGNGVCDTVFDGNALVPFAHGMALISDDIYQEAQTACHGNYWNTTTDKCENALHKVDTLISDLNIYDILEPCYHSKSIKKVTPANTKLPKSFQHLGTTDKPLAVRTRMHGRAWPLRAPVRAGRVPSWQEFA

SEQ ID NO: 13332 - protein, 185 aa, Oryza australiensis
FLLKWFQLYPEFLSNPFYIAGESYAGVYVPTLSHEVVKGLHDGVKPTINFKGYMVGNGVCDTVFDGNALVPFAHGMALISDDVYQEAQTACHGNYWNTTTDKCENALNKVDTLISGLNIYDILEPCYHSKSIKKVTPENSRLPKSFQHLGTTDKPLAVRTRMHGRAWPLRAPVRAGRVPSWQEFA

SEQ ID NO: 13333 - protein, 185 aa, Oryza brachyantha
FLLKWFQLYPEFQSNPFYITGESYAGVYVPTLSHEVVKGIHDGVKPAINFKGYMVGNGVCDTVFDGNALVPFAHGMGLISDDIYQEASTACHGNYWNATSAKCETAVSKVDTLISGLNIYDILEPCYHSTGVKELIPANSRLPKSFQHLGTTDKPLPVRTRMLGRAWPLRAPVREGRVPSWQELA

SEQ ID NO: 13334 - protein, 185 aa, Oryza granulata
FLLKWFQLYPEFLSNPFYIAGESYAGVYVPTLSHEVVKGIRAGVKPTINYKGYMVGNGVCDTVFDGNALVPFAHGMGLISDDIYQEASTACHGNYWNPTNDKCEIAVSKVDTLISGLNIYDILEPCYHSTSIKKVTPANSRLPKSFQHLGITDKPLPVRTRMLGRAWPLRAPVREGRVPSWQELA

SEQ ID NO: 13335 - protein, 185 aa, Leersia tisserantii
FLLKWFQLYPEFLSNPFYISGESYAGVYVPTLSHEVAKGIRDGVKPTINFKGYMVGNGVCDTVFDGNALVPFAHGMALISDDIYQEAHNACHGNYWNPTNDKCEIAVSKVNMVIDGLNIYDILEPCYHSPSIKNMTPENSRLPKSFQHLGTTDKPLAVRTRMIGRAWPLRAPVKAGHVPSWQELA

SEQ ID NO: 13336 - protein, 221 aa, Oryza rufipogon
CNRLALEGPLVSIDEMEAIKKMNYRGWRSKVLDITYPKKSGRKGLEETLDRICTEARGAIKKGYTVLVLSDRGFSSDRVAVSSLLAVGAVHQHLVANLERTRVGLLVESAEPREVHHFCTLVGFGADAVCPYLAIEAIWCLQNDGKIPPNGDGKPYSKEELVKKYFYASNYGMMKVLAKMGISTLASYKGAQIFEALGLSSEVIRKCFDGTPSRIEGATFE

SEQ ID NO: 13337 - protein, 221 aa, Oryza officinalis
CNRLALEGPLVSIDEMEAIKKMNYRGWRSKVLDITYPKKSGRKGLEETLDRICTEARGAIKKGYTVLVLSDRGFSSDRVAVSSLLAVGAVHQHLVANLERTRVGLLVESAEPREVHHFCTLVGFGADAVCPYLAIEAIWCLQNDGKIPPNGDGKPYSKEELVKKYFYASNYGMMKVLAKMGISTLASYKGAQIFEALGLSSEVIHKCFDGTPSRIEGATFE

SEQ ID NO: 13338 - protein, 221 aa, Oryza australiensis
CNRLALEGPLVSIDEMEAIKKMNYRGWRSKVLDITYPKKSGRKGLEETLDRICTEARGAIKKGYTVLVLSDRGFSSDRVAVSSLLAVGAVHQHLVANLERTRVGLLVESAEPREVHHFCTLVGFGADAVCPYLAIEAIWCLQNDGKIPPNCDGKPYSKEELVKKFFYASNYGMMKVLAKMGISTLASYKGAQIFEALGLSSEVIHKCFDGTPSRIEGATFE

SEQ ID NO: 13339 - protein, 221 aa, Oryza brachyantha
CNRLALEGPLVSVDEMEAIKKMNYRGWRSKVLDITYPKKSGRKGLEETLERICTEAREAIKKGYTILVLSDRGFSSDRVAVSSLLAVGAVHHHLVDNLERTRVGLLVESAEPREVHHFCTLVGFGADAVCPYLAIEAIWCLQNDGKIPPNSDGKPYSKEELVKKYFYASNYGMMKVLAKMGISTLASYKGAQIFEALGLSSEVIRKCFNGTPSRIEGATFE

SEQ ID NO: 13340 - protein, 221 aa, Oryza granulata
CNRLALEGPLVSIDEMEAIKKMNYRGWRSKVLDITYPKKSGRKGLEITLDRICTEAQEAIKKGYTILVLSDRGYSSDRVAVSSLLAVGAVHHHLVANLERTRVGLLVESAEPREVHHFCTLVGFGADAVCPYLAIEAIWCLQNDGKIPLNGDGKPYSKEELVKKYFYASNYGMMKVLAKMGISTLASYKGAQIFEALGLSSEVIRKCFNGTPSRIEGATFE

SEQ ID NO: 13341 - protein, 221 aa, Leersia tisserantii
CNRLALEGPLVSIDEMEAIKKMNYRGWRSKVLDITYPKRSGRKGLEETLDRICTEAREAIKKGYTILVLSDRGFSSDRVAVSSLLAVGAVHQHLVANLERTRVGLLVESAEPREVHHFCTLVGFGADAVCPYLAIEAIWCLQKDGKIPPNGDGKPYSKEELIKKYFYASNYGMMKVLAKMGISTLASYKGAQIFEALGLSSEVIRKCFDGTPSRIEGATFE

SEQ ID NO: 13342 - protein, 132 aa, Arabidopsis lyrata
MDQGGRSGGGGGGGGAEQMKYRGVRRRPWGKYAAEIRDSRKHGERVWLGTFDTAEDAARAYDRAAYSMRGKAAILNFPHEYSMGTGSSSTAASSSSSSRQVFEFEYLDDSVLDELLEYGENYNKTHNINTGK

SEQ ID NO: 13343 - protein, 389 aa, Lactobacillus brevis
MAEEVVIVSAARTPIGKFGKSLRGLSAEQLGTIAAKAAITRSGLDPATIQQTIFGSVLQAGQGQNIARQIELNAGLPVTSTAMTINQVCGSSLKAIRLGQSAILMGDADIVLVGGTESMSNAPYLTPQTRWGHKFGDIRLTDSLAHDGLTDAFTNIPMGITAENVAAQFHISRADQDAFALRSQRRATAAQQANRFADEIVPVSLDTTTLTTDEAVRTTTSREQFAALRPAFKSAGTVTAGNAAGLNDGAAAMILMKKSTAQAAGIAYLATLRGYQEVGIDPAIMGYAPVTAIQQLLTKTQRSVSDIDRFELNEAFAAQSVAVGQALALPDDRLNVNGGAIALGHPLGASGTRIVVTLLYELLHSGTHLGVASMCIGGGMGMALMIESN

SEQ ID NO: 13344 - protein, 591 aa, Solanum dulcamara
MGTPKEEATDEVFSENLEQKPDPDPATSKSELKETTSKSISGELQKRLSQCDKGINMSQSNQEAISLSRVQENQSENVQKQLGLKSEADASGSSQLSSLPKDSDAKSRGSESSVKDKVVSVLSGMASDSSDQMQTSNMEVFVSQSDQQRVSYQIKREKALDKLQPRRNPDTSVHGLTSDQGMTLSKAPEKPSEDGYNWRKYGQKLVKGNEFTRSYYKCTYPNCLAKKQVERSHDGHITDIHYIGKHEHPETLSVPQMSPELVLPLQMIQQDIPIITALEAEGEKSTTPRETCEPSKPSEVPLALDVVSACGGVKVTPLKQHKLENEVDKDDVPDSKRQKKDIVATDYTPPVKSHSEPRHIVQTMSEVDIINDGQRWPKYGQKIVKGNPNPRSYYRCSVAGCPVKKHVERASHDPKLVITTYEGHHVHDFPTSKAIGQISAAPDTGTAGVREDSRIESGESKHVVESKSESGENKHIREPKTEAGGNKRVGESIPESGENKHIREPKTEAGENKHIGESRIESGGNKHVEKSKLELGGNKHVGESIPKPGGNKHVGESIPESGGNKHVGESIPESGENKHVGLDMAVHIGAN

SEQ ID NO: 13345 - protein, 193 aa, Arabidopsis lyrata
SYTPGDTQTGPVISVPESEKIMNAYRFPNNNNNEMIKKKRLTSGQLASLERSFQEEIKLDSDRKVKLSRELGLQPRQIAVWFQNRRARWKAKQLEQLYDSLRQEYDVVSREKQMLHEEVKKLRAILRDQGLIKKQISAGTIKVSGEEDTTEVSSVVVAHPRTENLNTNQITGGNQVYGQYNNPMLVASSGWLS

SEQ ID NO: 13346 - protein, 658 aa, Vitis rupestris
MGPHSTDEVPEAKEDIRSLSSSHRHTTNLPYMHKVGVPPKQNLFKEFKTTVKETFFADDPLRSFKDQSKSRKFILGIQAIFPILEWGRSYNLTKFRGDLIAGLTIASLCIPQDIGYAKLASLEPQYGLYSSFVPPLIYAFMGSSRDIAIGPVAVVSLLLGSLLRAEIDPTENPAEYLRLAFTATFFAGITQATLGIFRLGFLIDFLSHAAIVGFMGGAAFTIALQQLKGFLGIKNFTKETDIISVMHSVWGSVHHGWNWQTIVIGATFLGFLLFAKYIGKKNKKFFWVPAIAPLISVVLSTFFVYITRADKKGVQIVKHIDKGINPSSASQIYFSGVYLLKGFKIGVVAGMIALTEAVAIGRTFASMKDYQLDGNKEMVALGAISIVGSMTSLLMWQQVPLSSAVNYMAGCRTAVSNIVMSCVVFLTLEFITPLFKYTPNAILASIIISAVIGLIDYDAAILIWKIDKFDFVACMGAFFGVVFKSVEIGLLIAVAISFAKILLQVTRPRTAILGKLPRTTVYRNIQQYPEATKIPGLLIVRIDSAIYFSNSNYVKERILRWLTDEEEHLKEANLPRVQFLIVEMSPVTDIDTSGIHALEELHRSLLKRDVKLVLANPGQVVVDKLHASKFADDIGEDKIFLTVGDAVVTCSPKLAEEV

SEQ ID NO: 13347 - protein, 487 aa, Clitoria ternatea
MAAFSSTHSACGILLLPLVVSSLICFQLASCGTIVEFLPGFDGPLPFVLETGYVGVGEGEDVQVFYYFVESENNPNEDPLMLWLTGGPGCSAFSGLALEIGPLIFKREEYNGGLPNLILRPHSWTKVSSIIFVDLPVSTGFTYARTDAAAQRSDWTLVHHAHEFLRKWLIDHPKFLQNELYIGGDSYSGIPIPVIVQEISQENEKGIQPWINLQGYILGNAITTRREKGYSIPFAHGMALISDELYESLRKNCKGEYLNVDPENVLCSRDIDSYSKATSRISFAHILERTCNSGDIKTSLRRSTIQRHHTKKFLNTNLKLPPLTCRTYANFQCGLWANDDNVRSALHIHKGSIGEWHRCSIRLPFTSDIPNSFEYHVNLSRKGYYRSLIYSGDHDMMVPFLGTQAWIRSLNYSIVDDWRPWNTNGQVAGYTRTYSNRMTYATIKGGGHTAPEFKPEECFAMYSRWISKRPLYENNTMSSYTNLASIL

SEQ ID NO: 13348 - protein, 469 aa, Clitoria ternatea
MARFSSSLGARVILLLPLLFSSLISFQLASCGTTVDFLPGFDGPLPFVLETGYVGVGEGEDVQAYYYFVESENNPNEDPLMLWLTGGPGCSSFSGLVLEIGPLIFKREEYNGSLPNLILRPHSWTKVSSIIFLDLPVSTGFTYARTEVAAQKSDLKLVHQAHEFLRKWLIDHPKFLSNEVYIGGDSYSGITVPAIVQEISQGNEKGIQPSINLQGYILGNAFTTRKEENYAIPFAHGMALISDELYESLQKNCKGEYIDVDTKNALCSRVMESYNEVISGISFSHILEPNCDWVDTETSLRRSLIQRHHGKKFLNTRLPALSCRTYANFQSSFWANDDNVRSALHIRKGSIGKWRRCTRNLPYTEDIPSSFEYHVNLSGKGYYRSLVYSGDHDLMVPFLGTQAWIRSLNYSIVDDWRQWNTNGQVAGYTRTYSNRMTFATVKGGGHTAPEFKPEECFAMYSRWISKRPL

SEQ ID NO: 13349 - protein, 481 aa, Gentiana triflora
MAVPAVPSEGHEEQHKSTSSFGIGSIKFQCSLFAVLLFALLYSSSSQSIVKTLPGFHGSLPFTLESGYVGVGENEELQLFYYFIESERDPANDPLVIWLTGGPGCSAFSGLIFEIGPLTFDFESYQGGVPTLNYNPHSWTKEASIIFVDSPVGTGYSYSNTFEGYHSTDHKASDDLYAFLRKWLLKHPKFLKNPVYVGGDSYGGKFVALVTWRISQGIDAGHEPRINLQGYIVGNPVADGFIDGNAPLPFAHRMGLISDDIHKMAEENCNGNYIKADQSNGLCLEAIKQYEECTADICFDNILEPNCQEKMTSHDISLLKLPSELKEEPWCRKDSYFLTHVWANDPSVQKALHIREGTIKEWVRCNYSISYSEKLDTVLEYHHLLSKRGYKTLAYSGDHDLYIPYTATLEWIHTLNLPVADEWRPWKVDNQVAGYTKRFIHNETGKYVTFATVKAAGHTAPEYKRRECLAMVARFFSDSPL

SEQ ID NO: 13350 - protein, 494 aa, Gentiana triflora
  misc_feature (158)..(158): Xaa can be any naturally occurring amino acid
  unsure (1)..(494): unsure at all Xaa locations
MADTNGTAKTTSRVKWYLYLYCNVITGLLYLQHSLLQVEAADSTTVKFLPGFKGPLPFELETGYIGVDKGENVQLFYYFVKSYSDYQIDPLVLWMTGGPGCSALTAFAYEIGPIAFEEVFSNGDVPRLVLNPYSWTQEASIVFVDAPVGTGFSYPRSXEAFRSTGLQTCNQIYQFLKKFLVHHPEFLSNPLYVGGDSYAGLFVPVVAELIAHGNENGIEPSINLKIFPSECFFDLGYVLGNPLTTPYDVDYRVPFSHGMGIISDELYESLKLNCNGVYHDVDPTNTKCLNDIDTFKQVFHGIRRSHILEPYCVSVLPEQQMLSTERQRSLHENNLRIPDVLNMHHTFRCRTDGYIPAYYWANDDRVREALHIHKGSIKNWVRCNRSLPFEDSIRNVVPYHANLSKKGYRSLIYSGDHDAMVPFMATQAWIRSLNYSIVDEWRQWIVEGQVAGYTRTYANQMTFATVKGGGHTAPEYKPKECKAMFKRWITHKPL

SEQ ID NO: 13351 - protein, 484 aa, Gentiana triflora
  misc_feature (158)..(158): Xaa can be any naturally occurring amino acid
  unsure (1)..(484): unsure at all Xaa locations
MADTNGTAKTTSRVKWYLYLYCNVITGLLYLQHSLLQVEAADSTTVKFLPGFKGPLPFELETGYIGVDKGENVQLFYYFVKSYSDYQIDPLVLWMTGGPGCSALTAFAYEIGPIAFEEVFSNGDVPRLVLNPYSWTQEASIVFVDAPVGTGFSYPRSXEAFRSTGLQTCNQIYQFLKKFLVHHPEFLSNPLYVGGDSYAGLFVPVVAELIAHGNENGIEPSINLKGYVLGNPLTTPYDVDYRVPFSHGMGIISDELYESLKLNCNGVYHDVDPTNTKCLNDIDTFKQVFHGIRRSHILEPYCVSVLPEQQMLSTERQRSLHENNLRIPDVLNMHHTFRCRTDGYIPAYYWANDDRVREALHIHKGSIKNWVRCNRSLPFEDSIRNVVPYHANLSKKGYRSLIYSGDHDAMVPFMATQAWIRSLNYSIVDEWRQWIVEGQVAGYTRTYANQMTFATVKGGGHTAPEYKPKECKAMFKRWITHKPL

SEQ ID NO: 13352 - protein, 481 aa, Lobelia erinus
  misc_feature (422)..(422): Xaa can be any naturally occurring amino acid
  unsure (1)..(481): unsure at all Xaa locations
MAFGMPFSWDWKLGWVLQIILLLAVSTIVAPRSIIDTLPGFKGILPFKLETGYISVGESDEIQLFYYFFPSEGSPEKDPLMIWFTGGPGCSGLSAFMENKGPLIFSDESPFDGNLPPLTTNPHTLTKVASIIFIDSPVKAGFSYATTYEGYNMSDTKTAKEATTFLKKWLLEHPEFDKNPLYIAGDSYAGLIVPMVVFHVSNAIEAGQMPNTNLEGYVLGNPFTDTPNDVGSRIPYANRMALISDQYYEWAKTSCQGDYSRQDPSNTKCLLHLQLIDKCIEDIYIDYILGPKCKNGMNLQSGDKFMLGKQSSQDMILLPSLREEHSEQCEEELKTHLCEIWANEPVVQQALHVRKGTLTSEWMRCNKSSSTYINDMPTSIEYHQILSKKTYRALIYSGDHDMTVPYVGTLAWIHKLNLSIEXYWRPWLVDNQAAGFTEKYQGKNGFSLTFGTVKGAGHVAARYKPKGTSTIIGRWLTRSLL

SEQ ID NO: 13353 - protein, 386 aa, Saccharomyces cerevisiae
  misc_feature (1)..(1): Xaa can be any naturally occurring amino acid
  misc_feature (76)..(76): Xaa can be any naturally occurring amino acid
  misc_feature (126)..(126): Xaa can be any naturally occurring amino acid
  misc_feature (172)..(172): Xaa can be any naturally occurring amino acid
  misc_feature (199)..(199): Xaa can be any naturally occurring amino acid
  misc_feature (224)..(224): Xaa can be any naturally occurring amino acid
  misc_feature (245)..(245): Xaa can be any naturally occurring amino acid
  misc_feature (282)..(282): Xaa can be any naturally occurring amino acid
  misc_feature (284)..(284): Xaa can be any naturally occurring amino acid
  misc_feature (339)..(339): Xaa can be any naturally occurring amino acid
  unsure (1)..(386): unsure at all Xaa locations
XKVISLKKDSFNKGGAVITLLPEDKEDLFTVYQIVDKDDELIFKKKFTSKLDEAGKKKSTDLVKLKIKVISEDFDXKDEYLKYKGVTVTDESGASNVDIPVGKYLSFTLDYVYPFTIIKQNFNKFXQKLLNEACNIEYKSDTAAVVLQEGIAHVCLVTSSSTILKQKIEYSXPKKKRTTDVLKFDEKTEKFYKAIYSAXKKDLNFDKLKTIILCSPGFYAKILXDKIFQYAEEEHNKKILDNKGXFFIAHCSTGYLQGINEVLKNPLYASKLQDTKYSKEIXVXDEFLLHLNKDDDKAWYGEKEVVKAAEYGAISYLLLTDKVLHSDNIAQREEYLKLXDSVESNGGKALVLSTLHSLGEELDQLTGIACILKYPLPDLDEDDGEE

SEQ ID NO: 13354 - protein, 375 aa, Arabidopsis lyrata
REIRVNNGGDHIVSLTSTTYGHLDLDERAETSPKSLEVTKGEVFESEIKARRSIQRDDPEIINTWELMEDLEDSMHVSNPQKISPKSRGIFGKSWKTPVKSVVESPKRGSSKRFGGKENRGGNNSRGVSPNQILKPKNILETPKRGVMRLSFPLKFEEPSVVITQRRKSYSPMFDPDLVASYERELSQEQEQIKMVISPVVHESRKTEKTRESERILEKFPEKCPPGGENSVVIYITTLRGIRKTFEDCNVVRSILDSHEVRFSERDVSMHSVFKEEIRGIMGTKHVKIPAVFVKGRMLGSVEEVMKLEEEGKLGILLEGIPAARLGGSCCRGCGGMRFVMCVVCNGSCKVRGEDKKSMVKCLECNENGLVLCPI

SEQ ID NO: 13355 - protein, 177 aa, Arabidopsis lyrata
MENMGTRVIEPLIMGRVVGDVLDFFTPTIKMNVSYNKKQVSNGHELFPSSVSSKPRVEIHGGDLRSFFTLVMIDPDVPGPSDPFLKEHLHWIVTNIPGTTDATFGKEVVSYELPRPSIGIHRFVFVLFKQKQRRVIFPNIPSRDHFNTRKFAVEYDLGLPVAAVFFNAQRETAARKR

SEQ ID NO: 13356 - protein, 205 aa, Capsicum annuum
MESAYIRSNFLIGFLILVALTTSSNYLASVSAARPAVGETNTEFIRTSCKSTSYPNLCFSSLSSRASAIGVAPQLLAHESLTVSLETAQSTSAMMLKLAHGQGMTPREVGAMHDCVEELSDTVAGLRKSLGEMKQLRGKDFDLKINDIQTWVSAALTDEDTCTEGFDGKVMNGKVKTVVRGKIFEVAHLTSSALALINSLASLHG

SEQ ID NO: 13357 - protein, 421 aa, Yersinia pestis
MSFDSLGLNADILRAVEEQGYLVPTPIQRQAIPVVLEGRDLMASAQTGTGKTAGFTLPLLQLLSQDQQPIKGRRPVRALILTPTRELAAQIDENVQSYSKYLKLRSLVVFGGVSINPQMMKLRGGVDILVATPGRLLDLEHQNAVDLSKIEILVLDEADRMLDMGFIHDIRRVLAKLPAKRQNLLFSATFSDEIKGLASKLLHNPASVEVARRNTASEQIAQSVHFVDKNRKRELLSQMIGEGNWQQVLVFNRTKHGANHLAEQLNKDGITAAAIHGNKSQGARTRALADFKDGKIRVLVATDIAARGLDIDQLPHVVNYELPNVPEDYVHRIGRTGRAERTGEAISLVCVDEHKLLRDIERLLKREIPRIALDGYEPDPSIKADPIQNGRQGRGAQRPGMGRGSSAGRPQNGGGASGARG

SEQ ID NO: 13358 - protein, 491 aa, Alternaria alternata
  misc_feature (400)..(400): Xaa can be any naturally occurring amino acid
  unsure (1)..(491): unsure at all Xaa locations
MRGKLGTVLGGAEGCNRCAQSACGCADMRRSRVRMALVRECLRRGRASFGLVDGSVEATTSGRHWQHDPSRPSQRTMFQPPAAPVFAGCSQCPLTNTTSLNAPHPNFNTSIHYTVSCPGRLPAREASLVASCVPLGMNLIHPNNTSSHQSAPKNGGAVQFQTQPLNQTRVTKGKYSLTDFTIQRTLGTGSFGRVHLVQSKHNQRFYAVKVLKKAQVVKMKQVEHTNDERRMLQQVKHPFLITLWGTFQDSKNLYMVMDFVEGGELFSLLRKSQRFPNPVAKFYAAEVTLALDYLHSHNIIYRDLKPENLLLDRHGHLKITDFGFAKEVPDITWTLCGTPDYLAPEVVASKGYNKSVDWWSLGILIFEMLCGFTPFWDGGSPMKIYENILKSRVKYPPYIXPDAHDLLQKLITPDLTKRLGNLHGGSKDVMNHPWFAEVTWDRLQKKDIDAPYVPPVRAGVGDASQFDKYPEETEAYGQAGDDPHGHLFPDF

SEQ ID NO: 13359 - protein, 167 aa, Brassica rapa subsp. rapa
MQEQATSSLPASSLPSSSERSSSSAPHLEIKEGIESDEEIRRVPEFGGEATGKEISGSGTGQDQTQATVGGESQRKRGRTPAEKETKRLKRLLRNRVSAQQARERKKAYLGELETRVKDLENRNSELDERLSTLQNENHMLRQILKNTTGNKRGGGGGGGSNADASL

SEQ ID NO: 13360 - protein, 164 aa, Gossypium arboreum
MTKDRQIGVAMDFSKGSKAALKWTIDNLVDKGDTLYLIHVKPNQSDESRKLLWSTTGSPLIPLSEFREKEVMKHYEVEPDPEILDLVDIASGQKQGTLVAKIYWGDARDKICESVEDLKLDCLVMGSRGLGTIQRVLIGSVSNYVMVNATCPVTIVKDPSAHGF

SEQ ID NO: 13361 - protein, 428 aa, Brassica rapa subsp. chinensis
MAQILAASPTCQMRLTKPSSIASSKLWNSVVLKQKEQSSSKVRSFKVMALQSDNSTINRVESLLNLDTKPFTDRIIAEYIWIGGSGIDLRSKSRTLEKPVEDPSELPKWNYDGSSTGQAPGEDSEVILYPQAIFRDPFRGGNNILVICDTYTPAGEPIPTNKRARAAEIFSNKKVNEEIPWFGIEQEYTLLQPNVNWPLGWPVGAYPGPQGPYYCGVGAEKSWGRDISDAHYKACLYAGINISGTNGEVMPGQWEFQVGPSVGIEAGDHVWCARYLLERITEQAGVVLTLDPKPIEGDWNGAGCHTNYSTKSMREDGGFEVIKKAILNLSLRHMEHISAYGEGNERRLTGKHETASIDQFSWGVANRGCSIRVGRDTEKKGKGYLEDRRPASNMDPYIVTSLLAETTLLWEPTLEAEALAAQKLSLKV

SEQ ID NO: 13362 - protein, 412 aa, Botryotinia fuckeliana
MALTPQQIDIIKATVPVVQEYGTAITTTFYKNVLAANPALNNIFNQTNQKNGDQPRALSGALAAYAANIDNLAVLSDAVERICQKHASLFIRPEHYPIVGKYLLEAMGQVLGAALTPEILDAWTAAYNQLAQIMIDREMQLYQEAGEWKEWRDFKIAKKVKESSIITSFYLEPVDGKPLPPFKPGQYISVQVHVPDFGYLQSRQYSLSDRPNEKYYRISVKREDAVVLPEANTPVEAGVISNILHDTKHEGDVVQVSPPQGEFFLDLQKNTDSPVVLISAGVGLTPMVSILNTLVERGSARPISYIHAARSKEVDAFHDHVQEIATSNSNVRSWVFVKNLPADNYGHPVKDLAGRMDLSKVKDAALHLDDSTTVYFICGPGGFMDDMSKVLQTFGVSEDRINLEVFGTGEAQ

SEQ ID NO: 13363 - protein, 415 aa, Neurospora crassa
MSFANMLNRLHGQPESYDKKSKYSFGRTLGAGTYGIVREASGPTGRVAVKIILKKNVKGNEQMVLDELEMLQRLKHPHIVKFVDWFESRDKYYIVTQLATGGELFDRICEQGKFTEKDASQTIKQVLGAVNYLHENNVVHRDLKPENLLYLTRDADSDLVLADFGIAKMLDNKDEVLTTMAGSFGYAAPEVMLKQGHGKPVDMWSMGVITYTLLCGYSPFRSENLQDLIDECSSGSVVFHERYWKDVSNDAKDFILRLLQPKPENRWTSQVRLTLAHPWLRGDSATNHNLLPEIKAYLTKARLRRGIEMVKLANRIEALKMQEDDPENTDMPGDATLAADQAQSRHRALSLASTKGGSSDAENATAPAEKRTLSKTIKTAIFREVVLAKVREMKEAEEANKLKEEAETKAKSFQA

SEQ ID NO: 13364 - protein, 1129 aa, Avena sativa
MSSSRPASSSSSRNRQSSQARVLAQTTLDAELNAEYEESGDSFDYSKLVEAQRDGPPVQQGRSEKVIAYLQHIQKGKLIQTFGCLLALDEKSFNVIAFSENAPEMLTTVSHAVPSVDDPPRLGIGTNVRSLFSDQGATALHKALGFADVSLLNPILVQCKTSGKPFYAIVHRATGCLVVDFEPVKPTEFPATAAGALQSYKLAAKAISKIQSLPGGSMEVLCNTVVKEVFDLTGYDRVMAYKFHEDDHGEVFSEITKPGLEPYLGLHYPATDIPQAARFLFMKNKVRMICDCRARSIKVIEAEALPFDISLCGSALRAPHSCHLQYMENMNSIASLVMAVVVNENEEDDEAESEQPAQQQKKKKLWGLLVCHHESPRYVPFPLRYACEFLAQVFAVHVNREFELEKQLREKNILKMQTMLSDMLFREASPLTIVSGTPNIMDLVKCDGAALLYGGKVWRLRNAPTESQIHDIAFWLSDVHRDSTGLSTDSLHDAGYPGAAALGDMICGMAVAKINSKDILFWFRSHTAAEIRWGGAKNDPSDMDDSRRMHPRLSFKAFLEVVKMKSLPWSDYEMDAIHSLQLILRGTLNDASKPKREASLDNQIGDLKLDGLAELQAVTSEMVRLMETATVPILAVDGNGLVNGWNQKAAELTGLRVDDAIGRHILTLVEDSSVPVVQRMLYLALQGKEEKEVRFEVKTHGPKRDDGPVILVVNACASRDLHDHVVGVCFVAQDMTVHKLVMDKFTRVEGDYKAIIHNPNPLIPPIFGADEFGWCSEWNAAMTKLTGWNRDEVLDKMLLGEVFDSSNASCPLKNRDAFVSLCVLINSALAGEETEKAPFGFFDRSGKYIECLLSANRKENEGGLITGVFCFIHVASHELQHALQVQQASEQTSLKRLKAFSYMRHAINNPLSGMLYSRKALKNTDLNEEQMKQIHVGDNCHHQINKILADLDQDSITEKSSCLDLEMAEFLLQDVVVAAVSQVLITCQGKGIRISCNLPERFMKQSVYGDGVRLQQILSDFLFISVKFSPVGGSVEISSKLTKNSIGENLHLIDLELRIKHQGLGVPAELMAQMFEEDNKEQSEEGLSLLVSRNLLRLMNGDVRHLREAGVSTFIITAELASAPTAMGQ

SEQ ID NO: 13365 - protein, 56 aa, Arabidopsis thaliana
QVEVWFQNRRARTKLKQTEVDCEFLKKCCETLTDENRRLQKELQDLKALKLSQPFS

SEQ ID NO: 13366 - protein, 350 aa, Arabidopsis thaliana
MKPVFCGNFEYDAREGDLERLFRKYGRVERVDMKAGFAFVYMEDERDAEDAIRALDRFEFGRRGRTLRVEWTKSERGGDKRSGGGSRRSSSSMRPSKTLFVINFDADNTRTRDLEKHFEPYGKIVNVRIRRNFAFIQYEAQEDATRALDASNNSKLMDKVISVEYAVKDDDARGNGHSPERRRDRSPERRRRSPTPYKRERGSPDYGRGASPVAAYRKERTSPDYGRRRSPSPYKKSRRGSPEYGRDRRGNDSPRRRERVASPTKYSRSPNNKRERMSPNHSPFKKESPRNGVGEVESPIERRERSRSSPENGQVESPGSIGRRDSDGGYDGAESPMQKSRSPRSPPADE

SEQ ID NO: 13367 - protein, 433 aa, Phaseolus vulgaris
MSEKEKEKEKGVSEGSTLLHGKYELGRVLGHGTFAKVYHARNLKTGQHVAMKVVGKEKVIKVGMMEQVKREISVMKMVKHSNIVELHEVMASKSKIYIAMELVRGGELFNKVSKGRLKEDVARLYFQQLISAVDFCHSRGVYHRDLKPENLLLDEHGKLKVSDFGLTAFADHLKEDGLLHTTCGTPAYVSPEVIAKKGYDGAKADIWSCGVILYVLLAGFLPFQDDNLVAMYKKIYRGDFKCPPWFSVEARRLVTRLLDPNPNTRISISKVVESSWFKKPVPRKVEDVAEMDLEEKCETPATMNAFHIISLSEGFDLSPLFEEKKREEMRFATAGTPSSVISRLEEVAKAGKFDMKSSETKVRLQGQERGRKGKLAIAADIYSVTPSFMVVEVKKDNGDTLEYNQFCSKQLRPALKDIFWNSPQNSTPAIVLE

SEQ ID NO: 13368 - protein, 438 aa, Phaseolus vulgaris
MMGEKSSTGEANNSLLLHGKYELGRLLGHGTFAKVYHARNLKSGKSVAMKVVGKEKVMKVGMMEQIKREISAMNMVKHPSIVQLHEVMASKSKIYIAMELVRGGELFNKIARGRLREETARLYFQQLVSAVDFCHSRGVYHRDLKPENLLLDEDGNLKVTDFGLSTFSEHLRQDGLLHTTCGTPAYVAPEVIGKKGYDGAKADIWSCGVILYVLLAGFLPFQDDNLVALYKKIYRGDFKCPPWFSSEARRLITKLLDPNPNNRITISKIMESSWFKKAVPKNVMGVKREELDLEEKIKQQEECKSSTMNAFHIISLSEGFDLSPLFEEKKREEKEIRFATTRPASSVISRLEEVAKAVKFDVKKSENQVRLQGQERGRKGKLAIAADLYAVTPSFLVVEVKKDNGDTLEYNQFCSNQLRPALKDIVWRTSPPENPTPA

SEQ ID NO: 13369 - protein, 52 aa, Pinus monticola
WRKYGQKMTRNNPLPRSYYKCAWAPACPVKKQVQRCAQDPTIVITTYPGEHT

SEQ ID NO: 13370 - protein, 52 aa, Pinus monticola
WRKYGQKMTRNNPLPRSYYKCAWAPACPVKKQVQRCAQDPTIVVTTYPGEHT

SEQ ID NO: 13371 - protein, 52 aa, Pinus monticola
WRKYGQKMTRNNPLPRSYYKCAWAPACPVKKQVQRCAQDPTIVITTYEGEHT

SEQ ID NO: 13372 - protein, 52 aa, Pinus monticola
WRKYGQKMTRNNPLPRSYYKCAWAPACPVKKQVQRCAQDPTIVITTYEGLHT

SEQ ID NO: 13373 - protein, 52 aa, Pinus monticola
WRKYGQKMTRNNPLPRSYYKCAWAPACPVKKQVQRCAQDPTIVITTYEGKHS

SEQ ID NO: 13374 - protein, 52 aa, Pinus monticola
WRKYGQKMTRNNPLPRSYYKCAWAPACPVKKQVQRCAQDPTIVITTYEGKHD

SEQ ID NO: 13375 - protein, 52 aa, Pinus monticola
WRKYGQKMTRNNPLPRSYYKCAWAPACPVKKQVQRCAQDPTLVITTYPGEHT

SEQ ID NO: 13376 - protein, 52 aa, Pinus monticola
WRKYGQKMTRNNPLPRSYYKCAWAPACPVKKQVQRCAQDPTIVITTYEGKHT

SEQ ID NO: 13377 - protein, 52 aa, Pinus monticola
WRKYGQKMTRNNPLPRSYYKCAWAPACPVKKQVQRCAQDPTLVITTYAGEHN

SEQ ID NO: 13378 - protein, 52 aa, Pinus monticola
WRKYGQKMTRNNPLPRSYYKCAWAPACPVKKQVQRCAQDPTLVITTYEGKHT

SEQ ID NO: 13379 - protein, 52 aa, Pinus monticola
WRKYGQKMTRNNPLPRSYYKCAWAPACPVKKRVQRCAQDPTIVITTYEGKHS

SEQ ID NO: 13380 - protein, 52 aa, Pinus monticola
WRKYGQKMTRNNPLPRSYYKCAGAPACPVKKQVQRCAQDPTIVITTYEGKHA

SEQ ID NO: 13381 - protein, 52 aa, Pinus monticola
WRKYGQKMTRNNPLPRSYYKCAGAPACPVKKQVQRCAQDPTIVITTYPGEHT

SEQ ID NO: 13382 - protein, 52 aa, Pinus monticola
WRKYGQKMTRNNPLPRSYYKCAGAPACPVKKQVQRCAQDPTIVITTYEGKHN

SEQ ID NO: 13383 - protein, 52 aa, Pinus monticola
WRKYGQKMTRNSTLPRSYYKCAMVPGCPVKKQVQRCAEDPTIVITTYEGKHS

SEQ ID NO: 13384 - protein, 52 aa, Pinus monticola
WRKYGQKKTKSNPLPRAYYKCAWGPGCPVKKQVQRSAEDPTIVITTYEGKHT

SEQ ID NO: 13385 - protein, 52 aa, Pinus monticola
WRKYGQKKTKSNPLPRAYYKCAWGPGCPVKKQVQRSAEDPTIVITTYEGKHN

SEQ ID NO: 13386 - protein, 52 aa, Pinus monticola
WRKYGQKMTKSNPLPRSYYRCAYAPSCPVKKQVQKSIQDPSILVTTYPGEHT

SEQ ID NO: 13387 - protein, 50 aa, Pinus monticola
WRKYGQKMTKNNPLPRSYYKCAWAPGCPVKKQVQRRAEDATILITTYEGK

SEQ ID NO: 13388 - protein, 52 aa, Pinus monticola
WRKYGQKMTKNNPLPRSYYKCAWAPGCPVKKQVQGCVEDTTIVITTYEGKHA

SEQ ID NO: 13389 - protein, 52 aa, Pinus monticola
WRKYGQKMTKNNPLPRSYYKCAWAPGCPVKKQVQGCVEDTTIVITTYEGKHT

SEQ ID NO: 13390 - protein, 52 aa, Pinus monticola
WRKYGQKMTKNNPLPRSYYKCAWAPGCPVKKQVQGCVEDTTIVITTYPGEHT

SEQ ID NO: 13391 - protein, 52 aa, Pinus monticola
WRKYGQKMTKNNKRPRSYYKCSLAPGCPVKKQVQRCAQDPTIVLTTYEGKHT

SEQ ID NO: 13392 - protein, 52 aa, Pinus monticola
WRKYGQKMTKNNKRPRSYYKCSLAPGCPVKKQVQRCAQDPTIVLTTYEGKHA

SEQ ID NO: 13393 - protein, 52 aa, Pinus monticola
WRKYGQKMTKNNKRPRSYYKCSLAPGCPVKKQVQRCAQDPTIVITTYEGKHA

SEQ ID NO: 13394 - protein, 52 aa, Pinus monticola
WRKYGQKMTKNNKRPRSYYKCSLAPGCPVKKQVQRCAQDPTIVITTYPGEHT

SEQ ID NO: 13395 - protein, 52 aa, Pinus monticola
WRKYGQKSTRNNPRPRSYYKCAMAPDCPVKKRVQRCAEDQTIVITTYEGKHA

SEQ ID NO: 13396 - protein, 52 aa, Pinus monticola
WRKYGQKSTRNNPRPRSYYKCAMAPDCPVKKRVQRCAEDQTIVITTYEGKHS

SEQ ID NO: 13397 - protein, 52 aa, Pinus monticola
WRKYGQKSTRNNPRPRSYYRCAMAPGCPVKKQVQRCAEDPTIVRTTYNGEHN

SEQ ID NO: 13398 - protein, 52 aa, Pinus monticola
WRKYGQKSTRNNPRPRSYYRCAMAPGCPVKKQVQRCAEDPTIVRTTYTGEHN

SEQ ID NO: 13399 - protein, 52 aa, Pinus monticola
WRKYGQKSTRNNPRPRSYYRCAMAPGCPVKKQVQRCAEDPTIVRTTYEGKHA

SEQ ID NO: 13400 - protein, 52 aa, Pinus monticola
WRKYGQKSTRNNPRPRSYYRCAMAPGCPVKKQVQRCAEDPTIVRTTYPGEHT

SEQ ID NO: 13401 - protein, 52 aa, Pinus monticola
WRKYGQKSTRNNPRPRSYYRCAMAPGCPVKKQVQRCAEDPTIVRTTYMGEHT

SEQ ID NO: 13402 - protein, 52 aa, Pinus monticola
WRKYGQKSTRNNPCPKSYYRCAMAPSCPVKKQVQRCAQDPTIVVTTYEGKHD

SEQ ID NO: 13403 - protein, 52 aa, Pinus monticola
WRKYGQKSTRNNPCPKSYYRCAMAPSCPVKKQVQRCAQDPTIVVTTYEGKHG

SEQ ID NO: 13404 - protein, 52 aa, Pinus monticola
WRKYGQKSTRNNPCPRSYYRCAMAPSCPVKKQVQRCAQDPTIVITTYEGKHT

SEQ ID NO: 13405 - protein, 52 aa, Pinus monticola
WRKYGQKSTRNNPCPRSYYRCAMAPSCPVKKQVQRCAQDSTIVITTYEGKHT

SEQ ID NO: 13406 - protein, 52 aa, Pinus monticola
WRKYGQKSTRNNPCPRSYYRCAMAPSCPVKKQVQRCAQDPTIVITTYEGKHA

SEQ ID NO: 13407 - protein, 52 aa, Pinus monticola
WRKYGQKSTRNNPCPRSYYRCAMAPSCPVKKQVQRCAQDSTIVITTYEGKHA

SEQ ID NO: 13408 - protein, 52 aa, Pinus monticola
WRKYGQKMTRNNPRPRSYYRCAMAPSCSVKRQVQRCAEDPTIVVTTYEGKHT

SEQ ID NO: 13409 - protein, 52 aa, Pinus monticola
WRKYGQKMTRNNPQPRSYYRCAMAPSCSVKRQVQRCAEDPTIVVTTYEGKHA

SEQ ID NO: 13410 - protein, 52 aa, Pinus monticola
WRKYGQKMTRNNPQPRSYYRCAMAPSCSVKRQVQRCAEDPTIVVTTYPGEHT

SEQ ID NO: 13411 - protein, 50 aa, Pinus monticola
WRKYGQKVVKGNPHPSYYKCTNVGCSVRKHVERASNDVKAVITTYEGKHT

SEQ ID NO: 13412 - protein, 942 aa, Casuarina glauca
MMEGLHNWNLRLVQWFILCFFILARSTCGQEGFVSLRCCAVANFTDPNTNISWRSDDSWFPDSTGCRQELGEAYLMKKNYGRARVFNITSGKRCYNLTTIEKQDYLVRGTFLFGDSLRTTSDTSFDVLLGLTGVSRVNTSEDIEVEVIFRATKDYIDFCLEKVTGDPYISELELRPLKSLNYLLGLNSSVLKRVSRTNVGSDGGDVRYPSDASDRIWKPCTNSTAQIILEPFVDFSNYSASTVTPPLQVLQTALYHPERLEFIENVDIREYKYRISQYFFELNGTSKLGDRVFDIYVNNEKVRRNFDILANGSKYKEVVLDVRASGILNLTLIKASGSTFGPICNGYEILLVHSVQGTNGSHSEIDLQVDKNQTDKRDGEVARWLRNQLLVSNQENEMLANWSGDPCHPNPWKGFTCKPYNDSSIITSLNLSSWNLQGSIPSRITELPDIETLDLSKNRFNGSIPDFPADSKLTSVDISHNDLSGSLPESLTSLPHLKSLFYGCNPHLDKGPQSNFSITSTDNGRCPGPARVALIIGSIASGSFLLTVTVGIIFVCICRRKSMPKGRFKGKRPPLTGNVLIFIPSKDDISIKSISIEPFTLEYIEAATAKYKTLIGEGGFGSVYRGTLPDGQEVAVKVRSATSTQGTREFENELNLLSEIRHENLVPLLGYCSEEDQQILVYPFMSNGSLQDRLYREPAKRKILDWPTRLSIALGAARGLAYLHTFAGRCIIHRDVKSSNILLDQSMCAKVADFGFSKYAPQDGDIGASLEVRGTAGYLDPEYYTTQQLSVKSDVFSFGVVLLEIVTGREPLNIHRPRNEWSLVDWARPYIRESKIDEIVDPSIKGGYHAEAMWRVVEAALYCVEPYAAYRPTMADILRELEDALIIENNASEYMRSIDSLGASNSSRFSIVMEKKAVLPPISSPSETQPVIPQGPSPPQPR

SEQ ID NO: 13413 - protein, 177 aa, Poncirus trifoliata
MSSRERDPLIVGRVVGDVLDNFTRTIPMSITYSNKDVNNGRELKPSEVLNQPRVEIGGDDLRTFYTLVMVDPDAPSPSDPSLREYLHWLVTDIPATTGASFGQEIVNYESPRPTMGIHRFVFVLFRQLGRQTVYAPGWRQNFSTRDFAELYNLGPPVAAVYFNCQRESGSGGRPVRR

SEQ ID NO: 13414 - protein, 187 aa, Arabidopsis halleri
YGDEDAGVSSPNSTVSSSTGKRSEREEDTDPQGSRGISDDEDGDNSRKKLRLSKDQSVILEETFKDHSTLNPKQKQALAKQLGLRARQVEVWFQNRRARTKLKQTEVDCEFLRRCCENLTEENRRLQKEVTELRALKLSPQFYMHMSPPTTLTMCPSCEHVSVPPPQPQAATSADHRSLPVNAWAPA

SEQ ID NO: 13415 - protein, 185 aa, Arabidopsis halleri
YGDEDAGVSSPNSTISSSTGKRSEREEDTDPQGSRGISDDEDGDNSRKKLRLSKDQSVILEETFKDHSTLNPKQKQALAKQLGLRARQVEVWFQNRRARTKLKQTEVDCEFLRRCCENLTEENRRLQKEVTELRALKLSPQFYMHMSPPTTLTMCPSCEHVSVPPPQPQAATSADHRSLPVNAWA

SEQ ID NO: 13416 - protein, 184 aa, Arabidopsis halleri
YGDEDAGVSSPNSTVSSSTGKRSEREEDTDPQGSRGISDDEDGDNSRKKLRLSKDQSVILEETFKDHSTLNPKQKQALAKQLGLRARQVEVWFQNRRARTKLKQTEVDCEFLRRCCENLTEENRRLQKEVTELRALKLSPQFYMHMSPPTTLTMCPSCEHVSVPPPQPQAATSADHRSLPVNAW

SEQ ID NO: 13417 - protein, 187 aa, Arabidopsis halleri
YGDEDAGVSSPNSTISSSTGKRSEREEDTDPQGSRGISDDEDGDNSRKKLRLSKDQSVILEETFKDHSTLNPKQKQALAKQLGLRARQVEVWFQNRRARTKLKQTEVDCEFLRRCCENLTEENRRLQKEVTELRALKLSPQFYMHMSPPTTLTMCPSCEHVSVPPPQPQAATSADHRSLPVNAWAPA

SEQ ID NO: 13418 - protein, 187 aa, Arabidopsis halleri
YGDEDAGVSSPDSTVSSSTGKRSEREEDTDPQGSRGISDDDDGDNSRKKLRLSKDQSVILEETFKDHSTLNPKQKQALAKQLGLRARQVEVWFQNRRARTKLKQTEVDCEFLRRCCENLTEENRRLQKEVTELRALKLSPQFYMHMSPPTTLTMCPSCEHVSVPPPQPQAATSADHRSLPVNAWAPA

SEQ ID NO: 13419 - protein, 187 aa, Arabidopsis halleri
YGDEDAGVSSPNSTVSSSTGKRSEREEDTDPQGSRGISDDDDGDNSRKKLRLSKDQSVILEETFKDHSTLNPKQKQALAKQLGLRARQVEVWFQNRRARTKLKQTEVDCEFLRRCCENLTEENRRLQKEVTELRALKLSPQFYMHMSPPTTLTMCPSCEHVSVPPPQPQAATSADHRSLPVNAWAPA

SEQ ID NO: 13420 - protein, 185 aa, Arabidopsis halleri
YGDEDAGVSSPNSTVSSSTGKRSEREEDTDPQGSRGISDDEDGDNSRKKLRLSKDQSVILEETFKDHSTLNPKQKQALAKQLGLRARQVEVWFQNRRARTKLKQTEVDCEFLRRCCENLTEENRRLQKEVTELRALKLSPQFYMHMSPPTTLTMCPSCEHVSVPPPQPQAATSADHRSLPVNAWA

SEQ ID NO: 13421 - protein, 187 aa, Arabidopsis halleri
YGDEDAGVSSPNSTVSSSTGKRSEREEDTDPQGSRGISDDEDGDNSRKKLRLSKDQSVILEETFKDHSTLNPKQKQALAKQLGLRARQVEVWFQNRRARTKLKQTEVDCEFLRRCCENLTEENRRLQKEVTELRALKLSPQFYMHMSPPTTLTKCPSCEHVSVPPPQPQAATSADHRSLPVNAWAPA

SEQ ID NO: 13422 - protein, 186 aa, Arabidopsis halleri
YGDEDAGVSSPNSTVSSSTGKRSEREEDTDPQGSRGISDDEDGDNSRKKLRLSKDQSVILEETFKDHSTLNPKQKQALAKQLGLRARQVEVWFQNRRARTKLKQTEVDCEFLRRCCENLTEENRRLQKEVTELRALKLSPQFYMHMSPPTTLTMCPSCEHVSVPPPQPQAATSADHRSLPVNAWAP

SEQ ID NO: 13423 - protein, 697 aa, Ipomoea nil
MASSTAQIHALGATQFATGRSRTVFFGQRVSCRTVPFGLKLKKSRGNAGGTRLRIVAEKVVGIDLGTTNSAVAVMEGGKPTIVTNAEGQRTTPSVVAYTKNGDRLVGQIAKRQAVVNPENTFFSVKRFIGRKMSEVDEESKQVSYNVIRDENGNVKLDCPAIGKQFAAEEISAQVLRKLVDDASKFLNDNVSKAVVTVPAYFNDSQRTATKDAGRIAGLEVLRIINEPTAASLAYGFERKNNETILVFDLGGGTFDVSVLEVGDGVFEVLSTSGDTHLGGDDFDKRVVDWLASNFKKDEGIDLLKDKQALQRLTETAEKAKMELSSLTQTNISLPFITATADGPKHIETTLTRAKFEELCSDLLDRLKTPVQNSLRDAKLSFSDIDEVILVGGSTRIPAVQEVVKKLTGKDPNVSVNPDEVVALGAAVQAGVLAGDVSDIVLLDVTPLSLGLETLGGVMTKIIPRNTTLPTSKSEVFSTAADGQTSVEINVLQGEREFVRDCKSLGSFRLDGIPPAPRGVPQIEVKFDIDANGILSVAAVDKGTGKKQDITITGASTLPNDEVDRMVKEAERFAQEDKEKRDAIDTKNQAYSVVYQTEKQLKDLGDKIPGSVKEKVEAKLGELKDAISGGSTQAMKDAMAALNQEVMQIGQSLYNQPGAAPGAGPAPGGSAEPSESSSSSGKGPDGDVIDADFTDSN

SEQ ID NO: 13424 - protein, 700 aa, Ipomoea nil
MASSTAQIHALGATHFSTKPSSLSKKPPGTVFFGQRLNKAPFGINLKKSACNRRNAPFRVVAEKVVGIDLGTTNSAVAAMEGGKPTIVTNAEGQRTTPSVVAYTKNGDRLVGQIAKRQAVVNPENTFFSVKRFIGRKMAEVDEESKQVSYNVIRDENGNVKLDCPAIGKQFAAEEISAQVLRKLVDDASKFLNDKVTKAVVTVPAYFNDSQRTATKDAGRIAGLEVLRIINEPTAASLAYGFEKKNNETILVFDLGGGTFDVSVLEVGDGVFEVLSTSGDTHLGGDDFDKRIVDWLASSFKKDEGIDLLKDKQALQRLTETAEKAKMELSSLTQTNISLPFITATSDGPKHIETTITRAKFEELCSDLLDRLKTPVQNSLRDAKLSFSDIDEVILVGGSTRIPAVQELVKKLTGKDPNVTVNPDEVVALGAAVQAGVLSGDVSDIVLLDVTPLSIGLETLGGVMTKIIPRNTTLPTSKSEVFSTAADGQTSVEINVLQGEREFVRDNKSLGSFRLDGIPPAPRGVPQIEVKFDIDANGILSVTAVDKGTGKKQDITITGASTLPSDEVERMVSEAERFAQEDKEKRDAIDTKNQADSVVYQTEKQLKELGEKVPGPVKEKVEAKLGELRDAISGGSTQAMKDAMAALNQEVMQLGQSLYNQPSASPGAGPTPGGGSAGPSESSGKGPDGDVIDADFTDSK

SEQ ID NO: 13425 - protein, 412 aa, Hordeum vulgare
GGPGCSSFDGFVYEHGPFNFESGGSVKSLPKLHLNPYAWSKVSTMIYLDSPAGVGLSYSKNVSDYETGDLKTATDSHTFLLKWFQLYPEFLSNPFYIAGESYAGVYVPTLSHEVVKGIQGGAKPTINFKGYMVGNGVCDTIFDGNALVPFAHGMGLISDEIYQQASTSCHGNYWNATDGKCDTAISKIESLISGLNIYDILEPCYHSRSIKEVNLQNSKLPQSFKDLGTTNKPFPVRTRMLGRAWPLRAPVKAGRVPSWQEVASGVPCMSDEVATAWLDNAAVRSAIHAQSVSAIGPWLLCTDKLYFVHDAGSMIAYHKNLTSQGYRAIIFSGDHDMCVPFTGSEAWTKSLGYGVVDSWRPWITNGQVSGYTEGYEHGLTFATIKGAGHTVPEYKPQEAFAFYSRWLAGSKL

SEQ ID NO: 13426 - protein, 361 aa, Arabidopsis lyrata
LVFPPPPPPPSTTFTSPIFPRTSSSGTNFPIIAIAVIGILATAFLLVSYYIFVIKCCLNWHQIDIFRRRRRSSDQNPLMIYSPHEVNRGLDESAIRAIPVFKFKKRDVAAGEDDQNKNSQECSVCLNEFQEDEKLRIIPNCCHVFHIDCIDIWLQGNANCPLCRTSVSCDASFSLDLISSPISSPENSPHSRNRNLEPGLVLGSDDDFVVIELGASNGNNRGSVRNRDFLTEQERVASNQVSTGNSSKSWSPLPRKFDNRGMHKKESKFHKMTSMGDECIDTRGKDGHFGEIHPIRRSISMDSSVDRQLYKAVQEEISRRNRQIPVAGDSEDSTSSSGGGNNRVMRRCFFSFGSSRTSKNS

SEQ ID NO: 13427 - protein, 175 aa, Pseudomonas putida GB-1
MKLLILDRDGVINYDSDAYIKTLEEWVPIPGSVEAIAQLSKAGWTVAVATNQSGIARGYYPLATLEAMHARLRALVAEQGGEVGHIVYCPHGPDEGCDCRKPKPGMLRAIAAHYQAGLEGVWFVGDSKGDLEAALAVGAQPVLVKTGKGERTLEKGVPETTLIFDDLAAIARELI

SEQ ID NO: 13428 - protein, 521 aa, Pseudomonas putida GB-1
MHRIIHLLPFLSWLPRQSGHSLRQDLLVGLSGAILALPQSIAYALIAGLPAEYGLYAAIVPVLVACLWGSSWHLICGPTAAISIVLYASISPLAVAGSADYITLVLLLTFLGGIFQLLLGLLRFGALVNFVSHSVVLGFTLGAAIVIALGQLPNLLGMDLPSQATALKTMQDLASHAGEVDLPSLVLGLATVMIGVAFKLWRPRWPSLLISLMLVSLLAWLLPGYFGHVPRVTAFTGQLPPFSPLPLLDVELMLRLLPSAVAVGMLGLVTSLSIARSLSARSEQLIDPDQEIRAQGLSNIAGAFFSGYLSAGSFTRSGLSYEAGARSPMAGVFSALWVALFAVTGAGLIAHLPIPAMAGSILLICWGLVDHRGIRALFRVSRSEFLVMALTAAATLLLELQTAIYAGVLASLFFYLKRTSRPRVQQSREGDADVLRVGGSIFFGAAHYLQVRLQRCQGPHVVIDARQVNFIDYSGVDMLHREARRLRRLGGSLTLHRARPQVIEELQKLEGVALCPIRFEE

SEQ ID NO: 13429 - protein, 373 aa, Pseudomonas putida GB-1
MHIGVPLETQTGETRVAATPETIKKLIGQGHQVTVQRGAGLNAAIPDSAYEAVGASLGSAADAYGAQLVLKVVAPNDQELALINSGSLLVGMLNPFNSELIGKMAERGITAFALEAAPRTSRAQSLDVLSSQANIAGYKAVLLAAHHYPRFMPMLMTAAGTVKAARVLILGAGVAGLQAIATAKRLGAVIEASDVRPAVKEQIESLGAKFIDVPYETDEERECAEGVGGYARPMPASWMQRQAQAVHERAKQADIVITTALIPGRKAPTLLSAETVAQMKPGSVVIDLAAAQGGNCPLTVADQVVQENGVTIVGPTNLPAQVGADASALYARNLLDFMKLLFDKDGALVINLEDDIVAACLMCRDGQVVRKNG

SEQ ID NO: 13430 - protein, 667 aa, Pseudomonas putida GB-1
MSAPNPSLANGKIRMNPPVFYFAASFILIFGLVVISNPQAAGDWLLAAQNWAANTVGWYYMLAMTLYLVFVVVTALSGYGKIKLGADHDEPEFSYLSWAGMLFAAGISITLFFFCVSEPLTHMLQPPQGEAGTAEAGRQAMQILFLHWGLHGWGVFAFVGMALAYFAYRHNLPLALRSALYPLIGKRINGPIGYAVDGFGIIATVFGLGADMGFGVLHLNAGLDYLFGISHSQWVQVILITLMMGAAVAVAVAGVEKGVRVMSDINLFLACALLLFVLFAGPTQHLFNTLIQNLGDYLGALPRKSFDVYAYGENRDWLGGWTVFYWAWWIAWAPFVGLFIARISRGRTIREFVFGVLLIPLGFTLAWMSIFGNSALDQVINHGMTALGQSALDNPSMSLYLLLETYPWSKAVIATTVFISFVFFVTSADSGTVVLSTLSAKGGEADEDGPNWLRIFWGAMTALITSALLFAGSIDSLKSAVVLTSLPFSLILLCMMWGLHKAFYLESQRQIAQMHSLAPFAQSRRGRGGWRQRLSQAVHFPSRDEVYRFMDDVVRPAIADVREVFEQKGLVLITQDDPSHDNVSLKIGHGEEQPFIYQVQMRGYFTPSFALGGLGTQELKNRRYYRAEVHLSEGSQNYDLVGYSKEQIINDILDQYERHMQYLHLVR

SEQ ID NO: 13431 - protein, 366 aa, Pseudomonas putida GB-1
MSDTFLNPVTTQTWANGRHIVRCVKVIQETWDVRTFCFMADQPIMFFFKPGQFVTLELEIEGKPVMRSYTISSSPSVPYSFSITVKRVPGGLVSNFLHDTMHEGAELPVHGPVGLFNAIDFPAGKALYLSGGVGITPVMSMARWFYDTNANVDMVFVHSARSPKDIIYHRELEQMASRIPNFSLHIICEKHGLGEPWAGYRGYLNQRLMELIAPDYMERVVFCCGPTPYMTAVKRMLEAVGFDMKNYHEESFGATPAEAKADAVEHAEQAAEAPELDVSDLNLVEFIGSEKSIRIAPGETVHAAAAKVGLMIPKACGMGICGTCKVLKLGGEVEMEHNGGITEEDEAEGYILSCCSVPKGDVRIDY

SEQ ID NO: 13432 - protein, 449 aa, Pseudomonas putida GB-1
MANPPSSAPAQLRRVLGLPALVFFGLVYMVPLTIFTTYGIVTELTGGRTAGAYLVTLVAMLFTAASYSFMVKRFPVAGSAYSYTNMAFGPNIGFLAGWSLLLDYLFLPMINYLLIGLFLNIAFPAVPTWAFVLACIALVTVLNVVGINSVAKTSNLIVGAQIVFIGVFVALSCQTLAGQPLDLLSPLLGDGSKPGFGHLMAGAAVLCLSFLGFDAVSTLAEECRDARRDVPRAIILTTLFAGLLFTVLAYVSQLVLPGSSFANADAAANEVMFKAGGQFLTNFFTAAYVAGSLGSALASQAAVSRILFTMGRDNVLPRRSFGYLSPRFGTPVFAIALVSAFSLLALVIDLSTLASLISFGALVAFSAVNLAVVKTHLMDDTSQRNAKNLLRYGVVPLVGLGLTLWLWTSLSALTLVIGLCWFALGLVYLAVLTAGFRRPVHLVDFTEAA

SEQ ID NO: 13433 - protein, 560 aa, Pseudomonas putida GB-1
MNKKNRHPADGKKPITIFGPDFPFAFDDWLEHPAGLGSIPVDRQGEEVAIIGAGIAGLVAAYELMKLGLKPVVYEASKLGGRLRSQAFNGTDGIIAELGGMRFPVSSTAFYHYVDKLGLETKPFPNPLTPASGSTVIDLEGQTYYAEKTSDLPKLFHEVADAWADALESGAQFAEIQQAIRDRDVPRLKALWNKLVPLWDDRTFYDFVATSRSFAKLSFQHREVFGQVGFGTGGWDSDFPNSMLEIFRVVMTNCDDHQHLVVGGVEQVPQGIWRHVPERCVHWPQGTSLSTLHGGAPRTGVKRIARASDGRLAVTDNWGDTRHYSAVLATCQTWLLTTQIDCEESLFSQKMWMALDRTRYMQSSKTFVMVDRPFWKDKDPETGRDLMSMTLTDRLTRGTYLFDNGDDKPGVICLSYAWMSDALKMLPHPVEKRVQLALDALKKIYPKTDIAGHIIGDPITISWEADPHFLGAFKGALPGHYRYNQRMYAHFMQQDMPAEQRGMFIAGDDVSWTPAWVEGAVQTSLNAVWGIMNHFGGHTHPDNPGPGDVFDEIGPIALAD

SEQ ID NO: 13434 - protein, 482 aa, Pseudomonas putida GB-1
MPSDHSAGSPAGSSVDFEKVGSDYFQQRELKKGAAGWVLLVGLGVAYVISGDYAGWNFGLAQGGWGGMFLATLLMATMYLCMCFSLAELSSMIPTAGGGYGFARSAFGPWGGFLTGTAILIEYAIAPAAIAVFIGAYCQSLFGIGGWMIYLAFYIVFIGIHIFGVGEALKLMFIITAIAAIALAVFLVSMVPHFDAANLFDIAKTDAVGASSFLPFGYVGVWAAIPYAIWFFLAVEGVPLAAEETKNPKRDLPRGLIGAMLVLLAFALLILVVGPGGAGSEALKASGNPLVEALSKAYGGNTWMGGFVNLVGLAGLIASFFSIIYAYSRQIFALSRAGYLPRKLSQTNKSKAPVLALIIPGIIGFALSLTGQGDLLILVAVFGATLSYVLMMAAHITLRIRRPKMERPYRTPGGVFTSGVALVLACIAVVAGFLVDPRVVIGAAVIYAVLIAYFAFYSRHHLVAGTPEEEFAAIQKAEEALH

SEQ ID NO: 13435 - protein, 854 aa, Pseudomonas putida GB-1
MRIDRLTSKLQLAISDAQSLAVGMDHPAIEPVHLVQALLEQQGGSIKPLLMQVGFDINSLRQGLVKELDQLPKIQNPTGDVNMSQDLARLLNQADRLAQQKGDQFISSELVLLAAMDENSKLGKLLLSQGVTKKALENAINNLRGGAAVNDANAEESRQALDKYTVDLTKRAEEGKLDPVIGRDDEIRRTVQVLQRRTKNNPVLIGEPGVGKTAIAEGLAQRIINGEVPDGLKGKRLLALDMGALIAGAKYRGEFEERLKGLLNELSKQEGQIILFIDELHTMVGAGKGEGAMDAGNMLKPALARGELHCVGATTLNEYRQFIEKDAALERRFQKVLVEEPSEEDTIAILRGLKERYEVHHKVAITDGAIIAAAKLSHRYITDRQLPDKAIDLIDEAASRIRMEIDSKPEVLDRLDRRLIQLKVESQALKKEEDEAAKKRLEKLTEEIERLEREYSDLEEIWASEKAEVQGSAQIQQKIEQARQELETARRKGDLSRMAELQYGVIPDLERSLQMVDQHGKTENQLLRNKVTEEEIAEVVSKWTGIPVAKMLEGEREKLLKMEALLHQRVIGQGEAVTAVANAVRRSRAGLSDPNRPSGSFLFLGPTGVGKTELCKALAEFLFDTEEAMVRIDMSEFMEKHSVARLIGAPPGYVGYEEGGYLTEAVRRKPYSVVLLDEVEKAHPDVFNVLLQVLEDGRLTDSHGRTVDFRNTVIVMTSNLGSAQIQELVGDREAQRAAVMDAVGAHFRPEFINRIDEVVVFEPLGREQIAGITEIQLGRLRSRLLERELSLSLSPDALDKLIAVGYDPVYGARPLKRAIQRWIENPLAQLILAGKFVPGAAITAKVEGDEIVFG

SEQ ID NO: 13436 - protein, 408 aa, Pseudomonas putida GB-1
MKFVDEVSIRVKAGDGGNGCMSFRREKFIENGGPNGGDGGDGGSVYMVADENLNTLVDYRYTRHHEAQRGSNGGSTDCTGKKGEDLFLRVPVGTTVIDASTQEVIGDLVTPGQKLMVAQGGWHGLGNTRFKSSTNRAPRQTTPGKPGDQRDLKMEMKVLADVGLLGLPNAGKSTFIRSVSAAKPKVADYPFTTLVPNLGVVSVDRWKSFVIADIPGLIEGASEGAGLGIRFLKHLARTRVLLHLVDIAPLDESSPADAAEVIVNELTRFSPSLAERERWLVLNKSDMVMDDERDERVQEVIDRLEWEGPVYVISAISKQGTDKLSHDLMRYLEDRADRLANDPAYAEELADLDQRIEDEARAQLQALDDARTLRRTGVKSVHDIGDDDGWDDDFEDDEDGPEIIYVRD

SEQ ID NO: 13437 - protein, 570 aa, Pseudomonas putida GB-1
MPDTTRFDWQRWLPGLVTLLHYKAAWLPKDIAAGLVLTTMLVPVGIAYAEASGVPGIYGLYATIIPLLAYALFGPSRILVLGPDSALAAPILAVVVQYAASDPQRAIAIASMMALVAGAFCVVAGLLRLGFITELLSKPIRYGYMNGIALTVLISQLPKLFGLKVDSEGPLRDLWHLGQALFAGQGHWPSFVVGAGSLVLILLLKPFKRLPGILIAVVLATLAVSLFNLDQMGVKVLGQLPQGLPSFVFPWVTDIDLVEVILGGVAVALVSFADTSVLSRSYAARLKMPVNPNQEMFGLGVANLASGLFQGIPISSSSSRTPVAEAAGSQTQLTGIIGALAVTLLLLVAPNLMQHLPNSALAAVVIAAALGLFEFADLKRIFRMQQWEFWLSITCFVGVAVFGAIPGICIAVAVSVIEFLWDGWRPHHAVLGRADGLRGYHDVQRYPQARRIPGLVLLRWDAPLFFANAEQFQSTVMAAVDASPTPVQRLIIAAEPVTSIDITSADMLAELDRALEARGVELQFAEMKDPVKDKMRRFGLFEHMGERAFHPTVGAAVDAYLEESGVDWQP

SEQ ID NO: 13438 - protein, 321 aa, Pseudomonas putida GB-1
MPSPRRAVFLDHQSLDLGDLDLSPLRSQFDELELFDATRPDQVSQRLQGAVAVVSNKVMLDAATLAANPQLKLILVAATGTNNVDLAAARAQGITVCNCQGYGTPSVAQHTLALLLALATRLCDYNQAVADGQWAKASQFCLLDFPIVELEGKTLGLLGHGELGGAVARLAEAFGMRVLSGQIPGRPERADRLPLDELLPQVDALTLHCPLNEHTRHMLGARELGLLKRNALVVNTARGGLIDEQALADALRSGHLGGAATDVLSVEPPVNGNPLLQPDIPRLIITPHSAWGAVESRQRIVGQLSENAQAFFAGQPRRVVS

SEQ ID NO: 13439 - protein, 695 aa, Pseudomonas putida GB-1
MQTFFIAPTDFGVGLTSISLGLVRTLERAGLKVGFFKPIAQPHPGDTGPERSTELVARTHGINPPVPLSLAQVERMLGDGQLDELLEEIIRLYQQACIGNDVVVVEGMVPTRHASYAARVNLHLAKSLDAEVILVSAPENEVLSELSGRVELQAQLFGGPRDPKVLGVILNKVRTDESMADFATRLREHSPLLRGNDFRLLGCIPYQPELNAPRTRDVAELLGAQVLNAGDYEQRRMSKIIICARTVANTVPLLTSGTLVVTPGDRDDIILAVSLAAINGVPLAGLLLTSDSKPDARILGLCRGALQAGLPILSVSTGSYDTANQLNSLNREIPVDDRERAEFITDFVASHLDAAWLHQRCGTPREMRLSPAVFRYQLIQRAQQANKRIVLPEGAEPLLVQAAAICQARGIARCVLLAKPEDVEAVARAQGIALPPGLEVLDPELIRGRYVEPMVALRKSKNLNAPMAEQQLEDPVVIGTMMLALDEVDGLVSGLVHSTANTIRPALQLIKTAPGSSLVSSVFFMLFPEQVLVYGDCVMNPHPSAAELAEIARQSAESAQAFGIAPRVAMISYSSDSASDEEVEKVREATRLAQGAAEALLIDGPLQYDAAANPAIARELAPGSPVAGRATVFVFPDLNTGNTTHKAVQRSTDGVSLGPMLQGLRKPVNDLPRGAQVDDIVHTIALTAIQASVVR

SEQ ID NO: 13440 - protein, 392 aa, Pseudomonas putida GB-1
MLNAEQRAIIKATVPLLESGGEALTTHFYKMMLSEYPEVRPLFNQAHQASGDQPRALANGVLMYARHIDQLEQLGGLVGQIINKHVALQILPEHYPIVGSCLLRAIEEVLGKDIATPAVIDAWAAAYGQLADILIGAEENLYKEKEEAEGGWRGTREFRLVRREQESSEIVSFYFAPVDGKPVLKAEPGQYIGLKLDIDGAEQRRNYSLSALCDGKEYRISVKREAGGKVSNYLHDELVVGDTLQLFPPAGDFTLAASDKPLVLISGGVGITPTLAMLQAALQTRREVHFIHCARNGAVHAFRDWIDGLAARHPQLKRFYCYAEPEGGAAADAVGLLSEDLLAEWLPQERDVDAYFLGPKAFMAAVKRQLKGLGVPEQQSRYEFFGPAAALE

SEQ ID NO: 13441 - protein, 404 aa, Pseudomonas putida GB-1
MKLPIYLDYSATTPVDPRVAQKMADCLLVDGNFGNPASRSHVFGWKAEEAVENGRRQVAELINADPREIVWTSGATESDNLALKGVAHFYQTKGKHIITSKIEHKAVLDTARQLEREGFEVTYLEPGEDGIVTPAMVEAVLRDDTILVSLMHVNNEVGSINDIAAIGELTRSRGVLFHVDAAQSAGKVEIDLQKLKVDLMSFSAHKVYGPKGIGALYVSRKPRVRLEAIIHGGGHERGMRSGTLPTHQIVGMGEAFAIAKQEMVAENARIKALSDRFFKQVSDLEELYVNGSQTARVPHNLNLSFNYVEGESLLMSLKDIAVSSGSACTSASLEPSYVLRALGRNDELAHSSIRFSFGRFTTEEEVDYAAQKVCEAVNKLRELSPLWDMYKDGVDISKIEWAAH

SEQ ID NO: 13442 - protein, 382 aa, Pseudomonas putida GB-1
MIRSKLPNVGTTIFTTMSQLAVQTGALNLSQGFPDFNGPQALLDAVGRHVAAGHNQYSPMTGLPALRQQVAAKVERLYGARVDADQEVTITPGATEAIFCAIQAVVHAGDEVIVFDPCYDSYEPSVELAGGRCVHVQLSDGNFRIDWQKFSDALSPRTRMVILNSPHNPSGALITREDLDQLAKLVADRDIYLVSDEVYEHLVYDGVRHASVLAHEQLYQRAFVVSSFGKTYHVTGWKTGYVIAPPALSAELRKVHQYVNFCGVTPLQCALADFMAEHPEHIDELPAFYQAKRDLFCGLLEGSRFSFARTAGTYFQLVDYSQIRPDLNDVDMSLWLTREHGVATIPVSVFYQQPIPEQRLVRLCFAKREETLRQAAERLCAI

SEQ ID NO: 13443 - protein, 452 aa, Pseudomonas putida GB-1
MQDQSTPERLQRGLKNRHIQLIALGGAIGTGLFLGIAQTIQLAGPSVLLGYAIAGLMAFLIMRQLGEMVVEEPVAGSFSHFAHQYWSEFAGFVSGWNYWVVYVLVGMAELTAVGIYVQYWWPEFPTWATAAIFFVAINLINLTQVKVYGEMEFWFALVKVVAIVSMIGFGAWLLSSGHGGPDASVANLWQYGGFFPNGVSGLVMALAVIMFSFGGLELVGITAAEADNPRQSIPKATNQVVYRILIFYIGALAVLLSLYPWQKVVQGGSPFVMIFHELDSDLVATILNIVVLTAALSVYNSCVYANSRMLFGLASQGDAPRQLLKVSRSGVPLTALGVSAFATGLCVLINYLMPGEAFGLLMALAVSALVINWASISITHLKFRKAKLAAGIIPFYKSLGHPLTNYLCLAFIVLILVVMYLTPPIRISVMLIPAWIAVLWVAFKLKKARQAK

SEQ ID NO: 13444 - protein, 324 aa, Pseudomonas putida GB-1
MSQSSELIQSAQRTLRLELEAVEALLARIDDNFVKACELILASKGRVVVVGMGKSGHIGNKIAATLASTGTPAFFVHPAEASHGDMGMITRDDVILALSNSGSTAEIVTLLPLIKRLGIKLISLTGNPDSPLAQAAEVNLDARVEQEACPLNLAPTSSTTASLVLGDALAIALLEARGFTAEDFAFSHPGGALGRRLLLKVENVMHSGDELPQVPRGTLLKDALLEMSRKGLGMTVIVEPDGKLAGIFTDGDLRRSLDRNIDVHTTLIDQVMTVHGKTARAEMLAAEALKIMEDHKIGALVVVDREDRPTGALNMHDLLRAGVM

SEQ ID NO: 13445 - protein, 70 aa, Pseudomonas putida GB-1
MAERQNGTVKWFNDEKGYGFITPESGADLFVHFRAIEGNGFKSLKEGQKVTFVAVQGQKGLQADQVQVVA

SEQ ID NO: 13446 - protein, 401 aa, Pseudomonas putida GB-1
MIELDFYGTLVAASLVLLLGRSLVARIGFLRTYNIPEPVAGGLVVALSLLALRSFDVHVQFDTSLQTPLMLAFFATIGLSADFASLKKGGRVVAVFLLVVTGLLLVQNAMGIGLATALGLDPLMGLLTGSISLSGGHGTGAAWGATFTERFGLASASELAMASATFGLVLGGLIGGPVARMLIKRVKAPGIEEEVPQLPKGFEHPHKERLITPFTFIETLALIAVSLLAGTLLNSALKGTTFELPTFVCVLFVGVVLRNGLSAIGFYRVFEREVSVMGNVSLSLFLAIALMSLKLWDLAALALPFFILLAVQTLVMALFAIFVTFRVMGRNYDAAVLAAGHCGFGLGATPTAIANMQAVTQRYGASQIAFLVVPMVGAFFIDIINVVVIKLYLALLLLIGG

SEQ ID NO: 13447 - protein, 199 aa, Pseudomonas putida GB-1
MLDELLRRMSNHHPASLETDRRFPEAAVLLPITRSEAPELVLTLRAKGLSTHGGEVAFPGGRRDPEDPDLVFTALREAEEEIGLPPGLVEVIGPLSPLISLHGLKVTPFVGLIPDFVEYRANDAEIAAVFTVPLEFFRQDPRDHTHRIDYQGRSWYVPSYRYGEYKIWGLSAIMIVELVNVLFDAGISLHQPPERYIKN

SEQ ID NO: 13448 - protein, 329 aa, Pseudomonas putida GB-1
MRALLFSSQHYDQESFTEAANGTSLELHFQPARLTLDTAALADGFEVVCAFINDELDATVLQRLAAGGTRLIALRSAGYNHVDLAAAQRLGLAVVRVPAYSPHAVAEHAVALILALNRRLHRAYNRTREGDFTLHGLTGFDLHGKTVGVVGTGQIGAAFARIMAGFGCQLLAYDPYPNPELLALGARYLPLPELLREARIISLHCPLTEHTRHLINAQSLAQLQPGAMLVNTGRGALVDTPALIDALKSGQLGYLGLDVYEEEAQLFFEDRSDLPLQDDVLARLLTFPNVIITAHQAFLTREALDAIAQTTLDNINRWAAGNPQNLVMG

SEQ ID NO: 13449 - protein, 595 aa, Pseudomonas putida GB-1
MCGLAGELRFTPIDQAPRPADLAAVERITHHLAPRGPDAWGFHSQGPIALGHRRLKIMDLSDGSAQPMVDNTLGLSLAFNGAIYNFPELRQELQDLGYSFWSDGDTEVLLKGYHAWGAALLPKLNGMFALAIWERDNQRLFLARDRLGVKPLYLSRNGERLRFASTLPALLKGGDIDPMLDPVALNHYLNFHAVVPAPRTLLANVQKLEPGTWMRIDRHGEVERQTWWQLQYGANPDERDLDLEGWTTRVLDATRDAVAIRQRAAVDVGVLLSGGVDSSLLVGLLREVGVDDLSTFSIGFEDAGGERGDEFQYSDLIAKHYGTRHHQLRIAEHEIIDQLPAAFRAMSEPMVSHDCIAFYLLSREVAKHCKGVQSGQGADELFAGYHWYPQVAGAEDAFAAYRDAFFDRSHAEYRDTVQAPWLLETDAAGDFVREHFARPGARDAVDKALRLDSTVMLVDDPVKRVDNMTMAWGLEARTPFLDYRLVELSARIPARFKLPDGGKQVLKQAARRVIPHEVIDRKKGYFPVPGLKHLEGATLGWVRELLTDPSQDRGLFNPAMLDRLLSNPHGQLTPLRGSKLWQLAALNLWLSEQGI

SEQ ID NO: 13450 - protein, 560 aa, Pseudomonas putida GB-1
MTQETGGFAALDLNPNIVAAVVATGYEEPSAIQQQSIPIILAGHDMIGQAQTGTGKTAAFALPILNKIDVSKREPQALILAPTRELALQVATAFETYAKQMPGVNVVAVYGGAPMGPQLRAIRNGAQIVVATPGRLCDHLRRDEKVLSTVQYLVLDEADEMLKLGFMDDLEVIFDAIPATRQTVLFSATLPSSIRSIAERHLREPKHVKIQTKTQTVTAIEQAHLMVHADQKIPAVLRLLEVEEFDALIAFVRTKQATLDLAAALEAKGYKAAALNGDIAQNQRERVIDSLKDGRLDIVVATDVAARGLDVPRITHVFNVDMPYDPESYVHRIGRTGRAGRDGRALLLVTPRERRMLQVIERVTGQKVAEARLPNAQAVLDARIKKLTSSLAPLVAEAEATHGELFDRLTSDLGCSARALASALLRKATNGQALDLAAVEREQPLVPGVGAPRGERSERPDRGERPDRGDRERRAPLPLAEGRVRCRTALGARDGIAAKNLLGAILNEGGLARDAIGRIQVRDSFSLVELPEDGLEKLLSKLKDTRVAGKQLKLRRYRED

SEQ ID NO: 13451 - protein, 403 aa, Pseudomonas putida GB-1
MQFSKSNKLANVCYDIRGPVLKHAKRLEEEGHRILKLNIGNPAPFGFEAPDEILQDVIRNLPTAQGYSDSKGLFSARKAVMQYCQQKEIEGVTIEDIYLGNGVSELIVMSMQALLNNGDEVLIPAPDYPLWTAAVSLAGGKPVHYLCDEQADWFPDLEDIKAKITPNTKALVIINPNNPTGAVYSKELLLGMLELARQHNLVVFSDEIYDKILYDEAVHISTASLAPDLLCLTFNGLSKSYRVAGFRSGWLIISGPKHHAQSYIEGIDMLANMRLCANVPAQHAIQTALGGYQSINDLVLPPGRLLEQRNRTYELLNDIPGVSCVKPMGALYAFPRIDPKVCPILNDEKFALDLLLSEKLLIVQGTAFNWPWPDHFRVVTLPRVDDLEAAIGRIGNFLKGYSQ

SEQ ID NO: 13452 - protein, 421 aa, Pseudomonas putida GB-1
MGCTNPPTALSVLARTLVNTAPRATPLAWVNGSDAPEKPSLNIGYMALTDCASVVVAATQGFAQQHGLTLNLKRQGSWAGLRDKLVSGELDAAHCLYGLVYAVHLGIGGVPAYDMAVLMGLNQNAQTINLSPALQRKGVTNPEALARLVHQHGARLTFAQTFPTGTHAMWLYYWLASQGIHPLRDVDSVVVPPAQMAAHIQAGRIDGFCAGEPWAADAVAKGQGFTLATSQSIWPDHPEKVLACARAFAEQYPNSARALIKAILAASRFIEQSPENRRSTAQLLSGSAYLDTPLDTIEPRLLGHYQDGLGNHWQDPHALRLFDQGRANWPYLSDGMWFMTQFRRWGLLREDPDYLGVARQVHQLRLYSEAAQSLGIACLELPMRSSLLIDGTRWDGSDPYGYARSFSLHALGDQPNARVGL

SEQ ID NO: 13453 - protein, 402 aa, Pseudomonas putida GB-1
MENMHSAMDSLVHGSNTLFILMGAILVLAMHAGFAFLEVGTVRHKNQVNALSKILSDFAISALVYFFIGYWIAYGVNFLQPAATLAADHGYALVKCFFLLTFAAAIPAIISGGIAERARFVPQLCATALIVAFVYPFFEGVVWNGNLGVQAWLQARFGAPFHDFAGSVVVHAMGGWLALAAVLLLGARRGRYRDGRLVAFAPSSIPFLALGSWILIIGWFGFNVMSAQTLQGVSGLVAINSLMAMVGGTLSALLAGRNDPGFLHNGPLAGLVAICAGSDLMHPIGALATGLVAGALFVWTFTAAQNRWKIDDVLGVWPLHGLCGVWGGIACGIFGQVALGGMGGVSLVSQLLGSLMGVLVALVGGFAVYGAIRALHGLRLSHEQEFQGADLSLHRIGATSQD

SEQ ID NO: 13454 - protein, 600 aa, Pseudomonas putida GB-1
MVVCGFPSIVVVAMPESVSPRQRRALRLAWQFVRPYRRQVLLALLALVVTAAITLSMGQGIRLLVDQGFMTRSAHQLNQTIGLFLVLVLALAVGTFSRFYLVSWIGERCVADIRRAVFDHLIGLHPGFFEDNRSSEIQSRLTADTTLLQSVIGSSLSMFLRNALMVIGGVVLLFITNPKLTSIVVVALPLVLAPILLFGRRVRSLSRQSQDRVADVGSYVAETLGQIKTVQAYNHQAHDRELFAGTVEAAFTVARKRIAQRAWLITLVIVLVLGAVGVMLWVGGMDVIAGRISAGELAAFVFYSLIVGSAFGTLSEVIGELQRAAGAAERIAELLAAHSAILPPAVVQAQPQQRASGRIELQQVVFAYPSRPTVAAVDGLSLAIEPGQTVALVGPSGAGKSTLFDLLLRFYDPQQGRILLDGQALTEFDPDQLRRQFALVAQNPSLFRGTVEANIRYGRPEATLAEVEAAARGAHADAFIQQLPQGYQTPLGEGGIGLSGGQRQRLAIARALLVDAPILLLDEATSALDAQSEHLIQQALPSLMAGRTTLVIAHRLATVQHAERIAVIDKGRVVAVGTHRQLIEESPLYARLAALQFTTG

SEQ ID NO: 13455 - protein, 391 aa, Pseudomonas putida GB-1
MSLNPRDVVIVDFGRTPMGRSKGGMHRNTRAEDMSAHLISKLLERNGKVDPKEVEDVIWGCVNQTLEQGWNIARMASLMTQIPHTSAAQTVSRLCGSSMSALHTAAQAIMTGNGDVFVVGGVEHMGHVSMMHGVDPNPHLSLHAAKASGMMGLTAEMLGKMHGITREQQDLFGVRSHQLAHKATVEGKFKDEIIPMQGYDENGFLKVFDFDETIRPETTLEGLASLKPAFNPKGGTVTAGTSSQITDGASCMIVMSGQRAMDLGIQPLAVIRSMAVAGVDPAIMGYGPVPSTQKALKRAGLTMADIDFIELNEAFAAQALPVLKDLKVLDKMDEKVNLHGGAIALGHPFGCSGARISGTLLNVMKQNGGTLGVATMCVGLGQGITTVFERV

SEQ ID NO: 13456 - protein, 321 aa, Pseudomonas putida GB-1
MEQAASNDQAMTRDSLYGTAAESTYAGITSFSRRRYSRDLRGVDVVVSGVPFDTATSNRPGARFGPRAIRAASVQQAWARHWPWAFDPFDHLAVIDFGDCPFDSGTPHSVPDSIEAHAEHILQAGCAMLTLGGDHFISYPLLKAHARRHGPLALIHFDAHSDTWPDEEGKRIDHGTMFWHAAREGLVDPAHSVQIGLRTTNDDSQGFAILDARQVHRQGTEAVIAAIRQRVGERPVYLTFDIDCLDPAYAPGTGTPVCGGLSTVQALEILGGLRGINLVGMDLVEVAPAYDHADITALAGATLAMEMLCLYAARHKVDKGQ

SEQ ID NO: 13457 - protein, 397 aa, Pseudomonas putida GB-1
MTLANDPIVIVSAVRTPMGGLQGDLKSLTAPQLGSAAIRGAVERAGIDAASVEQVLFGCVLPAGQGQAPARQAALGAGLDKHTTCTTLNKMCGSGMQAAIMAHDLLLAGTADVVVAGGMESMTNAPYLLDKARGGYRMGHGKIIDHMFMDGLEDAYDKGRLMGTFAEDCAQANAFSREAQDQFAIASLTRAQDAISSGRFAAEIVPVEVAEGKEKRVIKDDEQPPKARLDKIPQLKPAFREGGTVTAANSSSISDGAAALVLMRRSEADKRGLKPLAVIHGHAAFADAPALFPTAPIGAIDKLLKRTGWNLAEVDLFEINEAFAVVTLAAMKHLDLPHEKVNIHGGACALGHPIGASGARILVTLLSALRQNNLRRGVAAICIGGGEATAMAVECLY

SEQ ID NO: 13458 - protein, 550 aa, Pseudomonas putida GB-1
MYVYDEYDQRIIEDRVKQFRDQTRRYLAGELSEEEFRPLRLQNGLYIQRFAPMLRVAVPYGQLNATQVRTLAKIARDYDKGYAHISTRQNVQYNWPALEDIPDILAELATVQMHAIQTSGNCLRNTTTDQFAGVAADEIIDPRPWCEIVRQWTTFHPEFAYLPRKFKIAINGSQEDRAAIEVHDIGLEPVRNAAGELGFRVLVGGGLGRTPVVGSFINEFLPWQDLISYLDAILRVYNRYGRRDNKYKARIKILVKALTPEVFAEKVEAEMVHLRGGSTTLTEDEVQRVSRHFVDPQYLALDNVDYAAQDAEYPGFARWRSRNTRAHKRPGYVAVTLSLKPTGVAPGDLTDKQLDAVADLAERYSFGFLRTSHEQNIILADVEQRQLHALWLELREGGFATPNIGLLTDIICCPGGDYCSLANAKSIPIAESIQRRFDDLDYLFDIGEIDLNISGCMNACGHHHVGHIGILGVDKKGEEFYQVSLGGNAARGASLGKILGPSFAQDAMADVIEKLIAVYVEQRTEEERFIDTYQRIGIDPFKERVYAANH

SEQ ID NO: 13459 - protein, 384 aa, Pseudomonas putida GB-1
MPSAPLYFDYAATTPVDDRVIETMLACLGNQANFGNPASSGHAFGQAARHTVQQARQQVAERVGAQAENLVWTSGATESNNLALKGIAQGIGQPGHLITSQLEHKAVLDTVAELERQGWAVTRLAPDAAGLIQPASVQAALRADTRLVSLMAVNNELGTVTDVAAIGEQVRAHGALLHVDAAQAVGKLVIDLNAMSVDLMSFSAHKVYGPKGIGALYVGPRARTLMRAQMHGGGHEQGLRSGTLATHQIAGMGSAFALAGQPGDSEHQRLEQLAARLREGLLALPGVTLNGCVTHRIPHTLNLCIDSKGFNSAALAGELALSTTSACNSASNAASHVLLALGLDERQARNSVRLSIGRFSTDAEVDKAVEVFGRVLTTASAALW

SEQ ID NO: 13460 - protein, 547 aa, Pseudomonas putida GB-1
MAKAADLVVQCLESEGVEYVFGIPGEENLDLLESLRKSKIKLVLTRHEQSAGFMAATYGRLTGKTGVSLSTLGPGATNLVTASAYAYLGGMPMMMITGQKPIKKSKQGRFQIIDVCGMMDPITKYTHQFASADNIPSRMREAFRLAEEEKPGAVHLELPEDIAAEQTDALPIPQSLHRRPLAEHKAIEAAVEKLHRARNPILVIGAGANRKMTAKVLKQLIDETRIPFITTQLGKGVVDERHPCFLGNAALSAGDFVHRAIEAADLIINIGHDVIEKPPFFMVRGGTEVIHINFRAAEVDAVYFPQVEVIGDIANAVWQISEALNDTSHWDFTRLMAIREANEAQIAEGADDNRFPVYPQRLVADIRRVLPSEGIVALDNGIYKIWFARNYKAHKPNTVLLDNALATMGAGLPSAMAAHLVHPDRPVISVCGDGGFMMNSQELETAVRLGMHITVVILRDDGYGMIRWKQANMGFTDFGLDYGNPDFVKYAEAYGANGYRVESADSLIPLLDHCVSNSGVHVIDCPVDYSDNDRILNIDLRERSAAV

SEQ ID NO: 13461 - protein, 394 aa, Pseudomonas putida GB-1
MSSAEIYVVSAVRSAIGGFGGSLKDLPLADLASAVTRAAIERSGLAAEQVGHLVMGTVIPTEPRDAYLARVAAMNAGIPKETPAFNVNRLCGSGLQAIVSAAQGLLLGDTEVAVAAGAESMSRGPYLLPQARWGARMGDLQGIDYTVGVLHDPFQHFHMGITAENVSAKHGITREMQDELALTSQRRAARAIAEGRFDSQIVPLELKTRKGSVQFSVDEHVRGDVTAEQLAGMKPVFKKDGTVTAGNASGINDGAASLVLATGDAVRRLGLKPLARLVGYAHAGVEPELMGLGPIPATRKVLEKTGLKLQDLDVIESNEAFAAQACAVARELGFDPEKVNPNGSGISLGHPVGATGAIIATKAIHELQRIQGRYALATMCIGGGQGIAVVFERV

SEQ ID NO: 13462 - protein, 316 aa, Pseudomonas putida GB-1
MIDAVVVSRNDEAQGICSFELAAADGSLLPAFSAGAHIDVHLPDGLVRQYSLCNHPEERHRYLIGVLNDPASRGGSRSLHEQVQAGARLRISAPRNLFPLAEGAQRSLLFAGGIGITPILCMAEQLSHSGHDFELHYCARSSERAAFVERIRNAPFADRLFVHFDEQPETALDIARVLGNPQEDAHLYVCGPGGFMQHVLDSAKGLGWQEANLHREYFAAAPVDASNDGSFSVQVGSTGQVFEVPADQTVVQVLEQHGIEIAMSCEQGICGTCLTRVLQGTPDHRDMFLTEEEQALNDQFTPCCSRSKTPLLVLDI

SEQ ID NO: 13463 - protein, 468 aa, Pseudomonas putida GB-1
MTDTVEKIQLTRALKSRHIFMLSLGGVIGTGLFMGSGVTINQGGPVGAILAYLVAGLLMYLVMVCLGELSVQMPVSGSFQAHATKFIGPATGFMIGWVYWMSWATTVGLEFTAAGMLMTRWFPDVPIWYWSALFVVVLFGLNALATRAFGEAEYWFSGIKVATILGFIIIGLLVIFGAIPLTSGAPAPMLDNLVGESLFPHGLSAVFAVMMTVVYAFQGCEIMGVAAGETEHPEKSIPRAVRNVVFRVLIFYVLAIAVLSAIVPYEQAGLMESPFVQVFDMVGIPFAADVMNFVILTAILSVGNSGLYASTRILWAMSKSGMAPKSLSPLSKRGVPLRALSITLCFALISLMTSFIAADTLFMVLMAVSGMSGTVTWIVIALAQYRFRKAYLRDGGQLQDLKYRAPLYPLVPLLCITLCSSLFVFLALDETQRPSLYWGFGFIALCYAAYYFVNRRRQGAFEPSVPGV

SEQ ID NO: 13464 - protein, 535 aa, Pseudomonas putida GB-1
MNELTLTAGQALVRLLANYGVQTVFGIPGVHTLELYRGLPGSGIRHVLTRHEQGAGFMADGYARVSGKPGVCFVITGPGVTNAATAIGQAYADSVPMLVISSVNHTASLGKGWGCLHETQDQRAMTAPITAFSAVALRGDDLPELIARAWAVFDSERPRPVHISVPLDVLAARVSRDWSDEVVRRPARGQPCRETLDQAALKLATAKRPMIIAGGGALHAAEQLAQLSARLAAPVFTSVAGKGLLPPQAPLNAGASLCVEPGWQLISQADVVLAVGTEMADTDFWRERLPIMGELLRVDIDPRKFNDFYPCAIALLGDARQTLAGLLEHLSALQRDPAQASEAVANLRQAIRNGHAPLQATHQAILDRIAAVLPDNAFISSDMTQLAYTGNYAFASRAPRSWLHPTGYGTLGYGLPAGIGGMFATDHRPGLVLVGDGGFLYTAQELATAVEELQRPLVVLLWNNDALGQIRDDMLGLDIEPVGVLPRNPDFIGLARAFGCTVHQPRDLDALQADLASGFATPGVTFIELKHTCVC

SEQ ID NO: 13465 - protein, 396 aa, Pseudomonas putida GB-1
MRYAKLTQRIAGDGAAAWDIHYRALALQAEGKDILLLSVGDPDFDTPAPIVEAAIDSLRAGHTHYADVRGKLALRQAIANRHRKRSGQAVGADQVTVLAGAQCALYCVAQCVLEAGDEVIVAEPMYVTYEAVFGACGAKVVPVPVKPENGFRVCPRDVAERITPRTRALALNSPHNPSGASLPRATWEALAELCIAHDLWLISDEVYSELLYEGEHVSPASLPGMAERTATLNSLSKSHAMTGWRMGWVVGSAELATHLENLALCMLYGSPDFIQDAAVVALEQQLPELDAMREAYRQRRDLVCEQLAGCPGIKALKPDGGMFVMVDIRDTGLSAQAFADRLLDSQGVSVLAGEAFGPSAAGHIRLGLVLGSEALADACQRIARCAGELMQEQADA

SEQ ID NO: 13466 - protein, 323 aa, Pseudomonas putida GB-1
MANTYEMFSVRVTDVEQATPLIKRFTLAREDGAAMPAFTGGSHVIVQMQGADGSQFSNAYSLMSDPRDTRSYQIGVRLEEQSKGGSAFMHQQVEVGTRLTISSPNNLFALDPSAGRHVLIAGGIGITPFLAQLHELEGGSTDYELHYAFRAPEHGAFQDQLANGPHAANTQFYIDSLDRKLDLAALCAGLDAQAHLYVCGPKPLIDAVIACAAQAGIAEQRVHWEQFAATPVTGSAFTVVLAQSGVELQVEEGMTILQAIEKSKAAKVECLCREGVCGTCETAILEGEAEHYDQYLSDEEKAAQQSIMLCVSRARTARLVLDL

SEQ ID NO: 13467 - protein, 532 aa, Pseudomonas putida GB-1
MSHKNKKIDVFLITVSLIAVLLTVIGLAAFPAQAESAANQLFELSTRTFGTSVQVLVFASTLAVLYLAFSKYGNIRLGSGKPEYATATWVFMFICAGMGSSTLYWGVMEWAYYYQTPGLNIAAATPKALEYSVGYSFFHWGISAWSIYALASLAMAYHFHVRKKSGLNLASIIEAVTGFKATGPVGRTVDLIFLLTMMGALTVSLALTASTLTRGLHDLTGTPDTFTVQLMVIGGVAVMFSLSSYIGIDGGLQRLSKMVCIGALVFAAVVLLVGPTQFTLNNTANSIGLMIQNYVHMSLFTDPAGDGAFTRNWTVFYWLWWVSYAPGVAMFVTRVSRGRQIKEVVLALLLGGSFGCWFFFGALESYSMHQFITGAVDVPKMLAEQGGESAVTHLLLALPWGQVFLGVYLFIMAIFCASHMDAAAYAVAATSTRNLREGDDPTPTHRLFWCVVLTLVPLAMLFAKASLSTMKTAVVLTAIPFMVILLVKIYGFLKWMVADYGQVPAHIIEEEAARMAGEQPAEHAPRSAAAVH

SEQ ID NO: 13468 - protein, 319 aa, Pseudomonas putida GB-1
MNEELLNVVVRKREIQGADVVVLDLGRADGAALPAFEAGAHVDIHVAPGLVRQYSLCSDPADVTVYRLGVLKDPASRGGSVGVHEALMEGREVQISAPRNLFPLAAGAARSILLGGGIGITPMIAMAHALHQQGADFELHYCGRSRSRSAFLEALADAPFAARVVTHFDDEEATQRLNLADVLGAGMPGTHLYTCGPSGFMDWVIAGARQQGYAEEHIHKEYFQVEVDATGQGFEVVAARSNKTVQVAEGQTILDALAQVGIRIDISCEQGVCGTCMCEVLEGEPDHRDVYLTDEEKAANDQILVCCSRAKSNKLVLDI

SEQ ID NO: 13469 - protein, 401 aa, Pseudomonas putida GB-1
MCMDDCCSTSSRRDFLKLGAMLTAAGALPLLSSLQARAAAEPDAPVRIGYLPITDATPLLVAHNNGLFEAEGIKAERPVLLRSWAQVIEAFISGQVNVIHLLSPMTVWARYGSKVPAKVVAWNHVGGSGLTVAPDITDMKQLGGKTVAIPFWYSIHNVVLQQMLNDNGLSPVSKPANAQLAANEVNLLVLPPSDMPPALASKRIAGYIVAEPFNALAENLKVGRVQRFTGDVWRNHACCVVFMHEHDLNNRPEWSQKVVNAIVKAQHWTRDHRAEAAALLSKAGPNKYTPHEPAVLAKVLAPAAEDRAGYIASGAIRHQQWDEKRIDFQPYPFPSYTEELVKRLKTTLIEGDNGFLAGLDPAQTARDLVDDRFVRNAIAAVGGPSVFGIADNFERSEEFAV

SEQ ID NO: 13470 - protein, 582 aa, Pseudomonas putida GB-1
MAKEHITETLDLGVTDPSKTAEARQDRHFEGKLDWIVFGFTSLLAIAFVLWGFLNQASLASSASSAQSWVILNFGWFFVLTSTLFVVFVLWLAASRYGRIPLGRDGEQPEFRTVSWVAMMFSAGMGIGLMFFGVAEPLSHYVSPPPGSASGQTSEAMQVAMATTLFHWTLHPWAMYAIVGLVIAYGTFRRGRSQLISAAFRPLIGKHANGPLGRLIDMMAIFATLFGSAASLGLGALQIAGGLEYNGWIESPGKLFYISIITLLTIAFVTSAVSGIGKGIQWLSNTNMVLALVLAVFVFMVGPTLLMLNLLPTSLGIYIKMLPEMMARTNASGGEQMNNWLAGWTVFYWAWWISWTPFVGMFIARISRGRTIRQFVTGVLLVPSLVSLVWFTIFGGAAIDAVREGALQLANGTVNSNHALYQLLDSYPLASATSVLVMILVGIFFVSGADAASLVMGTLSEHGTTAPSRRTVIFWGALTGTVAAIMLAIGDPRDPGEALTGLQNLTIVVALPFVMVMVLLCLALYRDLRKDPMMLRHLRGNELIEKAVLYGAVKHGEEFYIVVQEKKASTKPVTAANEVSQT

SEQ ID NO: 13471 - protein, 320 aa, Pseudomonas putida GB-1
MKKRIVLYKRLPADLMARLQARVEVTWVDTAQPDGLARLRDALPGAHGLLGASVRLDASLLDLAPQLEVVSSVSVGVDNYDVAELSRRGVKLTNTPDVLTETTADTGFALLLATARRVVELANWVRDGHWQANLGPAHFGSDVHGKTLGIVGMGRIGEALARRASAGFGMRVLYHSQRPKPEVEARYGASKCSLDALLQQADFVCLTVPLNASTEGLIGTRELALMKPEAILVNISRGRVVDEQALIEALRNRRIRGAGLDVFVQEPLATDSPLLQLDNVVATPHIGSATEETRQAMARCAVDNLLSALAGERPLNLVNG

SEQ ID NO: 13472 - protein, 547 aa, Pseudomonas putida GB-1
MAKAADVVVQCLENEGVEYVFGIPGEENLDLLESLRKSKIKLVLTRHEQSAGFMAATYGRLTGKTGVSLSTLGPGATNLVTASAYAYLGGMPMMMITGQKPIKKSKQGRFQIIDVCGMMDPITKYTHQFASADNIPSRMREAFRLAEEEKPGAVHLELPEDIAAEQTDALPIPRSLHRRPLAEHVAIEAAVEKLLNARNPILVIGAGANRKMTAKVLKQLIDKTGIPFITTQMGKGVVDERHPRFLGNAALSSGDFVHRAVEAADLIINIGHDVIEKPPFFMVRGGTEVIHINFRSAEVDAVYFPQVEVIGDIANAVWQISEALNDTSHWDFTRLMAIREANEAQIAEGADDNRFPVYPQRLVADIRRVLPSEGIVALDNGIYKIWFARNYKAHKPNTVLLDNALATMGAGLPSAMAAHLVHPDRPVISVCGDGGFMMNSQELETAVRLGMHITVVILRDDGYGMIRWKQANMGFTDFGLDYGNPDFVKYAEAYGANGHRVESAEGLLPLLEHCIKTPGVHVIDCPVDYSENDRILNSELRERALAV

SEQ ID NO: 13473 - protein, 440 aa, Pseudomonas putida GB-1
MATLKRTLSLGSVVLFGIAYMTPIIVLGTFGILADTTAGMVPAAYLAAAIAMLFTALSYGNMARAFPVAGSAYTYVRKSISPQLGFITGWAVLLDYLFLPMAIWLIGAAYLHSAFPSVPQAIWVLAFIAVTTTINVIGLRLAKTVNGLLMLIQLLVLAAFVALAVHYVWGDPTVPLWTLEPFYKEGAQLPLIMSGAAIACYSFLGFDAVSTLTEETKEPRKNIPRAILLITLIGGGLFIACSYFVQLAHPSTDFINADAAAYEIAQNIGGDLFVSVFLLGLIVGQFTSGLSAQASASRLLYAMGRDGVLPKSFFGKLSERFSTPVPSIILCGVVALLALRMDVTTSTSFINFGAFLAFSLVNLAVIFHYWLAMGQRGGTAVLLYLAFPLVGLVSNVWLMASLDHLAIYLGLGWLCLGMLYLTAITRGFSKQPPEMHFEEA

SEQ ID NO: 13474 - protein, 406 aa, Pseudomonas putida GB-1
MTEPTLADALIIDAVRTPIGRYAGALSSVRTDDLAAVPLKALIQRHPELDWKAVDDVILGCANQAGEDNRNVAHMASLLAGLPLEVPGTTINRLCGSGLDAIGNAARALRCGEAGLMLAGGVESMSRAPFVMGKSEQAFGRTAELFDTTIGWRFVNPRMKAAYGTDSMPETAENVAEQFGISRADQDVFALRSQHKAAAAQARGRLAREIVPVEIAQRKGPAKVVEHDEHPRGDTTLEQLAKLGTPFREGGSVTAGNASGVNDGACALLLASSDAARLHGLKARGRILGMAVAGVEPRLMGIGPVPATRKVLEMTGLSLADLDVIELNEAFAAQGLAVLRELGLTDDDARVNRNGGAIALGHPLGMSGARLVTTALHELEETGGRYALCTMCIGVGQGIAMVIERL

SEQ ID NO: 13475 - protein, 358 aa, Pseudomonas putida GB-1
MSQFHSLTIKQVRNETRDAVSIAFDVPEHLQDQFRFTQGQYLVMRTQLDNEEVRRSYSICSAVQDGELRVAVKRVPGGRFSAFANEVLKAGQQLEVMPPSGSFFVPLDPTRQGNYLGVAAGSGITPILSIIATTLASEPNSRFTLLYGNRSSSGALFRDKLEDLKNTYLDRLNLIFVFSREQQDVDLYNGRIDADKCGQLFSRWLDVPGLDAAFICGPQAMTETVRDSLQANGLEKQRIHFELFAAAGNEARREAREAARQVDAALSHITVISDGRALTFDLPRNTQNVLDAGNAIGAELPYSCKAGVCSTCKCRVIEGEVEMDSNHALEDYEVAAGYVLSCQTYPVSDKVVLDFDQL

SEQ ID NO: 13476 - protein, 336 aa, Pseudomonas putida GB-1
MSYQIALNFEDGVTRFIEASGHETVADAAYRQGINIPLDCRDGACGTCKCKAESGRYDLGDNFIEDALSEDEIAEGYVLTCQMRAESDCVIRIPASSQLCKTEQASFEAAISDVRQLSASTIALSIKGEALSRLAFLPGQYVNLKVPGSEQSRAYSFSSLQKDGEVSFLIRNVPGGLMSSFLTNLAKAGDNMSLAGPLGSFYLRPIQRPLLLLAGGTGLAPFTAMLERIAEQGSEHPLHLIYGVTNDFDLVELDRLQALASRIPNFTYSACVANPDSQYPQKGYVTQHIEPRHLNDGDVDVYLCGPPPMVEAVSQYVREQGITPANFYYEKFAAAA

SEQ ID NO: 13477 - protein, 865 aa, Pseudomonas putida GB-1
MNLKSLFAKLNETSRTATESAAALCLSEHHYDVEVEHLLLQLLDSSDNDLAPILRHYEVVTERLQAQLVTALGTFKKGNTRTPALSPHITRMIEQAWLLASIEYGVGQVRSGHLLQALLDDAELRRVVMASAPELEKINANDLRLNLAALVEGSAESRQASPLASPAAPIASSTKAGGKTPALDQYTVNLTQSAREGRIDPVLGREFEVRQMVDILTRRRQNNPILTGEAGVGKTAVVEGLALRIAQGDVPAVLKDVALHTLDLGLLQAGAGVKGEFENRLKAVIEEVKRSLHPIILFIDEAHTLIGSGGQAGQNDAANLLKPALARGELRTIAATTWAEYKKYFEKDAALARRFQVVKVEEPDEDKAIHMLRGLLGKMREHHKVAVMDEALVQAVRLSNRYITGRQLPDKAVSVLDTACARIALAQSSQPGLLEDCRRQIDNLQAEIAVLGHEAGKGHDHARRLGELQAALQTEQQREQQLIAQWQQELELVEQLKALDAANDTDAEQLNTLRAELARVQGDQPLVHALVDSGAIAQVISGWTGIPLGKMLRDEIDTVQRLPALLGERVLGQDHALQEIGKRIKISRARMEDPNKPIGVFLLLGPSGVGKTETALALADTLYGGERNLITINMSEYQEAHTVSSLKGSPPGYVGYGEGGVLTEAVRRKPYSVVLLDEVEKAHPDVLELFFQVFDKGVLDDGEGREINFRNTVIILTSNTGTERIMQTCLNATELPTPEAIVEGLRNELNQVFKPAFLGRLNIVPFYPVQDQILERIVALKLERIAKRFARNHQAELGYDEALVKAIAARCTEVDSGARNIDNILSQTLMPELAQRVLERMAQDTPIERLVIELGSDGDFAYRLA

SEQ ID NO: 13478 - protein, 567 aa, Pseudomonas putida GB-1
MSKPTADNAPNAAAKGAPAVPANFLRPIIQADLDSGKHSSIVTRFPPEPNGYLHIGHAKSICVNFGLAKEFGGVCHLRFDDTNPAKEDQEYIDAIQNDVKWLGFDWAGDVRYASDYFDQLHDWAVELIKQGKAYVCDLTPEQAKEYRGTLKEPGKNSPFRERSVEENLDLFARMKAGEFKDGERVLRAKIDMASPNMNLRDPILYRIRHAHHHQTGDKWCIYPNYDFTHGQSDAIEGITHSICTLEFEGHRPLYDWFLDNLPVPAHPRQYEFSRLNLNYTITSKRKLKQLVDEKHVDAWDDPRMSTLSGFRRRGYTPASIRNFCEMIGTNRSDGVVDMSMLEFSIRDDLDRTAPRAMCVLRPLKVVITNYPEGQVEQLELPRHPKEDMGARVLPFSRELYIDRDDFMEEPPKGYKRLEPAGEVRLRGSYVIRADEAIKDADGNIVELRCSYDPDTLGKNPEGRKVKGVIHWVPAEGSVECEVRLYDRLFRSPNPEKTEEGGSFLDNINPGSLQVLSGCRAEPSLAQAQPEDRFQFEREGYFCADLKDSQPGRPVFNRTVTLRDSWGS

SEQ ID NO: 13479 - protein, 323 aa, Pseudomonas putida GB-1
MAKHGYESGRLNLPFVGHCTFAKAPVCTDWAAIDADVAILGAPNDMGTQWRSGARFGPRGIREASTLFSFGHAGAYDFEDDATYLTEDQVRMVDVGDADIVHTDMASSNANIESAVRQILAAGAMPVVLGGDHSVHAPVIKAFEGHGPIHIVHFDAHLDFVDERHGVRYGHGSPLRRASELEHIVGMTQMGIRNVSSSNRDDYDAARDAGSQILSVRDVRRLGCEGVLAKIPEGRNYYITIDIDGFDPSIAPGTGTPSHGGFLYYEVLEIIQALARRSHGRIVGMDLVEVAPAYDPTGMTSILAAQLLMNSIGFIFHARANAR

SEQ ID NO: 13480 - protein, 279 aa, Pseudomonas putida GB-1
MSLSTIARRGLLASLLATTTVAASGLAQADATLDKVQQRHKLAVGVVLSGGPFGAIDPATREPIGFSVDLARDLARQLGVAVDLVAVQPANRVQFLQQGKVDLLIANMEWTPERDKLLGHVPTPFYRVGGTAALAKDSPINTWAGLKGQPVCTSQGSSYTQALVELGADIKAFKTSAESLLALRGNNCVAAVHDATLINPLLAKGGEWSGYRALAPELNPAPSVIWTRLGETDTQQRLDPFVKQWHRSGWLIEREQANHITPASPALVELRAKLQGEGA

SEQ ID NO: 13481 - protein, 464 aa, Pseudomonas putida GB-1
MHTTTSTAHSPAHSPTPHAPTQPDASTGRLRKSMGMTALVLFGLAYMVPLAVFTTYGLVTQMTKGHLPTAYLLTLAAMLLTAYSYGRMVQAHPYSGSVYTYTRKAFGSHIGFITGWTLLLDYIFLPLLSYLLIGIYMSEYFPAIHAWVWVAGSIALVTFLNLIGIESITRVNWILVVVQLVFIIVFVALSVLKLSGQAEPVSLLAPFHHEGFSVPLIMTGAAVLCLSFLGFDAVSTMAEETSNPTYRIPVAILAVSLIGGLLFLVVSYCAQMVFPDWGSFADPDSASVDVMRRVGGELLVTAFTATYVAGCFASAMVSQASVSRVLFAMGRDGALPRAFGQLATKKRVPATAILVVSLVSMIALVITLDTVANMISFGALFAFSAVNLAVVKHYLVDQKLRGGRNYLLYGAIPGLGFLSTLWLWSSLTSLSFTIGLCWLGMGLVVLMGLTRAFRVKLPELQMAE

SEQ ID NO: 13482 - protein, 669 aa, Pseudomonas putida GB-1
MNDCHLICANRLDDGAVVWLDAGHEWVETLQQAGTFDAQALVSATLAAEAAVLANQVVAPTPCEAWLVDGRPEPKSLRERLRARGPSVRSDLGKQAAGTPPSSIARMRPVLPVEAGQAGVYRYDRFEREFLKDRARQFEQQVARRLSGELDEEAFKVYRLMNGLYLQLHGYMLRVAIPYGTLSALQLRQLAYVAHTYDKGYGHLTTRQNIQFNWPRLADTPEILSVLADADLHCIQTSGNCIRNVTTDHFAGAAEDEVLDPRVHAEILRQWSTEHPEFTYLPRKFKIAITGSPKDRAAVRFHDIGILAQRNAQGEVGFQVYAGGGLGRTPIVGTRVREWLPERELLRYVEAILRVYNALGRRDNLYKARIKILVRELKPGRFIEMIEEEFASLPADHQYLEPAIVQGIHARFVQPAFEALPGLCDSFLRARADDNAFASWVRTNTHPHKKRGYICAVISLKPPGGIPGDISAEEMLALADLAEAYSLNEIRVSHEQNVVLPHIRLVDLYSVWQALRQAGLATSNIGLLSDTIACPGMDYCSLATARSVPVAQRIAQRFDAARQQDIGELKLNVSGCINACAHHHVAHIGILGLDKAGHENYQITLGGSAEEDAAVGTILGRSVPFEEVPDIVEAIVAIYLQLREDDERFLDTYRRVGIEPFKEVLRDAR

SEQ ID NO: 13483 - protein, 463 aa, Pseudomonas putida GB-1
MNAQSSHQLKRGLSTRHIRFMALGSAIGTGLFYGSASAIKLAGPSVLLAYLIGGAAIYMMMRALGEMAVHNPVSGSFGHYASQYLGRYFGFLTGWSYAFSMLVVCLADVTAFGVYMGLWFPETPAWIWVLGIVFFIGALNLCSVKVFGEMEFWLSLLKVTAIVAMIVAGGAVLLLGIQLNDDAGTVAGISNLWSHGGFFPNGIGGMIASFTVVMFAFGGVEMIGITAGEARDPKRVLPKAINSVPLRILLFYILTLLVLMSIYPWTGIGSHGSPFVQIFSGLGISSAATVLNIVVISAAVSAINSDIFSAGRMMYGMAQNGQAPAGFASLSRFGVPWMTVAVMGVALLLGVVLNYLVPEGLFLVLAAVVTFSIVWVWLMILLSQVAMRRGMSKEEVAALDYRVPLWPVGPACAIAFMVFIFGVLGWFPASRTAMYVGVGWLILLSLGYWLWGVRTPRPVSASA

SEQ ID NO: 13484 - protein, 70 aa, Pseudomonas putida GB-1
MSNRQTGTVKWFNDEKGFGFITPQGGGDDLFVHFKAIESDGFKSLKEGQTVSFVAERGQKGMQAAQVRPE

SEQ ID NO: 13485 - protein, 382 aa, Pseudomonas putida GB-1
MRGRQKIAIVGAGLGGAAAATLLQQAGFDVEVFEQAPEFTRLGAGIHIGPNVMKIFRRMGLEQKLELMGSHPDFWFSRDGHSGDYLSRIPLGEFARREYGAAYITIHRGDLHALQIEAIKPGTVHFGKRLEKIVDEGDLVRLDFADGTHTVADIVIGADGIHSKIREELLGAEAPNYSGWVAHRALIRGVNLAQHADVFEPCVKWWSEDRHMMVYYTTGKRDEYYFVTGVPHEAWDFQGAFVDSSQEEMRAAFEGYHPTVQKLIDATESITKWPLRNRNPLPLWSRGRLVLLGDACHPMKPHMAQGACMAIEDAAMLTRCLQETGLSDHRTAFALYEANRKERASQVQSVSNANTWLYTQEDPAWVYGYDLYGQQLKSGEAA

SEQ ID NO: 13486 - protein, 427 aa, Pseudomonas putida GB-1
MQQATALEVSIVGGGIAGVALALDLCRHAHLNVQLFESAAAFGEVGAGVSFGANAVRAIAGLGIADPYARIADSTPAPWQDVWFEWRDGRDAQYLGSSVAEGVGQSSVHRADFLDALASQLPPGIAQFGKRAQQVEQVGERVRVCFTDGTEHHCDVLIGADGIKSSIRDHVLDGLGVARVAPRFSGTCAYRGLIDSAQLREACWARGVGEHLVDVPQMYLGLDGHILTFPVKQGRLINVVAFVSDRSQPNPAWPSDAPWVRQASQAEMLKAFEGWGDAVQVLLECIATPSLWALHDLAELPGYTHGRVGLIGDAAHAMLPHQGAGAGQGLEDAWLLAGLLADPNVLGSPVQAVLEAYDAVRRPRACRVQRTSWEAGELYEFRDPAVLDDPQLLGKVLGERFDWLWNHDLQDDLKRARQLLGLQVQAA

SEQ ID NO: 13487 - protein, 84 aa, Pseudomonas putida GB-1
MASGKVKWFNNAKGYGFINEDGGTEDLFAHYSAIQMDGYKTLKAGQAVTFNIIQGPKGLHAVEIKGINVSASTGVPNSPTTANA

SEQ ID NO: 13488 - protein, 757 aa, Pseudomonas putida GB-1
MSFGGSHLMYKDLKFPILIVHRAIKADSVAGERVRGIAEELRQDGFAILAAADHAEARLVAATHHGLACMLIAAEGVGENTHLLQNMAELIRLARMRAPDLPIFALGEQVTLENAPAEAMSELNQLRGILYLFEDTVPFLARQVARAAHTYLDGLLPPFFKALVQHTAQSNYSWHTPGHGGGVAYHKSPVGQAFHQFFGENTLRSDLSVSVPELGSLLDHTGPLAEAEARAARNFGADHTFFVINGTSTANKIVWHAMVGRDDLVLVDRNCHKSVVHAIIMTGAIPLYLCPERNELGIIGPIPLSEFSPEAIEAKIQANPLAHGRGQRIKLAVVTNSTYDGLCYHAGMIKQALGASVEVLHFDEAWFAYAAFHGFFTGRYAMGTACAADSPLVFSTHSTHKLLAAFSQASMIHVQDGARRQLDRDRFNEAFMMHISTSPQYSILASLDVASTMMEGQAGHSLLQEMFDEALSFRRALANLREHIAADDWWFSIWQPPSTEGIQPLAAQDWLLQPGAQWHGFGEVADGYVLLDPLKVTLVMPGLSAGGVLGERGIPAAVVSKFLWERGLVVEKTGLYSFLVLFSMGITKGKWSTLLTELLEFKRHYDGNTPLSSCLPSVGVADASRYRGMGLRDLCEQLHDCYRANATAKQLKRVFTRLPEVAVSPARAYDQMVRGEVEAVPIEALLGRVAAVMLVPYPPGIPLIMPGERFTEATRSILDYLAFARAFNQGFPGFVADVHGLQNENGRYTVDCIMECE

SEQ ID NO: 13489 - protein, 297 aa, Pseudomonas putida GB-1
MAKIGFIGTGIMGKPMAQNLQKAGHSLFVSTHHDAAPAELIAAGAVALANPKEVAQEAEFIIVMVPDTPQVESVLFGENGVAEGVGPNKIVIDMSSISPTATKAFAEKIKATGAAYLDAPVSGGEVGAKAATLSIMVGGCPKAFERTLPLFEAMGKNITRVGGNGDGQTAKVANQIIVALNIQAVSEALLFAAKNGADPAKVREALMGGFASSKILEVHAERMIKGTFDPGFRINLHQKDLNLALQGAKELGINLPNTSNAQQVFNTCQALGGGNWDHSALIKGLEHMANFSIRGDK

SEQ ID NO: 13490 - protein, 312 aa, Pseudomonas putida GB-1
MRKTVLVLVETVDDYLPMLEQAGYRLIRAPSPQLRAEAIERHADDIDAVLTRGPLGLTAAEIDALPKLQIICVIGAGYEQVDLAAAAARGITVTNGAGANAAAVADHTLALLLALLRNIPCGDASTRRGEWNRVISPSVSGKRLGILGLGAVGLAIAKRAHLGFDMPISYHSRTPRQDVPYTWYDSPRHLAEAVDILVVATPGGANTRHLVHAQVLEALGAEGYLVNIARASVVDTQALITALQHGQLAGAALDVFDDEPAVPDALKALANTVLTPHVAGQSPEAARDTVALVLRNLQAFFAGEPVLTPVRS

SEQ ID NO: 13491 - protein, 451 aa, Pseudomonas putida GB-1
MAVKVLLVEDDRVLRQALGDTLEIGGFAYQAVGSAEEALEAVRGDAFSLVVSDVNMPGMDGHQLLSQLRRQQPQLPVLLMTAHAAVERAVEAMRQGAADYLVKPFEPKALLSLVQRHAAGRVTGEEGPVACEPASRQLLELAARVARSDSTVLISGESGTGKEVLARYIHQQSPRATQPFVAINCAAIPDNMLEATLFGHEKGAFTGAIAAQAGKFEQAEGGTLLLDEISEMPMALQAKLLRVLQEREVERVGGRKPISLDIRVLATTNRDLAGEVAAGRFREDLYYRLSVFPLAWRPLRERPGDILQLAERLLARHVAKMKHAPVRLSPQARACLQAYAWPGNVRELDNALQRALILQQGGVIEAADFCLAGAIPLSAGTEPSLEVAAEAGGLGDDMRRHEYQMIIDTLRAERGRRKEAAERLGISPRTLRYKLAQMRDAGFDVEASLFG

SEQ ID NO: 13492 - protein, 455 aa, Pseudomonas putida GB-1
MQSNSLKQSLKQRHITMIALGGVIGAGLFMGSGSLIASAGPAAILSYFIGGLVVTLVMFMLGEMACRNPDAGSFSTYANTYLGDWAGFAVGWLYWFKSMMTITLEAVLLGAILHDFLPWLPIWAGAFLMLVTLMASNAYSVRSFAEVEYWLAAMKVATILIFMLLGLSILLGLHSDIPSPGLVNLTAHDGFMPNGLSPVMAGVIVVIFSLGGSEIAAVAAGESENPRQNVIRAIKSVILRVMLFYVGSVSILILCLPWTDKANLASPYVSLFSLAGFGGAAVAMKLVLFVSFMSVMNSFMFSNSRMLFSLSQRGHAPKLFSRTSAKGVPINALLLSLSICTLILTVHFVSGGDLFMTLAKSTGSLVMVVWIFIIIAHVAMRWKTRHEAIDPNAFRAWLFPYANIVALLALLTVIGTQAFEPASRFQFWFTVLTVLLVMAGYFVMRQRLTGKLATN

SEQ ID NO: 13493 - protein, 411 aa, Pseudomonas putida GB-1
MALIVQKFGGTSVGSIERIEQVAEKVKKHREAGDDLVIVLSAMSGETNRLIDLAKQITDQPVPRELDVIVSTGEQVTIALLTMALIKRGVPAVSYTGNQVRILTDSSHNKARILQIDDQKIRADLKEGRVVVVAGFQGVDEHGSITTLGRGGSDTTGVALAAALKADECQIYTDVDGVYTTDPRVVPQAQRLEKITFEEMLEMASLGSKVLQIRSVEFAGKYNVPLRVLHSFKEGPGTLITIDEEESMEQPIISGIAFNRDEAKLTIRGVPDTPGVAFKILGPISASNIEVDMIVQNVAHDNTTDFTFTVHRNEYEKAQSVLENTAREIGAREVIGDTKIAKVSIVGVGMRSHAGVASRMFEALAKESINIQMISTSEIKVSVVIEEKYLELAVRALHTAFELDAPARQGE

SEQ ID NO: 13494 - protein, 537 aa, Pseudomonas putida GB-1
MSGKFKKQLSLLDLTFIGLGAIFGSGWLFAASHVSAIAGPAGILSWFLGGFAVLLLGIVYCELGAALPRAGGVVRYPVYSHGPLLGYLMGFITLIAFSSLIAIEVVASRQYAAAWFPGLTKAGSSDPTVLGWLVQFALLGLFFFLNYRSVKTFAKANNLVSVFKFIVPLLVIGVLFTFFKPENFEAQGFAPFGLSGVEMAVSAGGIIFAYLGLTPIISVASEVKNPQRTIPIALILSVLLSTAIYALLQLAFLGSVPTEMLANGWASVTKELALPYRDIALALGVGWLAYLVVADAVISPSGCGNIYMNATPRVIYGWAQTGTFFKYFTRIDAESGIPRPALWLTFGLSVFWTLPFPSWEALINVVSAALVLSYAVAPVTVAALRRNAPDMPRPFRVKGMGVLGPLSFIIAALIVYWSGWNTVSWLLALQIVMFVLYLLCGRFVPTQHLSLAQQVRSSAWLIGFYAVTILLSWLGSFGGLGVLAHPFDTLAVAACALGIYYWGAVTGVPAHLVRLEGEDESEASAETYPSRPAAVAS

SEQ ID NO: 13495 - protein, 450 aa, Pseudomonas putida GB-1
MQPDHRATGNGQLRKTLRLWHVIIIGLAYLTPMTVFDTFGIVSGITAGHVPSAYILALAGILFTAVSYGTLVKRFPQSGSAYTYTQKAINPHVGFLVGWSSLLDYLLLPMVNALLAKLYLSAMFPEVPEWMWVAGFVTLISLINMRSVNLVAHFNLLFVGVQVAIIAVFIYLCVRGLDHGEGLGTAWSLMPFADSQTQFSALAAGATILCFSFLGFDAVTCLSEETRDPAKTIPRAIFLTALIGGVVFITVSYFIQAYFPTMARFHDQEAALPEIALYVGGKLFQSIFIACTVINTIASGLASQTSVSRLLYVMGRDNVIPASVFARLHSRYKTPVLNIAVVGIISLSAIFFDLVTATSIINFGALVAFSFVNLSVINHCYLREGNRKGLANQLKYLVLPTIGFCIIVSLWLDLNAHSLMFGGIWAALGLIYLGWLTKAFRAAPPNYIAE

SEQ ID NO: 13496 - protein, 197 aa, Pseudomonas putida GB-1
MFKIVHLVTGVAALLLSLIPSLKTDATPFLQQPDAVYLALLGLLNLVLAPVVPLYYRGARQQLQHLACALLVVAVVLQTLTLLARPEMGNLAALVCAVLAVALHLAVGFARTPRKARSSQHAAQDVGSRDTGTVKWFNTSKGFGFISRDSGDDIFVHFRAIRGEGHRILVEGQRVEFSVMHRDKGLQAEDVVAVTRR

SEQ ID NO: 13497 - protein, 678 aa, Pseudomonas putida GB-1
MQQPPDHRPSPWHAGEKTLQEKVGVAERMEAFGQKVIRDYMPDQHRTFYHQLPFMIAASVDTLGRPWATLLEGPEGFVSSPDPRLLTIDTTLPADDPATPGLAAGEAVGLLGIELHTRRRNRINGQIRQAAQGQLQVAVEQSFGNCPQYIQLRDYTRVDQPPQGRVDAPALDATTASMIEGADTFFVASYVEHGNGQRSVDVSHRGGRPGFIKVEGSLLTIPDYAGNLHFNTLGNLLVNPQAGLLFIDFSNGNVLQVCGRAEVLLDSPAIQAFEGAERLWTLQVEQVVWRPAAVSLRWAFKAYAPTSLMTGTWAEADARLEQRRQQRQWQAWRVLRVEQESRDIRSFYLEPPAGSRVAFAPGQHLPVQVQRDCEAALIRTYSLSSAPADGYLRISVKAQGPASRYLHERIVAGDVLNVRPPMGSFTLDQQSTRPLVLIGAGVGITPLLAMLREQVSTGQARRIHLFHGARSLAELPFQQELASLQQQAAGLLRVHRALSQPEGHARVGRDFEFIGRLGIEQVKATLALDDYDFYLCGPGSFTQALYEGLRGVHVPDARIHAEAFGPSTLRRHTDDGRPTVQQLPAANEPVPVYFAASAKEARWTPGSGTLLELAEARGLAPEFSCRGGSCGTCKTKLVSGQVHYPNLPAELPESGSVLICCAVPAHQEEGAQALVLEI

SEQ ID NO: 13498 - protein, 295 aa, Pseudomonas putida GB-1
MSSQLPSLGFAGIGLMGLPMCRRLLAAGYPLTVWNRSPDKCAALVAAGARLASSPAQLCRDSDMVLLCLADTAVVREVVFGEQGIAQGGRSGQLLIDFSSLEPTATREMAAELAALCGMAWLDAPVSGGTPGAEAGTLAIMVGGEVADLQRAHPVLQVLGQRVTHMGAVGAGQVTKACNQMIVACNALVIAEVVALAEQSGVDATLIAEALAGGFADSKPLQILAPQMAESRFEPIKWHVRTLLKDLDGAVKFSREQGSATPLSGLAAQLMRLHGSQGYLQKDPATLVELYRNKA

SEQ ID NO: 13499 - protein, 69 aa, Pseudomonas putida GB-1
MSNRQNGTVKWFNDEKGYGFITPQSGDDLFVHFKAIQADGFKTLKEGQAVTFVATRGQKGMQAEEVQIA

SEQ ID NO: 13500 - protein, 405 aa, Pseudomonas putida GB-1
MADVKKVVLAYSGGLDTSVILKWLQDTYNCEVVTFTADLGQGEEVEPARAKAQAMGVKEIYIDDLREEFVRDFVFPMFRANTVYEGEYLLGTSIARPLIAKRLIEIANATGADAISHGATGKGNDQVRFELGAYALKPGVKVIAPWREWDLLSREKLMDYAEKHGIPIERHGKKKSPYSMDANLLHISYEGGVLEDTWTEHEEEMWRWSVSPENAPDQATYIELTYRNGDIVAINGVEKSPATVLADLNRIGGANGIGRLDIVENRYVGMKSRGCYETPGGTIMLKAHRAIESITLDREVAHLKDELMPKYASLIYTGYWWSPERLMLQQMIDASQVNVNGVVRLKLYKGNVTVVGRKSDDSLFDANIATFEEDGGAYNQADAAGFIKLNALRMRIAANKGRSLL

SEQ ID NO: 13501 - protein, 111 aa, Pseudomonas putida GB-1
MDIIDTIKEQIANNTILLYMKGSPNAPQCGFSAKASQAVMGCGEKFAYVDILQNPEIRANLPKYANWPTFPQLWVAGELVGGSDIMLEMFEKGELQTLIKEAAAKAKAAEA

SEQ ID NO: 13502 - protein, 472 aa, Pseudomonas putida GB-1
MPVGNHSAHGQATEGGPLKRELGERHIRLMALGACIGVGLFLGSAKAIEMAGPAIMFSYIIGGLAILVIMRALGEMAVHNPVAGSFSRYAQDYLGPLAGFLTGWNYWFLWLVTCVAEITAVAIYMGIWFPDVPRWIWALAALGSMGAVNLVAVKAFGEFEFWFALIKIVTIIAMVIGGIGVIAFGFGNDGVAVGISNLWSNGGFMPNGVTGVLMSLQMVMFAYLGVEMIGLTAGEARNPQKTIPQAIGSVFWRILLFYVGALFVILSIYPWNEIGSQGSPFVMTFERLGIKTAAGIINFVVITAALSSCNGGIFSTGRMLYSLAQNGQAPAAFARTSKNGVPRNALLLSIGALLLGVLANYLVPEKVFVWVTSIATFGAIWTWVMILLAQLKFRAGLTTAERKALKYRMWLWPLSSYLALAFLVLVVGLMAYFEDTRVALYIGPAFLVLLTVLYYAFRLAPKEVQGVASTAS

SEQ ID NO: 13503 - protein, 300 aa, Pseudomonas putida GB-1
MTDNNPTRCGYVAIVGRPNVGKSTLLNHILGQKLAITSRKPQTTRHNMLGIKTEGDVQAIYVDTPGMHKANDKALNRYMNRNASAALKDVDVVIFVVDRTKWTDEDQLVLERVQYVTGPLIIAVNKTDRMEEKAELIPHLQWLQEQLPNAEVMPISAQQGHNLDALEAQIAKHLPENDHFFPEDQITDRSSRFLAAELVREKIMRQLGAELPYQITVEIEEFKQQGHVLHIHALILVERDGQKKIIIGDKGERIKRIGSEARKDMEVLFDSKVMLNLWVKVKGGWSDDERALRSLGYGDL

SEQ ID NO: 13504 - protein, 568 aa, Pseudomonas putida GB-1
MFLSRWLPGLANLLHYRREWFHADMQAGLSVAAIQIPIAIAYAQIVGLPPQYGLYACVLPMMVYALIGSSRQLMVGPDAATCAMIAGAVAPLAMGDPQRIAELSVIVTVLVGVMLIAAGLARAGFIASFFSRPILIGYLNGIGLSLIAGQLSKVVGFKIEGDGFILSLINFFQRLGEIHWVTLIIGLAALGLLIWLPRRYPRLPAALTVVALFMLLVGLFGLDRFGVAILGPVPAGIPKLAWPHSNLAEMKSLLRDALGIATVSFCSAMLTARSFAARHGYAINANHEFVALGVSNLAAGISQGFAISGADSRTAVNDMVGGKSQLVGIIAALVIALILLFFTAPMAWIPQAALGAVLLMAGWGLIDIKSLGRIRRLSRFEFWLCLLTTAGVLGLGVLPGIVFAVTLAILRLLYSIYQPTDAVLGWLPGTEGQVDIRKFKDARTVPGLVVYRFDDAILFFNADYFKMRLLEAVQSQNQPKAVLFDAEAVTSIDVSGIAALREVRDTLAAQGIFFAIARARGTFLRMLVRSGMAREMEDKLLFGSVRAGIRAYRVWRNRNRSVQTAEQR

SEQ ID NO: 13505 - protein, 545 aa, Pseudomonas putida GB-1
MATCGEVLVKLLEGYGVDHVFGIPGVHTVELYRGLAGSSIRHITPRHEQGAGFMADGYARTRGKPGVCFIITGPGMTNITTAMGQAYADSIPMLVISSVQTRDQLGGGRGKLHELPNQAALVAGVAAFSHTLMSAADLPQVLARAFAVFDSARPRPVHIEIPLDVLVEPADFLLPGRPVRGSRAGAAPQAVAQMAERLASARRPLILAGGGALAAGAALARLAEHLQAPVALTINAKGLLPASHPLQIGSTQSLPATRELVAEADVVLAIGTELAETDYDVTFKGGFEIPGSLLRIDIDPDQTVRNYLPELALVADAELAAEALFGALQAQPQPVHESTWGEARVAKLRQALAADWDQPTLSQTRLLNAILERLPNAILVGDSTQPVYTGNLTLDMHQPRRWFNASTGYGTLGYALPAAMGAWLGSAEQADQRAPAVCLIGDGGLQFTLPELASAVEAQVPLVVLLWNNQGYEEIKKYMVNRAIEPVGVDIHTPDFIGVARALGAAAEHVTDVVQLQAALGLALERKGPTLIQVDQNQWQETVLR

SEQ ID NO: 13506 - protein, 400 aa, Pseudomonas putida GB-1
MHDVFICDAIRTPIGRFGGALASVRADDLAAVPLKALIERNPGVQWDQVDEVFFGCANQAGEDNRNVARMALLLAGLPDSIPGVTLNRLCASGMDAIGTAFRAIASGEMELVIAGGVESMSRAPFVMGKAESGYSRNMKLEDTTIGWRFINPLMKHQYGVDSMPETADNVADDYQVSRADQDAFALRSQQKAAAAQAAGYFAEEIVPVRIAHKKGETIVERDEHLRPETTLEALTKLKPVNGPDKTVTAGNASGVNDGAAALILASAAAVKKHGLTPRARVLGMASGGVAPRVMGIGPVPAVRKLTERLGVAVSDFDVIELNEAFASQGLAVLRELGVADDAPQVNPNGGAIALGHPLGMSGARLVLTALHQLERSGGRKGLATMCVGVGQGLALAIERV

SEQ ID NO: 13507 - protein, 342 aa, Pseudomonas putida GB-1
MKMLKTTLAVLTAAAALGAVSNAQAGATLDAVKKKGFVQCGVSDGLPGFSVPDAQGKIVGIDADVCRAVAAAVFGDATKVKFSQLNAKERFTALQSGEVDVLSRNTTWTSSRDAGMGLVFAGVTYYDGVGFLVNKKLGVSSAKELDGATICIQAGTTTELNVSDFFRANNLKYTPITFDTSDESAKSLESGRCDVLTSDKSQLFAQRSKLAAPTDYVVLPETISKEPLGPVVRKGDEEWFSIVKWTLFAMLNAEEAGITSKNVEAEAKATKNPDVARLLGGDGEYGKDLKLPKDWVVQIVKQVGNYGEVFEKNLGQSTDLKIDRGMNALWNNGGIQYAPPVR

SEQ ID NO: 13508 - protein, 324 aa, Pseudomonas putida GB-1
MKKTVLAFSRITPAMAERLQQDFNVILPNPKLGDINAQFNEALPEAHGLIGVGRKLGRAQLEGAAKLEVVSSVSVGYDNYDLDYFNERGIALTNTPDVLTESTADLGFSLIMGCARRTAELDAWTKAGNWQATVGPAHFGSDVHGKTLGIVGMGNIGAAIARRGRFGFNMSVIYAGNSRKTALEQELGAQLRSLEQLLAEADFVVIVVPLSDATRKLIGARELKLMKPSAFLINIARGPVVDEAALIEALQNGTLRGAGLDVYEKEPLSDSPLFKLPNALTLPHIGSATAETRLAMANRAMDNLRAALLGERPRDLVNPQVWKG

SEQ ID NO: 13509 - protein, 392 aa, Pseudomonas putida GB-1
MNDVVIVAATRTAIGSFQGALASVPAVDLGAAVIKRLLEQTGLDPAQVDEVILGQVLTAGAGQNPARQAAIKAGLPFSVPALTLNKVCGSGLKALHLATQAIRCGDAEVVIAGGQENMSLAPYVMPSARTGQRMGHGQLIDSMITDGLWDAFNDYHMGITAENLVDTYSLTREQQDAFAAESQRKAVAAIEAGRFDAEITPILLPQKKGEPKVFARDEQPRPDTTAESLGKLRPAFKKDGSVTAGNASSLNDGAAAVLLMSAAKAKALGLPVLAKVAAYASAGVDPAIMGIGPVSATQRCLDKAGWQLAELDLIEANEAFAAQALAVGKALEWDAARVNVNGGAIALGHPIGASGCRVLVTLLHEMIKRDAKKGLATLCIGGGQGVALAIER

SEQ ID NO: 13510 - protein, 574 aa, Pseudomonas putida GB-1
MELLSGAEMVVRFLRDEGVKHIYGYPGGALLHVYDALFKEPEVEHILVRHEQAATHMADGYARATGKAGVVLVTSGPGATNAITGIATAYMDSIPMVILSGQVPSTMVGTDAFQETDMIGISRPIVKHSFMIKNPTEIPEVLKKAFYLAQSGRPGPVVVDIPKDMTNPAEKFEYVYPKKVKLRSYSPAVRGHSGQIRKAAEMLLAAKRPIVYSGGGVILGGGSEALTEIAKSLNLPVTNTLMGLGGFPGTDRQFLGMLGMHGSYTANMAMHNADVIFAVGARFDDRVVNGPAKFCPNAKIIHVDIDPASISKMIKADVPIVGPVDSVLSEMLGILKEIGEQPDKAALDAWWKQIDEWRGNGEMFPYDKGDGNVIKPQKVIETLCEVTHGDAFVTSDVGQHQMFAAQYYRFNKPNRWINSGGLGTMGFGFPAAMGVKLNFPDQDVACVTGEGSIQMNIQELSTCMQYGLPVKIVNLNNGVLGMVRQWQDMAYNGRHSHSYVESLPDFIKLAEAYGHVGIRITSLKDLKPKLEEAFAMKDRLVFIDIAVDRSEHVYPMQIKDGSMRDMWLSKTERT

SEQ ID NO: 13511 - protein, 390 aa, Pseudomonas putida GB-1
MAHPYSARSRAIEPFHVMALLARANELQAAGHDVIHLEIGEPDFTTAAPIVAAGQAALAAGHTRYTAARGLPALREAIAGFYGQRYGLSIDPERILITPGGSGALLLASSLLVDPGKHWLLADPGYPCNRHFLRLVEGGAQLVPVGPEVNYQLTADLVERYWDKDSVGALVASPANPTGTVLGREALASLAKATHERHGHLVVDEIYHGLTYGMDAPSVLEVDDSAFVLNSFSKYFGMTGWRLGWLVAPPGAVADLEKLAQNLYISAPSMAQHAALACFQPETLAIFEERRAEFARRRDYLLPALRELGFRIAVEPQGAFYLYADISAFGGDAFAFCRHFLETEHLAFTPGLDFGRHLAGHHVRFAYTQSLPRLEEAVQRIARGLRSWQG

SEQ ID NO: 13512 - protein, 641 aa, Pseudomonas putida GB-1
MGKIIGIDLGTTNSCVSILENGNVKVIENAEGARTTPSIVAYANDGEILVGQSAKRQAVTNPHNTLFAVKRLIGRRFEEEVVQKDIKLVPYKIVKGGNGDAWVQAGGKDMAPPQISAEVLKKMKKTAEDYLGEPVTEAVITVPAYFNDSQRQATKDAGRIAGLDVKRIINEPTAAALAYGMDKAKGDHTVIVYDLGGGTFDVSVIEIAEVDGEHQFEVLATNGDTFLGGEDFDMRLIDYLVDEFKKESGMDLKNDPLALQRLKEAAEKAKIELSSTQSTDVNLPYITADATGPKHLNVKISRAKLESLVEDLVQRTIEPCRIALKDAGIDASKIDDVILVGGQTRMPLVQKTVADFFGKEARKDVNPDEAVAMGAAIQGAVLAGDVKDVLLLDVSPLTLGIETMGGVMTALIEKNTTIPTKKSQVFSTADDNQGAVTIHVLQGERKQAAQNKSLGKFDLADIPPAPRGVPQIEVTFDIDANGILHVGAKDKATGKAQSIVIKANSGLSDEEIERMVRDAEANAEEDRKFEELAAARNQGDALVHSTRKMVVDAGDKVTAEEKAAIEAAVVALEAAVKGDDKAAIDAKVEELSKVSAPVAQKMYAEQSAEQPQGGAQQAEPEAKHDDVVDAEFEEVKGDDKK

SEQ ID NO: 13513 - protein, 443 aa, Pseudomonas putida GB-1
MPDTPLTQAHAPNVSSRPSACPGLWRIVSARDGGICRIKLPGGLLLAEQAEAVAAAAERFAGGVIEATNRGNLQIRGIGSEHRALVETLLAAGLGPREAAGDDVRNLMLSPLAGHDPAMLLDARPLAGQILDLLEGTPRFHQLSAKFAVQLDAGERLAMLEHPHDLWLSPLRLLQQTWLAFGLAGCPADGKVLGAVPLAQGLALVRAVLERFLDLATPTQSRMRQLLEVHSATDFVDGLGLDIRRDAAVLGWRREEHRASWLGTLPQTHGVALGVAPPQGRLTPAMLRGAARIARELGDGSLRLSPWQSLVLTNLQAQHIDQAQAELSALGLLCHDHEPLARISACTGASGCAKALGETKADAVALAALLGPGVPASVHLSGCPRSCAVAHVAPATLLARSPGRYDLYLRDARQPGFGALRATDLTLNEAGAMLDLPTEHLDD

SEQ ID NO: 13514 - protein, 473 aa, Pseudomonas putida GB-1
MTQTSPSTPDEQHLQRNLTNRHIQLIAIGGAIGTGLFMGSGKTISLAGPSIIFVYMIIGFMLFFVMRAMGELLLSNLNYKSFIDFSADLLGPWAGYFTGWTYWFCWVVTGIADVVAIAAYTQFWFPDLPQWIPALTCVGLLLSLNLVTVKMFGELEFWFALVKIVAILGLVATGLYMVITGFTSPSGRTAQLANLWNDSGMFPHGLMGFFAGFQIAVFAFVGIELVGTTAAEAKNPERTLPRAINSIPIRIIVFYVLALIAIMAVTPWRDVVPGKSPFVELFVLAGLPAAASIINFVVLTSAASSANSGVFSTSRMLYGLSQEGDAPKAFEKLSSRSVPANGLYFSCTCLLLGAVLIYLVPDVVEAFTLVTTVSAVLFMFVWTLILLSYLKYRKNRAALHQASKYKMPGGRFMCYVCLVFFAGILVLLSLEADTRSALVVTPIWFMILAVTYQFVRSRRHPRGATPQVEQSQR

SEQ ID NO: 13515 - protein, 602 aa, Pseudomonas putida GB-1
MAETPRPAEHTSSLKIYFRLLSYVKPYVGIFLLSIVGFVIFASTQPMLAGILKYFVDGLSNPEAVLFPNVPYLRDLQLLQAVPLLIILIAAWQGLGSFLGNYFLAKVSLCLVHDLRVELFNKLLVLPNRYFDNHNSGHLISRITFNVTMVTGAATDAIKVVIREGLTVVFLFAYLLWMNWHLTLVMVAILPVIAVMVSIASKKFRKQSKKIQVAMGDVTHVASETIQGYRVVRSFGGEAYEEQRFGKASQSNTDKQLRMTKTGSLYTPMLQLVIYSAMAALMFLVLFLRGESTAGDLVAYITAAGLLPKPIRQLSEVSSTIQKGLAGAESIFEQLDEEPELDTGTVEKERVEGRLEVRNLSFTYPGTEREVLSDISFVAEPGQMIALVGRSGSGKSTLAALIPRFYHHDQGQILLDGVEIENYRLRNLRRHVSQVTQHVTLFNDTVANNIAYGDLAGAPRADIEAAAADAYAKEFVDRLPKGFDTEVGENGVLLSGGQRQRLAIARALLKNAPLLILDEATSALDTESERHIQAALDHVMQGRTTLVIAHRLSTIEKADQILVMDQGRLVERGTHAELLAANGHYARLHAMGLDEPAKADIT

SEQ ID NO: 13516 - protein, 467 aa, Pseudomonas putida GB-1
MQQAQGLKRGLSARHIRFMALGSAIGTGLFYGSASAIQMAGPAVLLAYLIGGAAVFMVMRALGEMAVHNPVAGSFGHYASTYLGPMAGFILGWTYAFEMVIVAIADVTAFGIYMGFWFPEVARWIWVLGIVFIIGGLNLCNVKVFGEMEFWLSLLKVGAIVAMILAGLGIMAFGFSQVGTGHAVGMSNLFDHGGFMPNGIGGLIASFAVVMFAFGGIEIIGVTAGEAKDPQRVIPKAINAVPLRILLFYVLTLFVLMCLYPWPQIGSQGSPFVQIFSNLGIGSAAAVLNVVVISAAISAINSDIFGAGRMMYGLAHQGHAPRSFGKLSKHGVPWMTVVVMGAALLIGVLLNYLIPENVFLLIASIATFATVWVWLMILLTQVAMRRSMSREEVAQLKFPVPFWPYGPAMAIAFMVFIFGVLGYFPDTQAALIVGVIWVVFLVASYLLWCKPRAGQGQPAVEPAELHR

SEQ ID NO: 13517 - protein, 667 aa, Pseudomonas putida GB-1
MSSASLTKPPAERVRVNRVVFFTSALMILVLTALLIAVPETAGQVLGVAQKWLTRTFGWYYMLVICGYLLFVVYLAFSDYGSLKLGGKDDQPDFSYGAWAGMLFSSGIGISLLYFGASEPLDHYFNPPEGTPASLEAARQGLQLTFLHWGLHGWAIYALVGLAVGYFAYRHNQPLALRSALYPLVGERWVKGAAGNAVDIFGMFVTLLGLVTNLGIGSMQVSSGLEYLFGMDHSKTNLLVVILVMAGVATVAAVSGVENGIRRLSNLNIMLFSGLLIFVLLGGETLHLLNGFVQNVGDYLNGIVLKTFDLYVYEGEAGKSERWLGLWTVFYWAWWISWGPFVGMFIARISKGRTVRQLVMGVLLIPLGFTLAWLSIFGNTALDLVINQGAVELGKTALEQPSMSIYQLLEYFPAAKIVIGVAVFVGFVLFLTPADSGAVMMANLSCKGGKVDEDAPHWMVVFWSVVITLVTIGLLFAGNFEAMQTMVVLAGLPFSVVLVLFMFGLYKAMKQDVAVEQERAELAARGRRGFSERLSQLELQPTQAVVQRFMDKQVSPALKEAAAQLQTLGFEVETRVGQSRNMMGLRVMMEEGNPFVYEASLDGYLAAPSEAPVEGEPEVQQRFYRAEVYLHDGSQEYDLMGFTREQIVRDVLDQFESHRQLLGRVYS

SEQ ID NO: 13518 - protein, 1481 aa, Pseudomonas putida GB-1
MKTGLYHPEEFKDNCGFGLIAHMTGEPSHHLLQTAMQALTCMTHRGGINADGKTGDGCGLLMQKPDQFLRAVAQEHFAVELPKQYAVGMVFFNQDPVKAEAARANMDREILAAGLKLVGWRKVPIDTSVLGRLALERLPQIEQVFIGGEGLSDQEFAIKLFSARRRSSVANAHDSDHYICSFSHKTIIYKGLMMPRDLAAFYPDLGDERLQTAICVFHQRFSTNTLPKWPLAQPFRFLAHNGEINTITGNRNWAMARRTKFANDQIPDLEELGPLVNRVGSDSSSMDNMLELMVTGGIDLFRGVRMLVPPAWQNVETMDADLRAFYEYNSMHMEPWDGPAGIVMTEGRHAVCLLDRNGLRPARWVTTTNGYITIASEIGVWGYQPEEVLAKGRVGPGQILAVDTETGQILDTDAIDNRLKSRHPYKRWLRQHATRIQATLTDDQGVASYDADQLKQYMKMFQVTFEERDQVLRPLGEQGQEAVGSMGDDTPMAVLSQRVRSPYDFFRQQFAQVTNPPIDPLREAIVMSLEICLGAERNIFQESPEHASRVILSSPVISPAKWRSLMNLEREGFDRQLIDLNYEQGIGLEAAIRNIADQAEEAVRAGKTQLVLSDRYIAPGKLPVHASLAVGAVHHRLTEQGLRCDSNILVETATARDPHHFAVLLGFGASAVYPYLAYEVLADLIRTGEVLGDLDEVFKYYRKGISKGLLKILSKMGISTIASYRGAQLFEAIGLAEEVVGLSFKGVSSRIKGARFVDLESDQKLLAAEAWSARKPIQQGGLLKFVHGGEYHAYNPDVVNTLQAAVQQGDYAKFKEYTTLVDQRPVSMIRDLLKVKVADQPLALEQIEPLEAILKRFDSAGISLGALSPEAHEALAEAMNRLGARSNSGEGGEDPSRYGTIKSSKIKQVATGRFGVTPEYLVNAEVLQIKVAQGAKPGEGGQLPGGKVNGLIAKLRYAVPGVTLISPPPHHDIYSIEDLAQLIYDLKQVNPQALVSVKLVAEAGVGTIAAGVAKAYADLITISGYDGGTGASPLTSIKYAGAPWELGLAETHQTLRGNDLRGKVRVQTDGGLKTGLDVIKAAILGAESFGFGTAPMIALGCKYLRICHLNNCATGVATQNDKLRKDHYIGTVDMVINFFTFVAEETREWLAKLGVRSLGELIGRTDLLDVLPGDTERQQYLDLSPLLGSSHIPADKPQFCEVDKNPPFDKGELAEKMVEMALPAIRDQAGGEFDLDICNCDRSIGARISGEIAKLYGNQGMAANPITFRFKGTAGQSFGVWNAGGLNLHLQGDANDYVGKGMTGGKVTIVPPAGSPFETQHSAIVGNTCLYGATGGKLFAAGTAGERFAVRNSGAHAVVEGTGDHCCEYMTGGFVCVLGKTGYNFGSGMTGGFAYVLDMDNTFVDKLNHELVEIQRISGEAMEAYRSHLARVLAEYVEETGSEWGRELSENLDDYVRRFWLVKPKAANLKQLLSSTRANPQ

SEQ ID NO: 13519 - protein, 409 aa, Pseudomonas putida GB-1
MSKTSLDKSKIRFLLLEGVHQNAVDTLKAAGYTNIEYLTGSLPEAELKEKIADAHFIGIRSRTQLTEEIFDCAKKLVAVGCFCIGTNQVDLEAARQRGIAVFNAPYSNTRSVAELVLAEAILLLRGIPEKNASCHRGGWIKSAANSFEIRGKKLGIVGYGSIGTQLSVLAENLGMQVYFYDPLTKLPLGNAVQVTSLNELLGLADIVSLHVPELPSTQWMIGEKEIRAMKKGAILINAARGTVVELDHLAAAIKDKHLIGAAIDVFPIEPRSNDEEFESPLRGLDNVILTPHIGGSTAEAQANIGLEVAEKLVKYSDNGTSVSSVNFPEVALPAHPGKHRLLHIHENIPGVLSEINKVFAENGINISGQFLQTNEKVGYVVIDVDAEYSDLAQEKLQQVKGTIRSRVLF

SEQ ID NO: 13520 - protein, 290 aa, Pseudomonas putida GB-1
MKTANFTKLLAPLFGLALLAGCNKADEPPKPAAASPATSYLETIKARDKLIVGVFTDKPPFGFVDEKGRYVGFDTDIGRRLAKDLLGDENKVEFVAVEPASRIPFLQSDKVDLILANMTVTPERKEAVDFTNPNLRVAVQAIVADGSPVQKLDDLADKTIIVTTGTTADIWLTKNHPDWKLLKFEKNSESLQALATGRGDAYAQDNLILFSWAKQNPGYRVLPELLGDEAPIAPAVKKGNTELRDWVNAELAKLGEEKFLLKLYDQYVRKELSDDTKPESVIVEGGKWQG

SEQ ID NO: 13521 - protein, 560 aa, Pseudomonas putida GB-1
MDIKRTILIAALAVVSYVMVLKWNDDYGQAALPTQNTAASTVAPGLPDGVPAGNNGASADVPSANAESSPAELAPVALSKDLIRVKTDVLELAIDPVGGDIVQLNLPKYPRRQDHPDIPFQLFDNGGERVYLAQSGLTGANGPDARASGRPLYAAEQKSYQLADGQEQLVVDLKFSDNGVNYIKRFSFKRGEYDLNVSYLIDNQSGQAWSGNMFAQLKRDASGDPSSSTATGTATYLGAALWTASEPYKKVSMKDIDKGGLKENVSGGWVAWLQHYFVTAWIPAKSDNNVVQTRKDSQGNYIIGYTGPVISVPAGGKVETSAMLYAGPKIQSKLKELSPGLELTVDYGFLWFIAQPIFWLLQHIHSLLGNWGWSIIVLTMLIKGLFFPLSAASYRSMARMRAVAPKLAALKERFGDDRQKMSQAMMELYKKEKINPLGGCLPILVQMPVFLALYWVLLESVEMRQAPWMLWITDLSIKDPFFILPIIMGATMFIQQRLNPTPPDPMQAKVMKMMPIIFTFFFLWFPAGLVLYWVVNNCLSISQQWYITRRIEAATKKAAA

SEQ ID NO: 13522 - protein, 599 aa, Brassica napus
MSHLLPLKKPTRTRLSSPATLPDEPRKGADILVEALERQGVETVFAYPGGASMEIHQALTRSSTIRNVLPRHEQGGVFAAEGYARSSGKPGICIATSGPGATNLVSGLADAMLDSVPLVAITGQVPRRMIGTDAFQETPIVEVTRSITKHNYLVMDVDDIPRIVQEAFFLATSGRPGPVLVDVPKDIQQQLAIPNWDQPMRLPGYMSRLPQPPEVSQLGQIVRLISESKRPVLYVGGGSLNSSEELGRFVELTGIPVASTLMGLGSYPCNDELSLQMLGMHGTVYANYAVEHSDLLLAFGVRFDDRVTGKLEAFASRAKIVHIDIDSAEIGKNKTPHVSVCGDVKLALQGMNKVLENRAEELKLDFGVWRSELSEQKQKFPLSFKTFGEAIPPQYAIQILDELTEGKAIISTGVGQHQMWAAQFYKYRKPRQWLSSSGLGAMGFGLPAAIGASVANPDAIVVDIDGDGSFIMNVQELATIRVENLPVKILLLNNQHLGMVMQWEDRFYKANRAHTYLGDPARENEIFPNMLQFAGACGIPAARVTKKEELREAIQTMLDTPGPYLLDVICPHQEHVLPMIPSGGTFKDVITEGDGRTKY

SEQ ID NO: 13523 - protein, 605 aa, Prunus armeniaca
MDTKIGALDVCKPASNEVGSLPNGTAMAIQNSVPSTVINSSEATLGRHLARRLVQIGVTDVFTVPGDFNLTLLDHLIAEPGLTNIGCCNELNAGYAADGYARSRGVGACVVTFTVGGLSVLNAIAGAYSENLPLICIVGGPNSNDYGTSRILHHTIGLPDFSQELRCFQTVTCYQAVVNNLEDAHESIDTAISTALKESKPVYISISCNLAGIPHPTFSREPVPFSLSPRLSNQWGLEAAVEAAAEFLNKAVKPVMVGGPKLRVAHAGEAFVELADTSGYALAVMPSAKGLVPEHHPHFIGTYWGAVSTAFCAEIVESADAYLFAGPIFNDYSSVGYSLLLKKEKAIIVQPDRVTIANGPSFGCVLMKDFLRALAKKLNHNNTAHENYRRIFVPDGHPLKCAPREPLRVNVLFQHVQKMLSSETAVIAETGDSWFNCQKLRLPAGCGYEFQMQYGSIGWSVGATLGYAQAVPEKRVLAFIGDGSFQVTAQDVSTMIRNGQRTIIFLINNGGYTIEVEIHDGPYNVIKNWNYTGLVDAIHNGEGKCWTTKVRYEEELIEAIETATGDKKDSLCFIEVIVHKDDTSKELLEWGSRVSAANSRPPNPQ

SEQ ID NO: 13524 - protein, 1121 aa, Ceratodon purpureus
MSAPKKTYSSTTSAKSKHSVRVAQTTADAALEAVYEMSGDSGDSFDYSKSVGQSAESVPAGAVTAYLQRMQRGGLIQTFGCMVAVEEPNFCVIAYSENASEFLDLMPQAVPSMGEMDVLGIGTDIRTLFTPSSGAALEKAAATQDISLLNPITVHCRRSGKPLYAIAHRIDIGIVIDFEAVKMNDVSVSAAGALQSHKLAAKAITRLQALPGGDIGLLCDTVVEEVRELTGYDRVMAYKFHEDEHGEVVAEIRRMDLEPYLGLHYPATDIPQASRFLFMKNRVRVIADCCASPVKLIQDPDIKQPVSLAGSTLRAPHGCHAQYMGNMGSIASLVMAVIINDNEEDSRGAIQRGRKLWGLVVCHHTSPRTVPFPLRSACEFLMQVFGMQLNMEVELAAQLREKHILRTQTLLCDMLLRDAPIGIVSQTPNIMDLVKCDGAALYYGKRFWLLGTTPTENQIKDIAEWLLEYHKDSTGLSTDSLADRNYPGAHLLGDAVCGMAAAKITAKDFLFWFRSHTAKEVKWGGAKHDPAEKDDGRKMHPRSSFKAFLEVVKRRSLPWEDVEMDAIHSLQLILRGSFQDIDDSDTKTMIHARLNDLKLHGMDELSVVANEMVRLIETATAPILAVDSTGMINGWNAKIAHVTGLPVSEAMGRSLVKDLVLDESVVVVERLLYLASQGEEEQNVEIKLKTFGTQTEKEAVILIVNACSSRDVSDSVVGVCFVGQDVTGQKMFMDKFTRIQGDYKTIVKNPHPLIPPIFGGDEYGYCFEWNPAMEALTGWKHDELVGKLLVGEIFGMEMMCCRLKSQDSMTKFMISLNNAMDGTNTDKFSFSFCNREGKFVEALLSTNKRTNADGVITGVFCFLQIASSELQQALTVQRATEKVAIAKLKELAYIRQEIKNPLCGITFTRQLLEDTDLSDDQKQFLDTSAVCEQQLQKVLNDMDLESIEDGYLELDTAEFEMGTVMDAVISQGMTTSREKGLQIIRETPREISTMRLFGDQIRLQQVLSDFLINAIRFTPSSEGWVKIKVVPTRKRLGGNVHVMHLEFRVSHPGGGLPDELVLEMYDRGKGMTQEGLGLNMCRKLVRLMNGDVQYVRENAQCYFVVYVELPMAQRDDAASQM

SEQ ID NO: 13525 - protein, 172 aa, Bradyrhizobium yuanmingense
WGFDGSSTQQAEGHSSDCVLKPVAVFPDGARTNGVLVMCEVMMPDGKTPHASNKRATILDDAGAWFGFEQEYFFYKNGRPLGFPESGYPAPQGPYYTGVGYSNVGDVARKIVEEHLDLCLAAGINHEGINAEVAKGQWEFQIFGKGSKKAADEMWMARYLMLRLTEKYGIDI

SEQ ID NO: 13526 - protein, 172 aa, Bradyrhizobium elkanii
WGFDGSSTQQAEGHSSDCVLKPVACYPDAARENGVLVMCEVMMPDGKTPHPSNKRATILDDDGAWFGFEQEYFFYKDGRPLGFPEEGYPAPQGPYYTGVGYKNVGSVARKIVEEHLNLCLAAGINHEGINAEVAKGQWEFQIFGKGSKTAADQMWMARYLMLRLTESYGIDI

SEQ ID NO: 13527 - protein, 172 aa, Bradyrhizobium liaoningense
WGFDGSSTQQAEGHSSDCVLKPVAVFPDGARINGVLVMCEVMMPDGKTPHPSNKRATILDDAGAWFGFEQEYFFYKDGRPLGFPEYGYPAPQGPYYTGVGYKFVGDVARKIVEEHLDLCLAAGINHEGINAEVAKGQWEFQIFGKGSKKAADEMWMARYLMLRLTEKYGIDI

SEQ ID NO: 13528 - protein, 172 aa, Bradyrhizobium yuanmingense
WGFDGSSTQQAEGHSSDCVLKPVAVFPDGARTNGVLVMCEVMMPDGKTPHASNKRATILDDAGAWFGFEQEYFFYKDGRPLGFPTSGYPAPQGPYYTGVGFSNVGDVARKIVEEHLDLCLAAGINHEGINAEVAKGQWEFQIFGKGSKTAADQMWMARYLMLRLTEKYGIDI

SEQ ID NO: 13529 - protein, 172 aa, Bradyrhizobium yuanmingense
WGFDGSSTQQAEGHSSDCVLKPVAVFPDGARTNGVLVMCEVMMPDGKTPHPSNKRATILDDSGAWFGFEQEYFFYKNGRPLGFPESGYPAPQGPYYTGVGYSNVGDVARKIVEEHLDLCLAAGINHEGINAEVAKGQWEFQIFGKGSKTAADQMWMARYLMLRLTEKYGIDI

SEQ ID NO: 13530 - protein, 172 aa, Bradyrhizobium japonicum
WGFDGSSTQQAEGHSSDCVLKPVAVFPDAARTNGVLVMCEVMMPDGKTPHASNKRATILDDAGAWFGFEQEYFFYKDGRPLGFPSSGYPAPQGPYYTGVGFSNVGDVARKIVEEHLDLCLAAGINHEGINAEVAKGQWEFQIFGKGSKKAADEMWMARYLMLRLTEKYGIDI

SEQ ID NO: 13531 - protein, 440 aa, Chlamydophila pneumoniae AR39
MSKIVYKFGGTSLATAENICLVCDIICKDKPSFVVVSAIAGVTDLLVDFCSSSLREREEVLRKIEGKHEEIVKNLAIPFPVSTWTSRLLPYLQHLEISDLDFARILSLGEDISASLVRAVCSTRGWDLGFLEARSVILTDDSYRSASPNLDLMKAHWHQLELNQPSYIIQGFIGSNGLGETVLLGRGGSDYSATLIAELARATEVRIYTDVNGIYTMDPKVISDAQRIPELSFEEMQNLASFGAKVLYPPMLFPCMRAGIPIFVTSTFDPEKGGTWVYAVDKSVSYEPRIKALSLSQYQSFCSVDYTVLGCGGLEEILGILESHGIDPELMIAQNNVVGFVMDDDIISQEAQEHLVDVLSLSSVTRLHHSVALITMIGDNLSSPKVVSTITEKLRGFQGPVFCFCQSSMALSFVVASELAEGIIEELHNDYVKQKAIVAT

SEQ ID NO: 13532 - protein, 872 aa, Chlamydophila pneumoniae AR39
MLGVNFMEKFSDAVSEALEKAFELAKSSKHTYVTENHLLLALLENTESLFYLVIKDIHGNPGLLNTAVKDALSREPTVVEGEVDPKPSPGLQTLLRDAKQEAKTLGDEYISGDHLLLAFWSSNKEPFNSWKQTTKVSFKDLKNLITKIRRGNRMDSPSAESNFQGLEKYCKNLTALAREGKLDPVIGRDEEIRRTIQVLSRRTKNNPMLIGEPGVGKTAIAEGLALRLIQGDVPESLKGKQLYVLDMGALIAGAKYRGEFEERLKSVLKDVESGDGEHIIFIDEVHTLVGAGATDGAMDAANLLKPALARGTLHCIGATTLNEYQKYIEKDAALERRFQPIFVTEPSLEDAVFILRGLREKYEIFHGVRITEGALNAAVLLSYRYIPDRFLPDKAIDLIDEAASLIRMQIGSLPLPIDEKERELAALIVKQEAIKREQSPSYQEEADAMQKSIDALREELASLRLGWDEEKKLISGLKEKKNSLESMKFSEEEAERVADYNRVAELRYSLIPQLEEEIKQDEASLNQRDNRLLQEEVDERLIAQVVANWTGIPVQKMLEGEAEKLLILEESLEERVVGQPFAVSAVSDSIRAARVGLNDPQRPLGVFLFLGPTGVGKTELAKALADLLFNKEEAMVRFDMSEYMEKHSISKLIGSSPGYVGYEEGGSLSEALRRRPYSVVLFDEIEKADKEVLNILLQVFDDGILTDGKKRKVNCKNALFIMTSNIGSPELADYCSKKGSELTKEAILSVVSPVLKRYLSPEFMNRIDEILPFVPLTKEDIVKIVGIQMRRIAQRLKARRINLSWDDSVILFLSEQGYDSAFGARPLKRLIQQKVVILLSKALLKGDIKPDTSIELTMAKEVLVFKKVETPS

SEQ ID NO: 13533 - protein, 278 aa, Salmonella enterica subsp. enterica serovar Typhimurium
MKKNRAFLKWAGGKYPLLDDIKRHLPKGECLVEPFVGAGSVFLNTDFSRYILADINSDLISLYNIVKLRTDEYVQASRELFMPETNQAEVYYQLREEFNTCQDPFRRAVLFLYLNRYGYNGLCRYNLRGEFNVPFGRYKRPYFPEAELYHFAEKAQNAFFYCESYADSMARADKSSVVYCDPPYAPLSATANFTAYHTNSFSLTQQAHLAEIAENLVSNRIPVLISNHDTALTREWYQLAKLHVVKVRPSISSNGGTRKKVDELLALYQPGVATPARK

SEQ ID NO: 13534 - protein, 206 aa, Listeria monocytogenes
  misc_feature (193)..(193): Xaa can be any naturally occurring amino acid
  unsure (1)..(206): unsure at all Xaa locations
GEIQINIEESIRGCHVYVIQSTSNPVNQNLMELLIMIDALKRASAATINIVMPYYGYARQDRKARSREPITAKLVANLIETAGATRMITLDMHAPQIQGFFDIPIDHLNAVRLLSDYFSERHLGDDLVVVSPDHGGVTRARKMADRLKAPIAIIDKRRPRPNVAEVMNIVGNVEGKVCIIIDDIIDTAGTITXAAKALREAGATKV

SEQ ID NO: 13535 - protein, 206 aa, Listeria monocytogenes
  misc_feature (12)..(12): Xaa can be any naturally occurring amino acid
  unsure (1)..(206): unsure at all Xaa locations
GEIQINIEESIXGCHVYVIQSTSNPVNQNLMELLIMIDALKRASAATINIVMPYYGYARQDRKARSREPITAKLVANLIETAGATRMITLDMHAPQIQGFFDIPIDHLNAVRLLSDYFSERHLGDDLVVVSPDHGGVTRARKMADRLKAPIAIIDKRRPRPNVAEVMNIVGNVEGKVCIIIDDIIDTAGTITLAAKALREAGATKV

SEQ ID NO: 13536 - protein, 638 aa, Salmonella enterica subsp. enterica serovar Typhi str. CT18
MGKIIGIDLGTTNSCVAIMDGTQARVLENAEGDRTTPSIIAYTQDGETLVGQPAKRQAVTNPQNTLFAIKRLIGRRFQDEEVQRDVSIMPYKIIGADNGDAWLDVKGQKMAPPQISAEVLKKMKKTAEDYLGEPVTEAVITVPAYFNDAQRQATKDAGRIAGLEVKRIINEPTAAALAYGLDKEVGNRTIAVYDLGGGTFDISIIEIDEVDGEKTFEVLATNGDTHLGGEDFDTRLINYLVDEFKKDQGIDLRNDPLAMQRLKEAAEKAKIELSSAQQTDVNLPYITADATGPKHMNIKVTRAKLESLVEDLVNRSIEPLKVALQDAGLSVSDINDVILVGGQTRMPMVQKKVAEFFGKEPRKDVNPDEAVAIGAAVQGGVLTGDVKDVLLLDVTPLSLGIETMGGVMTPLITKNTTIPTKHSQVFSTAEDNQSAVTIHVLQGERKRASDNKSLGQFNLDGINPAPRGMPQIEVTFDIDADGILHVSAKDKNSGKEQKITIKASSGLNEEEIQKMVRDAEANAESDRKFEELVQTRNQGDHLLHSTRKQVEEAGDKLPADDKTAIESALSALETALKGEDKAAIEAKMQELAQVSQKLMEIAQQQHAQQQAGSADASANNAKDDDVVDAEFEEVKDKK

SEQ ID NO: 13537 - protein, 505 aa, Salmonella enterica subsp. enterica serovar Typhi str. CT18
MKNEKRKSGIEPKVFFPLLIIVGILCWLTVRDLDAANVVINAVFSYVTNVWGWAFEWYMVVMLFSWFWLVFGPYAKKRLGDEKPEFSTASWIFMMFASCTSAAVLFWGSIEIYYYISTPPFGLEPNSTGAKEIGLAYSLFHWGPLPWATYSFLSVAFAYFFFVRKMDVIRPSSTLVPLVGEKHAKGLFSTIVDNFYLVALIFAMGTSLGLATPLVTECMQWLFGIPHTLQLDAIIITCWIILNAICVACGLQKGVRIASDVRSYLSFLMLGWVFIVSGASFIMNYFTDSVGMLLMHLPRMLFYTDAIGKGGFPQGWTVFYWAWWVIYAIQMSIFLARISRGRTVRELCFGMVMGLTASTWILWTVLGSNTLLLMDKNILNIPQLIEQHGVARAIIETWAALPLSTATMWGFFILCFIATVTLINACSYTLAMSTCREVRDGEEPPLLVRIGWSVLVGIIGIVLLALGGLKPIQTAIIAGGCPLFFVNIMVTLSFIKDAKVHWKDK

SEQ ID NO: 13538 - protein, 574 aa, Salmonella enterica subsp. enterica serovar Typhi str. CT18
MEMLSGAEMVVRSLIDQGVKQVFGYPGGAVLDIYDALHTVGGIDHVLVRHEQAAVHMADGLARATGDVGVVLVTSGPGATNAITGIATAYMDSIPLVILSGQVATSLIGYDAFQECDMVGISRPVVKHSFLVKQTEDIPLVLKKAFWLAASGRPGPVVVDLPKDILNPAKKMPYVWPETVSMRSYNPTTSGHKGQIKRALQTLASAKKPVVYVGGGAISAACYAPLRHIIETFNLPVVSSLMGLGAFPATHRQSLGMLGMHGTYEANMTMHNADVIFAVGVRFDDRTTNNLAKYCPNATVLHIDIDPTSISKTVNADIPVVGDARLVLEQMLELLAQDAPSQPQDDIRDWWQQIESWRARQCLKYDAESESIKPQAVIETLWRLTKGDAYVTSDVGQHQMFAALYYPFDKPRRWINSGGLGTMGFGLPAALGVKMALPKEMVVCVTGDGSIQMNIQELSTALQYELPVLVLNLNNRYLGMVKQWQDMIYSGRHSQSYMQSLPDFVRLAEAYGHVGLQINRPDELESKLSEALEHVRNNRLVFVDVTVDGSEHVYPMQIRGGGMDEMWLSKTERT

SEQ ID NO: 13539 - protein, 126 aa, Salmonella enterica subsp. enterica serovar Typhi str. CT18
MIRTMLQGKLHRVKVTQADLHYEGSCAIDQDFLDASGILENEAIDIWNVTNGKRFSTYAIAAERGSRIISVNGAAAHCAEVGDIVIIASFVTMSDEEARTWRPKVAYFEGDNEMKRTAKAIPVQVA

SEQ ID NO: 13540 - protein, 713 aa, Salmonella enterica subsp. enterica serovar Typhi str. CT18
MNIIAIMGPHGVYYKDEPIKELERALQSLGFQIIWPQNSVDLLKFIEHNPRICGVIFDWDEYSLDLCSEINQLNEYLPLYAFINTNSTLDVSVHDMRMALWFFEYALGLAEDIATRIHQYTNEYLDNITPPFTKALFTYAKEGKYTFCTPGHMAGTVYQKSPPGCLFYDFFGGNTLKADVSISVTELGSLLDHTGPHLEAEEYIARTFGAEQSYMVTNGTSTSNKIVGMYAAPAGSTLLIDRNCHKSLAHLLMMSDVVPLWLKPTRNALGILGGIPKREFTRDSIARKVAETAQAQWPVHAVITNSTYDGLLYNTNWIKQMLDVPSIHFDSAWVPYTHFHPIYQGKSGMSGDRVPGKVIFETQSTHKMLAAFSQASLIHIKGEYDEETFNEAFMMHTSTSPSYPIVASIETAAAMLRGNPGKRLINRSVERALHFRKEVQRLREESDSWFFDIWQPEEVDEAECWPVTPGETWHGFTDADDDHMFLDPVKVTILTPGMDEQGNMSEEGIPAALVAKFLDERGVVVEKTGPYNLLFLFSIGIDKTRAMGLLRGLTEFKRAYDLNLRVKNMLPDLYAEDPDFYRNMRIQDLAQGIHKLIRQHDLPELMLRAFEVLPEMIMTPHQAWQRQIKGEVETVALDQLPGRVSANMILPYPPGVPLLMPGERITQQSRAVLDFLLMLCSIGQHYPGFETDIHGAKRNEDGVYQVRVLKHAC

SEQ ID NO: 13541 - protein, 188 aa, Salmonella enterica subsp. enterica serovar Typhi str. CT18
MAKSVPAIFLDRDGTINVDHGYVHEIDAFEFIDGVIDAMRELKKMGYALVVVTNQSGIARGKFTEAQFETLTEWMDWSLADRDVDLDGIYYCPHHPQGSIEEFRQVCDCRKPHPGMLISARDFLHIDMAASYMVGDKLEDMQAAAAANVGTKVLVRTGKPVTAEAENAADWVLNSLADLPSAIKKQQK

SEQ ID NO: 13542 - protein, 456 aa, Salmonella enterica subsp. enterica serovar Typhi str. CT18
MESNNKLKRGLSTRHIRFMALGSAIGTGLFYGSADAIKMAGPSVLLAYIIGGVAAYIIMRALGEMSVHNPAASSFSRYAQENLGPLAGYITGWTYCFEILIVAIADVTAFGIYMGVWFPAVPHWIWVLSVVLIICAINLMSVKMFGELEFWFSFFKVATIIIMIVAGIGIIVWGIGNGGQPTGIHNLWSNGGFFSNGWLGMIMSLQMVMFAYGGIEIIGITAGEAKDPEKSIPRAINSVPMRILVFYVGTLFVIMSIYPWNQVGTNGSPFVLTFQHMGITFAASILNFVVLTASLSAINSDVFGVGRMLHGMAEQGSAPKVFAKTSRRGIPWVTVLVMTIALLFAVYLNYIMPENVFLVIASLVTFATVWVWIMILLSQIAFRRRLPPEEVKALKFKVPGGVVTTIAGLIFLVFIIALIGYHPNTRISLYVGFAWIVLLLIGWIFKRRRDRQLAQA

SEQ ID NO: 13543 - protein, 292 aa, Salmonella enterica subsp. enterica serovar Typhi str. CT18
MKLGFIGLGIMGSPMAINLARAGHQLHVTTIGPVADELLSLGAVNVETARQVTEFADIIFIMVPDTPQVEEVLFGEHGCAKTSLQGKTIVDMSSISPIGTKRFAQRVNEMDADYLDAPVSGGEIGAREGTLSIMVGGEQKVFDRVKPLFDILGKNITLVGGNGDGQTCKVANQIIVALNIEAVSEALVFASKAGADPVRVRQALMGGFASSRILEVHGERMINRTFEPGFKIALHQKDLNLALQSAKALALNLPNTATCQELFNTCAANGGSQLDHSAMVQALELMANHKLS

SEQ ID NO: 13544 - protein, 464 aa, Salmonella enterica subsp. enterica serovar Typhi str. CT18
MKNASTASGASVSDAASKNEPTLQRGLQNRHIQLIALGGAIGTGLFLGIGPAIQMAGPAVLLGYGVAGIIAFLIMRQLGEMVVEEPVSGSFAHFAWKYWGPFAGFLSGWNYWVMFVLVGMAELTAAGIYMQYWLPDVPTWVWAAVFFIIINAVNLVNVRLYGETEFWFALIKVLAIIGMIGFGLWLLFSGHGGEHASIDNLWRYNGFFATGWHGLLLSLAVIMFSFGGLELIGITAAEARDPQKSIPKAVNQVVYRILLFYIGSLVVLLALYPWVEVKSNSSPFVMIFHNLDSNVVASALNFVILVASLSVYNSGVYSNSRMLFGLSVQGNAPKFLTRVSHRGVPVNSLMLSGAITSLVVLINYLLPQKAFSLLMALVVATLLLNWIMICLAHLRFRAAMRRKGRETQFKALFYPAGNYLCIAFLALILVLMCTMDDMRLSAILLPVWIVFLFIAFTVLRRKAH

SEQ ID NO: 13545 - protein, 362 aa, Salmonella enterica subsp. enterica serovar Typhi str. CT18
MNHTEIRVVTGPANYFSHAGSLERLTDFFTPEQLSHAVWVYGERAIAAARPYLPEAFERAGAKHLQFTGHCSERHVAQLAHACNDDRQVVIGVGGGALLDTAKAHARRLALPFVAIPTIAATCAAWTPLSVWYNDAGQALQFEIFDDANFLVLVEPRIILQAPDDYLLAGIGDTLAKWYEAVVLAPQPETLPLTVRLGINSACAIRDLLLTSSEQALADKQQRRLTQAFCDVVDAIIAGGGMVGGLGERYTRVAAAHAVHNGLTVLPQTEKFLHGTKVAYGILVQSALLGQDDVLAQLITAYRRFHLPTRLSELDVDIHNTAEIDRVIAHTLRPVESIHYLPVTLTPDTLRAAFEKVEFFRI

SEQ ID NO: 13546 - protein, 386 aa, Salmonella enterica subsp. enterica serovar Typhi str. CT18
MRNNPLIPKSKLPNLGTTIFTQMSALAQKHQAINLSQGFPDFDGPSYLHERLAYHVAQGANQYAPMTGAQALREAIADKTAEIYGYRPDDVSDITVTAGATEALYAAITALVRAGDEVICFDPSYDSYAPAVALSGGVLKRIALTPPHFRVDWQAFSALLSERTRLVILNTPHNPTATVWRQADIEALWQAIGEREIYVLSDEVYEHICFAAEGHASVLAHPQLRERAVAVSSFGKTFHMTGWKIGYCVAPAAISAEIRKVHQYLTFCVNTPAQLALADMLRAAPEHYRALPDFYRKKRDVLVNALAQSRLKVLPCEGTYFLLIDYSAVSTLNDVEFCQWLTEEVGVAAIPLSVFCAAPFPHQLIRLCFAKQESTLLAAAERLCKL

SEQ ID NO: 13547 - protein, 554 aa, Salmonella enterica subsp. enterica serovar Typhi str. CT18
MCSIFGVFDIKTDAAELRKKALELSRLMRHRGPDWSGIYACDNAILAHERLSIVDVNAGAQPLYNAKKTHVLAVNGEIYNHQTLRAEYGDRYAFQTGSDCEVILALYQEKGPDFLDDLQGMFAFALYDSEKDAYLIGRDHIGIIPLYMGYDEFGNFYVASEMKALTPVCRTIKEFPAGSYLWSKDGEIRQYYQRDWFDYDAVKDNVTDKNALRQALEESVKSHLMSDVPYGVLLSGGLDSSVISAITKKFAARRVEDQERSEAWWPQLHSFAVGLEGSPDLKAAQEVANHLGTVHHEIHFTVQEGLDAIRDVIYHIETYDVTTIRASTPMYLMSRKIKAMGIKMVLSGEGSDEVFGGYLYFHKAPNAKELHEETVRKLQALHMYDCTRANKAMSAWGVEARVPFLDKKFLDVAMRINPQDKMCGNGKMEKHVLRECFESYLPASVAWRQKEQFSDGVGYSWIDTLKEVAAKQISDQQLETARFRFPYNTPSSKEAYLYREIFEELFPVPSAAECVPGGPSVACSSAKAIEWDEAFKTMDDPSGRAVGVHQSAYQ

SEQ ID NO: 13548 - protein, 555 aa, Salmonella enterica subsp. enterica serovar Typhi str. CT18
MSEAEARPTNFIRQIIDEDLASGKHTTVHTRFPPEPNGYLHIGHAKSICLNFGIAQDYQGQCNLRFDDTNPVKEDIEYVDSIKNDVEWLGFHWSGDIRYSSDYFDQLHAYAVELINKGLAYVDELTPEQIREYRGTLTAPGKNSPFRDRSVEENLALFEKMRTGGFEEGKACLRAKIDMASPFIVMRDPVLYRIKFAEHHQTGTKWCIYPMYDFTHCISDALEGITHSLCTLEFQDNRRLYDWVLDNITIPVHPRQYEFSRLNLEYTVMSKRKLNLLVTDKHVEGWDDPRMPTISGLRRRGYTAASIREFCKRIGVTKQDNTIEMASLESCIREDLNENAPRAMAVIDPVKLVIENYPQGESEMVTMPNHPNKPEMGSREVPFSGEIWIDRADFREEANKQYKRLVMGKEVRLRNAYVIKAERVEKDAEGNITTIFCTYDADTLSKDPADGRKVKGVIHWVSVAHALPIEIRLYDRLFSVPNPGAAEDFLSVINPESLVIKQGYGEPSLKAAVAGKAFQFEREGYFCLDSRYATADKLVFNRTVGLRDTWAKAGE

SEQ ID NO: 13549 - protein, 455 aa, Salmonella enterica subsp. enterica serovar Typhi str. CT18
MSFDSLGLNPDILRAIAEQGYREPTPIQQQAIPAVLEGRDLMASAQTGTGKTAGFTLPLLQHLITHQPHAKGRRPVRALILTPTRELAAQIGENVRDYSKYLNIRSLVVFGGVSINPQMMKLRGGVDVLVATPGRLLDLEHQNAVKLDQIEILVLDEADRMLDMGFIHDIRRVLAKLPAKRQNLLFSATFSDDIKALAEKLLRNPLEIEVARRNTASEQVTQHVHFVDKKRKRELLSQMIGQGNWQQVLVFTRTKHGANHLAEQLNKDGIRSAAIHGNKSQGARTRALADFKSGDIRVLVATDIAARGLDIEELPHVVNYELPNVPEDYVHRIGRTGRAAATGEALSLVCVDEHKLLRDIEKLLKKEIPRITTPGYEPDPSIKAEPIQNGRQQRGGGGGGRGRGQNQGGAGRSQQPRRQDSGAAKAKPKPRTGEGKPAGDKARPPRRPRRITPAQ

SEQ ID NO: 13550 - protein, 285 aa, Salmonella enterica subsp. enterica serovar Typhi str. CT18
MKADNPFDLLLPAAMAKVAEEAGVYKATKHPLKTFYLAITAGVFISIAFVFYITATTGTGAMPYGMAKLIGGICFSLGLILCVICGADLFTSTVLIVVAKASGRITWGQLAKNWLNVYFGNLIGALLFVLLMWLSGEYMTANGQWGLNVLQTADHKMHHTFIEAVCLGILANLMVCLAVWMSYSGRSLMDKAFIMVLPVAMFVASGFEHSIANMFMIPMGIVIRDFATPEFWTAVGSSPESFSHLTVMSFITDNLIPVTIGNIIGGGLLVGLTYWVIYLRGNEHH

SEQ ID NO: 13551 - protein, 582 aa, Salmonella enterica subsp. enterica serovar Typhi str. CT18
MHNDKDLSTWQTFRRLWPTIAPFKAGLIVAGIALILNAASDTFMLSLLKPLLDDGFGKTDRSVLLWMPLVVIGLMILRGITSYISSYCISWVSGKVVMTMRRRLFGHMMGMPVAFFDKQSTGTLLSRITYDSEQVASSSSGALITVVREGASIIGLFIMMFYYSWQLSIILVVLAPIVSIAIRVVSKRFRSISKNMQNTMGQVTTSAEQMLKGHKEVLIFGGQEVETKRFDKVSNKMRLQGMKMVSASSISDPIIQLIASLALAFVLYAASFPSVMDSLTAGTITVVFSSMIALMRPLKSLTNVNAQFQRGMAACQTLFAILDSEQEKDEGKRVIDRATGDLEFRNVTFTYPGREVPALRNINLKIPAGKTVALVGRSGSGKSTIASLITRFYDIDEGHILMDGHDLREYTLASLRNQVALVSQNVHLFNDTVANNIAYARTEEYSREQIEEAARMAYAMDFINKMDNGLDTIIGENGVLLSGGQRQRIAIARALLRDSPILILDEATSALDTESERAIQAALDELQKNRTSLVIAHRLSTIEQADEIVVVEDGIIVERGTHSELLAQHGVYAQLHKMQFGQ

SEQ ID NO: 13552 - protein, 293 aa, Salmonella enterica subsp. enterica serovar Typhi str. CT18
MRYGSVCSGTAAMPIEEPALRTWRRPFLKWAGGKYSLLPELDRLIPAGKRLIEPFVGGGSVFLNSDKHERFLLADVNADLINLYQMLAVVPDSVIAEAMKAFRHLNDAENYTVIREAFNAQKLNATERAAAFLYLNRHCFNGLMRYNLDGFFNVGWGKYKAPYFPEEEIRAFRQKSHACVFMTAGFERTLRLAGDGDVVYCDPPYEPMPGTAGFTNYASGGFSWDSQVALAESCVAAHQRGAKVFISNSTAPRVIELYERHGFTLHRVNARRSISSKGSTRETANDIVASLGI

SEQ ID NO: 13553 - protein, 107 aa, Hevea brasiliensis
MAMTKAKELVSSNSVVVFSKTYCPYCTSVKKLLDELGANYKTVELDTEGDGSQVQSALAEWTGQRSVPNVFISGKHIGGCDTTTGMHKEGKLIPLLTEAGALAKASA

SEQ ID NO: 13554 - protein, 234 aa, Coffea canephora
MDYSSFPQHSFAEFSPESSASSSMYCYNSQHCQSSLPFNENDSQEMLLARVISEAAGSGNSMDAPSSSRIKEEEECTQQNDYDEPMNQVNYRGVRRRPWGKYAAEIRDSTRNGVRVWIGTFDSAEEAALVYDQAAFALRGHAAVLNFPVEVVYESLKQMQYGFEEGCSPVLVMKKRHSMNRRNALSKKRSQVLMGLDDDNNNNVLVLEDLGTDYLEELLGASESTSSSCPWRHQ

SEQ ID NO: 13555 - protein, 255 aa, Coffea canephora
MVRVPCCEKMGLKKGPWTPEEDQILVSFVQHYGHENWRALPKQAGLLRCGKSCRLRWTNYLRPDIKRGNFSKEEEESIIKLHQIMGNRWSAIANRLPGRTDNEIKNYWNTHLKKRVHQDAVGLKDLRQLQTNLWRSNSQGTPESGEASNHPGSEGNGDVQNFTGSIHENFSSLDYSISAPGPARVLAETNLKQSAKDSSKTNKYLGPASDSRLQFLSTGESNIEPGKDSIKEDMVFWYNLLLIAGKSQEKFAQIV

SEQ ID NO: 13556 - protein, 337 aa, Salmonella enterica subsp. enterica serovar Typhi str. CT18
MCNHKQSDRVLNLPAGYFGIVLGTIGMGFAWRYASQIWAISHWPGDIMVILAMIIWALLTLAFLSRLVRFPHSVMAEVRHPVMSSFVSLFPATTMLVAIGFVPWYRPLAVALFSVGVVIQLAYAAWQTAGLWRGAHPEEATTPGLYLPTVANNFISAMACGALGYNDAGLVFLGAGVFSWLSLEPVILQRLRSCGELPAVLRMSLGIQLAPALVACSAWLSVNGGEGDTLAKMLFGYGLLQLLFMLRLMPWYLSQPFNASFWSFSFGVSALTTTGLHLGHGSESGFFHILAVPLFIFTNAIIALLLVRTFLLLVQGTLLIRTERAALLKTEEKNDRS

SEQ ID NO: 13557 - protein, 509 aa, Salmonella enterica subsp. enterica serovar Typhi str. CT18
MRIGIPKERLPNETRVAATPKTVEQLLKLGFSVAIESGAGQLASFDDKAFAQAGADIVDGNAIWQSEIILKVNAPEEEEIALLNPGTTLVSFIWPAQNPGLMEKLAERKVTVMAMDSVPRISRAQSLDALSSMANIAGYRAIVEAAHEFGRFFTGQITAAGKVPPAKVMVIGAGVAGLAAIGAANSLGAIVRAFDTRPEVKEQVQSMGAEFLELDFKEEAGSGDGYAKVMSEAFIKAEMALFAAQAKEVDIIVTTALIPGKPAPKLITRDMVDSMKAGSVIVDLAAQNGGNCEYTVANQVVTTDNGVKVIGYTDLPGRLPTQSSQLYGTNLVNLLKLLCKEKDGNIDVDFDDVVIRGVTVIRDGDITWPAPPIQVSAQPQAAPKAAPAPKEPEKPASPWRKYALMALAIILFGWLADVAPKEFLGHFTVFALACVVGYYVVWNVSHALHTPLMSVTNAISGIIVVGALLQIGQGGWVSFLSFIAVLIASINIFGGFTVTQRMLKMFRKN

SEQ ID NO: 13558 - protein, 115 aa, Salmonella enterica subsp. enterica serovar Typhi str. CT18
MSTTIEKIQRQIAENPILLYMKGSPKLPSCGFSAQAVQALSACGERFAYVDILQNPDIRAELPKYANWPTFPQLWVDGELVGGCDIVIEMYQRGELQQLIKETAAKYKTQEPDAE

SEQ ID NO: 13559 - protein, 447 aa, Salmonella enterica subsp. enterica serovar Typhi str. CT18
MKKVKKLSLTDLVLYGLVFMVPIAPVSLYGVVYNLSHGMVALVYIIGAIAMFFTAYSYSTLSQHISSSGSAYAYAGVCINPAVGFLTGWILLLDYLLFPTLVAVLGGVAVHAILPQIPVWVWPLIYVAIGTGVNYLGIQQTAKFDKLLVFIQLGILAIFVLLIIRLMMQDSSQITLSFRPFFDSQWFTPGLIATAISVAALNFLGFDAISTLSEESEGGGRAVSKATLLALVLATVLFIIVVAFAAFATGNVDRFAEGNATNEAFFTIAGNVGGIWLKVAFSIIVAFVCAVGNIITAQTAVSRVLFSMGRDRMLPAFLAHVHTTRKTPDYAILFTGGVTLLLSYLFSGKIESISTLVNFGALFAFFVVNLCVFILFNFRMKAQRRIFAHVISPIMGMIVIGYVCLNMNIHALILGISWAAIGIAILCYRKAYNQNIAIDLEGKKLLD

SEQ ID NO: 13560 - protein, 248 aa, Salmonella enterica subsp. enterica serovar Typhi str. CT18
MLSIKDLQVSVEEKAILRGLNLDIRPGEVHAIMGPNGSGKSTLSATLAGREDYEVTGGSVTFKGKDLLELSPEERAGEGIFMAFQYPVEIPGVSNQFFLQTALNAVRAYRGQASLDRFDFQDLMEEKIALLKMPEDLLTRSVNVGFSGGEKKRNDILQMAVLEPELCILDESDSGLDIDALKIVAEGVNALRDDKRAFIIVTHYQRILDYIKPDYVHVLYQGRIVRSGDFTLVKQLEEQGYGWLTEQQ

SEQ ID NO: 13561 - protein, 315 aa, Salmonella enterica subsp. enterica serovar Typhi str. CT18
MPDMKLFAGNATPELAQRIANRLYTSLGDAAVGRFSDGEVSVQINENVRGGDIFIIQSTCAPTNDNLMELVVMVDALRRASAGRITAVIPYFGYARQDRRVRSARVPITAKVVADFLSSVGVDRVLTVDLHAEQIQGFFDVPVDNVFGSPILLEDMLQLNLDNPIVVSPDIGGVVRARAIAKLLNDTDMAIIDKRRPRANVSQVMHIIGDVAGRDCVLVDDMIDTGGTLCKAAEALKERGAKRVFAYATHPIFSGNAANNLRNSVIDEVVVCDTIPLTDEIKALPNVRTLTLSGMLAEAIRRISNEESISAMFEH

SEQ ID NO: 13562 - protein, 192 aa, Salmonella enterica subsp. enterica serovar Typhi str. CT18
MDTSRLTLDHFLSRFQLLRPQMTHETLNQRQAAVLIPVVRRPQPGLLLTQRAIHLRKHAGQVAFPGGAVDSTDASLIAAALREAQEEVAIPPQAVEVIGVLPPVDSVTGFQVTPVVGIIPPNLPWRASEDEVSAVFEMPLAQALQLGRYHPLDVYRRGNSHRVWLSWYEHYFVWGMTANILRELALQIGVKP

SEQ ID NO: 13563 - protein, 473 aa, Salmonella enterica subsp. enterica serovar Typhi str. CT18
MSRLVVVSNRIAPPDNKGGAGGLAVGVLGALKAAGGLWFGWSGETGNEDEPLKKVTKGNITWASFNLSEQDYEDYYCQFSNAVLWPAFHYRLDLVQFQRPAWEGYMRVNALLADKLLPLIKENDIIWVHDYHLLPFASELRKRGVNNRIGFFLHIPFPTPEIFNALPPHDELLEQLCDFDLLGFQTENDRLAFLDSLSSQTRVTTRSGKQHIAWGKDFQTEVYPIGIEPDEIALQAAGPLPPKLAQLKAELKNVKNIFSVERLDYSKGLPERFLAYEALLENYPQHRGKIRYTQIAPTSRGEVQAYQDIRHQLETEAGRINGKYGQLGWTPLYYLNQHFDRKLLMKIFRYSDVGLVTPLRDGMNLVAKEFVAAQDPANPGVLVLSQFAGAANELTSALIVNPYDRDDVAAALNRALTMPLAERISRHAEMLDVIVKNDINRWQERFIHDLKEVTPRSPERQQQNNVATFPKLA

SEQ ID NO: 13564 - protein, 70 aa, Salmonella enterica subsp. enterica serovar Typhi str. CT18
MTTKITGLVKWFNPEKGFGFITPKDGSKDVFVHFSAIQSNEFRTLNENQEVEFSAEQGPKGPSAVNVVAL

SEQ ID NO: 13565 - protein, 404 aa, Salmonella enterica subsp. enterica serovar Typhi str. CT18
MSYKIMAINAGSSSLKFQLLEMPQGDMLCQGLIERIGMADAQVTIKTHSQKWQETVPVADHRDAVTLLLEKLLGYQIINSLRDIDGVGHRVAHGGEFFKDSTLVTDETLAQIERLAELAPLHNPVNALGIHVFRQLLPDAPSVAVFDTAFHQTLDEPAYIYPLPWHYYAELGIRRYGFHGTSHKYVSGVLAEKLGVPLSALRVICCHLGNGSSVCAIKNGRSVNTSMGFTPQSGVMMGTRSGDIDPSILPWIAQRECKTPQQLNQLLNNESGLLGVSGVSSDYRDVEQAANTGNRQAKLALTLFAERIRATIGGYIMQMGGLDALVFTGGIGENSARARSAVCHNLQFLGLAVDEEKNQRNATFIQTENALVKVAVINTNEELMIAQDVMRIALPATEGLCVPA

SEQ ID NO: 13566 - protein, 454 aa, Salmonella enterica subsp. enterica serovar Typhi str. CT18
MTMSHNVTPNTSRVELRKTLTLVPVVMMGLAYMQPMTLFDTFGIVSGLTDGHVPTAYAFALIAILFTALSYGKLVRRYPSAGSAYTYAQKSISPTVGFMVGWSSLLDYLFAPMINILLAKIYFEALVPSIPSWVFVVALVAFMTAFNLRSLKSVANFNTVIVVLQVVLIAVILGMVVYGVFEGEGAGTLASTRPFWSGDAHVIPMITGATILCFSFTGFDGISNLSEETKDAERVIPRAIFLTALIGGLIFIFATYFLQLYFPDISRFKDPDASQPEIMLYVAGKTFQVGALIFSTITVLASGMAAHAGVARLMYVMGRDGVFPKSFFGYVHPKWRTPAMNIILVGAIALLAINFDLVMATALINFGALVAFTFVNLSVISQFWIREKRNKTLKDHFQYLFLPMCGALTVGALWVNLEESSMVLGLIWAGIGLIYLACVTKSFRNPVPQYEDVA

SEQ ID NO: 13567 - protein, 355 aa, Salmonella enterica subsp. enterica serovar Typhi str. CT18
MSQKYLFIDRDGTLISEPPSDFQVDHFDKLAFEPEVIPVLLKLQKAGFKLVMITNQDGLGTQSFPQADFDGPHNLMMQIFTSQGVCFDEVLICPHLPADDCDCRKPKVKLVERYLAEQAMDSANSYVIGDRATDIQLADNMGITGLRYHRETLNWTMIGEQLTKRDRYAHVVRNTKETQIDVSVWLDREGNSKINTGVGFFDHMLDQIATHGGFRMEITVKGDLYIDDHHTVEDTGLALGEALKLALGDKRGICRFGFVLPMDECLARCALDISGRPHLEYKAEFTYQRVGDLSTEMIEHFFRSLSYTMGVTLHLKTKGKNDHHRVESLFKAFGRTLRQAIRVEGDTLPSSKGVL

SEQ ID NO: 13568 - protein, 576 aa, Salmonella enterica subsp. enterica serovar Typhi str. CT18
MSSITMTDNKTFLNELARLVGHSHLLTDPAKTARYRKGFRSGQGDALAVVFPGSLLELWRVLNACVNADKIILMQAANTGLTEGSTPNGNDYDRDIVIISTQRLDKLHLLDNGQQVLAWPGTTLYALEKALKPLGREPHSVIGSSCIGASVIGGICNNSGGSLVQRGPAYTEMSLFARIDEQGKLQLVNHLGIDLGHTPEQILSKLDDERIKDEDVRHDGRHAHDHDYVTRVRDINADTPARYNADPDRLFESSGCAGKLAVFAVRLDTFAAEKNQQVFYIGTNQPAVLTEIRRHILANFDNLPVAGEYMHRDIYDIAEQYGKDTFLMIDKLGTDKMPFFFTLKGRTDAMLEKVKFFRPHFTDRAMQKFGHLFPSHLPPRMKNWRDKYEHHLLLKMAGDGVAEAQRWLNEFFKSAEGGFFTCTPEEGSKAFLHRFAAAGAAIRYQAVHADEVEDILALDIALRRNDTDWFEHLPPEIDSQLVHKLYYGHFMCHVFHQDYIVKKGVDVHALKAQMLELLQARGAQYPAEHNVGHLYKAPETLTRFYRQNDPTNSMNPGIGKTSKRKFWQENTPDETH

SEQ ID NO: 13569 - protein, 397 aa, Salmonella enterica subsp. enterica serovar Typhi str. CT18
MTHVTSAIIVGGGIGGAATALSLARQGIKVMLLEKAHEIGEIGAGIQLGPNAFSALDSLGVGDVARQRAVFTDHITMMDAVNAEEVVRIETGQAFRDHFGGPYAVIHRVDIHATVWEAVLTHPGVEYRTSTHIVDIRQTPDDVTVFDEQGNSWTADILVGCDGVKSVVRQSLLGDAPRVTGHVVYRAVIDCDDMPDDLRINAPVLWAGPHCHLVHYPLRGGQQYNLVVTFHSRQQEEWGVKDGSKEEVLSYFAGIHPRPRQMLDKPTSWRRWSTADREPVAKWGTERITLVGDAAHPVAQYMAQGACMALEDAVTLGKALERCDGDAQQAFALYESVRIPRTARIVWSTREMGRLYHAAGVERQVRNLLWKGKSQEAFYRGIEWLYGWKEDNCLEPR

SEQ ID NO: 13570 - protein, 404 aa, Salmonella enterica subsp. enterica serovar Typhi str. CT18
MSPIEKSSKLENVCYDIRGPVLKEAKRLEEEGNKVLKLNIGNPAPFGFEAPDEILVDVIRNLPTAQGYCDSKGLYSARKAIMQHYQARGMRDVTVEDIYIGNGVSELIVQAMQALLNSGDEMLVPAPDYPLWTAAVSLSSGKAVHYLCDESSDWFPDLDDIRAKITPRTRGIVIINPNNPTGAVYSKELLMEIVNIAREHNLIIFADEIYDKILYDDAEHHSIAALAPDLLTITFNGLSKTYRVAGFRQGWMVLNGPKKHAKGYIEGLEMLASMRLCANVPAQHAIQTALGGYQSISEFILPGGRLYEQRNRAWELINDIPGVSCVKPRGALYMFPRIDAKRFNIHDDQKMVLDFLLQEKVLLVQGTAFNWPWPDHFRIVTLPREDDLEMAINRFGRFLSGYHQ

SEQ ID NO: 13571 - protein, 400 aa, Salmonella enterica subsp. enterica serovar Typhi str. CT18
MSSKLVLVLNCGSSSLKFAIIDAVNGDEYLSGLAECFHLPEARIKWKMDGSKQEAALGAGAAHSEALNFIVNTILAQKPELSAQLTAIGHRIVHGGEKYTSSVVIDESVIQGIKDSASFAPLHNPAHLIGIAEALKSFPQLKDKNVAVFDTAFHQTMPEESYLYALPYSLYKEHGVRRYGAHGTSHFYVTQEAAKMLNKPVEELNIITCHLGNGGSVSAIRNGKCVDTSMGLTPLEGLVMGTRSGDIDPAIIFHLHDTLGMSVDQINKMLTKESGLLGLTEVTSDCRYVEDNYATKEDAKRAMDVYCHRLAKYIGSYTALMDGRLDAVVFTGGIGENAAMVRELSLGKLGVLGFEVDHERNLAARFGKSGFINKEGTRPAVVIPTNEELVIAQDASRLTA

SEQ ID NO: 13572 - protein, 714 aa, Salmonella enterica subsp. enterica serovar Typhi str. CT18
MSRIIMLIPTGTSVGLTSVSLGVIRAMERKGVRLSVFKPIAQPRAGGDAPDQTTTIVRANSTLPAAEPLKMSHVESLLSSNQKDVLMEEIIANYHANTKDAEVVLVEGLVPTRKHQFAQSLNYEIAKTLNAEIVFVMSQGTDTPEQLNERIELTRSSFGGAKNTNITGVIINKLNAPVDEQGRTRPDLSEIFDDSSKAQVIKIDPAKLQESSPLPVLGAVPWSFDLIATRAIDMARHLNATIINEGDIKTRRVKSVTFCARSIPHMLEHFRAGSLLVTSADRPDVLVAACLAAMNGVEIGALLLTGGYEMDARISKLCERAFATGLPVFMVNTNTWQTSLSLQSFNLEVPVDDHERIEKVQEYVANYVNADWIESLTATSERSRRLSPPAFRYQLTELARKAGKRVVLPEGDEPRTVKAAAICAERGIATCVLLGNPDEINRVAASQGVELGAGIEIVDPEVVRESYVARLVELRKSKGMTEPVAREQLEDNVVLGTLMLEQDEVDGLVSGAVHTTANTIRPPLQLIKTAPGSSLVSSVFFMLLPEQVYVYGDCAINPDPTAEQLAEIAIQSADSAIAFGIEPRVAMLSYSTGTSGAGSDVEKVREATRLAQEKRPDLMIDGPLQYDAAVMADVAKSKAPNSPVAGRATVFIFPDLNTGNTTYKAVQRSADLISIGPMLQGMRKPVNDLSRGALVDDIVYTIALTAIQASQQQQ

SEQ ID NO: 13573 - protein, 550 aa, Salmonella enterica subsp. enterica serovar Typhi str. CT18
MQNPYTVADYLLDRLAGCGIGHLFGVPGDYNLQFLDHVIDHPTLRWVGCANELNAAYTADGYARMSGAGALLTTFGVGELSAINGIAGSYAEYVPVLHIVGAPCSAAQQRGELMHHTLGDGDFRHFYRMSQAISAASAILDEQNACFEIDRVLGEMLAARRPGYIMLPADVAKKTAIPPTEALALPVHEAQSGVETAFRYHARQCLMNSRRIALLADFLAGRFGLRPLLQRWMAETPIAHATLLMGKGLFDEQHPNFVGTYSAGASSKEVRQAIEDADRVICVGTRFVDTLTAGFTQQLPAERTLEIQPYASRIGETWFNLPMAQAVSTLRELCLECAFAPPPTRSAGQPVRIDKGELTQESFWQTLQQCLKPGDIILVDQGTAAFGAAALSLPDGAEVVVQPLWGSIGYSLPAAFGAQTACPDRRVILIIGDGAAQLTIQEMGSMLRDGQAPVILLLNNDGYTVERAIHGAAQRYNDIASWNWTQIPPALNAAQQAECWRVTQAIQLAEVLERLARPQRLSFIEVMLPKADLPELLRTVTRALEARNGG

SEQ ID NO: 13574 - protein, 338 aa, Salmonella enterica subsp. enterica serovar Typhi str. CT18
MIIERARELAVRAPARVVFPDALDERVLKAAHYLQQCGLARPVLVASPFALRQFALSHRMAMDGIQVIDPHSNLSMRQRFAQRWLARAGEKTPPDAVEKLSDPLMFAAAMVSAGEADVCIAGNLSSTANVLRAGLRVIGLQPGCKTLSSIFLMLPQYAGPALGFADCSVVPQPTAAQLADIAIASADTWRAITGEEPRVAMLSFSSNGSARHPNVANVQQATEFVRERAPQLLVDGELQFDAAFVPEVAAQKAPDSPLQGRANVMIFPSLEAGNIGYKIAQRLGGYRAVGPLIQGLAAPLHDLSRGCSVQEIIELALVAAVPRQADVSRERSLHTLVE

SEQ ID NO: 13575 - protein, 759 aa, Salmonella enterica subsp. enterica serovar Typhi str. CT18
MDEQLKQSALDFHEFPVPGKIQVSPTKPLATQRDLALAYSPGVAAPCLEIEKDPLAAYKYTARGNLVAVISNGTAVLGLGNIGALAGKPVMEGKGVLFKKFAGIDVFDIEVDELDPDKFINVVAALEPTFGGINLEDIKAPECFYIEQKLRERMNIPVFHDDQHGTAIISTAAILNGLRVVEKNISDVRMVVSGAGAAAIACMNLLVALGMQKHNIVVCDSKGVIYKGREPNMAETKAAYAVDDSGKRTLDEVIDGADIFLGCSGPKVLTQEMVKKMARAPMILALANPEPEILPPLAKEVRPDAIICTGRSDYPNQVNNVLCFPFIFRGALDVGATAINEEMKLAAVRAIAELAHAEQSEVVASAYGDQDLSFGPEYIIPKPFDPRLIVKIAPAVAKAAMDSGVATRPIADFDAYIDKLTEFVYKTNLFMKPIFSQARKDPKRVVLPEGEEARVLHATQELITLGLAKPILIGRPSVIEMRIQKLGLQIKAGVDFEIVNNESDPRFKEYWSEYYQIMKRRGVTQEQAQRAMIGNHTAIGAIMVQRGEADAMICGTIGDYHEHFSVVKAVFGYRDGVHTAGAMNALLLPSGNTFIADTYVNEDPTPEQLAEIAVMAAETVRRFGIEPKVALLSHSNFGSSNSLSASKMRETLERVRERAPDLMIDGEMHGDAALVESIRNDRMPDSPLKGAANILVMPNMEAARISYNLLRVSSSEGVTVGPVLMGVSKPVHVLTPIASVRRIVNMVALAVVEAQTTPL

SEQ ID NO: 13576 - protein, 584 aa, Taiwania cryptomerioides
MVGSEQYTTSKRTQRFRFTVLASVLIVGAVIFLAIGSSKNDKEREEHVVSKGLRRWKKTSNVLKDACSSTLHPELCVSSIASYGGLSSKADHMEIVESAVRVGIGAVEKAKAHVRRLSRPGLDFRQRGALKDCMEMFDDTLEELQDTLTDLQNATFMSLPKYADDLKTLLSGAITNQYTCLDGFHLCKGHLRQDLNAELLNISHLVSNSLAMVCNFSQQANLALGNADSLSDRRRRLLSNDFMSSDDHGFPSWMSAGDRRLLQTPAQNINANAVVAKDGSGSYTTISAAVAAAPEKSTSRYVIHIKKGVYQENVDIPKNKHNLMFIGDGKDVTVVTANRNVVDGYTTFHSATAAVTGKGFVARDMTFKNTAGPTKHQAVALRVGSDLSAFLRCTFEGYQDTLYVHSLRQFYRECDVYGTVDFVFGNAAVVLQNCNIMARKPSANQKIMYTAQGREDPNQNTGISIQNCRLSATSDLVAAKSSFQVYLGRPWKQYSRTVILQSHLDDLIHPAGWHEWDGNFALSTLYYGEYMNRGPGAATANRVKWGGHRVITSSSEANQFTVNQFLQGDSWLPATGVQYTAGFT

SEQ ID NO: 13577 - protein, 404 aa, Salmonella enterica subsp. enterica serovar Typhi str. CT18
MKLPIYLDYSATTPVDPRVAEKMMQFLTLDGTFGNPASRSHRFGWQAEEAVDIARNQIAELVGADPREIVFTSGATESDNLAIKGAANFYQKKGKHIITSKTEHKAVLDTCRQLEREGFEVTYLAPQRNGIIDLNELEAAMRDDTILVSIMHVNNEIGVVQDIATIGEMCRARGIIYHVDATQSVGKLPIDLSQLKVDLMSFSGHKIYGPKGIGALYVRRKPRIRIEAQMHGGGHERGMRSGTLPVHQIVGMGEAYRIAKEEMETEMARLRGLRNRLWNGIKDIEEVYLNGDLEQGAPNILNVSFNYVEGESLIMALKDLAVSSGSACTSATLEPSYVLRALGMNDELAHSSIRFSLGRFTTEEEIDYTIDLVRKSIGRLRDLSPLWEMYKQGVDLNSIEWAHH

SEQ ID NO: 13578 - protein, 396 aa, Salmonella enterica subsp. enterica serovar Typhi str. CT18
MLDAQTIATVKATIPLLVETGPKLTAHFYDRMFTHNPELKEIFNMSNQRNGDQREALFNAIAAYASNIENLPALLPAVEKIAQKHTSFQIKPEQYNIVGTHLLATLDEMFNPGQEVLDAWGKAYGVLANVFIHREAEIYHENASKDGGWEGTRPFRIVAKTPRSALITSFEFEPVDGGTVAEYRPGQYLGVWLKPEGFAHQEIRQYSLTRKPDGKGYRIAVKREDGGQVSNWLHHHANVGDVVHLAAPAGDFFMNVAADTPVSLISAGVGQTPMLAMLDTLAKEQHTAQVNWFHAAENGDVHAFADEVSELGRTLPRFTAHTWYREPTEADRAQRVFDSEGLMDLSKLEAAISDPAMQFYLCGPVGFMQFAAKQLVSLGVNNENIHYECFGPHKVL

SEQ ID NO: 13579 - protein, 301 aa, Salmonella enterica subsp. enterica serovar Typhi str. CT18
MSTDKTYCGFIAIVGRPNVGKSTLLNKLLGQKISITSRKAQTTRHRIVGIHTEGPYQAIYVDTPGLHMEEKRAINRLMNKAASSSIGDVELVIFVVEGTRWTPDDEMVLNKLRDGKAPVILAVNKVDNVQEKADLLPHLQFLASQMNFLDIVPISAETGMNVDTIASIVRKHLPEAIHHFPEDYITDRSQRFMASEIIREKLMRFLGAELPYSVTVEIERFVTNERGGYDINGLILVEREGQKKMVIGNKGAKIKTIGIEARKDMQEMFEAPVHLELWVKVKSGWADDERALRSLGYVDDL

SEQ ID NO: 13580 - protein, 321 aa, Salmonella enterica subsp. enterica serovar Typhi str. CT18
MSDALLNAGRQTLMLELQEASRLPERLGDDFVRAANIIIHCEGKVIVSGIGKSGHIGKKIAATLASTGTPAFFVHPAEALHGDLGMIESRDVMLFISYSGGAKELDLIIPRLEDKSVALLAMTGKPHSPLGRAAKAVLDISVEREACPMHLAPTSSTVNTLMMGDALAMAVMQARGFNEEDFARSHPAGALGARLLNNVHHLMRQGDAIPQVMLATSVMDAMLELSRTGLGLVAVCDEQHVVKGVFTDGDLRRWLVGGGALTTPVSEAMTPNGITLQAQSRAIDAKELLMKRKITAAPVVDENGKLTGAINLQDFYQAGII

SEQ ID NO: 13581 - protein, 392 aa, Salmonella enterica subsp. enterica serovar Typhi str. CT18
MKEVVIVGALRTPIGCFQGTLARHSAVELGSMVVKALIERTGVDANAIDEVILGQVLTAGAGQNPARQSAIKGGLPTTVSAITINDVCGSGLKALHLATQAIQCGEADIVIAGGQENMSRAPHVLNDSRTGALPDADNLVDSLVHDGLWDAFNDYHIGVTAENLAREYGISRELQDAYALSSQQKARAAIDTGRFKDEIVPIVTQRNGQTAIVDTDEQPRADASAEGLALLHPAFDSLGSVTAGNASSINDGAAAVMMMSETKAQALGLPVLARIRAFASVGVDPALMGIAPVYATRRCLERAGWQLTEVDLIEANEAFAAQALSVGKMLEWDERRVNVNGGAIALGHPIGASGCRILVSLVHEMVKRDARKGLATLCIGGGQGVALTIERD

SEQ ID NO: 13582 - protein, 306 aa, Salmonella enterica subsp. enterica serovar Typhi str. CT18
MSTLGHQYDNSLVSNAFGFLRLPMNFQPYDSDADWVITGVPFDMATSGRAGGRHGPAAIRQVSTNLAWEHHRFPWNFDMRERLNVVDCGDLVYAFGDAREMSEKLQAHAEKLLSAGKRMLSFGGDHFVTLPLLRAHAKHFGKMALVHFDAHTDTYANGCEFDHGTMFYTAPKEGLIDPHHSVQIGIRTEFDKDNGFTVLDACQVNDRGVDDILAQVKQIVGDMPVYLTFDIDCLDPAFAPGTGTPVIGGLTSDRAIKLVRGLKDLNIVGMDVVEVAPAYDQSEITALAAATLALEMLYIQAAKKGE

SEQ ID NO: 13583 - protein, 402 aa, Salmonella enterica subsp. enterica serovar Typhi str. CT18
MNEFPVVLVINCGSSSIKFSVLDVATCDVLMAGIADGMNTENAFLSINGDKPINLSHSNYEDALKAIAFELEKRDLTDSVALIGHRIAHDGELFTQSVIITDEIIDNIRRVSPLAPLHNYANLSGIDAARRLFPAVRQVAVFDTSFHQTLAPEAYLYGLPWEYFSSLGVRRYGFHGTSHRYVSRRAYELLDLDEKNSGLIVAHLGNGASICAVRNGQSVDTSMGMTPLEGLMMGTRSGDVDFGAMAWIAKETGQTLSDLERVVNKESGLLGISGLSSDLRVLEKAWHEGHERARLAIKTFVHRIARHIAGHAASLHRLDGIIFTGGIGENSVLIRQLVIEHLGVLGLTLDVEMNKQPNSHGERIISVNPSQVICAVIPTNEEKMIALDAIHLGNVKAPVEFA

SEQ ID NO: 13584 - protein, 644 aa, Salmonella enterica subsp. enterica serovar Typhi str. CT18
MAKNLILWLVIAVVLMSVFQSFGPSESNGRKVDYSTFLQEVNQDQVREARINGREINVTKKDSNRYTTYIPINDPKLLDNLLTKNVKVVGEPPEEPSLLASIFISWFPMLLLIGVWIFFMRQMQGGGGKGAMSFGKSKARMLTEDQIKTTFADVAGCDEAKEEVAELVEYLREPSRFQKLGGKIPKGVLMVGPPGTGKTLLAKAIAGEAKVPFFTISGSDFVEMFVGVGASRVRDMFEQAKKAAPCIIFIDEIDAVGRQRGAGLGGGHDEREQTLNQMLVEMDGFEGNEGIIVIAATNRPDVLDPALLRPGRFDRQVVVGLPDVRGREQILKVHMRRVPLATDIDAAIIARGTPGFSGADLANLVNEAALFAARGNKRVVSMVEFEKAKDKIMMGAERRSMVMTEAQKESTAYHEAGHAIIGRLVPEHDPVHKVTIIPRGRALGVTFFLPEGDAISASRQKLESQISTLYGGRLAEEIIYGVEHVSTGASNDIKVATNLARNMVTQWGFSEKLGPLLYAEEEGEVFLGRSVAKAKHMSDETARIIDQEVKALIERNYNRARQILTDNMDILHAMKDALMKYETIDAPQIDDLMARREVRPPAGWEDPNGTNNSDSNGTPQAPRPVDEPRTPNPGNTMSEQLGDK

SEQ ID NO: 13585 - protein, 390 aa, Salmonella enterica subsp. enterica serovar Typhi str. CT18
MKFVDEASILVVAGDGGNGCVSFRREKYIPKGGPDGGDGGDGGDVWMEADENLNTLIDYRFEKSFRAERGQNGASRDCTGKRGKDVTIKVPVGTRVIDQGTGETMGDMTKHGQRLLVAKGGWHGLGNTRFKSSVNRTPRQKTNGTPGDKRDLLLELMLLADVGMLGMPNAGKSTFIRAVSAAKPKVADYPFTTLVPSLGVVRMDSEKSFVVADIPGLIEGAAEGAGLGIRFLKHLERCRVLLHLIDIDPIDGSDPVENARIIIGELEKYSQDLAAKPRWLVFNKIDLMDKSEAEEKAKAIAEALGWEGKYYLISAASQLGVKDLCWDVMTFIIENPIAQAEEAKQPEKVEFMWDDYHRQQLAEVEEDADDDWDDDWDEDDEEGVEFIYKR

SEQ ID NO: 13586 - protein, 103 aa, Salmonella enterica subsp. enterica serovar Typhi str. CT18
MYAVFQSGGKQHRVSEGQTVRLEKLDIATGETIEFAEVLMIANGEEVKIGVPFVDGGVIKAEVVAHGRGEKVKIVKFRRRKHYRKQQGHRQWFTDVKITGISA

SEQ ID NO: 13587 - protein, 328 aa, Salmonella enterica subsp. enterica serovar Typhi str. CT18
MSHLALQPGFDFQQAGKEVLEIEREGLAELDQYINQHFTLACEKMFNCTGKVVVMGMGKSGHIGRKMAATFASTGTSSFFVHPGEAAHGDLGMVTPQDVVIAISNSGESSEIAALIPVLKRLHVPLICITGRPESSMARAADVHLCVKVPKEACPLGLAPTSSTTATLVMGDALAVALLKARGFTAEDFALSHPGGALGRKLLLRVSDIMHTGDEIPHVNKHATLRDALLEITRKNLGMTVICDESMKIDGIFTDGDLRRMFDMGGDMRQLGIAEVMTPGGIRVRPGILAVDALNLMQSRHITSVLVADGDQLLGVLHMHDLLRAGVV

SEQ ID NO: 13588 - protein, 1486 aa, Salmonella enterica subsp. enterica serovar Typhi str. CT18
MLYDKSLEKDNCGFGLIAHIEGEPSHKVVRTAIHALARMQHRGAILADGKTGDGCGLLLQKPDRFFRIVAEERGWRLAKNYAVGMIFLNKDPELAAASRHIVEEELQQETLSIVGWRDVPTNEGVLGEIALSSLPRIEQIFVNAPAGWRPRDMERRLFIARRRIEKRLQDDKDFYVCSLSNLVNIYKGLCMPADLPRFYLDLADLRLESAICLFHQRFSTNTVPRWPLAQPFRYLAHNGEINTITGNRQWARARTYKFQTPLIPDLQSAAPFVNETGSDSSSLDNMLELLLAGGMDIIRAMRLLVPPAWQNNPDMDQDLRAFFDFNSMHMEPWDGPAGIVMSDGRFAACNLDRNGLRPARYVITKDKLITCASEVGIWDYQPDEVVEKGRVGPGELMVIDTRGGRILHSAETDDDLKSRHPYKAWMEKNVRRLVPFEELPDEEVGSRELDDDLLASYQKQFNYSAEELDSVIRVLGENGQEAVGSMGDDTPFAVLSSQPRIIYDYFRQQFAQVTNPPIDPLREAHVMSLATSIGREMNVFCEAEGQAHRLSFKSPILLYSDFKQLTTMSEHHYRADWLDITFDVTETTLDATVKALCDKAEQMVRNGTVLLVLSDRNIGKNRLPVPAPMAVGAVQTRLVDQSLRCDANIIVETGSARDPHHFAVLLGFGATAIYPYLAYETLGRLIDTQAIAKNYRTVMQNYRNGINKGLYKIMSKMGISTIASYRCSKLFEAVGLHDDVVNLCFQGVVSRIGGASFDDFQQDLLNLSKRAWLARKPISPGGLLKYVHGGEYHAYNPDVVRTLQQAVQSGEYSDYQEYAKLVNERPAATLRDLLAIHPDGEAVTIDEVEPASELFKRFDTAAMSIGALSPEAHEALAEAMNSLGGNSNSGEGGEDPARYGTNKVSRIKQVASGRFGVTPAYLVNADVIQIKVAQGAKPGEGGQLPGDKVTPYIAKLRYSVPGVTLISPPPHHDIYSIEDLAQLIFDLKQVNPKAMISVKLVSEPGVGTIATGVAKAYADLITIAGYDGGTGASPLSSVKYAGCPWELGLVETQQALVANGLRHKIRLQVDGGLKTGVDIIKAAILGAESFGFGTGPMVALGCKYLRICHLNNCATGVATQDEKLRKNHYHGLPFKVTNYFEFIAREVRELMASLGVTRLVDLIGRTDLLKELEGFTAKQQKLALSRLLETAEPHPGKALYCTENNPPFDNGVLNAQLLQQAKPFVDARQSKTFWFDIRNTDRSVGASLSGYIAQTHGDQGLASDPIKAHFSGTAGQSFGVWNAGGVELYLTGDANDYVGKGMAGGLIAIRPPVGSAFLSHKASIIGNTCLYGATGGRLYAAGRAGERFGVRNSGAITVVEGIGDNGCEYMTGGIVCVLGKTGVNFGAGMTGGFAYVLDEDGEFRKRVNPELVEVLDVDSLAIHEEHLRGLITEHVQHTGSQRGEEILSRWSSFSTQFALVKPKSSDVKALLGHRSRSAAELRVQAQ

SEQ ID NO: 13589 - protein, 483 aa, Salmonella enterica subsp. enterica serovar Typhi str. CT18
MQLEVILPLVAYLVVVFGVSIYAMRKRTAGTFLNEYFLGSRSMGGIVLAMTLTATYISASSFIGGPGAAYKYGLGWVLLAMIQLPAVWLSLGILGKKFAILARRYNAVTLNDMLFARYQSRLLVWLASLSLLVAFIGAMTVQFIGGARLLETAAGIPYETGLLIFGVSIALYTAFGGFRASVLNDTLQGLVMLVGTIVLLVGVVHAAGGLHQAVDTLHALDPKLVTPQGADDILSPAFMTSFWVLVCFGVIGLPHTAVRCISYKDSKAVHRGIIIGTIVVAILMFGMHLAGALGRAVLPDLTVPDLVIPTLMVKVLPPFAAGIFLAAPMAAIMSTINAQLLQSSATIIKDLYLNLRPDQMQNEIRLKRMSAAITLLLGALLLLAAWKPPEMIIWLNLLAFGGLEAVFLWPLVLGLYWERANAAGALSAMIVGGVLYALLATFNIQYLGFHPIVPALLLSLLAFLIGNRFGSSASQATVLSTDK

SEQ ID NO: 13590 - protein, 387 aa, Salmonella enterica subsp. enterica serovar Typhi str. CT18
MEQVVIVDAIRTPMGRSKGGAFRNVRAEDLSAHLMRSLLARNPSLTAATLDDIYWGCVQQTLEQGFNIARNAALLAEIPHSVPAVTVNRLCGSSMQALHDAARMIMTGDAQVCLVGGVEHMGHVPMSHGVDFHPGLSRNVAKAAGMMGLTAEMLSRLHGISREMQDQFAARSHARAWAATQSGAFKTEIIPTGGHDADGVLKQFNYDEVIRPETTVEALSTLRPAFDPVSGTVTAGTSSALSDGAAAMLVMSESRARELGLKPRARIRSMAVVGCDPSIMGYGPVPASKLALKKAGLSASDIDVFEMNEAFAAQILPCIKDLGLMEQIDEKINLNGGAIALGHPLGCSGARISTTLINLMERKDAQFGLATMCIGLGQGIATVFERV

SEQ ID NO: 13591 - protein, 548 aa, Salmonella enterica subsp. enterica serovar Typhi str. CT18
MNGAQWVVHALRAQGVKTVFGYPGGAIMPVYDALYDGGVEHLLCRHEQGAAMAAIGYARSTGKTGVCIATSGPGATNLITGLADALLDSVPVVAITGQVSAPFIGTDAFQEVDVLGLSLACTKHSFLVQSLAELPRIMAEAFEVANAGRPGPVLVDIPKDIQLASGELEPWFTTVDNEATFPQADVEQARQMLEQAKKPMLYVGGGVGMAKAVPALRKFIAVTQMPVTCTLKGLGAVEADYPYYLGMLGMHGTKAANFAVQECDLLIAVGARFDDRVTGKLNTFAPNASVIHMDIDPAEMNKLRQAHVALQGDLNSLLPALQQPLKIDAWRQSCAELRAEHAWRYDHPGETIYAPLLLKQLSERKPADSVVTTDVGQHQMWSAQHMTYTRPENFITSSGLGTMGFGLPAAVGAQVARPNDTVICISGDGSFMMNVQELGTVKRKQLPLKIVLLDNQRLGMVRQWQQLFFQERYSETTLTDNPDFLMLASAFGIPGQHITRKDQVEAALDTMLASEGPYLLHVSIDELENVWPLVPPGASNSEMLEKLS

SEQ ID NO: 13592 - protein, 285 aa, Salmonella enterica subsp. enterica serovar Typhi str. CT18
MSTILKWAGNKTAIMSELKKHLPAGPRLVEPFAGSCAVMMETDYPSYLVADINPDLINLYKKVAADCESFISRARVLFEIANREVAYYNIRQEFNYSTEITDFMKAVYFLYLNRHGYRGLCRYNKSGHFNIPYGNYKNPYFPEKEIRAFAEKAQQATFICASFDETLAMLQVGDVVYCDPPYDGTFSGYHTNGFTEDDQYHLASVLEYRSSEGHPVIVSNSDTSLIRSLYRNFTHHYIKAKRSIGVSAGESKSATEIIAVSGARCWVGFDPSRGVDSSAVYGVRA

SEQ ID NO: 13593 - protein, 441 aa, Salmonella enterica subsp. enterica serovar Typhi str. CT18
MIRGKIDILVVDDDVSHCTILQALLRGWGYNVALAYSGHDALAQVREKVFDLVLCDVRMAEMDGIATLKEIKALNPAIPILIMTAFSSVETAVEALKAGALDYLIKPLDFDRLQETLEKALAHTRETGAELPSASAAQFGMIGSSPAMQHLLNEIAMVAPSDATVLIHGDSGTGKELVARALHACSARSDKPLVTLNCAALNESLLESELFGHEKGAFTGADKRREGRFVEADGGTLFLDEIGDISPLMQVRLLRAIQEREVQRVGSNQTISVDVWLIAATHRDLAEEVSAGRFRQDLYYRLNVVAIEMPSLRQRREDIPLLADHFLRRFAERNRKAVKGFTPQAMDLLIHYDWPGNIRELENAIERAVVLLTGEYISERELPLAIAATPIKAENSAEIQPLVDVEKEVILAALEKTGGNKTEAARQLGITRKTLLAKLSR

SEQ ID NO: 13594 - protein, 220 aa, Salmonella enterica subsp. enterica serovar Typhi str. CT18
MELYLDTANVAEVERLARIFPIAGVTTNPSIVAASKESIWDVLPRLQNAIGEEGTLFAQTMSRDAKGMVEEAKRLNNAIPGIVVKIPVTAEGLAAIKLLKKEGIVTLGTAVYSASQGLLAALAGAKYVAPYVNRVDAQGGDGIRMVLELQTLLEHHAPDSMVLAASFKTPRQALDCLLAGCQAITLPLDVAQQMLNTPAVESAIEKFEQDWKNAFGNLNL

SEQ ID NO: 13595 - protein, 367 aa, Salmonella enterica subsp. enterica serovar Typhi str. CT18
MDRIIQSPGKYIQGANVIARLGDYLKPMANNWLVVGDKFVLGFAEETLRKSLTDAGLSVEIAPFGGECSQNEIDRLRAVAEKSQCGAVLGIGGGKTLDTAKALAHFMNVPVAIAPTIASTDAPCSALSVIYTDAGEFDRYLLLPHNPNMVIVDTQIVAGAPARLLAAGIGDALATWFEARACSRSGATTMAGGKCTQAALALAELCYNTLIEEGEKAMLAAEQHVVTPALERVIEANTYLSGVGFESGGLAAAHAIHNGLTAIPDAHHYYHGEKVAFGTLTQLVLENASVEEIETVAALCHSVGLPITLAQLDIKQDIPAKMRIVAEASCAEGETIHNMPGGATPDEVYAALLVADQYGQRFLQEWE

SEQ ID NO: 13596 - protein, 810 aa, Salmonella enterica subsp. enterica serovar Typhi str. CT18
MSVIAQAGAKGRQLHKFGGSSLADVKCYLRVAGIMAEYSQPDDMMVVSAAGSTTNQLISWLKLSQTDRLSAHQVLQTLRRYQCDLISGLLPADAADDLTSAFISDLERLAALLDGGVTDAVYAEIVGHGEIWSARLMSAVLNQQGLDAAWLDARAFLRAERAAQPQVDEGLSYPLLQQLLAQHPGKRLVVTGFISRNHDGETVLLGRNGSDYSATQIGALAGVSRVTIWSDVAGVYSADPRKVKDACLLPLLRLDEASELARLAAPVLHARTLQPVSGSDIDLQLRCSYTPDQGSTRIERVLASGTGARIVTSHDDICLIEFQVPASQDFRLAHKELDQILKRAQARPLAVGVHRDRQLLQFCYTAEVADSVLKLLDDVGLPGELRLRQGLALVAMVGAGVTRNPLHCHRFWQQLKGQPVEFTWQSEEGISLVAVLRTGPTESLIQGLHQSVFRAEKRIGLMLFGKGNIGSRWLELFAREQSTLSARTGFEFVLAGVVDSRRSLLNYEGLDASRALAFFDDEAVEQDEESLFLWMRAHPYDDLVVLDVTASEQLADQYLDFASHGFHVISANKLAGASASDKYRQIHDAFEKTGRYWLYNATVGAGLPINHTVRDLIDSGDTILSISGIFSGTLSWLFLQFDGTVPFTDLVDQAWQQGLTEPDPRVDLSGKDVMRKLVILAREAGYDIEPDQVRVESLVPAHCEEGSIDHFFENGDALNEQMVQRLEAARELGLVLRYVARFDANGKARVGVEAVRPEHPLAALLPCDNVFAIESRWYRDNPLVIRGPGAGRDVTAGAIQSDINRLAQLL

SEQ ID NO: 13597 - protein, 232 aa, Salmonella enterica subsp. enterica serovar Typhi str. CT18
MNKILLVDDDRELTSLLKELLEMEGFNVLVAHDGEQALELLDDSIDLLLLDVMMPKKNGIDTLKALRQTHQTPVIMLTARGNELDRVLGLELGADDYLPKPFNDRELVARIRAILRRSHWSEQQQSSDNGSPTLEVDALSLNPGRQEASFDGQTLELTGTEFTLLYLLAQHLGQVVSREHLSQEVLGKRLTPFDRAIDMHISNLRRKLPERKDGHPWFKTLRGRGYLMVSAS

SEQ ID NO: 13598 - protein, 298 aa, Salmonella enterica subsp. enterica serovar Typhi str. CT18
MAVIAFIGLGQMGSPMASNLLKQGHQLSVFDINPDAVQRLVDKGAQPASSPAQTTIGAEFVITMLPNGDLVRSVLFGEQGVCETLSREALVIDMSTIHPLQTDKLIADMQSKGFSMMDVPVGRTSDNAITGTLLLLAGGTTEQVERATPVLMAMGNELVNTGGPGMGIRVKLINNYMSIALNALSAEAAVLCEALGLSFDVALKVMSGTAAGKGHFTTTWPNKVMKGDLSPAFMIDLAHKDLGIALDVANQLHVPMPLGAASREVYNLARAAGRGREDWSAILEQVRISAGLTANVKK

SEQ ID NO: 13599 - protein, 330 aa, Salmonella enterica subsp. enterica serovar Typhi str. CT18
MKTAYIAKQRQISFVKSHFSRQLEERLGLIEVQAPILSRVGDGTQDNLSGCEKAVQVKVKALPDAQFEVVHSLAKWKRQTLGQHDFSAGEGLYTHMKALRPDEDRLSPLHSVYVDQWDWERVMGDGERQFSTLKSTVEAIWAGIKATEAEVHKQFGLAPFLPDQIHFVHSQELLARFPDLDAKGRERAIAKELGAVFLVGIGGKLSDGRRHDVRAPDYDDWSSASELGYAGLNGDILVWNPVLEDAFELSSMGIRVDADTLMRQLALTGDEDRLQLEWHQALLRGEMPQTIGGGIGQSRLTMLLLQLPHIGQVQCGVWPAQVRESIPAIL

SEQ ID NO: 13600 - protein, 548 aa, Salmonella enterica subsp. enterica serovar Typhi str. CT18
MDSQRNLLVIALLFVSFMIWQAWEQDKNPQPQTQQTMQTTTTAAGSAADQGVPASGQGKMITVKTDVLDLTINTRGGDVEQALLPAYPKELGSNEPFQLLETTPQFIYQAQSGLTGRDGPDNPANGPRPLYNVEKDAFVLADGQNELQVPMTYTDAAGNTFTKTFVFKRGDYAVNVNYSVQNTGEKPLEVSTFGQLKQSVNLPPHRDTGSSNFALHTFRGAAYSTPDEKYEKYKFDTIADNENLNVSSKGGWVAMLQQYFATAWIPRNDGTNNFYTANLGNGIVAIGYKAQPVLVQPGQTGAMTSTLWVGPEIQDKMAAVAPHLDLTVDYGWLWFISQPLFKLLKWIHSFVGNWGFSIIIITFIVRGIMYPLTKAQYTSMAKMRMLQPKIQAMRERLGDDKQRQSQEMMALYKAEKVNPLGGCFPLIIQMPIFLALYYMLMGSIELRHAPFALWIHDLSAQDPYYILPILMGVTMFFIQKMSPTTVTDPMQQKIMTFMPVIFTVFFLWFPSGLVLYYIVSNLVTIIQQQLIYRGLEKRGLHSREKKKS

SEQ ID NO: 13601 - protein, 562 aa, Salmonella enterica subsp. enterica serovar Typhi str. CT18
MASSGTTSTPQRFTGAEFIVHFLERQGIRIVTGIPGGSILPVYDALSQSTQIRHILARHEQGAGFIAQGMARTESKPAVCMACSGPGATNLVTAIADARLDSIPLICITGQVPASMIGTDAFQEVDTYGISIPITKHNYLVRNINELPQVMSDAFRLAQSGRPGPVWIDVPKDVQTATIELDALPSPAEKSPPPEFSAESIREAAAMINAAKRPVLYLGGGVINAPTRVRELAEKAQLPTTMTLMALGMLPKAHPLSLGMLGMHGARSTNFILQEADLLIVLGARFDDRAIGKTEQFCPNAKIIHVDIDRAELGKIKQPHVAIQADVDDVLAQLIPHIEAQPREAWHQLVADLQQEFPCGIPQENNPLSHYGLINAVAACVDDNAIITTDVGQHQMWTAQAYPLNRPRQWLTSGGLGTMGFGLPAAIGAALANPGNKVLCFSGDGSLMMNIQEMATASENQLDVKIILMNNDALGLVHQQQSLFYKQGVFAATYPGSINFMQIAAGFGLDTCDLNNEADPQAALQAIIRRPGPALIHVRIDAEEKVYPMVPPGAANTEMVGE

SEQ ID NO: 13602 - protein, 401 aa, Salmonella enterica subsp. enterica serovar Typhi str. CT18
MFELDTLSTLVAATLVLLLGRKLVQSVSLLKKYTIPEPVAGGLLVAVALLVLKKSVGWEVNFDMTLRDPLMLAFFATIGLNANLASLRKGGRVVGVFLVVVVGLLLMQNAIGIGMASLLGLDPLMGLIAGSITLSGGHGTGAAWSKLFVERYGFASATEVAMACATFGLVLGGLIDGPVARYLVKHSTTPDGMPDDQAVPTAFEKPDVGRMITSLVLIETIALIAICLTVGKIVAQLLAGTVLELPVFVCVLFVGVILSNGLALVGFYRVFERAVSVLGNVSLSLFLAMALMSLKLWELASLALPMLAILVVQTIFMALYAIFVTWRMMGKNYDAAVLAAGHCGFGLGATPTAIANMQAITDRFGPSHMAFLVVPMVGAFFIDIVNALVIKLYLMLPIFAQ

SEQ ID NO: 13603 - protein, 324 aa, Salmonella enterica subsp. enterica serovar Typhi str. CT18
MKPSIILYKTLPDDLLHRLEAHFTVTQVPNLHPETVARHAQAFASAQGLLGTSETVNRALLEKMPALRAASTISVGYDNVEVDALTARKIVLMHTPAVLTETVADTVMALMLATARRVVDVAERVKAGEWTESIGPAWFGVDVHHKTLGIVGMGRIGMALAQRAHFGFTMPVLYHARRRHQEAEDRFNARYCDLDTLLQEADFVCVILPLTAETRHLFGATQFARMKSSAIFINAGRGPVVDENALIAALQNGEIYAAGLDVFEQEPLSVDSPLLNMSNVVAVPHIGSATHETRYNMMACAVDNLIDALQGKIEKNCVNPQAAG

SEQ ID NO: 13604 - protein, 425 aa, Salmonella enterica subsp. enterica serovar Typhi str. CT18
MKPMHIAMALFSAAMFFVLAGVFMGVQLELDGTKLVVDTAADIRWQWIFIGTAVVFFFQLLRPMFQKAVKHVSGPKFILPAIDGSTVKQKLFLMALLVIAVAWPFMVSRGSVDIATMTMIYIILGLGLNVVVGLSGLLVLGYGGFYAIGAYTFALLNHYYGLGFWTCLPLAGLVSAAAGFLLGFPVLRLRGDYLAIVTLGFGEIVRILLLNNTEITGGPNGISQIPKPTLFGLEFSRNTREGGWDTFSNFFGVKYDPSDRVIFLYLVALLLVVLSLFVINRLLRMPLGRAWEALREDEIACRSLGLSPTRIKLTAFTISAAFAGFAGTLFAARQGFVSPESFTFAESAFVLAIVVLGGMGSQFAVILAAVLLVVSRELMRDFNEYSMLMLGGLMVLMMIWRPQGLLPMTRPQLKLKSGQAKGEQA

SEQ ID NO: 13605 - protein, 278 aa, Salmonella enterica subsp. enterica serovar Typhi str. CT18
MKKNRAFLKWAGGKYPLLDDIKRHLPKGECLVEPFVGAGSVFLNTDFSRYILADINSDLISLYNIVKLRTDEYVQASRELFMPETNQAEVYYQLREEFNTCQDPFRRAVLFLYLNRYGYNGLCRYNLRGEFNVPFGRYKRPYFPEAELYHFAEKAQNAFFYCESYADSMARADKSSVVYCDPPYAPLSATANFTAYHTNSFSLTQQAHLAEIAENLVSNRIPVLISNHDTALTREWYQLAKLHVVKVRRSISSNGGTRKKVDELLALYQPGVATPARK

SEQ ID NO: 13606 - protein, 269 aa, Salmonella enterica subsp. enterica serovar Typhi str. CT18
MFTDTINKCAANAARIARLSANNPLGFWVSSAMAGAYVGLGIILIFTLGNLLDPSVRPLVMGATFGIALTLVIIAGSELFTGHTMFLTLGVKAGTISHGQMWAILPQTWLGNLVGSVFVALLYSWGGGSLLPVDTSIVHSVALAKTTAPATVLFFKGALCNWLVCLAIWMAIRTEGTAKFLAIWWCLLAFIASGYEHSVANMTLFALSWFGHHSDAYTLSGIGHNLLWVTLGNTLSGVVFMGLGYWYATPKSERPVPQKTNQIKATANH

SEQ ID NO: 13607 - protein, 449 aa, Salmonella enterica subsp. enterica serovar Typhi str. CT18
MTEIVVSKFGGTSVADFDAMNRSADIVLSDANVRLVVLSASAGITNLLVALAEGMEPGERFATLDAIRKIQFDILDRLRHPNVIREEIERLLENITILAEAASLATSAALTDELVSHGELMSTLLFVEILRERDVQAHWFDVRKVMRTSDRFGRAEPDVAALAELAAQQLLPRLSETLVITQGFIGSESKGRTTTLGRGGSDYTAALLAEALHAARVDIWTDVPGIYTTDPRVVPVAQRIDEIDFEEAAEMATFGAKVLHPATLLPAVRSDIPVFVGSSKDPQAGGTLVCNKTQNPPLFRALALRRNQTLLTLHSLNMLHSRGFLAEVFGILARHNISVDLITTSEVSVALTLDTTGSTSTGDTLLTQSLLMELSALCRVEVEEGLALVALIGNNLSKACGVGKEVFGVLEPFNIRMICYGASSHNLCFLVPGDDAEKVVQKLHQNLFE

SEQ ID NO: 13608 - protein, 445 aa, Salmonella enterica subsp. enterica serovar Typhi str. CT18
MSSDADAHKVGLIPVTLMVSGNIMGSGVFLLPANLAATGGIAIYGWLVTIIGALALSMVYAKMSSLDPSPGGSYAYARRCFGPFLGYQTNVLYWLACWIGNIAMVVIGVGYLSYFFPILKDPLVLTLTCVAVLWIFVLLNIVGPKMITRVQAVATVLALVPIVGIAVFGWFWFKGETYMAAWNVSGMNTFGAIQSTLNVTLWSFIGVESASVAAGVVKNPKRNVPIATIGGVLIAAVCYVLSTTAIMGMIPNAALRVSASPFGDAARMALGDTAGAIVSFCAAAGCLGSLGGWTLLAGQTAKAAADDGLFPPIFARVNKAGTPVAGLLIVGVLMTIFQFSSMSPNAAKEFGLVSSVSVIFTLVPYLYTCAALLLLGHGHFGKARPLYLLITFVAFVYCIWAVIGSGAKEVMWSFVTLMVITALYALNYNRIHKNPYPLDAPVKQD

SEQ ID NO: 13609 - protein, 286 aa, Salmonella enterica subsp. enterica serovar Typhi str. CT18
MSTILKWAGNKTAIMPELIKHLPAGQRLVEPFAGSCAVMMATDYPHYLVADINPDLINLYKKIALDCEAFISRAKNIFAIANREVAYYNIRHEFNHSSEITDFMKAVYFLYLNRHGYRGLCRYNLSGHFNVPYGNYKNPYFPENEIRAFAKKAQRATFICASYDETLAMLRAGDVVYCDPPYDGTFSGYHTASFTGDDQYHLASILERRSSEGHPIIVSNSDTSLTRSLYRNFTRHRIIAKRSMGVAAGDGKSATEIIATKLVRWFGVDLASGPDVSVETEVRAWQ

SEQ ID NO: 13610 - protein, 467 aa, Salmonella enterica subsp. enterica serovar Typhi str. CT18
MVDQVKVAADEQAPAEQSLRRNLTNRHIQLIAIGGAIGTGLFMGSGKTISLAGPSIIFVYMIIGFMLFFVMRAMGELLLSNLEYKSFSDFASDLLGPWAGYFTGWTYWFCWVVTGMADVVAITAYAQFWFPGLSDWVASLAVVVLLLSLNLATVKMFGEMEFWFAMVKIVAIVALIVVGLVMIAMHFKSPTGVEASFAHLWNDGGWFPKGISGFFAGFQIAVFAFVGIELVGTTAAETKDPEKSLPRAINSIPIRIIMFYVFALIVIMSVTPWSSVVPDKSPFVELFVLVGLPAAASVINFVVLTSAASSANSGVFSTSRMLFGLAQEGVAPKAFAKLSKRAVPAKGLTFSCICLLGGVVMLMVNPSVIGAFTMITTVSAILFMFVWTIILCSYLVYRKKRPHLHEKSIYKMPLGKLMCWVCMAFFAFVLVLLTLEDDTRQALIVTPLWFIALGLGWLFLRKNKLAK

SEQ ID NO: 13611 - protein, 638 aa, Salmonella typhimurium LT2
MGKIIGIDLGTTNSCVAIMDGTQARVLENAEGDRTTPSIIAYTQDGETLVGQPAKRQAVTNPQNTLFAIKRLIGRRFQDEEVQRDVSIMPYKIIGADNGDAWLDVKGQKMAPPQISAEVLKKMKKTAEDYLGEPVTEAVITVPAYFNDAQRQATKDAGRIAGLEVKRIINEPTAAALAYGLDKEVGNRTIAVYDLGGGTFDISIIEIDEVDGEKTFEVLATNGDTHLGGEDFDTRLINYLVDEFKKDQGIDLRNDPLAMQRLKEAAEKAKIELSSAQQTDVNLPYITADATGPKHMNIKVTRAKLESLVEDLVNRSIEPLKVALQDAGLSVSDINDVILVGGQTRMPMVQKKVAEFFGKEPRKDVNPDEAVAIGAAVQGGVLTGDVKDVLLLDVTPLSLGIETMGGVMTPLITKNTTIPTKHSQVFSTAEDNQSAVTIHVLQGERKRASDNKSLGQFNLDGINPAPRGMPQIEVTFDIDADGILHVSAKDKNSGKEQKITIKASSGLNEEEIQKMVRDAEANAESDRKFEELVQTRNQGDHLLHSTRKQVEEAGDKLPADDKTAIESALNALETALKGEDKAAIEAKMQELAQVSQKLMEIAQQQHAQQQAGSADASANNAKDDDVVDAEFEEVKDKK

SEQ ID NO: 13612 - protein, 505 aa, Salmonella typhimurium LT2
MKNEKKKSGIEPKVFFPPLIIVGILCWLTVRDLDAANVVINAVFSYVTNVWGWAFEWYMVVMLFGWFWLVFGPYAKKRLGDEKPEFSTASWIFMMFASCTSAAVLFWGSIEIYYYISTPPFGLEPNSTGAKEIGLAYSLFHWGPLPWATYSFLSVAFAYFFFVRKMDVIRPSSTLVPLVGEKHAKGLFGTIVDNFYLVALIFAMGTSLGLATPLVTECMQWLFGIPHTLQLDAIIITCWIILNAICVACGLQKGVRIASDVRSYLSFLMLGWVFIVSGASFIMNYFTDSVGMLLMHLPRMLFYTDAIGKGGFPQGWTVFYWAWWVIYAIQMSIFLARISRGRTVRELCFGMVMGLTASTWILWTVLGSNTLLLMDKNILNIPQLIEQHGVARAIIETWAALPLSTATMWGFFILCFIATVTLINACSYTLAMSTCREVRDGEEPPLLVRIGWSVLVGIIGIVLLALGGLKPIQTAIIAGGCPLFFVNIMVTLSFIKDAKVHWKDK

SEQ ID NO: 13613 - protein, 553 aa, Salmonella typhimurium LT2
MFGYPGGAVLDIYDALHTVGGIDHVLVRHEQAAVHMADGLARATGDVGVVLVTSGPGATNAITGIATAYMDSIPLVILSGQVATSLIGYDAFQECDMVGISRPVVKHSFLVKQTEDIPLVLKKAFWLAASGRPGPVVVDLPKDILNPAKKMPYAWPETVSMRSYNPTTSGHKGQIKRALQTLASAKKPVVYVGGGAISAACYAPLRHIIETFNLPVVSSLMGLGAFPATHRQSLGMLGMHGTYEANMTMHNADVIFAVGVRFDDRTTNNLAKYCPNATVLHIDIDPTSISKTVNADIPVVGDARLVLEQMLELLAQDAPSQPQDDIRDWWQQIESWRARQCLKYDAESESIKPQAVIETLWRLTKGDAYVTSDVGQHQMFAALYYPFDKPRRWINSGGLGTMGFGLPAALGVKMALPKEMVVCVTGDGSIQMNIQELSTALQYELPVLVLNLNNRYLGMVKQWQDMIYSGRHSQSYMQSLPDFVRLAEAYGHVGLQINRPDELESKLSEALEHVRNNRLVFVDVTVDGSEHVYPMQIRGGGMDEMWLSKTERT

SEQ ID NO: 13614 - protein, 713 aa, Salmonella typhimurium LT2
MNIIAIMGPHGVYYKDEPIKELERALQSLGFQIIWPQNSVDLLKFIEHNPRICGVIFDWDEYSLDLCSEINQLNEYLPLYAFINTNSTLDVSVHDMRMALWFFEYALGLAEDIATRIHQYTNEYLDNITPPFTKALFTYAKEGKYTFCTPGHMAGTAYQKSPPGCLFYDFFGGNTLKADVSISVTELGSLLDHTGPHLEAEEYIARTFGAEQSYMVTNGTSTSNKIVGMYAAPAGSTLLIDRNCHKSLAHLLMMSDVVPLWLKPTRNALGILGGIPRREFTRASIESKIEETPQAQWPVHAVITNSTYDGLLYNTNWIKQMLDVPSIHFDSAWVPYTHFHPIYQGKSGMSGDRVPGKVIFETQSTHKMLAAFSQASLIHIKGEYDEETFNEAFMMHTSTSPSYPIVASIETAAAMLRGNPGKRLINRSVERALHFRKEVQRLREESDSWFFDIWQPEEVDEAECWPVTPGETWHGFTDADDDHMFLDPVKVTILTPGMDEQGNMSEEGIPAALVAKFLDERGVVVEKTGPYNLLFLFSIGIDKTRAMGLLRGLTEFKRAYDLNLRVKNMLPDLYAEDPDFYRNMRIQDLAQGIHKLIRQHDLPGLMLRAFEVLPEMIMTPHQAWQRQIKGEVETVALDQLPGRVSANMILPYPPGVPLLMPGERITQQSRAVLDFLLMLCSIGQHYPGFETDIHGAKRNEDGVYQVRVLKHAC

SEQ ID NO: 13615 - protein, 188 aa, Salmonella typhimurium LT2
MAKFVPAIFLDRDGTINVDHGYVHEIDAFEFIDGVIDAMRELKKMGYALVVVTNQSGIARGKFTEAQFETLTEWMDWSLADRDVDLDGIYYCPHHPQGSIEEFRQVCDCRKPHPGMLISARDFLHIDMAASYMVGDKLEDMQAAAAANVGTKVLVRTGKPVTAEAENAADWVLNSLADLPSAIKKQQK

SEQ ID NO: 13616 - protein, 879 aa, Salmonella typhimurium LT2
METPVSRSALYGKLAGPLFRSLESATAFCKLRSNPWVELTHWLHQLTQQPDNDILHVLRHYQIPLSDVEKALLRQLDMLPAGASAISDFSHHIDLSVEKAWMLASVRYGDNKIRSGWLLLALLTTPELRRVLSSICAPLATLPVDELTEILPSLIETSPEAQERPYDGSGLASAIPGESSQAIPNGGQDGKSALAKYCQDMTAQARDGKIDPVTGREHEIRTMTDILLRRRQNNPLLTGEAGVGKTAVVEGFALAIAQGEVPPALREVRLLALDVGALLAGASMKGEFESRLKGLLEEAGRSPQPVILFVDEVHTLVGAGGASGTGDAANLLKPALARGTLRTIGATTWSEYKRHIEKDPALTRRFQVLQIAEPEEIPAMEMVRGLVDTLEKHHNVLILDEAVRAAVQLSHRYIPARQLPDKAISLLDTAAARVALTLHTPPASVQFLRQQLKAAEMERSLLQKQEKMGIQSDERRDALMARIFSLNNELTASESRWQRELELVHTLQELRLAESDADDKTTLQQAETALREWQGDAPVVFPEVSAAVVAAIVADWTGIPAGRMVKDEASQVLELPARLAQRVTGQDGALAQIGERIQTARAGLGDPRKPVGVFMLAGPSGVGKTETALALAEAIYGGEQNLVTINMSEFQEAHTVSTLKGAPPGYVGYGEGGVLTEAVRRHPWSVVLLDEIEKAHHDVHELFYQVFDKGGMEDGEGTHVDFKNTTLLLTTNVGSDLISQMCEDPALMPDATGLKEALMPELRKHFPAAFLGRVTVIPYLPLDETSRGVIARLHLDRLVARMSEQHGVTLTYSEELVAHIVACCPMHETGARLLIGYIEQHILPRLSRYWLQAMTEKAAIRQIDIGVNGDEQIVFEIVC

SEQ ID NO: 13617 - protein, 456 aa, Salmonella typhimurium LT2
MESNNKLKRGLSTRHIRFMALGSAIGTGLFYGSADAIKMAGPSVLLAYIIGGVAAYIIMRALGEMSVHNPAASSFSRYAQENLGPLAGYITGWTYCFEILIVAIADVTAFGIYMGVWFPAVPHWIWVLSVVLIICAINLMSVKVFGELEFWFSFFKVATIIIMIVAGIGIIVWGIGNGGQPTGIHNLWSNGGFFSNGWLGMIMSLQMVMFAYGGIEIIGITAGEAKDPEKSIPRAINSVPMRILVFYVGTLFVIMSIYPWNQVGTNGSPFVLTFQHMGITFAASILNFVVLTASLSAINSDVFGVGRMLHGMAEQGSAPKVFAKTSRRGIPWVTVLVMTIALLFAVYLNYIMPENVFLVIASLATFATVWVWIMILLSQIAFRRRLPPEEVKALKFKVPGGVVTTIAGLIFLVFIIALIGYHPDTRISLYVGFAWIVLLLIGWIFKRRRDRQLAQA

SEQ ID NO: 13618 - protein, 464 aa, Salmonella typhimurium LT2
MKNASTASGASVSDAASKNEPTLQRGLQNRHIQLIALGGAIGTGLFLGIGPAIQMAGPAVLLGYGVAGIIAFLIMRQLGEMVVEEPVSGSFAHFAWKYWGPFAGFLSGWNYWVMFVLVGMAELTAAGIYMQYWLPDVPTWVWAAAFFIIINAVNLVNVRLYGETEFWFALIKVLAIIGMIGFGLWLLFSGHGGEHASIDNLWRYNGFFATGWHGLLLSLAVIMFSFGGLELIGITAAEARDPQKSIPKAVNQVVYRILLFYIGSLVVLLALYPWVEVKSNSSPFVMIFHNLDSNVVASALNFVILVASLSVYNSGVYSNSRMLFGLSVQGNAPKFLTRVSHRGVPVNSLILSGAITSLVVLINYLLPQKAFSLLMALVVATLLLNWIMICLAHLRFRAAMRRKGRETQFKALFYPAGNYLCIAFLALILVLMCTMDDMRLSAILLPVWIVFLFIAFTVLRRKAH

SEQ ID NO: 13619 - protein, 362 aa, Salmonella typhimurium LT2
MNHTEIRVVTGPANYFSHAGSLERLTDFFTPEQLSHAVWVYGERAIAAARPYLPEAFERAGAKHLPFTGHCSERHVAQLAHACNDDRQVVIGVGGGALLDTAKALARRLALPFVAIPTIAATCAAWTPLSVWYNDAGQALQFEIFDDANFLVLVEPRIILQAPDDYLLAGIGDTLAKWYEAVVLAPQPETLPLTVRLGINSACAIRDLLLDSSEQALADKQQRRLTQAFCDVVDAIIAGGGMVGGLGERYTRVAAAHAVHNGLTVLPQTEKFLHGTKVAYGILVQSALLGQDDVLAQLITAYRRFHLPARLSELDVDIHNTAEIDRVIAHTLRPVESIHYLPVTLTPDTLRAAFEKVEFFRI

SEQ ID NO: 13620 - protein, 386 aa, Salmonella typhimurium LT2
MRNNPLIPKSKLPNLGTTIFTQMSALAQKHQAINLSQGFPDFDGPRYLHERLAYHVAQGANQYAPMTGAQALREAIADKTAEIYGYRPDDVSDITVTAGATEALYAAITALVRAGDEVICFDPSYDSYAPAVALSGGVLKRIALTPPHFRVDWQAFSALLSERTRLVILNTPHNPTATVWRQADIEALWQAIGEREIYVLSDEVYEHICFAAEGHASVLAHPQLRERAVAVSSFGKTFHMTGWKIGYCVAPAAISAEIRKVHQYLTFCVNTPAQLALADMLRAAPEHYRALPDFYRKKRDVLVNALAQSRLKVLPCEGTYFLLIDYSAVSTLNDVEFCQWLTEEVGVAAIPLSVFCAAPFPHQLIRLCFAKQESTLLAAAERLCKL

SEQ ID NO: 13621 - protein, 554 aa, Salmonella typhimurium LT2
MCSIFGVFDIKTDAAELRKKALELSRLMRHRGPDWSGIYACDNAILAHERLSIVDVNAGAQPLYNARKTHVLAVNGEIYNHQTLRAEYGDRYAFQTGSDCEVILALYQEKGPDFLDDLQGMFAFALYDSEKDAYLIGRDHIGIIPLYMGYDEFGNFYVASEMKALTPVCRTIKEFPAGSYLWSKDGEIRQYYQRDWFEFDAVKDNVTDKNALRQALEESVKSHLMSDVPYGVLLSGGLDSSVISAITKKFAARRVEDQERSEAWWPQLHSFAVGLEGSPDLKAAQEVANHLGTVHHEIHFTVQEGLDAIRDVIYHIETYDVTTIRASTPMYLMSRKIKAMGIKMVLSGEGSDEVFGGYLYFHKAPNAKELHEETVRKLQALHMYDCARANKAMSAWGVEARVPFLDKKFLDVAMRINPQDKMCGNGKMEKHVLRECFESYLPASVAWRQKEQFSDGVGYSWIDTLKEVAAKQISDQQLETARFRFPYNTPSSKEAYLYREIFEELFPVPSAAECVPGGPSVACSSAKAIEWDEAFKTMDDPSGRAVGVHQSAYQ

SEQ ID NO: 13622 - protein, 555 aa, Salmonella typhimurium LT2
MSEAEARPTNFIRQIIDEDLASGKHTTVHTRFPPEPNGYLHIGHAKSICLNFGIAQDYQGQCNLRFDDTNPVKEDIEYVDSIKNDVEWLGFHWSGDIRYSSDYFDQLHAYAVELINKGLAYVDELTPEQIREYRGTLTAPGKNSPFRDRSVEENLALFEKMRTGGFEEGKACLRAKIDMASPFIVMRDPVLYRIKFAEHHQTGNKWCIYPMYDFTHCISDALEGITHSLCTLEFQDNRRLYDWVLDNITIPVHPRQYEFSRLNLEYTVMSKRKLNLLVTDKHVEGWDDPRMPTISGLRRRGYTAASIREFCKRIGVTKQDNTIEMASLESCIREDLNENAPRAMAVIDPVKLVIENYPQGESEMVTMPNHPNKPEMGSREVPFSGEIWIDRADFREEANKQYKRLVMGKEVRLRNAYVIKAERVEKDAEGNITTIFCTYDADTLSKDPADGRKVKGVIHWVSAAHALPIEIRLYDRLFSVPNPGAAEDFLSVINPESLVIKQGYGEPSLKAAVAGKAFQFEREGYFCLDSRYATADKLVFNRTVGLRDTWAKAGE

SEQ ID NO: 13623 - protein, 248 aa, Salmonella typhimurium LT2
MLSIKDLQVSVEEKAILRGLNLEIRPGEVHAIMGPNGSGKSTLSATLAGREDYEVTGGSVTFKGKDLLELSPEERAGEGIFMAFQYPVEIPGVSNQFFLQTALNAVRAYRGQASLDRFDFQDLMEEKIALLKMPEDLLTRSVNVGFSGGEKKRNDILQMAVLEPELCILDESDSGLDIDALKIVAEGVNALRDDKRAFIIVTHYQRILDYIKPDYVHVLYQGRIVRSGDFTLVKQLEEQGYGWLTEQQ

SEQ ID NO: 13624 - protein, 447 aa, Salmonella typhimurium LT2
MKKVKKLSLTDLVLYGLVFMVPIAPVSLYGVVYNLSHGMVALVYIIGAIAMFFTAYSYSTLSQHISSSGSAYAYAGVCINPAVGFLTGWILLLDYLLFPTLVAVLGGVAVHAILPQIPVWVWPLIYVAIGTGVNYLGIQQTAKFDKLLVFIQLGILAIFVLLIVRLMLLDSSQITLSFRPFFDSQWFTPGLIATAISVAALNFLGFDAISTLSEESEGGGRAVSKATLLALVLATVLFIIVVAFAAFATGNVDRFAEGNATNEAFFTIAGNVGGIWLKVAFSIIVAFVCAVGNIITAQTAVSRVLFSMGRDRMLPAFLAHVHTTRKTPDYAILFTGGVTLLLSYLFSGKIESISTLVNFGALFAFFVVNLCVFILFNFRMKAQRRIFAHVISPIMGMIVIGYVCLNMNIHALILGISWAAIGIAILCYRKAHNQNIAIDLEGKKLLD

SEQ ID NO: 13625 - protein, 509 aa, Salmonella typhimurium LT2
MRIGIPKERLPNETRVAATPKTVEQLLKLGFSVAIESGAGQLASFDDKAFAQAGADIVDGNAIWQSEIILKVNAPEEEEIALLNPGTTLVSFIWPAQNPGLMEKLAERKVTVMAMDSVPRISRAQSLDALSSMANIAGYRAIVEAAHEFGRFFTGQITAAGKVPPAKVMVIGAGVAGLAAIGAANSLGAIVRAFDTRPEVKEQVQSMGAEFLELDFKEEAGSGDGYAKVMSEAFIKAEMALFAAQAKEVDIIVTTALIPGKPAPKLITRDMVDSMKAGSVIVDLAAQNGGNCEYTVANQVVTTDNGVKVIGYTDLPGRLPTQSSQLYGTNLVNLLKLLCKEKDGNIDVDFDDVVIRGVTVIRDGDITWPAPPIQVSAQPQAAPKAAPAPKEPEKPTSPWRKYALMALAIILFGWLADVAPKEFLGHFTVFALACVVGYYVVWNVSHALHTPLMSVTNAISGIIVVGALLQIGQGGWVSFLSFIAVLIASINIFGGFTVTQRMLKMFRKN

SEQ ID NO: 13626 - protein, 337 aa, Salmonella typhimurium LT2
MRNHKQSDRVLNLPAGYFGIVLGTIGMGFAWRYASQIWGISHWPGDIMVILAMIIWALLTLAFLSRLVRFPHSVMAEVRHPVMSSFVSLFPATTMLVAIGFVPWYRPLAVALFSVGVVIQLAYAAWQTAGLWRGAHPEEATTPGLYLPTVANNFISAMACGALGYNDAGLVFLGAGVFSWLSLEPVILQRLRSCGELPAVLRTSLGIQLAPALVACSAWLSVNGGEGDTLAKMLFGYGLLQLLFMLRLMPWYLSQPFNASFWSFSFGVSALATTGLHLGHGSESGLFHILAVPLFIFTNAIIALLLVRTFLLLVQGTLLIRTERAALLKTEEKNDRS

SEQ ID NO: 13627 - protein, 70 aa, Salmonella typhimurium LT2
MTTKITGLVKWFNPEKGFGFITPKDGSKDVFVHFSAIQSNEFRTLNENQEVEFSVEQGPKGPSAVNVVAL

SEQ ID NO: 13628 - protein, 404 aa, Salmonella typhimurium LT2
MSYKIMAINAGSSSLKFQLLEMPQGDMLCQGLIERIGMADAQVTIKTHSQKWQETVPVADHRDAVTLLLEKLLGYQIINSLRDIDGVGHRVAHGGEFFKDSTLVTDETLAQIERLAELAPLHNPVNALGIHVFRQLLPDAPSVAVFDTAFHQTLDEPAYIYPLPWHYYAELGIRRYGFHGTSHKYVSGVLAEKLGVPLSALRVICCHLGNGSSICAIKNGRSVNTSMGFTPQSGVMMGTRSGDIDPSILPWIAQRESKTPQQLNQLLNNESGLLGVSGVSSDYRDVEQAANTGNRQAKLALTLFAERIRATIGSYIMQMGGLDALVFTGGIGENSARARSAVCHNLQFLGLAVDEEKNQRNATFIQTENALVKVAVINTNEELMIAQDVMRIALPATEGLCVPA

SEQ ID NO: 13629 - protein, 355 aa, Salmonella typhimurium LT2
MSQKYLFIDRDGTLISEPPSDFQVDRFDKLAFEPEVIPVLLKLQKAGFKLVMITNQDGLGTQSFPQADFDGPHNLMMQIFTSQGVCFDEVLICPHLPADDCDCRKPKVKLVERYLAEQAMDSANSYVIGDRATDIQLADNMGITGLRYHRETLNWTMIGEQLTKRDRYAHVVRNTKETQIDVSVWLDREGNSKINTGVGFFDHMLDQIATHGGFRMEITVKGDLYIDDHHTVEDTGLALGEALKLALGDKRGICRFGFVLPMDECLARCALDISGRPHLEYKAEFTYQRVGDLSTEMIEHFFRSLSYTMGVTLHLKTKGKNDHHRVESLFKAFGRTLRQAIRVEGDTLPSSKGVL

SEQ ID NO: 13630 - protein, 576 aa, Salmonella typhimurium LT2
MSSITMTDNKTFLNELARLVGHSHLLTDPAKTARYRKGFRSGQGDALAVVFPGSLLELWRVLNACVNADKIILMQAANTGLTEGSTPNGNDYDRDIVIISTQRLDKLHLLDNGQQVLAWPGTTLYALEKALKPLGREPHSVIGSSCIGASVIGGICNNSGGSLVQRGPAYTEMSLFARIDDQGKLQLVNHLGIDLGHTPEQILSKLDDERIKDEDVRHDGRHAHDHDYVTRVRDINADTPARYNADPDRLFESSGCAGKLAVFAVRLDTFAAEKNQQVFYIGTNQPAVLTEIRRHILANFDNLPVAGEYMHRDIYDIAEQYGKDTFLMIDKLGTDKMPFFFTLKGRTDAMLEKVKFFRPHFTDRAMQKFGHLFPSHLPPRMKNWRDKYEHHLLLKMAGDGVAEAQRWLNEFFKSAEGGFFTCTPEEGSKAFLHRFAAAGAAIRYQAVHADEVEDILALDIALRRNDTDWFEHLPPEIDSQLVHKLYYGHFMCHVFHQDYIVKKGVDVHALKAQMLELLQARGAQYPAEHNVGHLYKAPETLTRFYRQNDPTNSMNPGIGKTSKRKFWQENTPDETH

SEQ ID NO: 13631 - protein, 397 aa, Salmonella typhimurium LT2
MTHVTSAIIVGGGIGGAATALSLARQGIKVMLLEKAHEIGEIGAGIQLGPNAFSALDSLGVGDVARQRAVFTDHITMMDAVNAEEVVCIETGQAFRDHFGGPYAVIHRVDIHATVWEAVLTHPGVEYRTSTHIVDIRQTPDDVTVFDEQGNSWTADILVGCDGVKSVVRQSLLGDAPRVTGHVVYRAVIDCDDMPDDLRINAPVLWAGPHCHLVHYPLRGGQQYNLVVTFHSRQQEEWGVKDGSKEEVLSYFAGIHPRPRQMLDKPTSWRRWSTADREPVAKWGTERITLVGDAAHPVAQYMAQGACMALEDAVTLGKALERCDGDAQQAFALYESVRIPRTARIVWSTREMGRLYHAAGVERQVRNLLWKGKSQEAFYRGIEWLYGWKEDNCLEPR

SEQ ID NO: 13632 - protein, 714 aa, Salmonella typhimurium LT2
MSRIIMLIPTGTSVGLTSVSLGVIRAMERKGVRLSVFKPIAQPRAGGDAPDQTTTIVRANSTLPAAEPLKMSHVESLLSSNQKDVLMEEIIANYHANTKDAEVVLVEGLVPTRKHQFAQSLNYEIAKTLNAEIVFVMSQGTDTPEQLNERIELTRSSFGGAKNTNITGVIINKLNAPVDEQGRTRPDLSEIFDDSSKAQVIKIDPAKLQESSPLPVLGAVPWSFDLIATRAIDMARHLNATIINEGDIKTRRVKSVTFCARSIPHMLEHFRAGSLLVTSADRPDVLVAACLAAMNGVEIGALLLTGGYEMDARISKLCERAFATGLPVFMVNTNTWQTSLSLQSFNLEVPVDDHERIEKVQEYVANYVNAEWIESLTATSERSRRLSPPAFRYQLTELARKAGKRVVLPEGDEPRTVKAAAICAERGIATCVLLGNPDEINRVAASQGVELGAGIEIVDPEVVRESYVARLVELRKSKGMTEPVAREQLEDNVVLGTLMLEQDEVDGLVSGAVHTTANTIRPPLQLIKTAPGSSLVSSVFFMLLPEQVYVYGDCAINPDPTAEQLAEIAIQSADSAIAFGIEPRVAMLSYSTGTSGAGSDVEKVREATRLAQEKRPDLMIDGPLQYDAAVMADVAKSKAPNSPVAGRATVFIFPDLNTGNTTYKAVQRSADLISIGPMLQGMRKPVNDLSRGALVDDIVYTIALTAIQASQQQQ

SEQ ID NO: 13633 - protein, 550 aa, Salmonella typhimurium LT2
MQNPYTVADYLLDRLAGCGIGHLFGVPGDYNLQFLDHVIDHPTLRWVGCANELNAAYAADGYARMSGAGALLTTFGVGELSAINGIAGSYAEYVPVLHIVGAPCSAAQQRGELMHHTLGDGDFRHFYRMSQAISAASAILDEQNACFEIDRVLGEMLAARRPGYIMLPADVAKKTAIPPTQALALPVHEAQSGVETAFRYHARQCLMNSRRIALLADFLAGRFGLRPLLQRWMAETPIAHATLLMGKGLFDEQHPNFVGTYSAGASSKEVRQAIEDADRVICVGTRFVDTLTAGFTQQLPAERTLEIQPYASRIGETWFNLPMAQAVSTLRELCLECAFAPPPTRSAGQPVRIDKGELTQESFWQTLQQYLKPGDIILVDQGTAAFGAAALSLPDGAEVVLQPLWGSIGYSLPAAFGAQTACPDRRVILIIGDGAAQLTIQEMGSMLRDGQAPVILLLNNDGYTVERAIHGAAQRYNDIASWNWTQIPPALNAAQQAECWRVTQAIQLAEVLERLARPQRLSFIEVMLPKADLPELLRTVTRALEARNGG

SEQ ID NO: 13634 - protein, 338 aa, Salmonella typhimurium LT2
MIIERARELAVRAPARVVFPDALDERVLKAAHYLQQYGLARPVLVASPFALRQFALSHRMAMDGIQVIDPHSNLSMRQRFAQRWLARAGEKTPPDAVEKLSDPLMFAAAMVSAGEADVCIAGNLSSTANVLRAGLRVIGLQPGCKTLSSIFLMLPQYAGPALGFADCSVVPQPTAAQLADIALASADTWRAITGEEPRVAMLSFSSNGSARHPNVANVQQATELVRERAPQLLVDGELQFDAAFVPEVAAQKAPDSPLQGRANVMIFPSLEAGNIGYKITQRLGGYRAVGPLIQGLAAPLHDLSRGCSVQEIIELALVAAVPRQADVSRERSLHTLVE

SEQ ID NO: 13635 - protein, 759 aa, Salmonella typhimurium LT2
MDEQLKQSALDFHEFPVPGKIQVSPTKPLATQRDLALAYSPGVAAPCLEIEKDPLAAYKYTARGNLVAVISNGTAVLGLGNIGALAGKPVMEGKGVLFKKFAGIDVFDIEVDELDPDKFINVVAALEPTFGGINLEDIKAPECFYIEQKLRERMNIPVFHDDQHGTAIISTAAILNGLRVVEKNISDVRMVVSGAGAAAIACMNLLVALGMQKHNIVVCDSKGVIYKGREPNMAETKAAYAVDDSGKRTLDEVIDGADIFLGCSGPKVLTQEMVKKMARAPMILALANPEPEILPPLAKEVRPDAIICTGRSDYPNQVNNVLCFPFIFRGALDVGATAINEEMKLAAVRAIAELAHAEQSEVVASAYGDQDLSFGPEYIIPKPFDPRLIVKIAPAVAKAAMDSGVATRPIADFDAYIDKLTEFVYKTNLFMKPIFSQARKDPKRVVLPEGEEARVLHATQELITLGLAKPILIGRPSVIEMRIQKLGLQIKAGVDFEIVNNESDPRFKEYWSEYYQIMKRRGITQEQAQRAMIGNHTAIGAIMVQRGEADAMICGTIGDYHEHFSVVKAVFGYRDGVHTAGAMNALLLPSGNTFIADTYVNEDPTPEQLAEIAVMAAETVRRFGIEPKVALLSHSNFGSSNSLSASKMRETLERVRERAPDLMIDGEMHGDAALVESIRNDRMPDSPLKGAANILVMPNMEAARISYNLLRVSSSEGVTVGPVLMGVSKPVHVLTPIASVRRIVNMVALAVVEAQTTPL

SEQ ID NO: 13636 - protein, 404 aa, Salmonella typhimurium LT2
MKLPIYLDYSATTPVDPRVAEKMMQFLTLDGTFGNPASRSHRFGWQAEEAVDIARNQIAELVGADPREIVFTSGATESDNLAIKGAANFYQKKGKHIITSKTEHKAVLDTCRQLEREGFEVTYLAPQRNGIIDLNELEAAMRDDTILVSIMHVNNEIGVVQDIATIGEMCRARGIIYHVDATQSVGKLPIDLSQLKVDLMSFSGHKIYGPKGIGALYVRRKPRIRIEAQMHGGGHERGMRSGTLPVHQIVGMGEAYRIAKEEMETEMARLRGLRNRLWNGIKDIEEVYLNGDLEQGAPNILNVSFNYVEGESLIMALKDLAVSSGSACTSASLEPSYVLRALGMNDELAHSSIRFSLGRFTTEEEIDYTIDLVRKSIGRLRDLSPLWEMYKQGVDLNSIEWAHH

SEQ ID NO: 13637 - protein, 396 aa, Salmonella typhimurium LT2
MLDAQTIATVKATIPLLVETGPKLTAHFYDRMFTHNPELKEIFNMSNQRNGDQREALFNAIAAYASNIENLPALLPAVEKIAQKHTSFQIKPEQYNIVGTHLLATLDEMFNPGQEVLDAWGKAYGVLANVFIHREAEIYHENASKDGGWEGTRPFRIVAKTPRSALITSFEFEPVDGGTVAEYRPGQYLGVWLKPEGFAHQEIRQYSLTRKPDGKGYRIAVKREDGGQVSNWLHHHASVGDGVHLAAPAGDFFMNVAADTPVSLISAGVGQTPMLAMLDTLAKEQHTAQVNWFHAAENGDVHAFADEVSELGRTLPRFTAHTWYREPTESDRAQRLFDSEGLMDLSKLEAAISDPAMQFYLCGPVGFMQFAAKQLVSLGVNNENIHYECFGPHKVL

SEQ ID NO: 13638 - protein, 301 aa, Salmonella typhimurium LT2
MSTDKTYCGFIAIVGRPNVGKSTLLNKLLGQKISITSRKAQTTRHRIVGIHTEGPYQAIYVDTPGLHMEEKRAINRLMNKAASSSIGDVELVIFVVEGTRWTPDDEMVLNKLRDGKAPVILAVNKVDNVQEKVDLLPHLQFLASQMNFLDIVPISAETGMNVDTIAGIVRKHLPEAIHHFPEDYITDRSQRFMASEIIREKLMRFLGAELPYSVTVEIERFVTNERGGYDINGLILVEREGQKKMVIGNKGAKIKTIGIEARKDMQEMFEAPVHLELWVKVKSGWADDERALRSLGYVDDL

SEQ ID NO: 13639 - protein, 285 aa, Salmonella typhimurium LT2
MSTILKWAGNKTAIMAELKKHLPEGPRLVEPFAGSCAVMIETDYPHYLVADINPDLINLYQVIKNDVEYFIKEGRYLFEARNDPEAYYKTRQEFNLRHGGAIERALYFLYLNRHGYRGLCRYNLDGYFNVPYGNYKKPYFPENEIRAFAEKAKRATFICASYDETLALLQTGDVVYCDPPYDGTFNGYHTAGFTENDQFHLASILERRSSEGHPVIVSNSDTSLTRSLYRDFTRHRITAKRSMGVAAGDSKTAVEIIATKSACWFGVDLASGPDISVETEVRAWQ

SEQ ID NO: 13640 - protein, 392 aa, Salmonella typhimurium LT2
MKEVVIVGALRTPIGCFQGTLARHSAVELGSMVVKALIERTGVDANAIDEVILGQVLTAGAGQNPARQSAIKGGLPTTVSAITINDVCGSGLKALHLATQAIQCGEADIVIAGGQENMSRAPHVLNDSRSGALPDADNLVDSLVHDGLWDAFNDYHIGVTAENLAREYGISRELQDAYALSSQQKARAAIDTGRFKDEIVPIVTQRNGQTAIVDTDEQPRADASAEGLALLHPAFDSLGSVTAGNASSINDGAAAVMMMSEAKAQALGLPVLARIRAFASVGVDPALMGIAPVYATRRCLERAGWQLTEVDLIEANEAFAAQALSVGKMLEWDERRVNVNGGAIALGHPIGASGCRILVSLVHEMVKRDARKGLATLCIGGGQGVALTIERD

SEQ ID NO: 13641 - protein, 402 aa, Salmonella typhimurium LT2
MNEFPVVLVINCGSSSIKFSVLDVATCDVLMAGIADGMNTENAFLSINGDKPINLAHSNYEDALKAIAFELEKRDLTDSVALIGHRIAHGGELFTQSVIITDEIIDNIRRVSPLAPLHNYANLSGIDAARHLFPAVRQVAVFDTSFHQTLAPEAYLYGLPWEYFSSLGVRRYGFHGTSHRYVSRRAYELLDLDEKDSGLIVAHLGNGASICAVRNGQSVDTSMGMTPLEGLMMGTRSGDVDFGAMAWIAKETGQTLSDLERVVNKESGLLGISGLSSDLRVLEKAWHEGHERARLAIKTFVHRIARHIAGHAASLHRLDGIIFTGGIGENSVLIRQLVIEHLGVLGLTLDVEMNKQPNSHGERIISANPSQVICAVIPTNEEKMIALDAIHLGNVKAPVEFA

SEQ ID NO: 13642 - protein, 390 aa, Salmonella typhimurium LT2
MKFVDEASILVVAGDGGNGCVSFRREKYIPKGGPDGGDGGDGGDVWMEADENLNTLIDYRFEKSFRAERGQNGASRDCTGKRGKDVTIKVPVGTRVIDQGTGETMGDMTKHGQRLLVAKGGWHGLGNTRFKSSVNRTPRQKTNGTPGDKRDLLLELMLLADVGMLGMPNAGKSTFIRAVSAAKPKVADYPFTTLVPSLGVVRMDSEKSFVVADIPGLIEGAAEGAGLGIRFLKHLERCRVLLHLIDIDPIDGSDPVENARIIIGELEKYSQDLAAKPRWLVFNKIDLMDKTEAEEKAKAIAEALGWEGKYYLISAASQLGVKDLCWDVMTFIIENPIAQAEEAKQPEKVEFMWDDYHRQQLAEVEEDADDDWDDDWDEDDEEGVEFIYKR

SEQ ID NO: 13643 - protein, 328 aa, Salmonella typhimurium LT2
MSHLALQPGFDFQQAGKEVLEIEREGLAELDQYINQHFTLACEKMFNCTGKVVVMGMGKSGHIGRKMAATFASTGTSSFFVHPGEAAHGDLGMVTPQDVVIAISNSGESSEIAALIPVLKRLHVPLICITGRPESSMARAADVHLCVKVPKEACPLGLAPTSSTTATLVMGDALAVALLKARGFTAEDFALSHPGGALGRKLLLRVSDIMHTGDEIPHVNKHATLRDALLEITRKNLGMTVICDESMKIDGIFTDGDLRRVFDMGGDMRQLGIAEVMTPGGIRVRPGILAVDALNLMQSRHITSVLVADGDQLLGVLHMHDLLRAGVV

SEQ ID NO: 13644 - protein, 1486 aa, Salmonella typhimurium LT2
MLYDKSLEKDNCGFGLIAHIEGEPSHKVVRTAIHALARMQHRGAILADGKTGDGCGLLLQKPDRFFRIVAEERGWRLAKNYAVGMIFLNKDPELAAASRHIVEEELQQETLSIVGWRDVPTNEGVLGEIALSSLPRIEQIFVNAPAGWRPRDMERRLFIARRRIEKRLQDDKDFYVCSLSNLVNIYKGLCMPADLPRFYLDLADLRLESAICLFHQRFSTNTVPRWPLAQPFRYLAHNGEINTITGNRQWARARTYKFQTPLIPDLQSAAPFVNETGSDSSSLDNMLELLLAGGMDIIRAMRLLVPPAWQNNPDMDQDLRAFFDFNSMHMEPWDGPAGIVMSDGRFAACNLDRNGLRPARYVITKDKLITCASEVGIWDYQPDEVVEKGRVGPGELMVIDTRGGRILHSAETDDDLKSRHPYKEWMEKNVRRLVPFEELPDEEVGSRELDDDLLASYQKQFNYSAEELDSVIRVLGENGQEAVGSMGDDTPFAVLSSQPRIIYDYFRQQFAQVTNPPIDPLREAHVMSLATSIGREMNVFCEAEGQAHRLSFKSPILLYSDFKQLTTMKEEHYRADRLDITFDVTETTLNATVKALCDKAEQMVRNGTVLLVLSDRNIGKNRLPVPAPMAVGAVQTRLVEQSLRCDANIIVETGSARDPHHFAVLLGFGATAIYPYLAYETLGRLIDTQAIAKNYRTVMQNYRNGINKGLYKIMSKMGISTIASYRCSKLFEAVGLHDDVVNLCFQGVVSRIGGASFDDFQQDLLNLSKRAWLARKPISPGGLLKYVHGGEYHAYNPDVVRTLQQAVQSGEYSDYQEYAKLVNERPASTLRDLLAIHPDGEAVTIDEVEPASELFKRFDTAAMSIGALSPEAHEALAEAMNSLGGNSNSGEGGEDPARYGTNKVSRIKQVASGRFGVTPAYLVNADVIQIKVAQGAKPGEGGQLPGDKVTPYIAKLRYSVPGVTLISPPPHHDIYSIEDLAQLIFDLKQVNPKAMISVKLVSEPGVGTIATGVAKAYADLITIAGYDGGTGASPLSSVKYAGCPWELGLVETQQALVANGLRHKIRLQVDGGLKTGVDIIKAAILGAESFGFGTGPMVALGCKYLRICHLNNCATGVATQDDKLRKNHYHGLPFKVTNYFEFIAREVRELMASLGVTRLVDLIGRTDLLKELEGFTAKQQKLALSRLLETAEPHPGKALYCTENNPPFDNGVLNAQLLQQAKPFVDARQSKTFWFDIRNTDRSVGASLSGYIAQTHGDQGLASDPIKAHFSGTAGQSFGVWNAGGVELYLTGDANDYVGKGMAGGLIAIRPPVGSAFLSHKASIIGNTCLYGATGGRLYAAGRAGERFGVRNSGAITVVEGIGDNGCEYMTGGIVCVLGKTGVNFGAGMTGGFAYVLDEDGEFRKRVNPELVEVLDVDSLAIHEEHLRGLITEHVQHTGSQRGEEILSRWSSFSTQFALVKPKSSDVKALLGHRSRSAAELRVQAQ

SEQ ID NO: 13645 - protein, 483 aa, Salmonella typhimurium LT2
MQLEVILPLVAYLVVVFGVSIYAMRKRTAGTFLNEYFLGSRSMGGIVLAMTLTATYISASSFIGGPGAAYKYGLGWVLLAMIQLPAVWLSLGILGKKFAILARRYNAVTLNDMLFARYQSRLLVWLASLSLLVAFIGAMTVQFIGGARLLETAAGIPYETGLLIFGVSIALYTAFGGFRASVLNDTLQGLVMLVGTIVLLVGVIHAAGGLSQAVDTLHALDPKLVTPQGADDILSPAFMTSFWVLVCFGVIGLPHTAVRCISYKDSKAVHRGIIIGTIVVAILMFGMHLAGALGRAVLPDLTVPDLVIPTLMVKVLPPFAAGIFLAAPMAAIMSTINAQLLQSSATIIKDLYLNLRPDQMQNEIRLKRMSAAITLLLGALLLLAAWKPPEMIIWLNLLAFGGLEAVFLWPLVLGLYWERANAAGALSAMIVGGVLYALLATFNIQYLGFHPIVPALLLSLLAFLIGNRFGSSASQATVLSTDK

SEQ ID NO: 13646 - protein, 269 aa, Salmonella typhimurium LT2
MFTDTINKCAANAARIARLSANNPLGFWVSSAMAGAYVGLGIILIFTLGNLLDPSVRPLVMGATFGIALTLVIIAGSELFTGHTMFLTLGVKAGTISHGQMWAILPQTWLGNLVGSVFVALLYSWGGGSLLPVDTSIVHSVALAKTTAPATVLFFKGALCNWLVCLAIWMAIRTEGTAKFLAIWWCLLAFIASGYEHSVANMTLFALSWFGHHSDAYTLAGIGHNLLWVTLGNTLSGVVFMGLGYWYATPKSERPAPAKINQPEAAANN

SEQ ID NO: 13647 - protein, 369 aa, Salmonella typhimurium LT2
MVTTAIFPSRYVQGKGALTTHLPQELAALGHKALILQDPVVHNTYRDTVATALHGVIEFDIEVFSSECCDEEIARISARAQEIGADVIVGMGGGKTLDTAKATGASLRLPIAVVPTLASTDAPCSSLVVIYTPEGKFKRYLMIPRNPTLVLVDSSIIAAAPVRFLVSGIGDALATWFEAEDCRIKGAGNMTTRPGPMTAFELARFCYTTLMRYGRLAKLACEQHQVTPALEHVIEANTLLSGLGFESGGLAAAHAIHNGLTVLPATHKYWHGEKVAFGTLAMLMLTDRAPELIEEVYQFCEDIGLPTTLADIGLAGVSDDELLAVARASCQTGETIHNEPFTITPEAVQAALRAADAVGQARKKIDLAG

SEQ ID NO: 13648 - protein, 425 aa, Salmonella typhimurium LT2
MKPMHIAMALFSAAMFFVLAGVFMGVQLELDGTKLVVDTAADIRWQWIFIGTAVVFFFQLLRPMFQKAVKHVSGPKFILPAIDGSTVKQKLFLMALLVIAVAWPFMVSRGSVDIATMTMIYIILGLGLNVVVGLSGLLVLGYGGFYAIGAYTFALLNHYYGLGFWTCLPLAGLVSAAAGFLLGFPVLRLRGDYLAIVTLGFGEIVRILLLNNTEITGGPNGISQIPKPTLFGLEFSRSTREGGWDTFSNFFGVKYDPSDRVIFLYLVALLLVVLSLFVINRLLRMPLGRAWEALREDEIACRSLGLSPTRIKLTAFTISAAFAGFAGTLFAARQGFVSPESFTFAESAFVLAIVVLGGMGSQFAVILAAVLLVVSRELMRDFNEYSMLMLGGLMVLMMIWRPQGLLPMTRPQLKLKSGQAKGEQA

SEQ ID NO: 13649 - protein, 324 aa, Salmonella typhimurium LT2
MKPSIILYKTLPDDLLHRLEAHFTVTQVPNLHPETVAQHAQAFASAQGLLGASETVNRALLEKMPALRAASTISVGYDNVEVDALTARKIVLMHTPAVLTETVADTVMALMLATARRVVDVAERVKAGEWTESIGPAWFGVDVHHKTLGIVGMGRIGMALAQRAHFGFTMPVLYHARRRHQEAEDRFNARYCDLDTLLQEADFVCVILPLTAETRHLFGATQFARMKSSAIFINAGRGPVVDENALIAALQNGEIYAAGLDVFEQEPLSVDSPLLNMSNVVAVPHIGSATHETRYNMMACAVDNLIDALQGKIEKNCVNPQAAG

SEQ ID NO: 13650 - protein, 401 aa, Salmonella typhimurium LT2
MFELDTLSTLVAATLVLLLGRKLVQSVSLLKKYTIPEPVAGGLLVAVALLVLKKSVGWEVNFDMTLRDPLMLAFFATIGLNANLASLRKGGRVVGVFLVVVVGLLLMQNAIGIGMASLLGLDPLMGLIAGSITLSGGHGTGAAWSKLFVERYGFASATEVAMACATFGLVLGGLIGGPVARYLVKHSTTPDGMPDDQAVPTAFEKPDVGRMITSLVLIETIALIAICLTVGKIVAQLLAGTVLELPVFVCVLFVGVILSNGLALVGFYRVFERAVSVLGNVSLSLFLAMALMSLKLWELASLALPMLAILVVQTIFMALYAIFVTWRMMGKNYDAAVLAAGHCGFGLGATPTAIANMQAITDRFGPSHMAFLVVPMVGAFFIDIVNALVIKLYLMLPMFAG

SEQ ID NO: 13651 - protein, 562 aa, Salmonella typhimurium LT2
MASSGTTSTPQRFTGAEFIVHFLERQGIRIVTGIPGGSILPVYDALSQSTQIRHILARHEQGAGFIAQGMARTEGKPAVCMACSGPGATNLVTAIADARLDSIPLICITGQVPASMIGTDAFQEVDTYGISIPITKHNYLVRNINELPQVMSDAFRLAQSGRPGPVWIDVPKDVQTATIELDALPSPAEKSPPPEFSAESIREAAAMINAAKRPVLYLGGGVINAPTRVRELAEKAQLPTTMTLMALGMLPKAHPLSLGMLGMHGARSTNFILQEADLLIVLGARFDDRAIGKTEQFCPNAKIIHVDIDRAELGKIKQPHVAIQADVDDVLAQLIPHIEAQPREAWHQLVADLQQEFPCSIPQENNPLSHYGLINAVAACVDDNAIITTDVGQHQMWTAQAYPLNRPRQWLTSGGLGTMGFGLPAAIGAALANPGNKVLCFSGDGSLMMNIQEMATASENQLDVKIILMNNDALGLVHQQQSLFYKQGVFAATYPGSINFMQIAAGFGLDTCDLNNEADPQAALQAIIRRPGPALIHVRIDAEEKVYPMVPPGAANTEMVGE

SEQ ID NO: 13652 - protein, 548 aa, Salmonella typhimurium LT2
MDSQRNLLVIALLFVSFMIWQAWEQDKNPQPQTQQTTQTTTTAAGSAADQGVPASGQGKMITVKTDVLDLTINTRGGDVEQALLPAYPKELGSNEPFQLLETTPQFIYQAQSGLTGRDGPDNPANGPRPLYNVEKEAFVLADGQNELQVPMTYTDAAGNTFTKTFVFKRGDYAVNVNYSVQNAGEKPLEVSTFGQLKQSVNLPPHRDTGSSNFALHTFRGAAYSTPDEKYEKYKFDTIADNENLNVSSKGGWVAMLQQYFATAWIPRNDGTNNFYTANLGNGIVAIGYKAQPVLVQPGQTGAMTSTLWVGPEIQDKMAAVAPHLDLTVDYGWLWFISQPLFKLLKWIHSFVGNWGFSIIIITFIVRGIMYPLTKAQYTSMAKMRMLQPKIQAMRERLGDDKQRQSQEMMALYKAEKVNPLGGCFPLIIQMPIFLALYYMLMGSIELRHAPFALWIHDLSAQDPYYILPILMGVTMFFIQKMSPTTVTDPMQQKIMTFMPVIFTVFFLWFPSGLVLYYIVSNLVTIIQQQLIYRGLEKRGLHSREKKKS

SEQ ID NO: 13653 - protein, 330 aa, Salmonella typhimurium LT2
MKTAYIAKQRQISFVKSHFSRQLEERLGLIEVQAPILSRVGDGTQDNLSGCEKAVQVKVKALPDAQFEVVHSLAKWKRQTLGQHDFSAGEGLYTHMKALRPDEDRLSPLHSVYVDQWDWERVMGDGERQFSTLKSTVEAIWAGIKATEAEVHKQFGLAPFLPEQIQFVHSQELLARFPDLDAKGRERAIAKELGAVFLVGIGGKLSDGHRHDVRAPDYDDWSSASELGYAGLNGDILVWNPVLEDAFELSSMGIRVDADTLMRQLALTGDEDRLQLEWHQALLRGEMPQTIGGGIGQSRLTMLLLQLPHIGQVQCGVWPAQVRESIPAIL

SEQ ID NO: 13654 - protein, 548 aa, Salmonella typhimurium LT2
MNGAQWVVHALRAQGVKTVFGYPGGAIMPVYDALYDGGVEHLLCRHEQGAAMAAIGYARSTGKTGVCIATSGPGATNLITGLADALLDSVPVVAITGQVSAPFIGTDAFQEVDVLGLSLACTKHSFLVQSLEELPRIMAEAFEVANAGRPGPVLVDIPKDIQLASGELEPWFTTVANEATFPQADVEQARQMLEQAKKPMLYVGGGVGMAQAVPALRKFIAVTQMPVTCTLKGLGAVEADYPYYLGMLGMHGTKAANFAVQECDLLIAVGARFDDRVTGKLNTFAPNASVIHMDIDPAEMNKLRQAHVALQGDLNSLLPALQQPLKIDAWRQSCAELRAEHAWRYDHPGETIYAPLLLKQLSERKPADSVVTTDVGQHQMWSAQHMTYTRPENFITSSGLGTMGFGLPAAVGAQVARPNDTVICISGDGSFMMNVQELGTVKRKQLPLKIVLLDNQRLGMVRQWQQLFFQERYSETTLTDNPDFLMLASAFGIPGQHITRKDQVEAALDTMLASEGPYLLHVSIDELENVWPLVPPGASNSEMLEKLS

SEQ ID NO: 13655 - protein, 232 aa, Salmonella typhimurium LT2
MNKILLVDDDRELTSLLKELLEMEGFNVLVAHDGEQALELLDDSIDLLLLDVMMPKKNGIDTLKALRQTHQTPVIMLTARGSELDRVLGLELGADDYLPKPFNDRELVARIRAILRRSHWSEQQQSSDNGSPTLEVDALSLNPGRQEASFDGQTLELTGTEFTLLYLLAQHLGQVVSREHLSQEVLGKRLTPFDRAIDMHISNLRRKLPERKDGHPWFKTLRGRGYLMVSAS

SEQ ID NO: 13656 - protein, 810 aa, Salmonella typhimurium LT2
MSVIAQAGAKGRQLHKFGGSSLADVKCYLRVAGIMAEYSQPDDMMVVSAAGSTTNQLISWLKLSQTDRLSAHQVLQTLRRYQCDLISGLLPADAADDLTSAFISDLERLAALLDGGVTDAVYAEIVGHGEIWSARLMSAVLNQQGLDAAWLDARAFLRAERAAQPQVDEGLSYPLLQQLLAQHPGKRLVVTGFISRNHDGETVLLGRNGSDYSATQIGALAGVSRVTIWSDVAGVYSADPRKVKDACLLPLLRLDEASELARLAAPVLHARTLQPVSGSDIDLQLRCSYTPDQGSTRIERVLASGTGARIVTSHDDICLIEFQVPASQDFRLAHKELDHILKRAQVRPLAVGVHRDRQLLQFCYTAEVADSVLKLLDDVGLPGELRLRQGLALVAMVGAGVTRNPLHCHRFWQQLKGQPVEFTWQSEEGISLVAVLRTGPTESLIQGLHQSVFRAEKRIGLMLFGKGNIGSRWLELFAREQSTLSARTGFEFVLAGVVDSRRSLLNYEGLDASRALAFFDDEAVEQDEESLFLWMRAHPYDDLVVLDVTASAQLADQYLDFASHGFHVISANKLAGASASDKYRQIHDAFEKTGRYWLYNATVGAGLPINHTVRDLIDSGDTILSISGIFSGTLSWLFLQFDGTVPFTDLVDQAWQQGLTEPDPRVDLSGKDVMRKLVILAREAGYDIEPDQVRVESLVPAHCEEGSIDHFFENGDALNEQMVQRLEAARELGLVLRYVARFDANGKARVGVEAVRPEHPLAALLPCDNVFAIESRWYRDNPLVIRGPGAGRDVTAGAIQSDINRLAQLL

SEQ ID NO: 13657 - protein, 367 aa, Salmonella typhimurium LT2
MDRIIQSPGKYIQGANVIARLGDYLKPMANNWLVVGDKFVLGFAEETLRKSLTDAGLSVEIAPFGGECSQNEIDRLRAVAEKSQCGAVLGIGGGKTLDTAKALAHFMNVPVAIAPTIASTDAPCSALSVIYTDAGEFDRYLLLPHNPNMVIVDTQIVAGAPARLLAAGIGDALATWFEARACSRSGATTMAGGKCTQAALALAELCYNTLIEEGEKAMLAAEQHVVTPALERVIEANTYLSGVGFESGGLAAAHAIHNGLTAIPDAHHYYHGEKVAFGTLTQLVLENAPVEEIETVAALCHSVGLPITLAQLDIKQDIPAKMRTVAEASCAEGETIHNMPGGATPDEVYAALLVADQYGQRFLQEWE

SEQ ID NO: 13658 - protein, 220 aa, Salmonella typhimurium LT2
MELYLDTANVAEVERLARIFPIAGVTTNPSIVAASKESIWDVLPRLQNAIGEEGTLFAQTMSRDAKGMVEEAKRLNNAIPGIVVKIPVTAEGLAAIKLLKKEGIVTLGTAVYSASQGLLAALAGAKYVAPYVNRVDAQGGDGIRMVQELQTLLEHHAPDSMVLAASFKTPRQALDCLLAGCQAITLPLDVAQQMLNTPAVESAIEKFEQDWKNAFGNLNL

SEQ ID NO: 13659 - protein, 441 aa, Salmonella typhimurium LT2
MIRGKIDILVVDDDVSHCTILQALLRGWGYNVALAYSGHDALAQVREKVFDLVLCDVRMAEMDGIATLKEIKALNPAIPILIMTAFSSVETAVEALKAGALDYLIKPLDFDRLQETLEKALAHTRETGAELPSASAAQFGMIGSSPAMQHLLNEIAMVAPSDATVLIHGDSGTGKELVARALHACSARSDRPLVTLNCAALNESLLESELFGHEKGAFTGADKRREGRFVEADGGTLFLDEIGDISPLMQVRLLRAIQEREVQRVGSNQTISVDVRLIAATHRDLAEEVSAGRFRQDLYYRLNVVAIEMPSLRQRREDIPLLADHFLRRFAERNRKVVKGFTPQAMDLLIHYDWPGNIRELENAIERAVVLLTGEYISERELPLAIAATPIKTEYSGEIQPLVDVEKEVILAALEKTGGNKTEAARQLGITRKTLLAKLSR

SEQ ID NO: 13660 - protein, 449 aa, Salmonella typhimurium LT2
MTEIVVSKFGGTSVADFDAMNRSADIVLSDTNVRLVVLSASAGITNLLVALAEGMEPGERFATLDAIRKIQFDILDRLRHPNVIREEIERLLENITILAEAASLATSAALTDELVSHGELMSTLLFVEILRERDVQAHWFDVRKVMRTSDRFGRAEPDVAALAELAAQQLLPRLSETLVITQGFIGSESKGRTTTLGRGGSDYTAALLAEALHAARVDIWTDVPGIYTTDPRVVPVAQRIDEIDFEEAAEMATFGAKVLHPATLLPAVRSDIPVFVGSSKDPQAGGTLVCNKTQNPPLFRALALRRNQTLLTLHSLNMLHSRGFLAEVFGILARHNISVDLITTSEVSVALTLDTTGSTSTGDTLLTQSLLMELSALCRVEVEEGLALVALIGNNLSKACGVGKEVFGVLEPFNIRMICYGASSHNLCFLVPGDDAEKVVQKLHQNLFE

SEQ ID NO: 13661 - protein, 469 aa, Salmonella typhimurium LT2
MVDQVKVAADEQAPAEQSLRRNLTNRHIQLIAIGGAIGTGLFMGSGKTISLAGPSIIFVYMIIGFMLFFVMRAMGELLLSNLEYKSFSDFASDLLGPWAGYFTGWTYWFCWVVTGMADVVAITAYAQFWFPGLSDWVASLAVVILLLSLNLATVKMFGEMEFWFAMVKIVAIVALIVVGLVMIAMHFKSPTGVEASFAHLWNDGGWFPKGISGFFAGFQIAVFAFVGIELVGTTAAETKDPEKSLPRAINSIPIRIIMFYVFALIVIMSVTPWSSVVPDKSPFVELFVLVGLPAAASVINFVVLTSAASSANSGVFSTSRMLFGLAQEGVAPKAFAKLSKRAVPAKGLTFSCICLLGGVVMLMVNPSVIGAFTMITTVSAILFMFVWTIILCSYLVYRKKRPHLHEKSIYKMPLGKLMCWVCMAFFAFVLVLLTLEDDTRQALIVTPLWFIALGLGWLLIGKKRMAGMR

SEQ ID NO: 13662 - protein, 650 aa, Hypocrea lixii
MGPAVGIDLGTTYSCVGIFREDRCDIIANDQGNRTTPSFVAFTDTERLIGDAAKNQVAMNPQNTVFDAKRLIGRKFADSEVQADMKHFPFKIVDKGSKPVVEVEFKGEKKTFTPEEISSMILTKMRETAESYLGTTVNNAVITVPAYFNDSQRQATKDAGLIAGLNVLRIINEPTAAAIAYGLDKKVEGERNVLIFDLGGGTFDVSLLTIEEGIFEVKSTAGDTHLGGEDFDNRLVNHFVNEFKRKNKKDLSTNARALRRLRTACERAKRTLSSSAQTSIEIDSLFEGIDYYTSITRARFEELCQDLFRSTIQPVDRVLADAKIDKSQVHEIVLVGGSTRIPRIQKLITDYFNGKEPNKSINPDEAVAYGAAVQAAILSGDTSSKSTNEILLLDVAPLSLGIETAGGMMTKLIPRNTTIPTKKSEVFSTFSDNQPGVLIQVYEGERQRTRDNNLLGKFELTGIPPAPRGVPQIEVTFDVDANGIMNVSAVEKGTGKSNKIVITNDKGRLSKEEIERMLSDAEKYKEEDEAEGRRVSAKNGLESYAYSLRNTLNDPKVDEKIEAGDKETLKTEIDKIVQWLDENQQATREEYEEHQKELEGVANPIMMKFYGAGGEGGMPGGMPGGPGGFPGAGGAPHAGGDDGPTVEEVD

SEQ ID NO: 13663 - protein, 208 aa, Mimulus aurantiacus
MEKNDVGVVRKGAWTPEEDILLRKCIHTFGEGKWHLVPIRAGLNRCRKSCRLRWLNYLKPSIKRGQFTKDEVDLIIRLHKLLGNRWSLIAGRLPGRTANDVKNSWNSHIEKKLRSSSSSSTKTITRTNIVRSRPQAFSNIPPPDPTTHDVNSKIDPPCETDDEIMRWWRDLLRTTLMEDHDQMMQLVNINNADADEDHQTEMSARRLS

SEQ ID NO: 13664 - protein, 154 aa, Picea abies
  misc_feature (6)..(6): Xaa can be any naturally occurring amino acid
  unsure (1)..(154): unsure at all Xaa locations
TGDYEXIDVVIEESKLKNERFFVDIDFKAQFEIARPTDEYSALLQKIPNLFVGRAEKLCGIIKIMCNAARRSLKERGMCIPPWRKYRYMQTKWVSSYKRTTNPGSSAAQGALLQFPFSDIALKPTGWDTRVVRQMNKDKDNNVTDRYVKAKSKC

SEQ ID NO: 13665 - protein, 175 aa, Picea abies
QMVAPFSIGYASALMASGSGDGMDAWVFDIDETLLSNLPYYVAHQFGGEVFDNNAFSNWVDLAKAPALASSYRLYAHLLELGVKIFLLTGRDETQRNATEKNLVRAGYHTWEALLLRGLDDHGKTAVLYKSERRLKIEQDGFGIRGNSGDQWSDVYGYSIGDRTFKLPNPMYYIA

SEQ ID NO: 13666 - protein, 206 aa, Picea abies
  misc_feature (206)..(206): Xaa can be any naturally occurring amino acid
  unsure (1)..(206): unsure at all Xaa locations
SNGVVASQDDKYWDCHERGWEKEKKNGKFLDDQQLPSNKRTMNYMESAQIENRINSSIDDSHCCYKKSPNRKHHALSRGSAAAPKRIVSTRTRSESSVGGDGCQWRKYGQKMTKNNPLPRSYYKCAWAPGCPVKKQVQRCAEDPAIVITTYKGEHTHSLSPLVMAAMHGGVSNLLTGEGVNTENFVAANQFMPCTATISTSTLFPX

SEQ ID NO: 13667 - protein, 203 aa, Daucus carota
MRERKSTLGEMTLEDFLVKAGIVAEGEKNPGAVPVVDAIEIPQQSAPQQAQWMPYQTPPVHQLAPPQQQQNMFSVFMPGPPLPQTLPVTANPMMDGYADAMSPSALMDNVSDTQAPGRKRNASGVVVEKTVERRQKRMIKNRESAARSRARKQAYTQELELKVSRLEEENERLRNRQEAEKELPNVLPPEPKYQLRRTSSAHF

SEQ ID NO: 13668 - protein, 386 aa, Glycine max
MAKPVSIEVWNPSGKYRVVSTKPMPGTRWINLLIQNDVRLEICTEKKTILSVEDIIALIGDKCDGVIGQLTEDWGEELFSALSKAGGKAFSNMAVGYNNVDVDAANKYGVAVGNTPGVLTETTAELAASLTLAAARRIVEADEFMRAGLYDGWLPHLFVGNLLKGQTVGVIGAGRIGSAYARMMVEGFKMNLIYYDLYQSTRLEKFVTAYAAFLKANGETPVTWKRAATMDEVLQEADIISLHPVLDKTTYHLVNKERLAKMKKEAILINCSRGPVIDEAALVEHLKHNPMFRVGLDVFEEEPYMKPGLAELKNAIVVPHIASASKWTREGMATLAALNVLGKVKGYPVWFDANKVEPFLNENARPPAACPSIVNAKALGLPTSKL

SEQ ID NO: 13669 - protein, 318 aa, Listeria innocua Clip11262
MTASVFVAGKLLPETMEALDKWDVKTYKGKENITESELIKNVTDVEAIICPLSSPITAKVLESAKNLKIVANIGAGFDNIDVKKAQELGIAVTNTPDVSTEATAELTLGLILDVARRISAGDRLCRETPEQFKGWAPTFFLGTELSGKTLGIIGLGRIGQAVAKRAAAFGMKIIYSGHHPKEAAKQWDAEFVSQDELLKRSDVVTIHAAYSPSLKHLLNETTLNTMKSSAFLINAARGPVVEESALINALEKGVIAGAALDVFEFEPKIGAELGKLENVVLTPHIGNATVETRTEMGRMAISNVEAVLAGKQPLHSVY

SEQ ID NO: 13670 - protein, 580 aa, Listeria innocua Clip11262
MESMKWIWQYVRKYRLLMVGVFILIFIASGISIIYPLLGGKVIDDVVYQNKPNLLIPLLLIMIVSTIIRTICRYSYQIMCERIGQNSLFQIREDLYKKLQSLDFDFFNNTRVGDIMARMTGDTDAIRHFVSWVSYNILENVFLFSFAIIIMATIDWKLTLALVIITPLIAILTMKMSSKAQPVFYEIRESFSRLNSMVEENISGNRVVKAFAREDFEMKKFHEHNEDFKKRNLDSADVSRAYLPVLDSLAGVLVVITLIFGGYLVIKGQMTLGDLVAFNGFLWMLNGPMRMSGWLINDVQRFIASSFKIQDMMATNAKIPIHAEKPAPSLQGHVEFNNVSFHFEDDPNTDVLKNISLKASPGQTVAILGETGSGKSTLVNLICRFYDPTSGEILIDGVDARKWHVRELRNHIATVMQDIFLFSDTIEGNIAFGAPEATMEDVRKMARIADADHFIETMPESYDTIVGERGVGLSGGQKQRISLARALLKNPSILILDDTTSAVDMETEVKIQGELKKITENTTTFIIAHRISSVKEADEILILNHGEIIERGTHASLLAEKGYYFDIYNKQLGTEANVNG

SEQ ID NO: 13671 - protein, 318 aa, Listeria innocua Clip11262
MSNEYFDPKLKIFSLNSNRELAEEIAKEVGIELGKSSVTHFSDGEIQINIEESIRGCHVYVIQSTSNPVNQNLMELLIMIDALKRASAATINIVMPYYGYARQDRKARSREPITAKLVANLIETAGATRMITLDMHAPQIQGFFDIPIDHLNAVRLLSDYFSERHLGDDLVVVSPDHGGVTRARKMADRLKAPIAIIDKRRPRPNVAEVMNIVGNVEGKVCIIIDDIIDTAGTITLAAKALREAGATKVYACCSHPVLSGPAMKRIEDSPIEKLVVTNSIALPEEKWIDKMEQLSVAALLGEAIVRVHENASVSSLFE

SEQ ID NO: 13672 - protein, 690 aa, Listeria innocua Clip11262
MNRFFRNAIFYVIIFLVIIGIVASFNSNKEAAKDISYSEFVSKLEDGKVKSVEIQPDRSVYTIEGEFKSSDKSSDDKKTGLGQSKTSSTAFTTYALNSDTSLGDLQKTLDKEDVKTTVVPAKQNSGWVTFLTSIVPFVIIFILFFFLMSQSQGGGGGKVMSFGKSKAKLYNDDKKKVRFTDVAGADEEKQELVEVVEFLKDPRKFADLGARIPKGVLLVGPPGTGKTLLARAVAGEAGVPFFSISGSDFVEMFVGVGASRVRDLFENAKKNAPCIIFIDEIDAVGRQRGAGMGGGHDEREQTLNQLLVEMDGFGGNEGIIIIAATNRADVLDPALLRPGRFDRQIMVDRPDVKGREAVLRVHARNKPLAKSVDLKAIAQRTPGFSGADLENLLNEAALVAARSDKKEIDMSDLDEASDRVIAGPAKKNRVISEKERRTVAYHEGGHVIVGMVLDEAEVVHKVTIVPRGQAGGYAVMLPKEDRFLMTKAELMDRITGLLGGRVAEEVTFGEVTTGASNDFERATELARRMVTEWGMSDKIGPLQFTSGNGQVFMGRDFGSDKGYSDKIAYEIDTEVQSLIRYCYDRAKTIITEHQEQHKLIAETLLKVETLDARQIRSLFDDGVMPPDIDTIDVEAEYPSEKDEEVAGKSFEEEKEDLKEEKVEETQDEPKEVTSEDAPNIEQTPNDKKDE

SEQ ID NO: 13673 - protein, 218 aa, Listeria innocua Clip11262
MKFFLDTASVSEIKRISELGLVDGVTTNPTIIAKEGRPFEEVIKEICSIVDGPVSAEVIGLEADKMVEEARILAKWAPNVVVKIPMTEEGLKAVHTLTAEGIKTNVTLIFTVSQGLMAAKAGATYISPFLGRLDDIGTDGMILIKNLKKVLDNYGLKAEIISASIRHIGHLEEAAEAGAHIATIPGSLFPKLWSHPLTDKGIEGFLKDWEAFSQKEGN

SEQ ID NO: 13674 - protein, 216 aa, Listeria innocua Clip11262
MHLDSANLEDVKKIQTSSIFKGITTNPTILLKEKCNRETAIKRILELTDKQVFVQTVGFTYEEILADARMLLATFGKDKIAIKIPAHEAGTNVIDTLKKEDKAIQILGTAIYSADQAIAAALAGADFVAPYVNRMSAANIDPFKEIAGMRRFFDTKALKTQIMAASFKHSGQVMQAYESGADTVTIPYEIYLQMTNKVLAVEAIRVFNKDATLYEN

SEQ ID NO: 13675 - protein, 200 aa, Listeria innocua Clip11262
MDKQAILDNIHQTWQEEANAISRLPEVTSEEALVKTVETIAECTGKIVVAGCGTSGVAAKKLVHSFNCIERPAVFLTPSDAVHGTLGVLQKEDILILISKGGNTGELLNLIPACKTKGSTLIGVTENPESVIANEADIFFPVSVKKEPDPFNMLATASTMAVIASFDAIIVCLMTYMNYTKEQFSVIHPGGAVGNKLLNK

SEQ ID NO: 13676 - protein, 311 aa, Listeria innocua Clip11262
MTGKMKLFSVTSERPLATKIADYLDIPLCEVELQKFSDGEVKINIEESIRGTNAYVVQSMNANVNERLMELLIMVDALKRASVHSINIIMPYYGYARQDRKARSREPITAKLMANLIQRAGANRLITVDLHAAQIQGFFNIPIDHLSAVPLIGDYLIEKYGEEDVVVVAPDHSGVVRARRIADRLNAPIAILNRKPRPHEDEIMSVIGDVKGKVAIVVDDIIDTGVRATTSADILLEKGAVEVIACATHSVMAGDATERLQNSRIKEVITSDSIDLPEEKQFEKLTTISIGRILGRAIEGVQENRSLHPLF

SEQ ID NO: 13677 - protein, 553 aa, Listeria innocua Clip11262
MFKHILLSLNGYKASYLRNDVISGVGVAALTIPVAMGYAQVAGLPPIYGLYASFLPVIAYVIFASSPQLIFGIDATASAITGSIILGTAGLAAGSKEAIALAPILAFFCAVFLVLFSILKLGRFAKYISAPVLSGFISGLSVSIIMGQIPKIMGLKESGDSFFSSLGIIFGQFFQSNWISFAMGIVTIIIVITCKKVIPKIPMSLVVLVLGTMAAYFFKLDQYNVDIVGKIPVGFPSLALPDFGASSWALAIGGGLVCAIATFAGSLLPSESFAMRNKYTIDDNRELFAYGISNFVAAFSGCSPASASVSRTAANEQFRGKTQMVSIVAATIIALIVAFLSGLLYYMPQPVLSGIVFAALVGIIDVDVLKGLFRVSRREATVWIVAALGTLLVGVIFGVLLGIFLSFINVVSRSMKSPIAILGVIDGRHGYFDLKRKPEAKPIPNVVIYRYSASLFFGNFNKFADGLKEAVQDDTKLVIFEASAIINIDTTATESMKDLLKWLDDKGIEYYFADLIDHLKTSFRKHDLGYIIDNGYTKKTVEDALDAYYAEHK

SEQ ID NO: 13678 - protein, 605 aa, Listeria innocua Clip11262
MSGPGPGGGMRMQTAAKPKNFKQTLFRLLGYMKPRSVAIIVVFIFAILSTIFNIFSPKELGKATTEIFKGVMSPEGINNDKIFNILMIVLVLYLGSSLFSFIQQYVMSSVAQRTVYDMRKDLKAKMARLPLKYYDTRSNGDILSRSVNDMDNIANTLQQSLTQAITAIVQMIGVLIMMLTISWQMTLIVLVTVPISIILVAIIAGRSQRYFGAQQRNLGILNDTVEETYGGQTIIKAFGQEKKTLVKFDEVNEDYFKAAKKAQFISGIMMPVMQFVGNLGYVGVCVAGGIFVTNGTLQVGDIQSFTQYVQLFTQPISSVANIANIIQSTIASAERVFEMMDEEEEKDEIPANVNQVAGEEHSIVFDHVKFGYTPDKPLMTDLNIHVEEGQMVAIVGPTGAGKTTIINLLMRFYDVDGGEIRMRGIDTRDMTKDAVREKFGMVLQDTWLFNGTIADNIAYGREGATKDEVIGAAKAAYADDFIRRLPNGYDTILNEEGSNISQGQKQLLTIARAILSDPSILILDEATSSVDTRTELNIQLAMGNLMEGRTSFVIAHRLSTIRDADLILVMNHGSVIEQGTHQELLDAKGFYADLYNSQFTGAQAV

SEQ ID NO: 13679 - protein, 502 aa, Physcomitrella patens subsp. patens
MPLVLLKITRRPRLKLPPSPPAYPIIGHLHLLGKLPHQSMTNLAKKYGEIYSLRLGSVPAIVISTPEMAKEFLLTNDKIWSSRSVHMTSGYYFSYDYAGIAFAPSTPVWRSLRKICMSELFTQRRLEASKGLREEEMQYMIRSILDDAHQGRLIDLKLKINALTANIVARMVLNKRFTGCIDSTVETEAEAHQFKEMMEEHFLLLGVFMIGDYIPWLSPLDLGGTEKRMKSLRKRLDAFLDDILEVHEVKRAKGPIPEEDQDVIDVLLNEMYQQDSNESKQLDTNNVKSTILNLFAGGTDTSTVTIEWAMSEMLRNPTIMGKLKAELDARIGKDRRVRETDLSDLPYLQAVTKETFRLHPVGPLLIPHVSTHDCEVGGYHIPTGTRLYVNVYAIGRNPKVWDRPLEFDPERFMTGLNAGVDVKGKHFHLLPFGTGRRGCPALPLGLLIVQWTLATLVHALDLSLPQSMEPKDVDMTEAYGLTVPRAQSLYLNAKLRAADHLY

SEQ ID NO: 13680 - protein, 166 aa, Physcomitrella patens subsp. patens
MSRPDRTIGVALDYSASSKYALKWAVDNLLRQHDQLTVLIVHKEFNTEDSQYILFGKYGSQLIPLAEEEEPGTQRRYNLKQDEEVQSYLKEAVTAKKATVVFKVYWGDPKENICKSVNDVPLDFLVMGCRGLSALKRTFMGSVSNYVSNSVPCPVTIVKLPPNMSS

SEQ ID NO: 13681 - protein, 463 aa, Listeria innocua Clip11262
MNSLFRRKPIEDLMHNKSGSTHLKQTLGPLDLTLLGVGAIVGTGIFILPGTVAAKNAGPAIIFSFVIAAIVCAIAAMCYSEFASSVPVAGSAYTYGYVVFGELIGWLLGWALILEYGLAVASVASGWSSYLNALLSGFHISIPEAVSGPFNPEVGTFINLPAIIIVLVIAFLLTLGIKESTRVNTIMVAIKVGVILLFLVVGVFYVKPDNWQPFMPFGISGVMNGAALVFFAYLGFDAVSSAAEEVKNPQRTMPIGIIGSLLICTILYVAVSAVLTGMVPYTDLNVTDPVAYALQVINQDWVAGIVSLGAVVGMITVILVMSYGATRLIFAMGRDGLLPKVLAEINQKYQTPVKNTWIFAFIVAIISGLVPLDRLAELVNIGTLLAFMMVSIGIIFLRKNKSIQQSGFKVPFYPVLPIISFLLCAFLISRLSVHTWILCGIWFVIGLIVYFAYGRKNSELLKK

SEQ ID NO: 13682 - protein, 444 aa, Physcomitrella patens subsp. patens
MESALNQTGDDESNAQNLNLRSWAIRNRSTRWCGKGIVGWEFVTLQRGVEIAAVAWIHIILQGIPLIIRQWPRQSFHKAFAAAFPHRSQNGNIVSLHHGHELLDVNFSSAAVGDLFTMAMAAARLLSRRVCRSVLPSFSNSGISLASSPVVSPTDETLVSSRYLSISPVANKGFQCGKEDVRLRSLTQLVPFGRVFSTDATEGFSSEKIDDLSQTIVEAPKAPTVAPPRPFKLNNEQRKLAEVIGYKVVDRYTEDNFGKNKKPKAFAVVQVGSHQFKVSPNDLIYTEKLKYCDINDKLMLNKVLLLGSKDQTIVGRPTVPDAAVFAVVEEHALDEKVIIFKKKRRKNYRRTTGHRQVGTEPYRCLLVLDVCSGLLGIPKRYFLRFCTPKDQTELTRLRILEVKGINLDEPFPSVSQKLKATPSKKVNHTSADTNLGGIPTPALA

SEQ ID NO: 13683 - protein, 683 aa, Physcomitrella patens subsp. patens
MGGRRGASFLPLGIAPPKRERIAIAVKEPSLHGLRIKSSLKLIVIMGDNEKTPLLKPENRGIQNGKDVRFNTKLPGGTDLEVGDAVQAQNVGFGRILKLPTFAGRVIDIVTAHSDTDEGREAALKAVNHAILLIVVVVLVGSTATMVRAYLFSAASERVVARLKKDLFSHLIAQASILNEIAFFDVTRTGELLNRLSEDTQVIKNAATTNLSETLRSLATSIIGVGFMLQTSWHLTGLESIESLTLEIGLHAALALIIVPAISLGIRSFGKYLRELSHKTQAAAAVAASIAEESFGAVRTVRSFANEEYERSRYAEKVNVTLQLGLRQSMVVGLFSGGVSAAATLSIVAVVVYGARLTILGQMTTGTLTAFILYSLTVGLSLASLSGLYSTAMKAAGASRRVFQLLDRVSSMSKAGDAKPLGKDEEGEVKLENVWFSYPSRPKDLVLKGVNLTLKPGAKVALVGPSGGGKTTIANLVERFYDPDQGVITLNRINLKEIDHRHLHEKISIVSQEPTLFNCSIAENISYGLKDNVKHEDIERVSRMANAHEFVSKFPEGYETQVGERGVRLSGGQKQRIAIARALLMDSRVLLLDEATSALDAESEFLVQDAMDRLMKGRTVLVIAHRLSTVQSADTVAVIADGKVAEQGSHFELLKSNGLYAALVRRQLQGPGTSSATDLNELA

SEQ ID NO: 13684 - protein, 155 aa, Physcomitrella patens subsp. patens
MPPQVVHGGAQQVQGQHPLGQWTTGLCDCGDDPTNFCIAFCCTCITFGQIAEVIDQGATSCLLAGAGWLGMLMFTGCPCAISCLWRGKLRAKYNIQDDAFTDFCIHCWCEPCAVAQEFRELKNRGLDPALGWSLLSQQGYGAQPMGIPMQAPMQR

SEQ ID NO: 13685 - protein, 159 aa, Physcomitrella patens subsp. patens
MAAPWVLQRAGVTIPAGDEPDTHDDFKPVQKQADSLSPVHEAIEKDVKENQVMVFMKGVPQAPQCGFSAMVVRILDEYGVGYKSRNVLADPELRTAIKDYSKWPTIPQVYVNGEFVGGSDILISMHRVCLPFTAPMVSLLLWVLEMWIKFRTQISILTD

SEQ ID NO: 13686 - protein, 322 aa, Physcomitrella patens subsp. patens
MAIKESSPNGKPHVLMMQVDMPYLRDSLESKFNLLVLSEHTNRDEYLAMAGGSVRAVVTSTNSVVGAKLLEKLPNVEIVASFSVGLDKVDLDYCKQKGIVVTNTPEVLTEDCADLAIALLLATMRQICSADRYVRKGCWPKQGTYPLSYKMSGKDLGIVGLGRIGKAVAKRAEAFGCKIKYYARSDKKDVPYEYFSSVLELAKNSTMLVVCCAFTKETAKIIDRRVLDALGPEGFLVNISRGGVVDEPELVKALLECRLGGAGLDVYENEPIVPQELWNMDNVVLLPHVASGTWETRRAMADLISGNLEAHFSGKPVLTPVT

SEQ ID NO: 13687 - protein, 201 aa, Physcomitrella patens subsp. patens
MASEAADPSSSGAGAPEEIKISRSIRSCRGCLLYSSIMRERGRNPVCLGLSRSTDAQAYIPDGKMDNEVARNFRNFTDFKYACIGYSTHKEVNSNQLTQPTDSTNELPYCFGLEFLADRKPTTQAQERPHREDGPNALPRPPSSIGGLGGGGLSADEFATRFFRSSRLVATAVVNNVGRVASNIRSTIDKIFTSDQGRPKA

SEQ ID NO: 13688 - protein, 576 aa, Listeria innocua Clip11262
MKKVKASETLVQTLKNWDIDHVYGLPGDSIDTVVDALRKEQEAIEFIHVRHEEVASLAAAAYTKLTGKIGVALSIGGPGAIHLLNGMYDAKMDHVPMLVLAGQVTTDVLNTGFFQEVNLPAIFEDVAVYNKQIDNAETLADVVDEAIRTAYQEKGVAVLTIPNDIPSQEIKASLKAKPVKFEQEIPKLDEKAIQEAVTLIDKAEKPVILAGLGTKHAGPELIAFAEKAKIPIIHSLPAKTIVPDDHPNALGNLGKIGTKPAYEAMQETDLLLMFGNDYPYSDYLPKKAECIQIDINPAKISKRYQATVGLVGDAAEIISNLTTKIAPVEERKFLQACQENMQEWWKWLEEDISQTTDPIAPEVVMANIQKIADKDAIFSIDVGTATVWSTRYLHLTPENDFIVSAWLGTMGCGLPGAIAAKKAYPDRQAIAIVGDGGFSMVMQDFVTAVGLDMPMIVVVLNNQQLSFIKYEQQSAGELNYAIDLPDINYAKFAESCGGIGFRVEKMADLEAAFENAKLATKPVIIDVSVDSAAAPLPGKIVMDEALGYTKFEIQSVLEDHRFAKMPPLKTILRRFL

SEQ ID NO: 13689 - protein, 61 aa, Physcomitrella patens subsp. patens
HYRGVRQRPWGKFAAEIRDSSKNGSRIWLGTFDTAELAALAYDRAALQMRGSKALLNFPLK

SEQ ID NO: 13690 - protein, 454 aa, Physcomitrella patens subsp. patens
MRCFDRAKIYVKAGDGGNGVVAFRREKYVPFGGPSGGSGGRGGDIYIEADTAMNSLLPFRKQVHFRADRGAHGKGSSREGANGPDCVVKVPVGTVIRAAEGQDVGSEREILLELTKPGQKELLLPGGRGGRGNAAFKTGRNKAPQLAEYGEVGAEMWIELELKLVADVGIVGVPNAGKSTLLSAISAAKPTVANYPFTTLLPNLGVVPIGYDASMVVADLPGLLEGAHQGIGLGHEFLRHTERCSVLVQVVDGTCTQAFEEYEAIRLELQLFNPELAEKPFVVAYNKMDTQEAVDQWPSFQESLEKQGIKAFPMSAATQEGTMAVVYQAYELLESRKRASLDEEKVNEDTEQVGDVVKKIRDAPIEKYEIISDKRTRTWEVKGAGLDRFTQMTNWEYFESVRRFQHVLIASGVNRSLREQGVKEGDTVIVGQVIPVHLPEFFLHALHQLVDSLL

SEQ ID NO: 13691 - protein, 630 aa, Physcomitrella patens subsp. patens
MTANAKHTLQFAPSSTQKSQGKHRLLASSVAFQTSSSLIAKGTTTICTLPKSRSLAVKAVVTNSSATVSKTPTEEAVKTRNPDLATVLVAEKLGEGGLDLLRKVSNVDALYNLTNDELCEKISNYDALIVRSATKVTRKVFQASNGRLKVVGRAGVGIDNVDLDAATELGCLVVNAPTANTVAAAEHGIALLTAMARNAAPADASMKSGKWERSKYVGVSLVDKTLAVMGFGKVGSEVARKAKGLGMHVISHDPYASADRARAIGVELVSFDEALARADFISLHMPLTPTTDKIFNDDTFKKCKKGVRLVNVARGGVIDEEALLRAIDSGVVAQAALDVFTTEPPKEGDSSWALVQHKNVTATPHLGASTVEAQEGVAVEIAEAVAGALAGELAATAVNAPMVPAEVITELAPYVTLAEKLGRLAVQLVSGGAGVKQVKVVYRSARDDGDLDTRLLRAMITKGLIEPVSSAFINLVNADYVAKQRGLKISEEREASVSAAGAPLESVSVTIADVDSKFASATGDLTRSITLEGKVKDGVPHLSKVGNFNVDVSLEGSIIFYRQVDQPGMIGKVGSILGEENVNIAFMSVGRTLRGLDAIVAIGTDEDLSKATIQKLADIPAIGELVFLKL

SEQ ID NO: 13692 - protein, 444 aa, Physcomitrella patens subsp. patens
MAVRTLWKQVRKRSVGGVALTAGFAASASLPEVVIVAAKRTPVGSFQGSLASLSAPELGSIAIRGALESVKLSPEHVNEVFMGNVLSSGVGQAPARQAALKGGLLPATVCTTVNKVCSSGMKAVMLGAQSIMLGINNVVVAGGMESMSNAPFILPRNLSSKMIGHVQLRDAMVADGLWDPHKDISMGSCAELCVDDLSISREAQDDYAITSYERAAAAQTLGVMKNEIVPVTIVGKKIVVVNHDEECLKFDPEKLKKLRPVFKEDGTITAGNSSSISDGAAVLLLTSAAFAHDHNLQILGRIRGFGDAEQDPEKFPTSPSLAIPKALEHAGLKKEDVDLYEINEAFSASFFTISVVSLANQQLLGLRSDQLNIHGGAVSIGHPIGASGARIIISLLTGLALKNLKIGVASICNGGGGASAIVIERVPEYRISLHGRGGNKSEKD

SEQ ID NO: 13693 - protein, 455 aa, Physcomitrella patens subsp. patens
KKERKKKREKLAAFVSRRDEPCCYGCGAVLQSSTAEAPGFLSLDIFEVKKKHHQLGTVLCGRCQLLSQGAMIPAVSGNGGYGEGKGFVSSDELRAQLTHLRYEKALIVKLVDIVDFNGSFLTRVRDLVGSNPIILVVTKVDLLPKGTDLAAVGDWVIQATIAKKLNVISVHLTSAKAATGISGFSALMLRQRQGRDVYVLGSANVGKSAFISTLLRDMGERDPIAAAAQRFRPIQSAMPGTTLGPIQIDAFSGGGSLYDTPGVHLHHRLAAAVSPEDLPLLAPRKRLAGRLISAPDPSLSLVGQSIFWGGVVRIDVLEAPENIALTFYGPNSIPVLGTLTPQAEVFYEKEVGVRLFPPGGDRAKNWPGLVNQEVVRFTVNSRKRPAGDLAISGLGWIAVGVVYSEEEETGYINHVVRLRVYTPKAVEVFMRPSIPVGVNAADWYEYMEVEDDESE

SEQ ID NO: 13694 - protein, 61 aa, Physcomitrella patens subsp. patens
HYRGVRQRPWGKFAAEIRDSAKNGARVWLGTFDTAEQAALAYDRAALNMRGSRALLNFPLK

SEQ ID NO: 13695 - protein, 458 aa, Listeria innocua Clip11262
MEEQKEELQRGLKNRHIQLIAIGGAIGTGLFLGAGKSIHLAGPSIMLVYLIIGAILFFVMRALGELLIHNPTTGSFTEFAEQFIGPWAGFITGWTYWFCWIVTGIAEITAVGMYVKFWVPDLPQWIPALGCVLILLLFNLATVKAFGEIEFWFAIIKVVVIIALIVIGFVLVFIGYKHGTSTASFSNLIDYGGFFPNGVAGFLLAFQMATFSFVGIELVGVTAGEADDPERTLPKAINNIPIRILIFYIGALLVLMSIYPWSNIDPDTSPFVSVFTMIGIPAAAGIINFVVLTAAMSSCNSGIFSTSRMLYTLSAEGKAPKKMHHLSSNGVPATALITSTACLLIGVFLNYILPEQVFILVTSIATICFIWVWGIILVAHLRFRHKHPEISAKSKFKMPLSPFMNWVSLIFFAGLLIILGFAADTRIALFVTPVWFLILAIAYQILKASNRKTKIRHN

SEQ ID NO: 13696 - protein, 547 aa, Physcomitrella patens subsp. patens
MFYKCIQTLFDDQLEVDVTSIMWRKCDNAVIFPTSLPGLVRKCTKVVTNSTKIYASFVPSTSKSESLRVPHSEVRNFVGHRADGVQTYTLNLMVRHLVVHRACSSLQCNSSFELGQQLMKVDESAQRKGKGDTAPACSILKELVAGAAEFWPCCKPIVSEVEIGNRRRVQEDEVKKTSTTVSSCSELDHGEPQYFLQESSSTGNDAATVGEHVSVVGEAEKEYIGNSTLHQELEASFHRGSQSFTAPSEVEEETSAFGSKRAFPDLNEADALPESLPTSKAQRLANFTGAILGAHSDPPVRKARVSVRTQSDSTTMNDGCQWRKYGQNTAKGNLCPRGLLPLYCGALLSRPQAGFCDNVQRCAHDKSVLITTYEGTHNHPIPPAGTAMASTTSAAANKTSTFASLTPIPTITLDFTRDPTTQLCLRLGGSKTAPATRNHFEASRETKTLDLTTSKKLDNLSSTAQFSLPCSRNSLHRVPKSVQTQAAPLSSSFSQARQQQLFVMMASIMCPGKYRGVRFLYRIGLAIFDGATGAASCAGDFSRNFSG

SEQ ID NO: 13697 - protein, 545 aa, Listeria innocua Clip11262
MELAFPVAVNHVIDTLLPGKDFGLIITAALALLFFYILNTFMQYIVTYFGHMLGLNIETDMRRDLFSHLQKQPFGFYDNQKTGKLMSRMTTDLFEIGEVAHHGPEDIFISIMSLFGAFFLMLNINVKLAISTFILVPILTVLIVYFNKRMTKVTTGIFKDLGNFNAGVENAISGVRVVQAFANEPHEKGRFAVLNQAYRKSKLMFYKVMGLSFSFNYFLMRLISLFALLFGAYFTINGEISYGEFVGFILLTNVFIRPIEKINNVIESYPKGFAGFKRFLEVMDTEPAIQDEKDAKPASAFRGDIEYKDVSFEYSDGKNVLSHINLSIKAGETVAFVGPSGAGKTTICNLLPRFYDVSDGEITIDAENIKHFTLPSLRAQIGVVQQDVFLFSGTVRENIAYGKLDASNEEIEHVVKLAHLSKVVEEMPDGLDTIIGERGVKLSGGQKQRLAIARMFLKNPPILILDEATSALDTETEQVIQASLEELAEGRTTLIIAHRLATIKHADRIIVVNETGIAETGTHDELLAKENGAYKRLYDAQFNTI

SEQ ID NO: 13698 - protein, 113 aa, Physcomitrella patens subsp. patens
MSGSGVWKFQSDGVISVEENPVADTSIPGPSMGLKVLLYSATNEYISNLEQLDAKLFGLGWREYFRNKYVRQYHRSDDTCDLITLPVLFRNIRTTHMYDIVVKTRSAFQVRDA

SEQ ID NO: 13699 - protein, 385 aa, Physcomitrella patens subsp. patens
MAAKQLAVQVHNAGGTLRVLSTKPMPGTQWIKTLTSVGCRVEVCTEPKVILSTDDIVSLIGNKCDGVIGQLTEDWGDTLFGALKKAGGHAYSNMAVGYNNVDVDAATRHGISVGNTPGVLTETTAELAAALTLAAARRVVEADDFMRAGKYEGWLPTLFVGNLLKGQTVGIIGAGRIGTAYARMMVEGFKMNVIYYDLYQATRLEKFVSAYGQFLESQGETPVHWRRASSPEDVLKEADVVSLHPVLDKTTYHLINKERLALMKKDAVLVNASRGPVVDETALVEHLKANPMFRVGLDVFEDEPYMKPGLGELSNAVVVPHIASASKWTREGMATLAAQNVAAKLKGWPVWSSPNVEPFLDEIKPAPKAAPSIINAKALCLSSMP

SEQ ID NO: 13700 - protein, 235 aa, Physcomitrella patens subsp. patens
MFVRNDTASDSGIAMVASCSPAAFQVKHGAVGLEDTSVSCGKNRSHYPTFDASGEDLGEEDHGDDCSQPSKKRRLTFDQVRFLEKNFDIENKLEPERKLLLAKELGLRPRQVAVWFQNRRARWRTKQLERDYESLTSGYKQLKSEFEAMLQEKQDLQGEVERLTEKLQTVQPGPADPSLEKSKKHISMSHPSPQWACEGSVKSERIPEIEANNDGLSPCKEEGSKETFSDSFSSE

SEQ ID NO: 13701 - protein, 332 aa, Physcomitrella patens subsp. patens
HKDPSTTQPPPRKSRTEIENDHFVYVNGIRYQKLGQIGKGGSSEVFKVIASNCSIYALKRINLKGRDWSTAQEFYQEIKYLKALRGKRHIIQLVDSEVTNQKVLEKRWEGQEISEEAFIYMVLEYGEIDLAGMLVAKRKEMQSSHETKIDENWLRFYWQQILEAVRTIHDERIVHSDLKPANFMLVRGELKLIDFGIAKAIQNDTTNIVRDSLGGTLNYMAPEACLQNQTDEEGLEIKQGRASDIWSLGCILYQMVYGHTPFAELGFYSKIQAITNPHHKIHYPDVPNPWLLDIMKRCLTWDRRKRLRIPELLEHPFLQPHLAPYCPRCEQI

SEQ ID NO: 13702 - protein, 490 aa, Physcomitrella patens subsp. patens
MADATPAIPSAYVSTGGVNPDWLNKGDNSWQLTAATFVGMQTVPALVILYGSIVKKKWAVNSAFMAFYAFAAVLLCWVGWAYKMSFGEKLIPIWGKAGTTLNFNYLLSQAELPASATYYSDGSVQVATLMPWYPMATQVYFQFVFAAITLVLLAGSVLGRMSFRAWMVFVPLWLTCSYTVGCFSVWGGGFLWQWGIIDYAGGYVIHLSSGVAGFTAAYWVGPRLSKDRERFPPNNVLLMLAGAGLLWMGWAGFNGGAALSANLVASIAIINTHVCAATSVLVWTFLDVVVFGKPSVIGAVQGMITGLVVITPGAGLVQGWAALVMGVFAGSIPWFTMMVVHKRSSLLQKVDDTLGVFHTHAVAGFLGGILSGCLAEPTLCNYFLPVLDLQGAFYGGIGGKQLGKQIAGALFIIGWNVVVTSIILNVIKLVIPLRMDDEHLLIGDDAEHGEEAYALWGDGEKYDSSVHGASEMDITNHGSKNNDKRPTVAL

SEQ ID NO: 13703 - protein, 544 aa, Listeria innocua Clip11262
MKKVLSNSVKGYTWARFRKDLLAGIIVGIIALPLGMSFAIASGVKPEYGIYSSFVAGIIVSIFGGSRFQIAGPTGAFIPVLLGIVLTYGYQDLLVAGMMAGVLLCLMGIFKLGTLIKFIPRPVTIGFTAGIAVTIFMGQVGNFLGLTGMEKHESFIANMKEIWLHLDSWNFYSVLISCICMFVLFVFPKILPRIPAPLIGLVITTGIAMLFFKDALPTIGSAYGEIPSTFPPFQFPDMTFANMSKLIGPAFVIAMLGGIESLLSAVVADGMTNTKHNSNRELIGQGIANIVTPMFGGIPATGAIARTATNINNGATSRVSGVIHGIFVLLTLLVLAPVAINIPIAAMAPILMLVAWNMSERKTFQHIIKLKSGDTLVLVITFLLTVFASLTVAVEVGLLLAVVLFAKQMGSSMQIEEIEPEGAEIAPHLHDKISIFTIRGPLFFGAAQIFQQNIIKAIHVKPEFLILRMGKVPIIDATAEGYFHQIEKEFSKQGGQILITGLTDKAKESLKGSGLYDRIGEEHFFLHTEDAVHYAENALSELSR

SEQ ID NO: 13704 - protein, 968 aa, Physcomitrella patens subsp. patens
MGNVGGSLGIPCRDRDNGCLCEQCKMAIQAGKAFGNLTGRLAPCRDYGSGCKCTQCETFRKAAIQSSQCLADNKRSGVSLGLLQSTSGSSTFPTPLTLEPAREVSRSIRHVTMSFTDLGSDVISVNQWFFQVPVLSRTEPYAEVNIVHSAVGLISQSDIDLAASCRALIVGFTVGLMGFAIATSARLAGARGVEEGELWAVAEVCIVRGVGGFWRFVRLLEIRARVKVNGPECAGAGGDRVPTADAARGLVQTFGCMVAVEESSFRVIGYSENAPDMLDLVPQGGVPSAGQQDVLGIGTDARTLLTPSSATALEKASSAADVTMLNPVSVHCRSSGKPFYAILHRIDVRVVIDSKPIRPHDAIAEAGSEGVSLYYGKRFWLLGVTPKEAQIKEIADWLLECHRDLTGLSTDSLADAGYPGAAELGDAVCGMAAAKITPKDFLFWFRSHTTKEIKWGGAKHDPDERDDGRRMHPLSSFKAFLEVVKRSLPWDDVEMDAIHSLQLILRGSFQDIDDSDTKTMIHAHLNDLKLQGMDELSLVANEMVRLIETATAPILAVDSSGFINGWNAKVAELTGLPVGEAMGRSLVKDLILEESAEVVERLLYFALEGEEEQNVEIQLKTFGPQKEKGAVILIVNACSSRDVADNVVGFCFVGHDVTGQKLVLDKFTRIQGDYKDIVMNPNPPIPPIFSTDEYGYCSEWNPSMEKLTGWKREEVLGELLVGEIFGMQFMCCRLKGQDAMTKFMIVLNSAMDGQDTDRFPFSFFDRQGKYVDALLTVNKRTDAEGSITGVSCFFHTTSVELLQVGLETLLRLIAIGCSVAETPNSCGFCATVCATRGVTCAALTAGDSAIALTVQRATEKVAFAKLKELAYICQEIKNLLFGIFVDTSAVCERQPRKILDDMDLESIEDGYLELKTSEFVMGTVMDAVVSQGMITSTEKGLQLIRETPREIKRAFVCLGTRFDYNKWR

SEQ ID NO: 13705 - protein, 378 aa, Physcomitrella patens subsp. patens
MVAPLPIPVAAPTTKNVGLSTCAGCHRTLGFGRFLTCINQNWHPDCFCCKSCRSPIVTKEFSVHGSDPYHRDCYKKLFHPKCEICYQYISYNAQGQIEYRSHPFWNQRYCPSHERDGSKCCCSCDRIEPVDRRYQSLGDGRKVCPECMESAVMTTKDCQPLYKNVLKFYRVNLGMPIEQDVPMLLVEREALNKAREVENDGHTHTPETRGLCLSEEKIFPVRQPHLFRFRHDVSRFEQVVENGGEPRKLTRHCEITAILVLYGLPMLLTGSILAHELMHAFIRLNGQFPNLENDVEEGICQVIAHMWLKAELENLTRRTSGSDDSSVSKRLGEFFLHQIETDSSQIYGDGFRAASKAVAAYGLPRTLHHLRRTGEILR

SEQ ID NO: 13706 - protein, 270 aa, Listeria innocua Clip11262
MGYYSPQEVTEITIEKGTQKANSSTLTLVLLGFLGGAFISLGYLLYIRAVGTMPHEWGSFATLIGASLFPVGLVCILLGGGELITGNMMAVAIAWYDKKISFQQLLRNWAIVSVMNLVGAFFVAYFFGHFVGLTEGDFLPKTLATAGAKINDPFWVAFVSGIGCNWFVGIAVWLCYAAKDFAGKILGIWFPVMAFVAIGFQHVVANMFIIPAAIFAGYYSWADFIWNVIPVYLGNVVGGAVFVSLFYFLAYKKNAPKKVKEEIHQPIEEN

SEQ ID NO: 13707 - protein, 105 aa, Physcomitrella patens subsp. patens
MVVPRSSHHTLVPEAVGRSRSVSNKPKSTSIKRARKVQEGRYRGVRQRPWGRYAAEIRDPNTKERKWLGTFDTAEDAALAYDTAARSMRGVKARTNFVYPSHETS

SEQ ID NO: 13708 - protein, 440 aa, Physcomitrella patens subsp. patens
MQENGHKKVKTVDEWLPVTGDRKAKWWYSAFHNVTAMVGAGVLGLPNAMVYLTWGPGVVVLVVSWMITLYTLWQMVEMHEMVEGKRFDRYHELGQEAFGHDLGLWIVVPQQLIVEVGVDIVYMVTGGTSLQNFYKLVCSGNCPMAHHTSAWIAIFSSVHFVLAQLPNFNSIAGVSLAAAIMSLSYSTIAWAIPASYGHSTPLVGPVNYKLPVQSVSAHVFNAFNALGTVAFAYAGHNVVLEIQATIPSTKERPSKIPMWRGVVLAYIIVAICYFPVALIGYWAYGNQVTDNILGYVGRPRGVVAMANLMVVVHVIGSYQIYAMPVFDMLESVLVKRFRLAPSRKLRLVTRSLYVAFTAFVGMTFPFFGALLGFFGGFAFAPTTYFLPCIMWLCIVKPKAFSFSWILNWVIIFLGVLLMLVSSIGGLRAIIVSASTYKFYE

SEQ ID NO: 13709 - protein, 217 aa, Physcomitrella patens subsp. patens
MCSTACSPVLHLSISPLLSFPSRTRAARAKLSSTDSIFSQFRQVSSRGRVLRVVRVRGLADEAGGSEKAGVDSTGDNGKSSAAVASSSSSSSSVSTGSTKGFGPSARPGSTKPSSKEKKKPGTVRRNAPEKPLIQSAPADNQMSQLETAYVASLTFLFALIFAEGIALAASGFLPEEWDQFFVNTLYPSFTPTVGLFLLLAAGYGVFKYLGYGPSQE

SEQ ID NO: 13710 - protein, 62 aa, Physcomitrella patens subsp. patens
QHFRGVRRRPWGKFPAEIRDPAKRGARVWLGTFDTAEEAAAAYDHAALRMRKSRALLNFPLK

SEQ ID NO: 13711 - protein, 470 aa, Physcomitrella patens subsp. patens
MIFSHAENPSNEVLRHRATAQDQERCIDIDDHNRKDNQALVRTLSHARDELRYFRNGLRCLGLDQSSKLKVTLSWILFALFTFIVPFVNLTSVSCPDCDPQHRHPFEGLVQLAETALAAVSFVCLSHIVRRHGLRRTLFLDRIVRESHEVRAGYESELHGAFSLLGSFLLPIALIEIAFRVWWYYYVTVSIPFIESHRRLKIILNVVLCSCGLLSWLYRTSVFLFTCILFRLMCHLQILRLKGYIKLLETTSNVSIILSEHMRIRSQLTIISHRFRAFLVAASFTISFSQVWSAFVLLSSYEKFNFFRAGDLVVCSVVQLTGLMLCLNGAAKITHRAQRIIGIVSQWHALATCNPHAVTDSQRTGEGDSNDPALWSSTIRGPAHPCVYNDSSDESDSDDEEQSPRHSTSIKQAFHDMENYQKRHALLCYLQQAKAGVSLYGCVLDRGFLYGIFACTFSLILVILGKTIIT

SEQ ID NO: 13712 - protein, 101 aa, Physcomitrella patens subsp. patens
MGIQDVKENPVLIYMKGVPDAPQCGFSAMVVHILDEYGVRYKTRNVLSDPELRNAIKEYSNWPTIPQVYVNGEFVGGSDILISMHRSGELKTLLKDVKNIR

SEQ ID NO: 13713 - protein, 384 aa, Physcomitrella patens subsp. patens
TEAVQRSHERVAFYTLKLSPDAFGSQEFQSPVKAGNGEYLMTLTLGSPPQSFDVIVDTGSDLNWVQCLPCRVCYQQPGPKFDPSKSRSFRKAACTDNLCNVSALPLKACAANVCQYQYTYGDQSNTNGDLAFETISLNNGAGTQSVPNFAFGCGTQNLGTFAGAAGLVGLGQGPLSLNSQLSHTFANKFSYCLVSLNSLSASPLTFGSIAAAANIQYTSIVVNARHPTYYYVQLNSIEVGGQPLNLAPSVFAIDQSTGRGGTIIDSGTTITMLTLPAYSAVLRAYESFVNYPRLDGSAYGLDLCFNIAGVSNPSVPDMVFKFQGADFQMRGENLFVLVDTSATTLCLAMGGSQGFSIIGNIQQQNHLVVYDLEAKKIGFATADC

SEQ ID NO: 13714 - protein, 675 aa, Physcomitrella patens subsp. patens
MVGKVQTASSLGQASEQSTAVDASGSSRHTLVPEKMGSRSVSQKLKAASIKRAKKVQEGRYRGVRRRPWGRYAAEIRDPNTKERRWLGTFDTAEDAALAYDTAARSMRGLKARTNFMYPTHETCLLSAAAALAAPNSLQHATHPVDLIAQKTLGEVLLLSSTNKSRNFDWQSTTTTCITQPSFDESSRNMLNSPSTQKQLVEFERNLFPGQGCRYVDRKIQPPSQQMPRSVLVEMSPNVLQSFKENKVETAESSLSVSPGMEEQWRCLPESDMQFRPNQLVRSPTANSGLLVSRYRSAELQPFQVTRSNDNAPMASENASMFGGSSIICSKAVSTTSSCKLSQRSRPLFSSENVGGMLDQVVSKYVVDSTGPTPSTVAVEDTGGVIESKECLLSTQVPYSDESSSSTSASRFADTAESSPTTGAAGSPGLFSLSSEVEPTCGFSAATADVCRRPSAFQLVPSNRNPDNLESILPANLIYNRHHHNAPRRAEWAWDMPVARTTSSSGLDAITGHCNSVSLQRHNCSHESSWQNLCELPDAVANFLLSESMQGFNTTTSTHCVNVSVKKHEPSLQHRSYEPTPALASNSPWQMSHSRVTGNSESINVLADWDSTRSQDPSLGYSLCPENNSGLCNDMFMPDNNCLHVFNATGSSHYPFYDDGYLFPHLMEESSMLYV

SEQ ID NO: 13715 - protein, 199 aa, Physcomitrella patens subsp. patens
MSREATDASSSGTGSPEETKISQTIRSCRGCLYYSSVMRERGQNPICLGLSRSSEPQVYSVHNELDSELVRNFRDSTYFKYVCTGYSAHREVSSNQSMQPIESPAELPYCVGLEFLIDRKPTRQERPHKEDSSNIMPRPSSSIGSMDVGGLSANEFATRLFRTSRLVASAVVNNVGRVANNVRSTIDKIFTSDQGRPKP

SEQ ID NO: 13716 - protein, 119 aa, Physcomitrella patens subsp. patens
MSPRSTLKSRSKSQVMHPKQHYIHVRARRGQATDSHSLAERVRREKISERMKFLQDLVPSCSKVTGKAVMLDEIINYVQSLQRQIEFLSMKLAAVDPRLDINLLNLLNKEVHNLICEMA

SEQ ID NO: 13717 - protein, 286 aa, Listeria innocua Clip11262
MEKIGFVGTGVMGSSMAKHLLEAGYEVHIYTRTKEKAEALLSQGALWESDPGSLGAKVDILISMVGYPKDVEQLYLGENGFLDNLKAGSVAIDMTTSSPALAKKIAEAGHEKGIGVLDAPVSGGDIGAKNGTLAIMVGGAEDVFLKVKPIFEILGSSVILQGDAGSGQHTKMVNQIAIASNMIGVTEAIIYAERAGLNPSRVLDSISGGAAGSWSLTNLIPRVLQDDFSPGFFIKHFIKDMGIALSEAKQMGLELPGLTLAEQMYQTLAEQGLSEEGTQALIKYYR

SEQ ID NO: 13718 - protein, 381 aa, Listeria innocua Clip11262
MTKSIRPELRDIEVSGIRTFNTRVTGIPDMIRLTLGEPDFPTPEHVKQAAITAIQENFTNYTPNAGMPELLEAASSYFEEKYDLTYSNKEIIVTVGATEAISVALQTILEPGDEVILPDPIYPGYEPLIKLNKARPVKVDTTESNFKLTPEQLRAHITPKTKALIIPYPSNPTGVSLSKQELRDLAEVLKETGIFVIADEIYSELTYHEEHVSIAPMLRDQTIVINGLSKSHAMIGWRIGFLLAPEKITTEMLKIHQYSVTCASSISQKAALEAITNGKDDAFQMRTEYKTRANFTQDRLEKMGFTVIPPDGAFYFFVKLPDDITENSFDWAVRLAEEAKVAVVPGNAFSEKGDRYFRLSYATSVNNLAEALDRMAQFLAK

SEQ ID NO: 13719 - protein, 461 aa, Physcomitrella patens subsp. patens
MYTQVIKTEYAVRGEIVTRAQNLEQELITKPGSLPFEEIVYCNIGNPQSLSQPPVTFFREVVALCDHPNLLDKSETHALFSSDAISRAFRIIDNIPGRTTGAYSHSQGIKVCREDIAAGIEARDGFPADPEDIFITDGASPGVHMMMQLLITSEKDGILCPIPQYPLYSASIALHGGTLVPYYLNESAGWGLEMNELKQQLKAARDAGTNVRALVVINPGNPTGQQVLSEENQRDVVQFCKEEGLVLLADEVYQENIYAPDKKFNSFKKVARSMGLQDKDLNIVSYHSVSKGYYGECGRRGGYMEVTGLPKDVKDQLYKVASVNLCSNISGQVLMSLVTNPPKPGDESYELFAEERDAILGSLGRRAKVLTEGMNKLEGVTCNAAEGAMYVFPRLDLPERALKAAGAVGMLADVFYTRRLLDATGVVMVPGSGFGQVCNTLLRSTCAYFPICREDVRTIIR

SEQ ID NO: 13720 - protein, 788 aa, Physcomitrella patens subsp. patens
MLRAVGKKVRRVLREELLAGLQGRGLGRIYDASGTGVRKHGWGISSRETHTNSLYIHHTIGGVGRDSVAVTVGLLHSLERLQPGIGYFRPIDQTTIGGYRSKLIKSVFKMKDDPAIMQGVTQDRAYELVTNDKIDDLLEEVLKAYEACRVKHDFVVVEGTSLRGGGDDTVTLNAKIAQTLGSSALLVTDAGIACGKMDKMKNWDGFDWEKRVVNNAKLSDLVFRREHVDVVGAIVHRTPQTERKDKLLRKVFEEMKIPFVGALPEDSVLRSVQVQDVAKKLEAGLLYPVEDEEVAMSTEVTQYLVATEQLSDLLRHLPRYVDPTKGSIVITSANRVDILLGLIHLHESKSNANIAAVVLSGGKPPPREVHELLKARNSGTLPIILSPQMTFETASALANVEGYISSKTPLKVERAQTLFDDNINMKLIKDAMFQERPVRMNSKLFQHNLFTRAKQCIQTIVLPEGEEPRTLQAAGTVLRRGLCNLILLGDREKIETLAKQFRVDISQARIVDPRDCPETEKYARYFYESRKHKGITLGQAHNILIGDVNYFGTCMVAEGAADGMVSGAVHTTANTVRPALQLIKTLPGIPVVSSVFFMCLPGKVLVYGDCAINSDPTSEELAAIAIASADTAAAFGIKPRVAMLSYATGDSNKGPLIQKVIDATAIARKLRPDLLIEGPLQYDAAVDPVIAKTKMKGAESEVAGKASVLIFPDLNTGNNTYKAVQQTTGAVAMGPLLQGLRKPVNDLSRGCTVPDIVTTIALTAVQAAAMKETAKRETPKENLVASAA

SEQ ID NO: 13721 - protein, 343 aa, Physcomitrella patens subsp. patens
MVVPSLPAFGGQNAMLRRNIDNNTDTLISLLQGSCSPRVSMQQGYVAVPRSSESLENMMGACGQKLPYFSSFDGPSVEEQEDVDEGIDEFAHHVEKKRRLSLEQVRSLERNFEVENKLEPERKMQLAKELGLQPRQVAVWFQNRRARWKTKQLERDYETLKKAYDRLKADFEAVTLDTSALKAEVSRLKGISNDDVKPAEFVQGKCDTTSHPASPAQSERSDIVSSRNRTTPTIHVDPVAPEEAGAHLTMSSDSNSSEVMDADSPRTSHTSASRSTLSTSVVQPDEGLGVAQYPHFSPENFVGPNMPEICADQSLASQVKLEEIHSFNPDQTFLLLPNWWDWA

SEQ ID NO: 13722 - protein, 144 aa, Physcomitrella patens subsp. patens
PSRYEAQKRRDWNTFGQYLRNHRPPLPLARCTGAHVLEFMRYLDQFGKTKVHIASCSFFGLPHPPHPCPCPLRQAWGSLDALIGRLRAAFEENGGMPESNPFGARQVRLYLREVREMQAKARGIAYEKKKRKRMPPPSTLGVNG

SEQ ID NO: 13723 - protein, 585 aa, Physcomitrella patens subsp. patens
MGSSWLPEQSFQSWGNYRRALASIPSRLIDRMSARTQLNEEVTDIKARSNVDMNKNLTWWDLIWFGIGAVIGAGIFVLTGVEAKNHAGPAIVISYVIAGSSAMLSAFCYTEFADEIPLAGGAFAYLRVELGDFIAFIGAGNIVLGNVIGSAAVARGWTSYFASLIFSGVDVGDKLRIETNLAEGYNQLDPIAVAVLVLVGLVAIWSTKGASYVNWIASLVNMFIIAFIIVAGLALSNSHNLTDDFFHYGARGIFSASSVLFFAYLGFDAISTMAEEVKNPGRDIPIGLLGSMTICTFIYIMMAVTLSLMVPFLNIDEGAPFSVAFSSVGWDWAKYIVALGALKGITTVLLVSTVGQARYLIHIARSHLIPPWFSQVNKQTRTPINATAITILASSVVGFFTDLPILGNLLSLSSLFIFFLVAVALLVRRYYVPGQTSRQHGGLFIVYMLLIILSSTAIAAFWGLNKSGYALYAVCGSIWSFSTLLLHLTLRPLRQPETWGVPFMPWIPSLSVAFNIFLLGSLDKASFIRFGYWTGMMLVYYFFFGLHSTYDAAKYNSSDLVPKTLRNEGQTATIYEQDTPSSTST

SEQ ID NO: 13724 - protein, 397 aa, Listeria innocua Clip11262
MHKIMAINAGSSSLKFQIFTMPGEEVLVKGLIERIGLPDAIFNMSFQNEKIKETRAINNHGEAVEILLEQLKTHQVINDLNEITGVGHRVAHGGEAFVSSCIVTDDVVKGIEDVTSLAPLHNPANIIGIKTFRELLPNAVSVAVFDTAFHQTIPEENFLYALPYELYEKHHIRKYGFHGTSHKYVAGKAAEVLKKPLEKLKIISCHLGNGASVCAIEAGKSVNTSMGFTPNAGLMMGTRSGTIDATIIPYLVDELGYSLDEVTHMMSSESGVLGVSGISSDFRDIEIAANEGNSRALLTLRMFTGQICNYIGAYASAMNGCDALLFTAGVGENSPLIRKMVTEQLSYLGVTCNVTKNNAGDMIISNDDEAVKVCIIPTNEELMIARDVEKYTKQTIS

SEQ ID NO: 13725 - protein, 140 aa, Physcomitrella patens subsp. patens
APSRYEAQKRRDWNTFGQYLRNHRPPLALARCTGVHVLEFVHYLDQFGKTKVHVPSCPFFGLPHPPHPCPCPLRQAWGSLDALIGRLRAAFEENGGKPESNPFGARQVRLYLREVREMQAKARGIAYEKKKRKRMPNAGS

SEQ ID NO: 13726 - protein, 289 aa, Physcomitrella patens subsp. patens
SVGFLGLGIMGTAMARNLIMAGYDVTVWNRSTSKCDPLISEGAKRGESPEQTAAACDVTFAMLADPAGAMEVACGPQGAVKGLSAGKGYVDVSTVDDETSKAIAEAVRKTGAEFLEAPVSGSKKPAVDGTLIFLTAGDKPLFERASPMLDVMGKSKFYLGEVGNGAAMKLVVNMVMGSMMASFSEGLLLGAKTGLDPKTIIEVIGQGAISAPMFAMKGPSMVEGQYPTAFPLKHQQKDLRLAVELADKVGQPTPIAAAVNDLYAQAKSNGLGDEDFSAIIEALKVNVNA

SEQ ID NO: 13727 - protein, 311 aa, Physcomitrella patens subsp. patens
MTSLQQQPLPLIPNPHNSRPCYSATNSSSSNARGANLAKLDTPDAFPAGLRVLVVDDEPVTLMVLEKMLTNCSYRVTTCGRATDALCLLREDIDKFDLVISDVNMPDMDGFKLLELVGLEMDLPVIMMSGNGETSAVMKGITHGACDYLLKPVRQKELRNIWQHVVRKRRQDVKIARETKSVEEGGVCVREKRTGPDDVDYTSSATGDTGDGNWRKKRKGENQTFKDETEEDVEQENDDPSTMKKPRVVWSVELHQQFVSAVNQLGIDRAVPKRILELMGVHGLTRENVASHLQVIRHPTSTLIKTFFISF

SEQ ID NO: 13728 - protein, 61 aa, Physcomitrella patens subsp. patens
DGCHWRKYGQKMAKGNPCPRAYYRCTLLRGCPVRKQVQRCADDLSILITTYEGTHNHPIPA

SEQ ID NO: 13729 - protein, 161 aa, Physcomitrella patens subsp. patens
MEFVVFDTDPFLTSLHQLVHEPESDLERKIKRKRRSQHDEPRHVTIATPVDVKEKKDAYLFIADVPGLQKTDIEVQIENENILTMRGKRKLDEIVNDKEEDTKFVRMERSPVKLFRKFTLPSDANADAITANCVDGVLMVTVPKIPPPEPAKPKTVKIAVD

SEQ ID NO: 13730 - protein, 523 aa, Physcomitrella patens subsp. patens
MAVVDCSYNLSQEDLCAKVAECDALIVRSGTKVTREVFEASKGRLKVVGRAGVGIDNVDLQAATEVGCLVVNAPTANTVAAAEHGISLLTAMARNVAQASASMKAGKWQRNKWVGVSLVDKTLAVMGFGKVGSEVARRAKGLGMTVVAHDPYASAERAKALGVELVSFDEALAAADFISLHMPLTPTTDKIFNDESFGKCKKGVRIVNVARGGVIDEPALVRALDAGIVAQAALDVFTVEPPKEGDALVNHENVIVTPHLGASTMEAQEGVAVEIAEAVAGALAGELSATAVNAPMVPAEVITELAPYVTLAERLGRLAVQLVSGGAGVKQVKVVYRSARADDDLDTRLLRAMITKGLIEPVSSAFINLVNADYVAKQRGLKISEERQPTDGAIEVPLETITVTIAGVKSKFASAISGNGSITLEGKVKDGVPYLSKVGDFGVDVSLEDSIILCRQVDQPGMIGKVGSILGQENVNISFMSVGRKSPRQHAVMAIGVDEEPSKVTLQKLGDIPAVEEFVFLKL

SEQ ID NO: 13731 - protein, 404 aa, Listeria innocua Clip11262
MGLVVLKFGGTSVSTVDKIGKTADQAIYEKKQGNKVIVVVSAMGKSTDKLVAMAEEISEAPDKREMDMLLSTGEQITIALLAMTLKEKGHDAISYTGWQAGIETEAVHSNARIADIDSARIESALEAGQIVIVAGFQGITTDGEITTLGRGGSDTTAVAIASALKAEKCAICTDVVGVFTTDPRYVKKAQKLEQLTYDEMLELANLGAGVLHPRSVEYAKNFRIPLEVRASHELEPGTMIEEDLTMENTKVVRGIAFEDQITRVTIHWKQKEAMRVSKVFTKLAENNIDVDIIIQGITGLGHGNLSFTIKTSELLATLAVLEESKELLQIEKLESEQELAKVSIVGSGMVSNPGVAAKMFEALTENNIPIKMISTSEIKVSTVVPARKMVEAAQVLHDQFELDK

SEQ ID NO: 13732 - protein, 376 aa, Physcomitrella patens subsp. patens
MFDWFVKMVMACWRPVKRYRKRQDGTDRQDPLLWSKDLCPHAVGEFSYAVVQANAILEDMSQVESGSFGTFVGIYDGHGGPEASRCINESLFSFVQKNTADQGGMSCDVLCKAFKEVEDKFFEIVRKAWDVKPQIAAVGSCCLVGAIWDSKLYVASLGDSRAVLGSFSRDTSLPVARQISTEHNASIEAIREELFAKHEDDPQIVVLKHGVWRVKGIIQISRSIGDFYLKRAEFNRPPLIARFRLPEPLKRPVISAEPECNVITLGPDDEFVIFASDGLWEHLSSKEAVDIVYSQPRAGIARRLIKAALQKAATKREMRYSDLKGIERGIRRHFHDDITVVVLYLDTKLLNKGGSISNHVSVKCANDMPKGDNPSR

SEQ ID NO: 13733 - protein, 69 aa, Physcomitrella patens subsp. patens
RALQERRLKPPDQVIACPRCQSLNTKFCYYNNYSLTQPRHFCKSCRRYWTAGGTLRNVPVGGGCRKNKR

SEQ ID NO: 13734 - protein, 647 aa, Physcomitrella patens subsp. patens
MTTVDIGNGRNGSTEGKPLVHKVEMPPKRSFLKEVGSGVRETFFHDPPIQGFKGLSRGQQVLQSLKFLFPILDWLSTYSLKMFFKDFLAGLTIASLAVPQDLGYASLTGIPPVYGLYSSFVPPLVYAVLGTSRNIAIGPVAVVSLLLGELLKQELSPTEDAAEYLQLAFTATFFAGIFQAGLGILRLGFITEFLSHATIIGFMGGAAITIALQQLKGLFNLFQHFTRHSDFVSVMRSVFGHIDEWNWRTIVMGLLFIAFLFSAKILAKKKPKLFWIAAIAPLTSVVVATAAVYLTRADKHGVHIVGHVKKGLNPSSFHRIFFSGKFTARAIKIGLVCGLVALTEGLAIGRTFATLRDYRVDGNKEMISFGFMNICGSFSSCYVTTGSFSRSSINYAAGALTPMANIVMASVVAITLTALTPLVYYTPNCILASVIITAVLSVVDVNAAWLIWKIDKGDFLACMGAFFGTLFVSVEIGLLVAVCISFVKILFHVTRPHTAILGNIPGTTVYRNVAQYLQATQVPGILAVRIDGPVYFSNASYIHDKVLAYLEAEKLRVEKINGPKVRYLVIDLTPVTNIDSSGVQAFEMIEKAVKRQQIQLTIANPGTSIMRKLDASNFISRLGSEWMFVTVGEAVQVCTILLNLQEA

SEQ ID NO: 13735 - protein, 493 aa, Physcomitrella patens subsp. patens
MADALPTVPIAYNQTGGVTPAWLNKGDNAWQLTASTLVGVQSVPALVILYGSIVKKKWAVNSAFMAFYAFAAVWLCWVGWAYKMSFGEKLIPIWGKAGTTLSYKYLLSQAELPSTAHYHKNGDIETYALTPFFPMASLVYFQFVFAAITLVLLAGSVLGRMSFRAWMLFVPLWLTCSYTVGAFSLWGGGFLWQWGVIDYAGGFVIHLSSGIGGFVAAYWVGPRLTKDRERFPPNNVLLMLAGAGLLWMGWAGFNGGAALSANLIASIAVMNTNVCAATSLLVWTCLDVLIFGKPSVIGAVQGMITGLVVITPAAGLVQGWAALVMGVFAGSVPWFTMMVVHKRSSILQRVDDTLGVFHTHAVAGLVGGLLVGCFAEPTLCDYFLPVLGERGAFYGGVGGKQLGKQIVGALFITAWNVVMTSIILNVIKLVMPLRMTDEHLLVGDDAEHGEEAYALWGDGEMFDMSKHGALTSNLSTLSSNDFGSEKSRPTITL

SEQ ID NO: 13736 - protein, 517 aa, Physcomitrella patens subsp. patens
LSLTGWGGDPCLPVPLSWVLCSPVTATAAARVISVRLSRYNLTGIIPVEFAELTALQTLHLNDNGLSGSIPDSLSFIPTLEELFLQNNNLTGTVPDALKNKSGLNLNINGNPVCGPTCSNPGPGSKSNVGLIAGVVGGVVGVLVVGGILLFCFCRKRQTTEGMGQNGTNGQGAKPFSHAEIKAATSNFSTQIGAGGFGPVYYGKLANGREVAVKVSDMNSRQGAAEFNNEVQLLSRVHHRNLVSLLGYCQEDGKQMLVYEYLHKGTVREHLWGSPLATKEPLDWKQRLDVSLNAAQGLEYLHTGCSPIIIHRDIKSSNILLTDKYVAKVADFGLSRLGPEESSGATHVSTVVKGTAGYLDPEFWSTNHLSERSDVFSFGVVLLEVLCGRQPINNGLPDKSQSNIVEWVRNSLLAGDIESILDPAVRDCHPNMDSVWKVAELAIQCVEPRGIHRPWMRDVVKELREAIVLEDGDSGALSEMDRSNNIGTSSTPAPYMEGNSDDVSLNFEHYRKGPQVR

SEQ ID NO: 13737 - protein, 536 aa, Physcomitrella patens subsp. patens
LNLTGWGGDPCLPVPLSWVLCSPVTATAAARVISVRLSRYNLTGIIPVEFAELAALQTLHLNDNGLSGSIPDSLSFIPTLEELFLQNNNLTGTVPDALKNKSGLNLNINGNPVCGPTCSNPGPGRKSNVGLTAGVVGGVVGVLVVGGILLFRFCRKRQTTKGMEQELPKSNSDPYKSGGKGKGKGKGGAKPFSHAEITAATLNFSKQIGAGGFGPVYYGKLANGREVAVKVSDMSSRQGAAEFNNEVQLLSRVHHRNLVSLLGYCQEDGKQMLVYEYLHKGTVREHLWGKPFIEQPQWFLNCPLVLVYSGLEYLHTGCSPIIIHRDIKSSNILLTDKYVAKVADFGLSRLGPEESSGATHVSTVVKGTAGYLDPEFWSTNHLSERSDVFSFGVVLLEVLCGRQPINNGLPDKSQSNIVEWVRNSLLAGDIESILDPAVRDCHPNMDSVWKVAELAIQCVEPRGIHRPWMRDVVKELREAIVLEDGDSGAFSEMDRSNNTGTSIIPAAFKRGNSDDHYFVMDSSSNLEQINVGPQVR

SEQ ID NO: 13738 - protein, 539 aa, Physcomitrella patens subsp. patens
LNLTGWGGDPCLPVPLPWVLCSPVTATEAARVISVRLSRYNLTGIIPVEFAELTALQTLHLNDNGLSGSIPDSLSFIPTLEELFLQNNNLTGTVPDALKNKSGLNLNINGNPVCGPTCSNPGPGSKSNVGLIAGVVGGVVGVLVVGGILLFRFCRKRQTTKGMEQELPKSNSDPYKSGGKGKGKGKGGAKPFSHAEIKAATSNFSKQIGAGGFGPVYYGKLANGREVAVKVSDMNSRQGAAEFNNEVQLLSRVHHRNLVSLLGYCQEDGKQMLVYEYLHKGTVREHLWGSPLATKEPLDWKQRLDVSLNAAQGLEYLHTGCSPIIIHRDIKSSNILLTDKYVAKVADFGLSRVGPEESSGATHVSTVVKGTAGYLDPEFWSTNHLSERSDVFSFGVVLLEVLCGRQPINNGLPDKSQSNIVEWVRNSLLAGDIESILDPAVRDCHPNMDSVWKVAELAIQCVEPRGIHRPWMRDVVKELREAIVLEDGDSGAFSEMDRSNNTGTSIIPAAFKRGNSDDHYSVMDSSSNLERINVGHQVR

SEQ ID NO: 13739 - protein, 1124 aa, Physcomitrella patens subsp. patens
MTSTKLSYSLGTTVKSKHSVRVQQTTADAKLQAVYEESNDSGDAFNYSKSVGQAAKATVQQVPAQAVSSYLQRMQRGGLTQTFGCMLAVEESTFRVIAYSENAPEMLDLVPHAVPSVGQQDVLGIGADARSLFTPSSASALERAASTSDLSMVNPISVHSRSSGKPFYAIVHRIDVGVVIDFEPVRPNDVIISTAGALHSHKLAAKAVARLQSLPGGDIGLLCDAVVEEVRELTGYDRVMAYKFHDDEHGEVLAEIRRSDLESYLGLHYPSTDIPQASRFLFMKNRVRMIADCCAPPVKVIQDKDLRQPITLAGSTLRAPHGCHAQYMGNMGSVASITLAVIVNDQEEDFGVQQKGRRLWGLVVCHHTSARTISFPLRSACEFLMQVFGLQLNMEVELQAQVKEKHILRTQTLLCDMLLRDAPIGIVSQSPNIMDLVKCDGAALYYGKRFWLLGTTPTEQQITEIADWLLEYHKDSTGLSTDSLADAGYPGANLLGDAVCGMAAARITPKDFLFWFRSHTAKEIKWGGAKHDADEKDDGRKMAPRSSFNAFLEVVKRRSVPWEDIEMDAIHSLQLILRGSFQDIDDSDGKTMIHARLHDLKLQGMDELSTVANEMVRLIETATVPILAVDSSGFINGWNAKVAELTGLPVGDAMGRSLVKDLILEESVEAVERLLYLALQGEEEQNVEVRLKTFGQQKSKGVLILIVNACSSRDVQENVVGVCFVGQDVTGQKMVHDKFTRIHGDYKSIVQNPNPLIPPIFGGDELGYCTEWSPSMEKLTGWKREEVLGKMLVGEVFGVQLMCCRLKGQDAVTKFMIVLNNAMDGQDTDKFPFSFFDRQGKFVEALLTANKRTDADDYITGVFCFLHTASPELLQALTVQRATEKVAFAKLKELAYIRQEIKNPLYGIMFTRNLMEDTDLSEEQKQFMDTSAVCERQLRKILDDMDLESIEDGYLELETAEFDMGSMMDAVVSQGMITSREKGLQLIRETPREIKGMCLFGDQVRLQQVLADYLLNAVRFTPSSEGWVGIKVVSTKKRLVGGFHVVHLEFRVTHPGSGLPEELVCEMFDRGRGMTQEGLGLSMCRKLVKLMNGEVKYIRDAGKSYFLVNLELPLAGRDDSGNAR

SEQ ID NO: 13740 - protein, 61 aa, Physcomitrella patens subsp. patens
HYRGVRQRPWGKFAAEIRDSSRQGTRVWLGTFDTAEQAALAYDAAALKMRGRRALLNFPLR

SEQ ID NO: 13741 - protein, 61 aa, Physcomitrella patens subsp. patens
MNDGCQWRKYGQKMAKGNPWPRAYFRCTVSPGCPVRKQVQRCEEDTSILVTTYEGTHNHAL

SEQ ID NO: 13742 - protein, 419 aa, Physcomitrella patens subsp. patens
MGNGSPKVNGNLVKPSESTPLLPHGNVHHRALSSSCKTFFNIVITVVGAGVLGLPYAFKQSGWLQGLLILAGTSAAMYYCMMLLVWCRRHLEREGIVGSVDTYSELGYHTLGAAGQFAVDAMIVLSQGGFCVAYLIFIGENLASVFARENSLTSPLLKVYVWIVLPLQVLLAFIRSLTHLAPFSMFADIVNVAAMGVVMTTEFAAIVTGSGEHVVAFTGLKNLLFAIGVAIYAVEGISLVLPLESEYQERPKFARILAAAMCFITFLYTVFALLGYLAFGDYTKDIFTLNLGNSWQTVVVKLCLCTGLVFTYPMMMHPVYEVAERRLSLRGSSSQVLRTLIVLCTAWIAVSVPHFGSFLSLVGSSVCCLLSFVLPGWMHLRVFGDSLSLVSRSLDWLLIVGGVVFGILGTMSSINDIRW

SEQ ID NO: 13743 - protein, 451 aa, Physcomitrella patens subsp. patens
MAERTLLARRTTAFAPSPIQQLSLLAQRCNAINLAEGFPDFPAPPEIKEAAIAAIRSDFNQYRHVQGVCEKVAEAFEMSHGVRVDAATQITICCGQSEAMAATVFAVVEEGDEVVLLDPVYETYQSCIILAGGTPRYVSLNPPHWSLDFENLESAFGSKTKAIIINSPHNPTGKAFSTSELAKIATLCCKYDCLAITDEVYEHIIFDGREHVSIASFPGMQQRTIVTSSLSKTFSVTGWRIGWAVAPATISAAIGNIHVKMTDSAPAPFQEAALVALQSTTNFFTQLKQEYEERRDYVCEMLLQAGFSNFLKPEGSFFVFAELPKACPLNDVDYVAELIQGAGVAVVPGRGFFHQAADTVGQSTQFKDQSNTGEELSAEEVYDSNGATKFGELCIQNYTTRYIRVAFCKDMATLRAAKTAIQKHLALVDPDTGHKQHYSSQCSLDRPHFFT

SEQ ID NO: 13744 - protein, 494 aa, Physcomitrella patens subsp. patens
MATPVVQSAYNQTGGVSPDWLNKGDNAWQLTASTLVGLQSMPGLVILYGSIVKKKWAVNSAFMALYAFAATLLCWVTWAYKMSFGEQLLPIWGKAGTTLGYTFMLDQARLPSTIHYYKNNTIEMPASEGFYGMADMVLYQFFFAAITLVLLAGSVLGRMSFRAWMLFCPLWLTFSYTVGAFSVWGGGFLWQWGVIDYAGGYVIHVSSGVAGFVAAYWVGPRLAKDRERFPPNNVLLMLTGAGLLWMGWSGFNGGAPFSANLISGLAVLNTHICAATSLLTWTTLDVIVFGKPSVIGAVQGMMTGLVMITPAAGFVPGWAALVMGILAGSIPWWTMMCLHKRWSLLQRVDDTLGVFHTHAVAGCLGGLCVGLFAEPRLCEYMNHAVTNSNGLFYGGDGGMQVLKQVVGAAFIIGWNIVVTTLIMFAIRFVMPLRMSEEHLLVGDDAEHGEEAYALWGDGEKFDVTRHIHSDLEMEQSRFGVRQSQTFAPNTILHI

SEQ ID NO: 13745 - protein, 66 aa, Listeria innocua Clip11262
MEQGTVKWFNAEKGFGFIERENGDDVFVHFSAIQGDGFKSLDEGQAVTFDVEEGQRGPQAANVQKA

SEQ ID NO: 13746 - protein, 355 aa, Listeria innocua Clip11262
MSYDVLTINPGSTSTKLAVYHGDKVLFEETVRHTMQEFADFNNVQEQFDFRWQVLRRVIDAFGYDVNKLDAVVGRGGLLRPVAGGTYMVTEKMLADLKNNKYGEHASNLGAMLAKKLADKLGIPSFIVDPVVVDEMQPVARFSGNELIARKSIFHALNHKAAGRKIAKELGSEYEKMNFVIAHLGGGISVAAHRQGKAVDVNNALDGDGPFSPERSGSLPMNDFLEACFSGKWTKRELHELIVGRGGMISYLGTNSMLDVENKVQAGDEDAIKAFDAMAYQVSKEIGACSVVLHGKIDAIILTGGLARSELFTSKIIEQTNWIARVIIEPGEDELEALNSGVQRVLAGIEKEKVY

SEQ ID NO: 13747 - protein, 338 aa, Physcomitrella patens subsp. patens
MATLQQQQKHQPLNPNHQNPRNRSNSSPTNCYSNTAWGAKPAKLDTPDEFPVGMRVLVVDDNPTCLMILEQMLVRCAYRVTTCGKATEALSMLREDIGKFDVVISDVDMPDMDGFKLLELVGLEMDLPVIMVSGNGETSAVMKGITHGACDYLLKPVRIEELRNIWQHVVRKKRREVKAVATKSVEEAGGCERPKRGGGADDADYTSSATDTTDSNWKLTKRRKGEFKDENEEDNEQENDDPSTLKRPRVVWSVELHQQFVSAVNQLGIDKAVPKRILELMGVQGLTRENVASHLQVIPATYATLTVFSFVQCEYLKIVNELHTCIHFAEKRHLCFEL

SEQ ID NO: 13748 - protein, 389 aa, Listeria innocua Clip11262
MKEVVIIDAVRTPIGKFGGSLKDISAVDLGATALKGVLKRANIAPERVDQVIFGNVLQAGLGQNVARQVAIKAGIPYKVPGVTINEVCGSGLKAIMLGRQAIQLGEADIVAVGGTENMSQAPLLLNPELAGEEINPKDLKNSMIIDGLTDVYGEYHMGITAENVAEKYSVSREDQDKFAHNSQMKAARAQEKNLFEEEIVPVQLPDGSFFEADETIRANSTLEKLATLKSVFQEGGTVTAGNASGINDGASAIILMSKEKAVAENIPYLATIKVTSEVGVDPAYMGYAPYYAVNEALEKAGYSIADIDLFHLNEAFASQSVAVARDLKIPEEKLNIYGGAIALGHPIGASGARIVVSLLNELQHEDKHTGVASLCIGGGIGIAIIIERV

SEQ ID NO: 13749 - protein, 403 aa, Listeria innocua Clip11262
MKIIVQKFGGTSVQNEKIRLMAFNHIKNALKDGYKVVVVVSAIGRYGDPYATDTLLELIGAKDTKLTAREQDTLLSVGETISASVFTNMLREADIKAEAFSGGQAGIITSNNHLNAKITEVDTKRLKKALETLDVAVVAGFQGITENGDITTLGRGGSDTSAAALGVSLQADYIDIFTDVDGMMTADPRIVEHARSLPRVSYNEVSNMAYQGAKVIHPRAVEIAMTAKVPMRIRSTYLESTGTLVTSLADDSGHFDVKERMVTGVAHVTNLTQIFVKTDTVKAQQQTFKILADAGISLDFINISTDSVIFTVPEEKRRVVKQLLEEANLQTTVREDCAKVSIVGAGITGVPGVTAKIVGALSEKNIPILQSADSHTTIWVLVREEDLISAVNALHDVFCLEIK

SEQ ID NO: 13750 - protein, 503 aa, Physcomitrella patens subsp. patens
MNEGLRKWCRTSAIALAGFAVFLLQQQSAIALLGPREVVDKARTGIWEVKGGRWKYLVKHPERDEFVVQTVKNSEEEALAYEEDVITRFVELGKQIVLPDGYPQSVTDDYFEYTLWRMGQVIASQISGVLTTQALLYAVGLGKGAIPTAAAVNWVLRDGIGYLSKIVLSKYGRHFDVHPKGWRLVSDLIENMSYGLELLTPAFPHLFVYLAAAAGAGRSASGLIQAATKSCFNAGMAANRNFAEIIAKGEAQGMVSKSIGIALGIAVSAYVGSTGPLLVGTFFGVTALHIFCNLKSYQAVQLRTLNPYRASLVLAEYFRSGNVVSVREVNGEEPIFPFSFFNFRLRGSKGDGTLLSEESKAVAHSIENHLEFGATFGAAVKTREEADALLDIYKSERYLLSQHDDRLLVVLKEGATPRDMLRAMMQAIYLDYLQGTGFTSHRNLMHDSGNGGVLRVSHDFVVNQFEQIRQDIAGVGWICEGLIARPAPNRLLESRPSPTPVAS

SEQ ID NO: 13751 - protein, 301 aa, Listeria innocua Clip11262
MSEPFKSGFVAIVGRPNVGKSTLLNHIIGQKIAIMSDKAQTTRNKVQGVFTTDESQIIFIDTPGIHKPKHKLGDFMVKIALNTFQEVDLIYFVIDASTGFGRGDEFIIEKLKNVQTPVFLLINKIDLISPEDLIKLIEQYRELMDFEEIIPISALEGNNVPNLLEQTNANLEIGPMYYPKDQITDHPERFIISELIREQVLQLTREEVPHSVAVVIEGIEKNPKTEKLTINATIIVERSTQKGIIIGKQGQMLKQIGMRARKEIESLLGSKVFLEIWVKVQKNWRDKEHYLHDYGFDREEY

SEQ ID NO: 13752 - protein, 907 aa, Physcomitrella patens subsp. patens
MFLCDGIAFLRDSFSVYFTFLRALMNLKAAFMNGEHELHDWDNGSQSPCGWLGVTCNNLTFEVTALNLSDLALSGEISPSIGLLWNLQVLDLSQNSIFGQLPIEICNCTSLTWIDLSGNNLNGEIPYLLSQLQLLEVLNLRNNKFSGPIPSSFASLSNLRHLDMQINNLSGPIPPLLYWSETLQYLMLKSNQLTGGLSDDMCKSTQLAYFNVRENKLSGPLPACIGNCTSFQILDLSHNNFSGEIPYNIGYLQVSTLSLEGNRLSGGIPNVLGLMQALVILDLSNNQLEGEIPPILGNLTCLTKLYLYNNNITGHIPIEFGNLSRLNYLELSGNSLTGQIPSELSYLTGLFELDLSENQISGSIPVNISSLTALNILNVHGNQLNGSIPPGLQQLTNLTRLNLSSNHFTGSVPEEIGMIVNLDILDLSHNNLTGQVPSSISTLEHLVSIDLHENNLNGSIPMAFGNLKSLNFLDLSHNHIQGPIPLELGQLLELLHLDLSYNNLSGSIPVPLKECFGLKHLNLSYNHLSGNIPPDELFSRFPASSYAGNPLLCTNISASCGLVPLKSTNIASQPPGPPRFVILNLGMAPQSHDEMMRLTENLSDKYVIGRGGSSTVYRCSLKNGHPIAIKRLHNTFAQNVHEFETELKTLGTIKHRNLVTLRGYSMSSIGNFLFYDYMENGSLYDHLHGHVSKIKLDWNTRLKIATGAAQGLAYLHRDCRPQVVHRDIKACNILLDENMVAHVADFGIAKNIQAARTHTSTHVLGTIGYIDPEYAQTSRLNEKSDVYSFGIVLLELLTSRMAVDDEVMSKLLGKTMQDVVDPHARATCQNLNALEKTLKLALLCSKLNPSHRPSMYDVSQVLLSLLPVQIEEESPTLKSPFPANQRRKSSSGDTLLHQFKEAISRKL

SEQ ID NO: 13753 - protein, 375 aa, Physcomitrella patens subsp. patens
MFEWLTKMVISCWRPAKRCAHGQGVTDCQDPLLWGRDLCSHALGEFSYAVVQANGILEDMSQVESGSFGTYVGVYDGHGGPEASRCINEYLYNFVLNNITEQGGMSCDVLCRAFRETENKFFDIVRRAWQIKPQLAAVGSCCLAGVVCSSKLYIANLGDSRAVLGSFSPDTGSVARQISHEHNASIEAVRNELHAHHEDDPQIVVLKHGVWRLKGLIQVTRSIGDFYLKKAEFNKEPLIARFRLPEPLKRPVMRAEPECSVIKLSPQDDFVIFASDGLWEHLSNKEAVDIVYSNPRAGIARHLIKAALQEAAKKREMRYSDLRKVERGIRRHFHDDITVVVVYLDPKLLNEPSNTSNPISAKCPIDMPQGNRRRS

SEQ ID NO: 13754 - protein, 382 aa, Listeria innocua Clip11262
MENRIYLDHAATSPIHPEVIQTMLGAITNTYGNPSSIHYAGREARKALDEARHTIAQSIQAEEKEIVFTSGGTEGDNLALIGTALAHKENGKHIITSQIEHHAVLKTCEYLETQGFEVTYLPVDEHGIVSSESVQKALRPDTILVSIMYGNNEIGTIQPIAEIGAVLLDHQAVFHTDAVQAYGLLNINVIELGVDLLTTSSHKINGPRGVGFLYVKNGTRLAYQMHGGEQERKRRAGTENLAGICGFSAASTIMTNERELKNEEYVSFKKRMAEIWRAAGLDFEVNGLEANTLPHVFSVRFPGVSIEQLLMNLDMEGIAVSSGSACTAGTVDPSHVLVALFGENHPAIQETVRISFGLGNHLEEIEAAATKVSEVVARLMKN

SEQ ID NO: 13755 - protein, 360 aa, Physcomitrella patens subsp. patens
MTSLNELLNLSLEETTQEIIAEYIWIGGSGTDLRSKARTLPKPVSDPKLLPKWNYDGSSTGQAPGEDSEVILYPQAIFRDPFRRGNNILVICDAYTPQGVPIPTNKRAAAAEIFATKEVAEEETWYGLEQEYTLLQKEVKWPLGWPVGGYPGPQGPYYCGTGADKAWGRDIVNAHYKACLYAGIQISGINGEVMPGQWEFQVGPSKGIAAADQLWAARYILERITEIAGVVLSLDPKPIEGDWNGAGCHTNYSTKSMREEGGYEVIKKAIEKLGLRHREHIASYGEGNERRLTGKHETADMNTFSWGVANRGASVRVGRDTEKDGKGYFEDRRPASNMDPYVVTGMIAYTTILWSPEEQK

SEQ ID NO: 13756 - protein, 429 aa, Listeria innocua Clip11262
MFVDQVKIYVKAGNGGDGMVAFRREKFVPNGGPAGGDGGKGADVVFVVDEGLRTLVDFRFKRIFKAEHGDHGMSKSMHGRGAEDLVVKVPQGTIVKDIDTGEIIADLVAHGQRAVIAKAGRGGRGNKRFATPANPAPELSENGEPGQERNVQLELKVLADVGLVGFPSVGKSTLLSVVSAARPKIAAYHFTTIVPNLGMVDAGDGRSFVMADLPGLIEGASQGVGLGHQFLRHIERTRVIVHVIDMSGSEGRVPYEDYMAINNELEQYNLRLMERPQIIVANKMDMPDAEENLKEFKTKIAEDIPVFPISAVTKTGLRELLLAIADKLETTPEFPLNEILEQEDEDTVLYKYVAEEPDFEITREPDGTFVLSGAKIERLFTMTNFERDASISRFARQLRAMGVDEALRKRGAKDGDIVRLLDYEFEFMD

SEQ ID NO: 13757 - protein, 102 aa, Listeria innocua Clip11262
MYAIIETGGKQIKVEAGQEIYVEKLAGEVGDVVTFDKVLFVGGDSAKVGVPFVDGATVTAKVEKQGRAKKLTVYKYKPKKNYHKKQGHRQPYTKLTIDAINA

SEQ ID NO: 13758 - protein, 864 aa, Physcomitrella patens subsp. patens
RILVNLKAGFVNGEEELHDWDVESQSPCGWMGVNCNNVTFEVVALNLSELALGGEISPSIGLLGSLQILDLSGNNISGQIPVEICNCTSLTHLDLSSNNLGGEIPYLLSQLQLLEVLNLRNNRLSGPIPSSFAGLSNLRHLDMQFNSLSGPIPPLLYWSETLQYLMLKSNQLTGGLSDDMCKLTQLAYFNVRDNKLAGPLPAGIGNCTSFQILDLSYNSFSGEIPYNIGYLQVSTLSLEANQLTGGIPDVLGLMQALVILDLSNNKLEGQIPPILGNLTSLTKLYLYNNNISGPIPVEFGNMSRLNYLELSGNRLTGEIPSELSYLTGLFELNLHGNQLNGSISPALQQLTNLTLLNLASNNFTGSVPEEIGMIVNLDILNLSRNSLSGQIPSSISNLEHLLSIDLHDNKLNGTIPMALGNLKSLGFLDLSQNHLQGPIPLELGQLLELSYLDLCFKRLSGPIQLIHSFTYLNISYNHLSGTIPRNQVCCSMVTSYFGNPLLCLNSTFSCGLNPQQPREATSQRPGICTTWGITISALILLALLTIVGIRYAQPHVFLKASNKTVQAGPPSFVIFHLGMAPQSYEEMMRITENLSEKYVIGRGGSSTVYRCSLKNGHPIAIKKLYNQFSQNVHEFETELRTLGNIKHRNLVTLRGFSMSSIGNFLFYDYMENGSLYDHLHGHVKNKLDWNTRLKIASGAAQGLAYLHKDCKPQVVHRDVKSCNILLDVDMEPHVADFGIAKNIQPARTHTSTHVLGTIGYIDPEYAQTSRLNEKSDVYSFGIVLLEILANKKAVDDEVNLLDWVMSQLEGKTMQDVIDPHVRATCKDVDALEKTLKLALLCSKLNPSHRPSMYDVSQVLLSLLP

SEQ ID NO: 13759 - protein, 370 aa, Listeria innocua Clip11262
MLIGVPKEIKNNENRVAMTPASVFSYVNAGHTVYVEKGAGSGSNYQDADFVQAGATIVETAKEAWDVDMVVKVKEPIASEYTYFKEGLLLFTYLHLANEPTLAKALLESKVNSVAYETVELADHTLPLLSPMSEVAGRMAAQIGAQFLQRTNGGMGVLLGGVPGVEKSEVVIIGGGIAGTNAAKIAVGLGANVTILDMNLKRLRQLDDIFGNQVQTLMSNDFNIELAVKKADLVIGAVLIPGAKAPKLVKEHVIKQMIPGSVLVDIAIDQGGIFETTDHVSTHDDPTYEKYGVLHYAVANMPGAVPRTSTLALTNATLPFGLKLANDGLEEAVKKDPYLLRGLNTYQGHITYKAVSDSLDLPYTNSAELI

SEQ ID NO: 13760 - protein, 397 aa, Listeria innocua Clip11262
MEKTIAINAGSSSLKFQLYDMPSERVITAGIVERIGLKDSIFTITVDGEKIKEIIDIPDHEIAVQMLLEKLINHKVIGSYDEITGIGHRVVHGGERFPESVYIDDQVIKDIEALSELAPLHNPANVTGIKAFRKILPDVVSVAVFDTAFHQTMPPASYLYSLPYSYYEDYGIRKYGFHGTSHKYVSERAAELLGRPVEELRLLTCHLGNGASIAAIEGGKSMDTSMGFTPLAGVSMGTRSGNIDPALIPFIMEKTGKTAEQVLDVLNKESGMLGVSGISSDLRDLEDEAAKGNDRAELALQVFVDRIHKYIGSYAARMNGVDAIIFTAGIGENSSYIREKVLRGLEFMGVYWDPALNQVRGEERFLNYPHSPVKVIIIPTNEELMIARDVETIKQNH

SEQ ID NO: 13761 - protein, 379 aa, Listeria innocua Clip11262
MIYFDNSATTKPNAAVLETYTKVASNYFANPSSLHRFGAKSKELLDTSRKQIATMLDVLPEEIIFTSGGTEGNNLAIKGLAYSYKNRGKHIITSSIEHPSVRLVMEELEENGFTVTYLKVDKNGVIQLDELKAALTDETILVSIMGVNNEVGSIQPLQEIGEILASREHTFFHVDFVQGIGKIPLEIDKHAIDLLTFSGHKFHALRGTGALVKRKNVHLHPEIIGGGQEMGYRSGTENLAGGVALAKALRLTLENESKRAELIEIRDYLLTEITQMPDMTVHTKKSVAAPHIVCFSAKGHRGEILVHALEKEDIYISTTSACSSKQKLASSTLKAMGVTDEEATGAVRVSLSYENRLSEAKIFIQKLQEIIENLNKVVK

SEQ ID NO: 13762 - protein, 649 aa, Physcomitrella patens subsp. patens
MGGGGDDKRRTVHEEVPLVHKVHVPPRGGLVKDVSHGLWETFFHDAPLRQFKGQSKHSKSWLGLKFVFPLLEWITTYTPRMFVSDFIAGLTIASLAIPQDLGYAKLAGVPSVNGLYSSFVPPLVYALLGSSRDIAIGPVAVVSLLLGTLLKQELSPTKQPQLYLQLAFTATFFAGLFQTALGLLRLGFVIQFLSHAAIVGFMAGAAVTISLQQLKGLLNITHFTTDTDFISVMTSVFQNTNEWNWRSIVIGLAFLSFLVLTKILAKKKPKLFWVSAISPLISVVLATLFVFIFRVDKYGVKVVGNIKKGVNPSSADQIFFTGKYVTAGAKIGFVAALIALTEGVAIGRTFAALRDYHIDGNKEMIAFGIMNICGSVTSCYVATGSFSRSAVNYQAGVKTAMSNIVMAIVVLITLVALTPLFKYTPNTILAAIIISAVISLVDFKAAWLIWKIDKFDFLATLGAFFGVFFVSVEIGLLVAVCISFVKILFNVTRPHTARLGNIPGTKVYRNILQYPDATLPHGIVAVRLDAAIYFSNSQYIHDKVLRYLEDETERVAKTGGPRIEYLIVDLTPVTNIDTSGIIAFEELHRILVKRNVQLAFANPGSQVIQKFDSSGYLTTLGSEWIFFSVAEGVQVCSVLLNKSAAERSV

SEQ ID NO: 13763 - protein, 673 aa, Physcomitrella patens subsp. patens
MCSSGYCSPLLLTKSISCCGAENSPLIVANGGTSGLYPDQTLEAYSDAINSTSLPLALLCDLQLTKDNLAVCRTGLNLTTSTTLATVMPNTTTMTTYVVRGASQTGYFSVDFTLAEINQTKAIQPNIARTPGFDGQFALQTPEDSATGISLAGLPGLMLWLNVEYPTFYQQHPGKNSLASYLTTFLKQYKPQYLSATEVGILKLLVPTASRSATRLVLKFLSTDLIEESTNSTYGQILTNLTDIATFAGGILVPKEFIYPTVPLSNGSVSGYGYYSGNPTTLVQDAHNANLEVFVYGFANDIYPSSYNNSFDPVLESLNYVGDSFTVDGIVSDFPSTVAEAICEYTLCHIERNVSSAPTPVRNPLIIAQNGASGDYPGSTLSAYVAAVKGGSDYIECSVQITKDGVPICRDGANLVNTTNVALNPDLFETKFTTYQEMGSGVFSFDLTLEEIRTLRGILFSPFGVVNVSRDPSLDGKEGILTLDEFLSFAKNNSGVGVYVNVQNAYFVRTVKSLDMVSAVVTSLTTANLTNVGDKVYLASEDSSALAAFQSLIPSVQRVYVTPDTGDVTITTAVLQEIKKYADIVTLDRAFVDPFDSQTSFLLEKTSVVSAAKSLNMTVFYHFLANEFSGLAFDYRADPILKISYLISEYNLDGFITDHPATLYNFLYSKYCF

SEQ ID NO: 13764 - protein, 376 aa, Physcomitrella patens subsp. patens
EAPDLGSDEDKESDLPSVKPSRYFDALEGAELEELKDHEVLILPKGELWPFLLRFPLNCFGVCLGLGSQAILWKNLHLSPELEFLHIPKEINIFLWSIALLALLVISMTYLLKVLFYFEAVRREYFHPVRVNFFFAPWIAGMFLAIGVPPSIAQSVHPAVFCCFMTPIFILELKLYGQWLSGGKRRLSKVANPSTHLSIVGNFVGSLLAAIVKWNEPAIFFWSVGLAHYIVLFVTLYQRLPTNEKLPKDLHPVFFLFVAAPSTASVAWLYITGDFDYISRIVFSIALFLYTSLVVRINFFRGIRFTLSWWAYTFPMTGAAIASIEYSHAASSWITKILAIVLSSVSSATVFTLFITTLLHTFVWKTLFQNDSVIAI

SEQ ID NO: 13765 - protein, 593 aa, Physcomitrella patens subsp. patens
MTRRGMDSWHEERGKKDVQQGGLGVQHGVEQGGGQQTRKNPSISQLKGFYPDNGIKYLPLIKHGNHALQKNAVCPAVWDCTAVYFVTNVVLAFLPAATTAKIDERTKTKRRGLIRDSSPGNSKLKSNSATRLGDTPGPNWIRKTRPGPRVSSEPADIFDPRSWPESVLGRACGVPRQPPSSEIRPLRLNVRHKSPRSSSVAADEGLSISVDGILLKMARTNTACELCDGVAALYCEADEAHICWICDAKVHSANFLVARHTRSVLCGTCGTQTSWRASGANPTPLPGVCAECSQGEAQGECITLNDGNVIDTARVTAESCESAVIFETEFSQVSSCESSHSQLSSYDSEGVIVDCGSAHASVSSGISKSLKRKRSLHSLLPVSVPQSKQIAMRVLEDVNSSDAHRQCKCDSTTSSSSSTGSNSRANQDSSFEERGDNRTQFPEFGNTNRVVTNHLLSSAKRQRMDDRVQTMSSFAPAQESAVLSISRSMRTLAKWHWDLHLSSPGTVPLALRMFCKVSRALTPTLFSNSGRRVALAACLRLAAVLDEAQITVPNSGKVAACAGVSARRLAMTELHLLALLGSRRLPVWASSRT

SEQ ID NO: 13766 - protein, 800 aa, Physcomitrella patens subsp. patens
MEKKMNLNLLTLVVLVTLPTCFAYNATIGWQTFNKGPPLVIANGGTSGLYPDQTLRAYRDAANSTSSPLALLCDLMISKDNFGICRPGFFLEMSTNTTSYPATAKRSTYSGYGQNLTGYFANDFTLAELLTVTGMRTSNARPPIFTQETLAAPENVSQIAAEFGVATWINVEFPEFFQEYPAPNSLLSYLTSFLKTNKVQYLSVTNSSILKLIAPTNGTRLVLKLLDYDGLVDPLFQNLTDIATYAQGVLVPNSYVIPKNFTGYGVYEGQATTAVQDAHKAGLEIFVYGFANDRQPYIYNYSKDPVLEVLSYVGDSFTADGIVTDFPNTAATAIHCYPDGFDKPSTIQASTPKLTNPIIIAEDGASGDLPGSTMAAYLKAIDDGADYIECKVQITSDGVPICRDGENLLNNTNIGSSQAKLEKYYTAYPDFGYGVFSFDVPSTEIQNLRGIISRPNNSTSRDPANDGKESILTLKEFLNLSKIYTNTGLYVNVQNAYKVYRLKNLDMVSAVATALAVADLTNAGDKVLLASEDTSALNAFQEVIPNVRLVYVIANNEMDYSVPREVLKEIKKYADTVHIYRSFIDRIDPYTYFVNKMTSVVQEAKALNMTVFYASISNEYLNLAFDYRADPHLKMYYLLQELQSNGKSLLDGFLTVYPATVYNFLNNNYCYRTLGGATNRSMSGRNDPIYRVYPDATAIWYIPPAFPVLNVTQGPVSYGNVVNATPPAPPPKPSSSPSLGSNLPFTLLASAVLIFILNFTLQQEPPQGEIGHVGRNSCLHDITQLLPVLEMNNLEPICRK

SEQ ID NO: 13767 - protein, 666 aa, Physcomitrella patens subsp. patens
MEVHALLVGSAAAHAKRKWNSGLLPSPVKKEKIDHLGLFDAQPNGVEGACMHCLAPTSHNLCDVCIISTLPYENQGQLDPSPFHLNLKHTNVAAQDMRFHRPASDVRTHPAQNSSSLSTGILSRHPAQFSNPDPIQNDFSHMKQSANMPVQSDVGNPVHQSSRTVRISSSEAMEDNVVASHDYGIGAVVGQHNLFGNPEPLRQLSGFPSQEMTTKFPVLPNPRQQQPLSVNSSFSVGSVSAGAAHTDFFLDSSMTSGHDMPNIPQATPYSVQIHRIHPTVQVVSPESEHASLGSRRLEGTAFHTLQHPQFYATTKTDGERYAEMERQCLSNNIADKVMINQHSPRPVTKSAYRGVRKRPWGRWSAEIRDRIGKCRHWLGTFDTAEDAARAYDAAARRLRGAKARTNFELPSSCSSPPSDSPTLPPGENSPTSNSSLSLKQASYLSRSIADHSGQLRRTPNEESNSHAQAAEAQSTQECCRQQPISPSKTAAVDQAPNGTLKLDLTLGNCSSRSCSSSDRIQQSPCNSSETGIYLPTRHFPTPRFATLGSHRIALNAWHSCATHAHKFLSVWPRKPRVWRSAAVDANDVGCDHMLAQNESDSRSTSSPTCLWCLQMLPGGSSVICRCQGFCGFCSKTSSGIWCRTTLNYQKVRKLAFDQQWSYTVKG

SEQ ID NO: 13768 - protein, 164 aa, Physcomitrella patens subsp. patens
MLPAAYHYAIPYNLYEELGIRKYGFHGTSYQYLLQQSLTILEKPQSDVNIVALHLGARASMAAIKNGMNVDVVINILNKKNMLFGLCGKKDMRYVWNSTEAGNARHKLALQVYVHWICSYLGAYYFHLQENLDALVFSTGIGEGAGQTRARICEGLEKFGIEVD

SEQ ID NO: 13769 - protein, 594 aa, Physcomitrella patens subsp. patens
MAVDEGVSYQPPSSFSSFSEYGRAILDTPRRLYKHAWDISTPTDEMSEVRARSGAEMSRSLHWWDVIALGVGGMVGAGIFVSTGTAARSSGPSVVIAYLVAGISALLSALCYTEFAVEMPVAGGAFSYLRITFGEFPAFIAGANLIMEYVLSNAAVARSFTSYAASAYGVLHADAWRVQVDGLADGYNQIDVVAVLVVMFLTAFLCCSTKKSCTLNLVMTVLHIAFILFIIVMGFVKGDVKNLTTAGDPVANPSGFAPMGIRGILGGAAIVYFSYIGFDSVSTTAEEVKNPARSMPIGVSGSVIIVTVLYSLIAIALCMLQPYDMIDTGAPFSSAFQHVVGWEWVTKFIGAGASLGIMTSLLVALLGQARYMCVLGRAHIVPQWFAAVNPSTGTPINATIFLGACTAAISLFTDLTVLLNLVSIGTLFVFYMVANALIFRRHYVRGKTSSLPTAAYLVVLSVLAITFVTVWQCGQHYRHNWALYLVGGLAIALTAVFWFKIPTAQKGKDWSVPCMPWVAAASIFLNVFLLGSVDKASYMRFVIWIIIAIVFYILYSVHSTHDAEARASLDTPLIAGTVQVKVESLPWIRVILSV

SEQ ID NO: 13770 - protein, 107 aa, Physcomitrella patens subsp. patens
WSTGLFDCCADMPMCCFTMFFPCLAFGWNAQALDESKNSCWTAATAWWVLQHTIALGCLYSASYRGKLRSKYNIPEGPFSDSLIHCLCWPCAFCQEYRELHYRSFGP

SEQ ID NO: 13771 - protein, 61 aa, Physcomitrella patens subsp. patens
HYRGVRQRPWGKFAAEIRDSARQGARVWLGTFDTAEQAAMAYDAAAFKMRGCRALLNFPLQ

SEQ ID NO: 13772 - protein, 621 aa, Listeria innocua Clip11262
MCGFVGCVHDRITEITGADKETFRQMNSMITHRGPDDEGYFTDDHVQFGFRRLSIIDVENGHQPLTYENERYWIIFNGEVYNYVELREQLVAEGMTFETESDTEVIIATYAKYKEKTAERLRGMFGFVIWDKQEELVYGARDPFGIKPFFYAEEDGKLFMGSEKKSILHALKEKELDEVSLQNYMTYQFVPEPDSLTKNVKRLEPGHQFTKKIGQPMEITTYWKASFAPVTKSEDAWIKEVRDVMYDSVKMHMRSDVPVGSFLSGGIDSSIIAAIAKEYHPAIKTFSVGFERDGFSEIDVAKETADKLGVENISYVISPEEYMKELPKIVWHMDDPLADPAAIPLYFLSREARKQVTVALSGEGADELFGGYNIYNEPNSLAMFNKMPGVFKSMLNSVARIMPEGMRGKSFLERGTTPMEERYIGNAKMFTEKEKQILLPKYQSGHDYTNITDPFYAETKNYHPVERMQYIDIHTWLRGDILLKADRMTMANSLEVRVPFLDKEVYNVARNIPDTMKTTNGTTKYILRKAAATFVPEHVLNRRKLGFPVPIRHWLKDEMNAWVKNIIKESPTDHLINKQYVLGLLDDHCAGKFDYSRKIWTVVIFMIWYDVYVADKYDFGK

SEQ ID NO: 13773 - protein, 575 aa, Physcomitrella patens subsp. patens
MGGGDKAKEALPDGSRTLGRYIAARLVEVGVRDLFTVPGDFNLVLLDHLMAEPGLELIGCCNELNAGYAADGYARANGVGACAVTFTVGGLSVINAIAGAYSENLPVICIIGGPNSNDYGTNRILHHTIGEIDFSQEHRCFQQVTCAQVVIQSLDDAHELVDRAISTAIGQSKPVYVSVSCNLAAMPHPSFRSAPLPYSMTQGPDPRSLEAAVDAVSSLLASAVKPVLVGGPKLRVAKACDSFEQLATACGYAVAVMPAAKGLFPESHRNFIGTYWGAVSSTFTAEIVESADKYLFAGPVFNDYSSVGYSLLIKKENIISLEPDRVMIGNGPSFGCVLMKDFLEVLAKKIKKNTTSFDNYSRMYVPVSVPPKQKPGEPLKAVNLFKHIQAMLTKDSAVIAETGDAWFNCQKLKLPDGCSYEFQMQYGSIGWAVGATFGYAQGAKQRRVIACIGDGSFQVTAQEVSSMIRNGQNSVIFLLNNGGYTIEVEIHDGPYNVIKNWNYTALVEAFANGEGRLWTCKVRTEEDLEKAIATVHEKDSLCFIEVILHRDDTSKELLEWGSRVATANSRPPNPQ

SEQ ID NO: 13774 - protein, 420 aa, Physcomitrella patens subsp. patens
MEEDKAACSGGPRRRVISVSAGASHTVALLSGDLVCSWGRGEDGQLGHGDAEERHLPLVISALDDCEISSITCGADHTTARSESTRTVYSWGWGDFGRLGHGNSSDLFIPRAIKGLKGLEIKQIACGDSHCLAITGDGEVHSWGRNQNGQLGLGHTEDVLVPNKVAAFEGIAVKMLAAGAEHTAAVTESGKLYGWGWGRYGNLGLGDRNDRLVPGEVAAVPGEKMNLVACGWRHTIAVANSGNLYTFGWSKYGQLGHGDFEDHLVPHQVQALKNKTIQAVSGGWRHTVALDEDGELYGWGWNKFGQVGCGNTDDHNSPKLITGIVNEKVTRVTCGWRHTVAITDRGNVYSWGRGTSGQLGHGDAVDRCVPKRIELLSADGLACQGIESSPSGNCASSNWISPAERYAVVPDETIGSFTET

SEQ ID NO: 13775 - protein, 363 aa, Physcomitrella patens subsp. patens
MQAACEFCGEGRATVYCRADSARLCLTCDRQVHGANALAQRHSRTLLCHSCNVRPAAVRCPSCHSSLCETCDDEIHNPILGTDQHQRRSFECFTGCPTATELAMLWASQANDVRKRGGAVLASSPFKKSMQWNSWEPRIGAVALNPIAPVDVRESCTAQRTGDNFNVGAYMSGPGPPRILKNMQDLGMCEEEERDLCSGFNVPDVNLSFENYEDIFASSQAPNAATFSACTSMEADAGRESHMQSIPESELFSQENSGLSWTASAVSGDSSDYVECDLSPVLLTPSGESSLGSGSPDSVTFAQARDSAMLRYKEKKKIRRFGKKIRYESRKARADIRTRVKGRFVKVGQACDYDPMVQPQWSL

SEQ ID NO: 13776 - protein, 317 aa, Physcomitrella patens subsp. patens
MQLVVQGSLDNQYGLRKSYYGVSCPNAEEIVTKTVTKAVKHDSRSAASLVRLFFHDCFVSGCDGSVLLDNSTTAMSEKEARPNINTLRGFGIIERIKESLENACSETVSCADILALAARDSVVQTGGPHYDVLLGRRDSIIANYTGANAVLPSPKFNVTTLTKKFLDVGLTSEDMVTLSGAHTIGKTHCTSITTRLYNQSGTTKPDPAIPAEMLRKLQTKCPNDPTDLKTTLVLDDETPEVFDNQYFKNLLNKRGILYSDQILADTEGFNLDLVNLYANDQNAFFDAFVKSMTRMGNISPLMGTSGEIRKRCDRVNL

SEQ ID NO: 13777 - protein, 1530 aa, Listeria innocua Clip11262
MKQTNLPKKHGLYNPENEHDACGIGFVANIKKISSHKIVEQGIHMLCQLKHRGGEVGGDTGDGAGILLEISDSFFRRECSKLGITLPEKYHYAVGMFNFPQNKAQRECLMSETEKLIASEGQTFLGWRKLPTDVTKVGAGARKTEPAMYQLFIQKNAELDEAGFERALYLIRKQVEKFAATSELITETFYVPSLSTRTVIFKGMLLPEQINQYYLDLADPAYVSAFALVHSRFSTNTFPSWERAHPYRYLIHNGEINTQRGNVNWMKAREKRAESALLGKDLAKVLPVIDESGSDSATLDNALEFLVQAGRSLPHAAMMLIPEPWDKNPHMTDPKRAFYEYHSTLMEPWDGPTSISFTNGRVIGTILDRNGLRPARYYETKDHTIIYSSETGVVPVDPSEVIRKETVGAGTMLLIDLEAGRIVTDSELKDELTTEKPYREWLDLEMTEIADLVTADLRYESMDKSERFKKQRAFGYTQDELNKILIPMVTEKKDPMGAMGYDAPLAVLSQRPQVLFNYFKQLFAQVTNPPIDGIREETVTSAMTLLGDEGNILNPTAKNANRIRLKTPILSRKEFAALTLQTKFAKPTATLPILFKAEERDGLEACLEELFEAADKKIANGAELLVLSDDGVNAEWIGIPALLAVSGLHHHLVKAGTRTKVSIIVKTAEARDVHQCALLIGYGADAVFPSLAIDTFDGLIKEGRIKGFTLDEAESRYIEAITDGILKIMSKMGISTVQSYRGAQIFEAIGIGDEVINTYFPGTASQIGGIPLEVIAQEAWLRHREAYHDIGYQSFTLNTGGEYQWRSNGEYHVYNPLAIHSLQQATRENDRETYNLYSDLMQNQSNAFLRGLLTFTSDRKPIPLDEVEPAESIFKRFKSGAMSYGSISQEAHEALAIAMNRIGGKSNSGEGGENPNRFTPDENGDWRRSAIKQIASGRFGVTSHYLVNAEELQIKMAQGAKPGEGGHLPGKKVYPWISKTRGSTTGVGLISPPPHHDIYSIEDLSQLIFDLKNANQNARVNVKLVSKTGIGTIAAGVAKGNADVILVSGYEGGTGAAARTSIRHAGVPWEIGLAETHQTLLLNGLRNKVVVETDGKLMTGKDVLVAAMLGAEEFGFATAPLVTLGCVMMRVCHLDTCPVGVATQNPELRKKFNGSADYVVNFFHFIVAEMREMMAELGFRSLTEIIGHKEFLTTHEKKEAHWKAKYIDFSNMLYSDDFYKNQVQYCTKQQDHKIDQTLDMREIVPLIKPALENGEKVTGTFAVRNVDRAIGTIAGSFISKKYGAVGLPEDTISLDFVGSAGQSFGAYTPLGMTLRIHGDANDYFGKGLSGGKLIVSPDHRTPIKAHDSAIVGNVTLYGATGGHAYMHGKAGARFAVRNSGATAVVEGIGDNGCEYMTGGTVVILGEIGENFAAGMSGGVAYIYTKNSQETTTKINHELVNSRSTLSAPELAKLKQLIEQHANLTRSEFAQEILSNWEDEKANFIFVIPNEYEMMLTRITSLEQTGKTHDEAELQAFYEHKDGKLIAGVAK

SEQ ID NO: 13778 - protein, 368 aa, Listeria innocua Clip11262
MLNKELIVRGAPQEYFCQVGAWDTLPTHLERRGLKNVLVVRGNASWEVAKKKFPVLSNVTSTFEVYNGGSTYEERDRLVAIMKTNNMDAIIAVGGGKIADVCKAAAAVLRLPVIILPTLASTCAAYTPLSVMYDVEGAMIRYDVFASSNALLLIDPEMILDSPKELLVAGIGDTLAKWYEADVIIKSLPTKSVEIEIAHIAAKMCRDNLLQFSEEALNAMDKQELNEAFVKIIETNILVGGMVGGFGDDYGRCAGAHSIHDALTMVPETHHLLHGNKVAYGILVQLVIENRWNEIDQLLPFYAKLGLPTSLYDMGLATLTEETIVAVSKRATEPHETIHMMPGEMTAEVVLNAIKQLEDSMAMKRVAK

SEQ ID NO: 13779 - protein, 99 aa, Physcomitrella patens subsp. patens
TDNDWTTGILGCMEDVPNCVFTMVCPCLAFGRVVEHLDDGNTPCITAALVWYVIQQLTSCGCVYSYGYRKKLRRKYNLPSRPLPDWFVHYFCWSCAICQ

SEQ ID NO: 13780 - protein, 363 aa, Physcomitrella patens subsp. patens
LSAGRYFDALTGPELEEVKDKESLLLPEHELWPFLLRFPIGTFGVALGLGSQTMLWKNLALVPQMTFLQIPTWINLVLWCVAVLALVVILICYFLKIQFYFEAVRREYHHPVRVNFFFAPWIACMFLATGVPPQIATTIHPAVWCVFMFPVFCLELKIYGQWLSGGQRRLSKVANPSTHLSVVGNFVGSNLAAIVGWKEPAIFFWAVGLAHYIVLFVTLYQRLPTNETLPTDLHPVFFLFVAAPSASSLAWMRISGEFDYVSRIVFFIALFLYTSLIVRINFFRGFKFSIAWWAYTFPMTAAAIASIQYAQVAPSWITRILALVLSLISSAMVCTLFISTLLHMFYWRCLFPNDLAIAITAHK

SEQ ID NO: 13781 - protein, 83 aa, Physcomitrella patens subsp. patens
QDYIHVRARRGQATDSHSLAERVRREKISERMKFLQDLVPGCSKITGKAVMLEEIINYVQSLQRQIEFLSMKLAAVDPRLDIN

SEQ ID NO: 13782 - protein, 772 aa, Physcomitrella patens subsp. patens
FTPADAIRIACGSASDVKIGTRVFAADNVPGTIKGIAGTTLQNNGALSAYAPLLTSARFFTAGSNYTFTVSPGRHWVRLFFYPFAFSSFQPSNSFFDLTANEFGLLSNFSAVTFVTADSPYFVREYILNITSKELVLTFIPRPSSYAFINAIEIVSAPDGMVQDGATILGGSSVGNFGLSRSALETMHRINVGGVTVTPDADSANMSRTWIPDSPYLIFGATGKTEYTQTQDITYTNVPQYIAPAAVYASALTLSGSDVVNVNYQLNWNFTVDPAFAYLVRFHLCEIVYQRLNERVFNIYINNQVAFPDLDIIAKTTTPLTPLYMDFMVPMFNNYPEINVMIESSKTAQNYKNAILNGLEIFKVNNSRSSLAGPNRVVVPDNSTDGTQTTNSSSSSNLGAIIGASIGGVAAVLVAAALVIFCCYKKKTKSDKPGAPSHWLPLPLHGSSTDHSKVSTSSAKSGKSGAGSYVSSVPSNLGRYFSFAELQEATNNFDESLVLGVGGFGKVYKGEIDDGSKVAVKRGNPRSEQGLNEFQTEIELLSKLRHRHLVSLIGYCEEHGEMILVYDYMANGPLRGHLYGTDEAPLSWKQRLEICIGAARGLHYLHTGAAQGIIHRDVKTTNILLDENFVAKVADFGLSKIGPANEVTHVSTAVKGSFGYLDPEYFRRQQLTEKSDVYSFGVVLMEVLCARPAINPALPREQVNMAEWAIKYQKAGMLDQIVDEKLRGSINPDSLKTFGDTVEKCLQEQGIDRPSMGDVLWNLEYALQLHEA

SEQ ID NO: 13783 - protein, 872 aa, Physcomitrella patens subsp. patens
MGYDRCIQILSVLLLCGASWAQGPVAAPAPSFTPADAIRIACGSASDVKIGTRVFLADVQGTGQGVAGRTNQNNGALSAYAPLLTSARFFTSAFNYNFTVSPGRHWVRLFFYPFAFSSFQPSNSFFDISTKEVGLLSNFSAVTFVTADSPYFVREYFLNITSKDLVLTFIPRSNSYAFINAIEIVSAPDGMVQGGAPTLGGGSLTYPGLSQSALQTMYRLNVGGGTVAPDDDSANLSRTWIPDTPYKLLNTPGVSVEANATKITYTDVAEYIAPATVYASGQALEDNDVANANAALNWNFTVDNNFTYLVRLHFCELQYQRLYERVFIIEINRVAIYQFFDIIEEAGAAYTPLYRDFMVPMINTYPKINVRIAPDRSNPNAKNVLLNGLEIFKVNNANSSLAGPNRIIEPNTTSGGTQTTNSSSSSNLGAIIGASIGGVAAVLAAAALVIFCCYKKKTKSDKPGAPSHWLPLPLHGSSTDHSKVSTSSAKSGKSGAGSYVSSVPSNLGRYFSFAELQEATNNFDESLVLGVGGFGKVYKGETDDGSKVAVKRGNPRSEQGLNEFQTEIELLSKLRHRHLVSLIGYCEEHGEMILVYDYMANGPLRGHLYGTDEAPLSWKQRLEICIGAARGLHYLHTGAAQGIIHRDVKTTNILLDENFVAKVADFGLSKIGPANEVTHVSTAVKGSFGYLDPEYFRRQQLTEKSDVYSFGVVLMEVLCARPAINPALPREEVNLADWAIKYHKAGMLDKIVDEKLRDTINPDSLKTFGDTVEKCLQERGIDRPSMGDVLWNLEYALQLHEASVKGAMSSLDQGNFSTDSDNSHMISVPLVAPNLFDDSLTMDIERRMLEETASEDQSASAIFSQLINAQGR

SEQ ID NO: 13784 - protein, 804 aa, Physcomitrella patens subsp. patens
MKELPGRKSGGVTEVSSAQGRSPAKAARASNDVDSGGSDRFCGEEITVRQWLSRPNREVDRVQSLHVFKQVLDFVDLAHGQGVMLRNIRPSCFLLFPSNRVAFIDSASTRSSSEQYCENSPDWRESTGSEGERRAVSRDGVQSYEITSSSGKQVDMNNSDGLLRNGEYCFPQRQLLLMEQAWYTSSEEHATGTITFASDIYSLGVFMFELFCSFGSEVERMRVMADLRNRILPPRLLSECPKEASLCLWLLHPDPSCRPKARDIFNCEILMEAGDAIAERQAAVLLEEKEAESEVLFEFLLRMQNQKQENARKLAHDVSRLSADIQEVERRRLALKKKRGPITKVENSGQRRVTGANMQERKGLQGKRQHPEDGVGFREKGIACIDGRGKILSKSARFMSNFNHLEKVYFSMNWRACAPGMGMSKSSSRQGAEGLSIGCAASDELKATSRSGEENEEDWLGCFFDSLCKYARYSRFEVKATLRHGDLLNTANMVCSLSFDRDEEYFATAGVCKRIKVFECDTILNEHVDIHYPVVEIPCRSKLSSVCWNGYIKSHLASCDYEGVVQLWDASNNRVLKEYEEHEKRAWSVDFSKAYPTKLASGSDDGTVKLWSINQERSIGTIKTKANVCCIQFPPDSGHLLTFGSADYKVYVYDLRTTKLPLCILASHQKAVSYVKFVDSVTLVSASTDNTLKLWDLTRANTAPHAQTGCSLTYTGHTNEKNFIGLSIADGYIACGSETNAVFAYHKSLPMEMASHKFGCTDPITGREVEEDGGQFVSSVCWRGKSQTLVAANSMGNIKILEMV

SEQ ID NO: 13785 - protein, 66 aa, Listeria innocua Clip11262
MQNGKVKWFNNEKGYGFIESDGGEDIFVHFTAIQGDGYKSLEEGQAVTFEVVEGNRGAQAANVEKA

SEQ ID NO: 13786 - protein, 393 aa, Listeria innocua Clip11262
MDLPLSKRVKGVAPSPTLAITAKAKQMKQEGIDVIGLGAGEPDFNTPQNIIDAAIESMNKGFTKYTPSSGILELKQAIVDKLKKDQSLTYEANQIFVGTGAKHVLYSAFQTILDPGDEVIIPVPYWVTYPEQVKLAGGVPVFVETGFDADFKISATDFEHAITEKTKAIVLNSPNNPSGMCYTKDELAAIGAVAEKHQIYILSDEIYEKLYYGNKADLVSIASLSDRLYDLTIVINGVSKAYSMTGWRIGYAAANKEIIAGMSKLADHLTSNPTANAQYAALEAYVGSQEVPEKMYKAFEERMERFYPELSSIPGFKPKKPDGAFYFFIEVKEAAHKKGFQDVDAFVAALLEEAKVAVIPGSGFGMPDYIRLSYATNPDLFQEAINRIKSFMK

SEQ ID NO: 13787 - protein, 127 aa, Listeria innocua Clip11262
MFRTMMNGKIHRATVTEANLNYVGSITIDSAILEAVDMLPNEKVQIVNNNNGARIETYIIPGEPGSGVICLNGAAARHVQVGDVVIIMSYGMFTSEEAKTHEPKIVVLDEKNHIEMILPEEKAHTTL

SEQ ID NO: 13788 - protein, 84 aa, Physcomitrella patens subsp. patens
MIPEETHSPEPAKKRKYRGVRQRPWGKWAAEIRDPKKAARVWLGTYDTAEEAAQAYDKAAKEFRGLRARLNFPDGVHMGIGSSS

SEQ ID NO: 13789 - protein, 160 aa, Physcomitrella patens subsp. patens
MSSRGGSDDEDEGTTRKKLRLSKEQSALLEESFKEHSTLNPKQKNALAKQLGLRPRQVEVWFQNRRARTKLKQTEVDCELLKRCCDSLKEENRRLQKELLELRAIKVAPPCVISHDYYMPLPAATLTMCPSCERVATVDNRSLTFAKPGFSHLSQSSAAC

SEQ ID NO: 13790 - protein, 239 aa, Physcomitrella patens subsp. patens
PAGLKVLVVDDEPLALMIVERMLQICQYTVTTCNSATKALAMLRENRNYFDLVISDVYMPDMDGFKLLEAIGLELDLPVIMMSGDGETDSVMKGIRHGACDYLLKPVRLKELINIWQHVVRKLVTPRDIPKEESGEWDEFPKHQDNADFDSTARKRKERSEDVAQLVEDVNNLKKARVVWSAELHQQFVNAVNYLGVDKAVPRKILDIMNVQGLTRENVASHLQKYRLYLKRLIGVTPQ

SEQ ID NO: 13791 - protein, 380 aa, Physcomitrella patens subsp. patens
QVQCEDVLPRQCWDSPSYSGTIPKQQPALLAVQGVYNPSTTWLEMANNISRGGFGHGSSNVMLVRNESSTDTLVAMLASCSPAALQVQRGGGGLEDALVSSGQKRSFFPTFEASGEDAGDEDLGDDCTHNVEKKRRLTFDQVRSLERNFEVENKLEPERKMQLAKELGLQPRQVAVWFQNRRARWKTKQLERDYEVLTSDYNRLKSEFEAVLQEKQELQGEIECLTGKLQISSQPGPVDGAPEKPSKRLSKAVPSQLSPPKTSSEACVKSERKPSDPNASSNDDKEEGSRATSSDSISSEILDADSPRTTEKFNTDLAAEVPLDSNIIHVSDHLCDHMLYPQACQRISVKLEDGSFRDESCNYILSQLDEERGLPWWDWP

SEQ ID NO: 13792 - protein, 160 aa, Physcomitrella patens subsp. patens
MSSRGGSDDEDEGTTRKKLRLSKEQSALLEESFKEHSTLNPKQKNALAKQLGLRPRQVEVWFQNRRARTKLKQTEVDCELLKRCYESLKEENRRLQKELLELRAIKVAPPCVISHDYYMPLPAATLTMCPSCERVATVDNRSLTFAKPGFSHLSQSSAAC

SEQ ID NO: 13793 - protein, 618 aa, Physcomitrella patens subsp. patens
MTSTALKEADVPLPDVIESGISSGKTLTAPTPKDFVSRYAEDEPRKGSDILVEALEREGVRTTFAYPGGASMEIHQALTRSNVIRNVLCRHEQGEIFAAEGYAKSSGRVGVCIATSGPGATNLVTGLADALLDSVPLVAITGQVPRRFIGTDAFQETPIVEVTRSITKHNYLVMTVDDIPRVIREAFFLAASGRPGPVLVDIPKDIQQQLAIPDWNQPMKLQSYLNRLPPPPQVSLMQQIIRLLSTAKKPVIYSGGGCLHASKELREFVELTGIPVTSTLMGLGTFPASDERYLSMLGMHGTVYANYAIDNSDMLLAFGVRFDDRVTGKLESFASRASIVHIDIDPAEIGKNKQPHISICADVQLALAGLNKLIKEGPATRPSFSAWRKELDGVKEKWPMKFPKLDSQVIVPQFAIQTLCELTGGNAIISTGVGQHQMWAAQWYEYEQPRRWLTSGGLGAMGFGLPAALGAAATNPDIPVVDIDGDGSFIMNIQELATIHVEKLPVKIMVLNNQHLGMVVQWEDRFYKANRAHTYLGDPEAEAEIYPDFCKIAEGCKVPSARVTRKEDLRDAIKKMLQTPGPYLLDVIVPHQEHVLPMIPGGASFKEIITEGDGRQIY

SEQ ID NO: 13794 - protein, 573 aa, Listeria innocua Clip11262
MIDTTKTNEKATKKLNKSGAELLIDSLKKQQVEMIFGYPGGAVLPLYDAFYDCDIPHILTRHEQGAIHAAEGYARVTGKPGVVVVTSGPGATNVLTGIADAMSDSIPLVIFTGQVHTPGIGKDAFQEADMIGLTIPITKYNYQVRDVRDLPKIVNEAFHIANTGRKGPVVVDIPKDMGITQTDTVRPDTIDLPGYQPTYSPNPLQLEKLMQALSARSKPLILAGAGVNHARATAELLEFAERYQIPVVNTLLGLGSFPQNHDLFLGMGGMHGSYAANMALTDCDLLINFGSRFDDRLASAPKDFATKATIAHIDIDPAEIGKIIETQIPIVADINETLTQLLQMELPVHPDTSHWYKLNMTRKNRHPFNFDRTKKAEIKPQRVIELIGEITQGEALVSTDVGQHQMWTAQFYPFQFDHQIITSGGLGTMGFGFPAAVGAQLAFPDKTVVAVVGDGGFQMTNQELAILNDYQINVKTVIINNGSLGMVRQWQEKFHDERYSHSIFTSQPDFVKLSEAYGVKGVRLTNPETLEKDLRKAFAHPGPIVIDVHVAKDELVLPMVPSGKPNHQMEGVE

SEQ ID NO: 13795 - protein, 564 aa, Listeria innocua Clip11262
MIKMEKHEKDQTKGKSGADLVVDSLINQGVTHVFGIPGAKIDKVFDVMEERGPELIVSRHEQNAAFMAAAIGRLTGKPGVVLVTSGPGASNLATGLVTATAEGDPVVAIAGNVTRQDRLKRTHQSMDNAALFRPITKYSEEVVHAESIPEAITNAFRSAAEPNQGAAFVSLPQDIVNEPNVPVKAIRPLAKPENGPASKEQVAKLVARLKKAKLPVLLLGMRASSPEVTGAIRRLLQKTSIPVVETFQAAGVISRDLEDNFFGRVGLFRNQPGDILLNKADLVITVGYDPIEYDPKAWNASGDRTIVHLDDIRADIDHYYQPVTELVGNIALTLDRVNAKFSGLELADKELETLKELHAQLEERDVPPESDETNRVHPLSVIQTLRSAIDDNVTVTVDVGSHYIWMARHFRSYEPRRLLFSNGMQTLGVALPWGIAATLVHPGEKVVSISGDGGFLFSAMELETAVRLRAPLVHLVWNDGSYDMVAFQQKMKYGKEAAVRFGDVDIVKFAESFGAKGLRVTKPSELSDVLKEALETEGPVVVDIPIDYRDNIKLGETLLPDQFY

SEQ ID NO: 13796 - protein, 503 aa, Physcomitrella patens subsp. patens
MTTYGCAAGDLTILQGYLGASGNATGLSEFLCSKLDGIDARLGFTTLAVDNTYLLFSTYLVFAMQLGFAMLCAGSVRAKNTMNIMLTNVLDAACGGISYYVFGFAFAFGQGGKPNGFIGHANWGLQNVPNASFDYSFFLFQWAFAIAAAGITSGSIAERTQFVAYLVYSSVLTGFVYPIVSHWLWSTDGWLSATKSVGPGGLLFGSGAIDFAGSGVVHMVGGLAGFWGAFIEGPRIGRFDKSGNSMNFRGHSATLVVLGTFLLWFGWYGFNPGSFLKILVPYEGVKGNWSGVGRTAVTTTLAGSTAGVTTLFGKRLLDGHWNVLDVCNGVLGGFAAITASCAVVSPWASIICGFGAAWVLIGFNRLAARFHYDDPLEAAQLHAGCGAWGLLFVGLFAEKNYVQQIYGGNADRPFGLFMGGGGRLLAAQIVQILAITGWVTVTMGPLFLALHRFRLLRISSEDEIAGMDLTRHGGTAYIHNDGSEQLVHFTTKGDKNHNGKIPI

SEQ ID NO: 13797 - protein, 504 aa, Physcomitrella patens subsp. patens
MTTYGCAAGDLTILQGYLGASGNATGLSEFLCSKLDGIDARLGFTTLAVDNTYLLFSTYLVFAMQLGFAMLCAGSVRAKNTMNIMLTNVLDAACGGISYYVFGFAFAFGQGGKPNGFIGHANWGLQNVPNASFDYSFFLFQWAFAIAAAGITSGSIAERTQFVAYLVYSSVLTGFVYPIVSHWLWSTDGWLSATKSVGPGGLLFGSGAIDFAGSGVVHMVGGLAGFWGAFIEGPRIGRFDKSGNSMNFRGHSATLVVLGTFLLWFGWYGFNPGSFLKILVPYEGVKGNWSGVGRTAVTTTLAGSTAGVTTLFGKRLLDGHWNVLDVCNGVLGGFAAITASCAVVSPWASIICGFGAAWVLIGFNRLAARYHYDDPLEAAQLHAGCGAWGLLFVGLFAEKNYVQQIYGGDSRPFGLFMGGGGRLLAAQIVQILAITGWVTVTMGPLFLALHKFRLLRITPEDEIAGMDLTRHGGTAYIHQDGSEHVMHLSTINGDKRNANDQMPI

SEQ ID NO: 13798 - protein, 505 aa, Physcomitrella patens subsp. patens
MTTYGCAEGDLATIQGFLGAAGNSTGLSEFLCTKLDGIDARLGFTALAVDNTYLLFSTYLVFAMQLGFAMLCAGSVRAKNTMNIMLTNVLDAACGGISYYVFGFAFAFGVGGKANGFIGHANWGLKNVPNASFDYSFFLFQWAFAIAAAGITSGSIAERTQFVAYLVYSSVLTGFVYPIVSHWLWSTDGWLSATKSMGPGGLLFGSGAIDFAGSGVVHMVGGLAGFWGALIEGPRMGRFDKSGNSLNFRGHSATLVVLGTFLLWFGWYGFNPGSFLKILVPYEGVKGNWSGVGRTAVTTTLAGSTAGVTTLFGKRLLDGHWNVLDVCNGVLGGFAAITASCAVVSPWASIICGFGAAWVLIGLNKLAARFHYDDPLEAAQLHAGCGAWGLLFVGLFAEKNYVQQIYGGDPERPYGLFMGGGGKLLAAQIVEILAITGWVSVTMGLLFLGLQKFKLLRISPEDEVAGMDLTRHGGTAYIHQDGSEHIMHMSTINGDKRSLNNQGPI

SEQ ID NO: 13799 - protein, 511 aa, Physcomitrella patens subsp. patens
MSTFGCSAEDVTTLQGFLGNTANAAGLSSFLCKKLDDVSSQLDATTLAVDNTYLLFSAYLVFAMQLGFAMLCAGSVRAKNTMNIMLTNVLDAACGGLSYYIFGFAFAFGIGSKTNGFIGHYNWALRGYPNESFDYSYFLFQWAFAIAAAGITSGSIAERTQFVAYLIYSSVLTGFVYPIVSHWLWSTDGWLSASKSVGPGSLLFGSGAIDFAGSGVVHMVGGIAGFWGAFIEGPRIGRFDKTGNPMVFRGHSATLVVLGTFLLWFGWYGFNPGSFVNILVPYSGNRGAWTGVGRTAVTTTLSGCTAAVTTLFAKRLLHNHWSVLDVCNGLLGGFAAITAGCAVVAPWASIICGFVSAWVLIGLNKLAARVHYDDPLEAAQLHAGCGAWGLIFVGLFAQQNYILQIYDGAGDRPHGLFMGGGGKLLAAQIIEILAIFGWVTVTMGPLFFLLKLFNLLRISPEDEMAGLDLTRHGGTAYIHHDGSDHPMHMHSMNGQKRPNEGPGGNYDGTNV

SEQ ID NO: 13800 - protein, 66 aa, Listeria innocua Clip11262
MQTGTVKWFNSEKGFGFIEVEGGDDVFVHFSAIEGEGFKTLDEGQSVEFEIVEGQRGPQAEKVTKL

SEQ ID NO: 13801 - protein, 368 aa, Listeria innocua Clip11262
MIYFDHAATTKMSETSLQVFMDASREFFANSESLHDAGTKSAALLEKCRESFAELLQVPNRGILFTSGGTESNQIAIQTLLHTTDKKEVLVSPLEHASVWQQLMALEQAGKCRMKALPVDSFGQVNPATLEKMISTETGLIIIQHVNSEIGTIQPIAELAHIAKKAGVFFHTDIVQSFGKLDLDLSDVTSFSISSHKIYGPKGAGLLFMKPDSPLQAVLPDVHHEFGFRPGTVNVPAIAAFTTAAYDIMENREQEAIRALKLKAAICDTLETRVKVEGGPNTSPFILGLTLPNMQGQEALLALNEADIQISTTSACSLRDLAPSRTLIATGKTTEEANRFIRLSFGKENELNDSIIFKEEIDKLLRKR

SEQ ID NO: 13802 - protein, 318 aa, Physcomitrella patens subsp. patens
MAALGRAGETMSMTATGSGGGLEEEATGRGQKRPHYPISDKGPGEEPEEGDDCCYDGAHPMEKKRRLSFEQVRSLERNFEMEIKLEPDRKMKLAKELGLQPRQIAVWFQNRRARWKTKQLERDFELLNSGYSKLKRDFEKVLEEKDVLKAELVRLSAKIIPKDSQSVDFSQSEKDSHCKPTANDPAKSDKLKESKPATPKDNQSTRSSPTTVVCSATTLEAEITSTSSGSNSSDLLDADSPRTTDSNPREEQLANYCGQLLPENFVGHLTVEEAVNTSQKVYSVKLEDGCHHFQVDATSGYFLPPMAEQSILPWWDWP

SEQ ID NO: 13803 - protein, 177 aa, Physcomitrella patens subsp. patens
MPRSIDPLIVGKVIGDVIDTFVPRVDMAIHYSTRQVTNGCQLKPSATAQAPEIQLSDKSGDNNYYTLVMTDPDAPSPSEPSLREWLHWIVTDIPGNSGGSETNTGEKLVPYIGPRPPIGIHRYIFVLFKQPSQSFLISPPAARNNFSTRNFAAYYGLGLPVAATYCNSQKEPASRSR

SEQ ID NO: 13804 - protein, 513 aa, Physcomitrella patens subsp. patens
MQSGKNTAYLRGGWNPVEERYDQRDASLEFELNLETFLGLARPPDPANLRIQSECGRQGCPDGFIYSVASVLISCIVVSKMAAGTNVLELTTTNWAGNIVFHRDVLQEADSVEKIRTLVKSKGKVKALGSGHCFNTIADTDDNQLSLKPMHKVLALDDKARTVTVDAGITYAQLCPYLDSKGFALHNLASLLDTTVAGAISTATHGSGNKNGNLATAVYALEFVHANGDVVKYSRGSSHSDELNPIQAVVVGLGALGVITRITLDIQPTYTVRQWVYENLPLEELAENFDAITSGGYSVSFFTDWQKKRIKQLWIKVREGYGQPFWGPKKYFGATLATRKLHPIEGFNAANCTDQLGIPGPWYDRLPHFRLGSIPSAGDELQSEYIVARSDAVDAILAVETLGNQIGPHLFVSEIRTIAADDLWMSTAYGRQSVAIHFTWKNELAAVQRLMTLIEGKLAPFHPRPHWGKLFTVPPAELHSEYEKLPSFLRMADEHDPSGKFRNDFLDTNLFSS

SEQ ID NO: 13805 - protein, 647 aa, Physcomitrella patens subsp. patens
MVGRRKAAKELLQIANAAARRSSATSNFQIPATLPKPTAQQSQFSCNGTLLGSVLSRNIRTAAKESIPAFRDTSAASKFAPCRRPVRGFATSATAQLPGQSPFPWYGRYVGYTILLGGSAILTYFYYPHPKRGGGAAPPALTADEHTVTNWSGTHSATTSVYAQPESLEELEKVVKLAHDNGQRLRPVGSGLSPNGLGLSDEGMVNLALMDKIISVDEETKKVRVQAGARVAEVVEALRPYGLTLQNYASIREQQIGGFIQVGAHGTGAKLPPVDEQVVGLKLVTPGKGTLDLSPEDGALFYLARCALGALGVVAEVELQCVQAHKLLEKTIVTNMKQVKRNHKKWLQENKHLRYMWIPNTDTVVVVQCNPLKEGQEPKEVSPKYSMDERLSGARSLYKETAAKYFKEPLGHLSDEELNSLSFTELRDKVLGFDPLNAAHVNKVNQVESEYWKKSEGIRVGWSDEILGFDCGGQQWVSETCFPTGTIQKPDMQDLKFIEQVMGLIKKEGIPAPSPIEQRWTARSRSPLSPAFDPSPDNIYSWVGIIMYLPTADEKQREAITQRFFEYRKSTQYLLWDSYGAHEHWAKIEVPTNENALAWVRERLRHRYPLDEFYKAREQLDPKNILVNGVVEKLFPRKSAEAVQTST

SEQ ID NO: 13806 - protein, 404 aa, Listeria innocua Clip11262
MTKEKIVLAYSGGLDTSVAIQWLVESGYEVIACCLDVGEGKNLDFIKEKAITVGASASYTIDAKEEFAENFALIALQAHAYYEGKYPLISALSRPLIAKKLVEVARQEGASAIAHGCTGKGNDQVRFEVAIHALAPDLKVVSPVRDWKWSREEEINYAKEHNIPVPIDLDNPFSIDQNLWGRSNECGVLENPWTTPPEAAYDLTVSLEDAPDTADIVEITFDAGIPISLNGENMSLANLILTLNEIAGKHGVGRIDHIENRLVGIKSREVYECPAAVTLITAHKELEDLTFVREVAHFKPIIEQKISETIYNGLWFSPLTEALIAFLKSTQKFVNGTIRVKLFKGHAIVEGRKSPNSLYDENLATYTSSDTFDQDAAVGFIKLFGLPTKVSAEVNSKVTITTEV

SEQ ID NO: 13807 - protein, 242 aa, Physcomitrella patens subsp. patens
MYPPIHQCPNGHTLCSNCKQRVHNRCPTCRYELGNIRCLALEKVAESLELPCRYQSLGCPDIFPYYSKLKHEAQCTYRPYNCPYAGSECSVTGDIPWLVAHLRDEHKVDMHNGCTFNHRYVKSNPQEVENATWMLTVFNCFGQHFCLHFEAFQLGMAPVYMAFLRFMGDDNEAKNFSYSLEVGANGRKLIWQGVPRSIRDSHRKVRDSHDGLIIQRNMALFFSGGDRKELKLRVTGRIWKEQ

SEQ ID NO: 13808 - protein, 507 aa, Listeria innocua Clip11262
MKKLTNVFWGASLLVLIAVLFGAFLPEQFETLTTNVQRFLTSNFGWYYLFVVAIIIIFCIFLILSPIGSIRLGKPGEKPGYSNKSWFAMLFSAGMGIGLVFWGAAEPLSHFAVQAPGGEVGSQAAMKDALRYSFFHWGISAWSIYAIVALALAYFKFRKDTPGLISATLYPILGKHAKGPLGQLIDIIAVFATVIGVATTLGLGAQQINGGLTYLFHVPNNFTVQLIIIVIVTVLFLLSAMSGLDKGIQLLSNVNIYVAGVLLILTLILGPTLFIMNNFTNSFGDYLQNIIQMSFQTAPNAPDARKWIDSWTIFYWAWWLSWSPFVGIFIARISRGRTIRQFLLGVIVLPALVSIFWFAVFGGSAIFVDQYKDTALSTLATEQVLFGVFDQFPFGIVLSIVAMILIAVFFITSADSATFVLGMQTTGGSLNPPNSVKVTWGLLQSGIASVLLYAGGLTALQNASIIAAFPFSIVIILMIVSLFVSLTKEQEKLGLYVRPKKSQRSKL

SEQ ID NO: 13809 - protein, 141 aa, Physcomitrella patens subsp. patens
MAYTQTATAQWNSGLCDCFQDCGSFCCSFCCPCVVVGRLAEIIDQGMTSCIGAGCIFYCLQTFTGLGCLYTCGYRARLRAKYGLVPEPCGDCCVDCWCLSCSLSQQHRELQSRGINPSLGWLANREAYEKSAPAPQRMGGY

SEQ ID NO: 13810 - protein, 325 aa, Listeria innocua Clip11262
MSELFTTIKGQVTGKNVRIVLPEGTDERIVGAAARLQKENIVTPILLGNKAEIEAKAKEIGVSVEGITIHDPATDPLFDELVAAFVERRKGKATEEAARKMLVDPNYFGTMLVYTGKAEGLVSGAAHSTGDTVRPALQIIKTKPGVSKVAGAMIMVRGEERYLFSDVAINIAPVAADLAENAIVSAETAEIFGIDPRVAMLSFSTKGSAKSDETEKVVEATALAKEKAPELTLDGEFQFDAAFVPTVAEKKAPGSVIKGDANVFIFPSLEAGNIGYKIAQRLGNFEAVGPILQGLNAPVNDLSRGCNTDDVYNLTLITAAQAVNK

SEQ ID NO: 13811 - protein, 361 aa, Physcomitrella patens subsp. patens
MPAACEFCSEACATVHCRADSARLCLTCDRHVHGANALSKRHPRTLLCHSCNVRPAVVRCSSCHSSFCETCDDNKHKFALGTDQHQRHSFQCFTGCPSATELAILWASQANEPRKRAGDMLTSSSSKEGVQYSLESRNGAVAPNPSARSGARGSWSVDTQRMDDNSKIDANMSGSGPPPPLKNMQDIGMCEEDERDLCSGFNISDVNLSFGNYEDIFSSTQDPTAATFPGCVPMNEATTNSSQMQSIPESDILRPLTNSGMSLAGSGPSGDSSDYVECDASSVVLAPITYTSLGSGSPDSVTFAQARDSAMLRYKEKKKIRSFGKKIRYESRKARADIRRRVKGRFVKVGQAYDYDLAIPF

SEQ ID NO: 13812 - protein, 60 aa, Physcomitrella patens subsp. patens
HYRGVRQRPWGKFAAEIRNSARQGQRVWLGTFDTAEQAARAYDAAAFEMRGYRALLNFPL

SEQ ID NO: 13813 - protein, 343 aa, Physcomitrella patens subsp. patens
CAGCKQTLSHGRFLTCLGQSWHPACFCCRSCHKAIVDREFSVQEKQPYHRECFKREFHPKCEICFNFIPPNSEGLIEYRSHPFWDQKYCPSHERDGRRRCCSCDRIERVDQGYTPLGDGRKLCGECMDSMVMHTRDCQPLYREILKFYKNNLGMSIVQEIPMLLVERAALNHAREAERDEHIHAPETRGLCLSEEQTITTVRLVPDEYGDYTHHEMQTRKLTRHCEVTAILVLFGLPSLLTGSILAHELMHAWIRLDGGFPSLDNDIEEGICQVIAHIWLKEELEKLKRKGNVSEATIRLGDFFLHQIETDSSPIYGDGFRAAYAAYKEYGLSKTLNHLRNTG

SEQ ID NO: 13814 - protein, 61 aa, Physcomitrella patens subsp. patens
HYRGVRHRPWGKFAAEIRDPAKNGARVWLGTFDTAELAGLAYDRAALKLRGSRALLNFPLR

SEQ ID NO: 13815 - protein, 383 aa, Listeria innocua Clip11262
MMNNSKIAKKHQQMPVNILADIGTLAKTMPDILDLSIGDPDLITDASIINAAFEDVRAGHTKYTESGGDVELIDAIRGYFSRNYDLSFERSQIRATVGALHGMYLTLQTILDDGDEVIIHEPYFSPYKDQVLNSGGTPIIIPTYEKDGFAINVDILEAAITNKTKALILNSPNNPTGAVFSPETFEKIANLAKKYDFFILSDEVYDGFSFYEDFVPMAKFAPDHTITFGSMSKNFAMTGWRLGYMIAPTYLNEAAKIINEGITYSAPSPSQRAAIYALNHSETLIPLVTETFQKRLEYIAKRVAEIPYLSLHPLKGSIYAFINISKTKMDSVSFTEYVLKETQVLVIPGLAFGESGDNYVRLAATQDISVLEEAFNRLAKLTF

SEQ ID NO: 13816 - protein, 366 aa, Physcomitrella patens subsp. patens
MILCVGICRPTATNICAGCKQPLGYGRFLSCLGKNWHPHCFACKMCSKPIDDREFSVQGGDPYHRNCYKELFHPKCEVCLEFIPTNEDGMIEYRSHPFWNQKYCPSHEIDGTPRCCSCDRIETGEVKYAGLEDGRKICLECLETAVFDTKECQPLYREVLKFYKNVGMMIDQEVPMLLVERTALNEAREGEKEGIHMTSETRGLCLSEEQTVTTVRKSSFPRLSFNFWTEPKHLRRHCEVTAILVLYGLPRLLTGSILVHELMHAWLRLAGGFPRMRPEVEEGICQVMSHIWLSAELKRAEKKDSTSAKGITSPAQERLGKFYLYQISSDTSPVYGDGFRQALASVNRYGLVRVLEHLRMTANFQV

SEQ ID NO: 13817 - protein, 575 aa, Physcomitrella patens subsp. patens
MNVTTTHSSSPAVTQTLSEQSNQSRNPDLATVLVSEKLGDGGLDILRKVSNVDCIYNLTNEELCAKISDYDALIVRSATKVTRKVFEASKGKLKVVGRAGVGIDNVDLEAATELGCLVVNAPTANTVAAAEHGIALLTAMARNVAPSDSSMKSGKWERNKYVGVSLVDKTLAVMGFGKVGSEVARKAKGLGMHVISHDPYASADRARAIGVELVSFDDALARADFISLHMPLTPTTKKVFNDDTFRKCKKGVRLVNVARGAVIDEEALLRALDSGIVAQAALDVFAVEPPKGGDSSFALVQHKNVIATPHLGASTVEAQEGVALEIAEAVAGALAGDLAATAVNAPMVPAEVIAELTPYVVLAEKLGRLTVQLVSGSAGVKQVKVVYKSSRDDGDLDTRLLRARISKGLIEPVSDAIINLVNADYVAKQRGLKISEEREPADGESGVPLESVSVTIQDVESKFASARGDHSRSITLEGKVKDGVPHLSKVGNFSVDVSLDGNVILYRQVDQPGMIGKVGSILGEDNVNISFMSVGRTLRGQAAIVAIGTDEDVSDATIQKLKELPAIEELVFLRL

SEQ ID NO: 13818 - protein, 61 aa, Physcomitrella patens subsp. patens
HYRGVRQRPWGKFAAEIRDSSKNGARVWLGTFDSAEQAALAYDRAALNMRGSRALLNFPLK

SEQ ID NO: 13819 - protein, 554 aa, Physcomitrella patens subsp. patens
MAKSNRVCELCDGVADLYCAADEAHICWTCDAKVHSANFLVARHTRLVLCEICGIQTPWKASGGNPTPLTGLCAECSQGESQDECTTHSHGGVIDTSRVTVRAHPIAGCADSGYESGCSSSKPESCESAVIVEMDLVQTSPCESSISQLSSEDMEGITVDSRGAQGSVSLGIPKSLKRKRSLDCFLPVSVPLSKQIVVSTLEDDMRSVAHGQCECDSTASFSSSTRRVSHANQDPSFEARDWNRPQSQEVESSNRDLTNLLLSSAKRQRVDRTQIRASFTRTQQSAVFSTSRVMRMLAKWHWDLHLSSPGTVPLALRMFRKISRAMAPTVLSNSGMRITLAACLHLASSLDEAQITVPRTSEVAGCAGVSTRKLATAEIHLLALLGWRSFPVRAGSRGFNIEIGCQVTVLVIQGGLPSKALLYPRDSRFVDMRIGSGFKLGALPDRQGRYASHLENSRESLDPSAVIINLGELSKLEVRNWSVKLMQCHTLCMCTNGGGHLPFPCQNPPSNCSRTGQLCSVGKEVFTAGISDNIIVEQKIFCTKLKYLPAMQDF

SEQ ID NO: 13820 - protein, 583 aa, Physcomitrella patens subsp. patens
MSRYADDEPRKGSDILVEALEREGVRTTFAYPGGASMEIHQALTRSNVIRNVLCRHEQGEIFAAEGYAKSSGRVGVCIATSGPGATNLVTGFADALLDSVPLVAITGQVPRRFIGTDAFQETPIVEVTRSITKHNYLVMTVEDIPRVIREAFFLAASGRPGPVLVDIPKDIQQQMAIPDWNQPMKLQSYLSRLPPPPQISLMQQIIRLLATAKKPVIYSGGGCLHASKELREFVELTGIPVTSTLMGLGTFPASDKRYLSMLGMHGTVYANYAVDNADMLLAFGVRFDDRVTGKLESFASRASIVHIDIDPAEIGKNKQPHISICADVQLALAGLNKLIKEGPAERPDFSAWRAELDGVKLKWPMKFPKFDNSVIVPQLAIQTLCELTGGNAIISTGVGQHQMWAAQWYEYEQPRRWLTSGGLGAMGFGLPSALGAAATHPDIPVVDIDGDGSFIMNIQELATIHVEKLPVKIMILNNQHLGMVVQWEDRFYKANRAHTYLGDPEAEADIYPDFCKIAEGCKVPSARVTRREHLRDAITKMLETPGPYLLDVIVPHQEHVLPMIPGGASFKEIITEGDGRQIY

SEQ ID NO: 13821 - protein, 173 aa, Physcomitrella patens subsp. patens
IVQDYSSGNMGSCDCEESSLSSILTLQDQREMFRSVFPGRSSDNSQEYDEDDEGSSQKLRFTKAQLRVLEDTFERLQRPNAHQKSTLAMELGVQPRQVEVWFQNRRARGKAKRNESDCEVLRQRCQDLLVENHHLSYLIQTERMGYDSRQLSNEGGPLLQMALCNNCKKLRNC

SEQ ID NO: 13822 - protein, 187 aa, Physcomitrella patens subsp. patens
MEEVGASVNVGAKETGKVKWFNSSKGFGFITPDKGGDDLFVHQTSIHAEGFRSLREGEVVEFQVESSEDGRTKALAVTGPGGAFVQGASYRRDGYGGGGDGGGRGFGGSGARGRGRGGRGSGGFGGVGGGDRPCYNCGEGGHIARDCQNEPTGSVRQGGSGAGGSRNCHTCGEAGHFARDCTPAAAS

SEQ ID NO: 13823 - protein, 438 aa, Physcomitrella patens subsp. patens
MRYMREQNNALERPWRPRKGLVWLFLIQWSFIDLWIAEAGCIPQSGCNTAYAYYKVQANETLDSVGEKFQVTSDEILAVNPSIVDKQSIVTHQPLYIPFNCGCIQDQLLHMFKHQVQRTNTIGFISKKIYEDLTKETWIGYWNGIPNLNFIETGTSMKIPVQCFCGDPRVSLGYGLFLTYVVAACTAGNVSGLASNFNTSEALLRVYNPLVVWNNSQPEQYAFIPVAGDADDITIAGVLLGIAYGVAGALALLSVLAILHHCFTLRQRRRQQREYLASKLKDEDDRPFKHNGGNYLYQQWPPCLPEMMSEALANLITESQSILKGIAVPKLHHNHEDFDANVLETCCKDIVQQHTHSHSFAEQLMRDVGAAIAIATYNGVSSALRNGAVFLLLSPCNQQLARLHHTPPAPPFLLLFACSVAVTGASAGGILLRLGIIA

SEQ ID NO: 13824 - protein, 453 aa, Listeria innocua Clip11262
MKVIKFGGSSLASGIQLNKVFQLVAEDSERKIVVVSAPGKRFKDDTKVTDLLIDCAAKALLGEDTSELFEAVIARYAGIALDTGMDDAIITQIRADLQKTISSDKSDPDKFLDRMKASGEDNNAKLIAAYFKFKGLNANYVNPKDAGLFVTDEHASAQVLPESYDRLFALREREGIIVFPGFFGYTKDGEISTFSRSGSDITGAIVANGAQAELYENFTDVDAVYAVNPAIVKNPKKVLELTYREMRELSYAGFSVFHDEALIPAFHAGIPVHIKNTNNPDSCGTRVVHERENNNGPVVGIASDDGFCSIYISKYLMNREIGFGRKVLQILEDAGLNYEHMPSGIDDLTIIIRENQFGEDTERTIMTRLKEELNADQVIMQHGISLIMVVGEAMRHNVGITSRASKALSDAKVNIEMINQGSSEVSIMFGVKEEQENTAVRALYNEFFSEVLV

SEQ ID NO: 13825 - protein, 262 aa, Physcomitrella patens subsp. patens
MERLAHPEGFSPAGLKVLVVDDDNVILKILERMLRECKYAVTTCNSATKALAMLRENRSYFDLVISDVYMPDMDGFKLLEAIGLELDLPVIMMSRDGEIDSVMRGIKHGACDYLLKPVRLEELRNIWQHVVRKLVSPILVSKEESGELDEYPKHQDNADFDATSRKRKERLEDETQLVEDVNNLKKARIVWSPELHQQFVNAVNYLGVDKAVPRKILDIMNVQGLTRENVASHLQKYRSYLKRLIGVTPQPHPVASFQAAEN

SEQ ID NO: 13826 - protein, 552 aa, Physcomitrella patens subsp. patens
MSWRRSSAAAKLDDCALSEVCRSGFSGKIMHISFVDGHTAGNGSAARNWGSRTGDQIQSSFVTTSMQAPSSAPTDSESAIPTMQALPPQPGALPCFVEPNSLDKSSYATSGSEDQPPRPPTGVPTAGEYLLPHTQLELGHSMARAAYPFADPYFGGIVAAYGAQAVIHPHMLGVQQARMPLPSEMMEEEPVYVNAKQYHGILRRRQSRAKAESENKLIKSRKPYLHESRHQHALRRARGNGGRFLNTKAKEGDSKSNSDGNHGSHEGQSSQAGNVSSTRASHSGMDMLSGQGDSVNYHNTMMQHGQNNAYLNLHPPQSFHSSAFHTLPGGSESGDGGSNGNNLVWEQDMCAYMIFEVERWDKWHLEVDVSFAGLWQGCSNFCLWTCVKPMARREAQLLICEPSAHQSYLLLNTPEDPELFQLAEEFDAAEDIMIGRRIPVTSASPSLALESGLWLSRPSYTRISLQSVLGSETGSVHMTSKAAWSIASVVNFSFKCNNRVGEPFGTQVCKISSMTELCLKLLTKICCLGPPLYRRFFCHDALILKLLANLKS

SEQ ID NO: 13827 - protein, 422 aa, Physcomitrella patens subsp. patens
MEWIKPHTYTHTLIYISLSTYIYIYIYIDYKFTGKVDCCLQKCALADSSVSWNGRPVVPVVPNQNWNSVAGSKVLRDTVLHDIRLENRLKIFSGTANKALSQEIAYYMGLDLGKITIKRFADGEIYVQLQESVRGCDVFLVQPTCPPANENLMELLIMIDACRRASAKNITAVIPYFGYARADRKTQGRESIAAKLVANLITEAGANRVLACDLHSGQSMGYFDISVDHVYGQPVILDYLASKMISSNDLVVVSPDVGGVARARAFAKKLSDAPLAIVDKRRQGHNVSEVMNLIGDVKGKVAVMLDDMIDTAGTIFNGAALLHAEGAREVYACCTHAVFSPPAIERLAGGLFHEVITTNTIPVTEKNYFPQLTVLSVANLLGETIWRVHEEGAVSRVFTYSLSFSSVEILRMYIVGECVNCM

SEQ ID NO: 13828 - protein, 160 aa, Physcomitrella patens subsp. patens; identical to SEQ ID NO: 549

SEQ ID NO: 13829 - protein, 1490 aa, Physcomitrella patens subsp. patens
MEHRGGCLADNDSGDGAGIMTRIPWELFDQWFKEQGLPLPDKAKTAVGMVFLPTDSDSRAAAKAVVEGILEKEGIEVLGWRQVPVDVSVLGPIAKKTLPLVEQVFVKVSMEQAGDDIERELFITRKLIEKAKEKEPWSEDLYFCSFSSRTIVYKGMMRSTVLGTFYSDFHNDSYVTPFAIYHRRFSTNTSPRWPLAQPMRFLGHNGEINTIQGNLNWMRSREASMTSPVWRGREEDIRPFGNAKASDSANLDMVAELLMRSGRSPEETLMMLIPEAYMNHPTLQIKYPEAVGFYEYYKGQMEPWDGPALVVFSNGRTVGACLDRNGLRPARFWRTKDDIIYVASEVGVMDIDDSEIVLKGRLGPGMMISANLETGELYENTEVKRRVANAKPYSKWFAEGSRALEASEYLSPSSLTIEALFKQQQCFGYSSEDVQMVIENMASQGKEPTFSMGDDTPMPVLSQKSHWLYDYFKQRFAQVTNPAIDPLREGLVMSLEIAVGKKENLLEVGPQNAAQVTLLSPVLNEKELELLKMDNVLKAKTLRTYFNISKGIPGALQSALDSLCRAADDAVRAGSQLIILSDRNNHLDPEKPAIPPLLAVGAVHHHLISNGLRMSASIIVDTAQCFSTHHFACLIGYGASGICPYLALETCRQWRGSTKTIALMKNGKIPTSSVEQVQANYVKAAKVGLLKILSKMGISLMTSYHGAQIFEIYGLGREVVDLAFRGSVSRIGGLTLDEVAWETVSFWSKGFGEDSARKLENYGFIQSRPGGEYHGNNPEMSKLLHKAVREGNRDAYAVYLEYLASRPVNVLRDMLEFKSDRKPIPVEDVESASNIVSRFCTGGMSLGAISRETHEVIAVAMNRIGGKSNSGEGGEDPVRWKHLEDVVDGLSPLLPHLRGLKNGDHASSAIKQVASGRFGVTPTFLANADQLEIKIAQGAKPGEGGQLPGKKVSPYIATLRNSKAGVPLISPPPHHDIYSIEDLAQLIYDLHQVNPKAKVSVKLVAEVGIGTVACGVAKANADIIQISGYDGGTGASPISSIKHAGGPWELGLTETHQDLLKNGLRERVMLRVDGGFKSGVDVMMGAAMGADEYGFGTVAMIATGCIMARICHTNNCPVGVASQREELRARFPGVPGDLVNYFLYVAEEVRGMLANLGYQKLDDIIGRTDLLRPRNVKLRKTNPLDLSFLLKSVGLPKWSSTQIRGQEVHSNGVILDDILLSDPEIAEAIEKAKTFEKTIKIFNVDRSVCGRLAGVISKKYGDNGFPGRLNLTFVGSAGQSFGCFLTPGINLRLIGEANDGVAKGMAGGEVVVVPYDNCGYVPEEATIVGNTCLYGATGGQLFVRGKAGERFAVRNSMAEAVIEGTGDHCCEYMTGGCVVSLGKVGRNVAAGMTGGLAYFLDEDDTFTPQVNREIVKMQRVTTPAGQAQLRLLIQSHTEKTGSAKGKYVLENWDKVIPQFWQLVPPSEDSTPEAKAGSDDKQIDRLVAHAA

SEQ ID NO: 13830 - protein, 261 aa, Listeria innocua Clip11262
MATLKIQDLHVEIEGKEILKGVNLEISTGEIHAIMGPNGTGKSTLSSAIMGHPKYEVTQGSITLDGEDVLEMEVDERARAGLFLAMQYPSEISGVTNAEFIRAAINSRREEGDEIPVMQFIRKLDAKMDILDMDEEMAERYLNEGFSGGEKKRNEILQLLMIEPKLAILDEIDSGLDIDALKVVSKGVNEMRGEGFGCLIITHYQRLLNYITPDFVHVMMQGKVVKEGGPELAKRLEAEGYDWIKQELGIELEEEEAVDQQ

SEQ ID NO: 13831 - protein, 404 aa, Physcomitrella patens subsp. patens
MAGRPLYLDMQATSPVDPRVLDAMFPYYIDQYGNPHSRTHMYGWESDDAVEKAREQIAKLIGANPKEIIFTSGATEANNIALKGVMHFYKEKRKHVITTQTEHKCVLDSCRHLQQEGFEVTYLPVKKDGLIDLDELKAAVRQDTGIVSVMTVNNEIGVIQPIAEIGELCRKNKIFFHTDAAQAAGKISINVDDLKVDLLSLSAHKIYGPKGVGALYMRRRPRVRVEAQMSGGGQERGIRSGTVPTPLVVGLGAACEIAMEEMKHDEKHVKALTDRLYQGITSKLDGVILNGSEEHRYAGNLNLSFACVEGESLLMGLKEVAVSSGSACTSASLEPSYVLRALGVEEDMAHTSIRFGIGRFTTKEEVDKAIALTVDQVTKLRQMSPLWEMVQEGIDLKRIQWAQH

SEQ ID NO: 13832 - protein, 798 aa, Physcomitrella patens subsp. patens
MPVEVESKGVRDPAALALFKGIGLDAKTAANAVANPKVTANLTNVVHEAGVENGCDKSVGNLLYTVATKFPANALSHRADLCRYISRNQIKTIPQVEAALGFFALVGPDSYDAADFEKKCGVGVEVSPAEIKAVVADVINVNKELLLEQRYRVNVGILLSQVRSKLPWADGKLAMEELQTQIKDLLGEKTAADDEKLVKKKKDAKPRVEKPSSAVATEVAATASDAPEENDPYSIFPKPEDNISVHTEVFMSDGSIMRLHNPRARLEKHLKETGGKFVTRFPPEPNGYLHIGHAKAMFVDFGLAKETGGNCYLRFDDTNPEAEKQEYIDHIHEIVNWMGWKPFKVTYSSDYFTQLYELAVELIKRDRAYVDHQTGDEVKLYRSEKRESPWRNRPIEESLKLFDDMRRGLIDEGKATLRMKQDMKNENPNMYDLIAYRIKFTPHPHVGDKWCIYPSYDYTHCIVDALENVTHSLCTLEFESRRASYYWLLDSLDLYLPYVWEYARLNITNTVMSKRKLNCLVTDHHVDGWDDCRLPTLAGLRRRGFTPDAINAFCRGIGITRSDNLIQMELLEHYVRDDMNRNAPRTMVVLNPLKVIITNMKDDEIEELEAKIWPDAREGSYKVPFSKVCYIESSDFRLEDSKDYYGLAPGKSVILRWAYPVKCTNVVLGDDKTVLEIHVEYDREKRTKPKGVIHWVSEPSPGVEPLKVEVRHFDKLFKAENPNELEDWLGDFNTNSKEVISGAYAVPPLANSKVGDKFQFERLGYYCVDRDSTPEKVVFNRTVTLRDSYKPSKPAAKK

SEQ ID NO: 13833 - protein, 603 aa, Physcomitrella patens subsp. patens
MCGILAILGADGAVPSAGRDRALALSRRLRHRGPDWSGLFEGKDSWCYLAHERLAIIDPASGDQPLYNGTKDIVVAANGEIYNHELLKKNMKPHEYHTQSDCEVIAHLYEDVGEEVVNMLDGMWSFVLVDSRDNSFIAARDPIGITPLYLGWGADGRTVWFASEMKALKDDCERLEVFPPGHIYSSKAGGLRRYYNPQWFSETFVPETPYQPLELRSAFEKAVVKRLMTDVPFGVLLSGGLDSSLVASVAARHLAETKAVRIWGNELHSFCVGLEGSPDLKAAREVAKYIGTRHHEFNFTVQEGLDALSDVIYHVETYDVTTIRASTPMFLMTRKIKALGVKMVLSGEGSDEIFGGYLYFHKAPNREEFHHELVRKIKALHLYDCQRANKSTSAWGLEARVPFLDKEFMDVAMMIDPSEKMIRKDLGRIEKWVLRKAFDDEERPYLPKHILYRQKEQFSDGVGYSWIDGLKEYAESHVTDQMMKHAKHVYPFNTPNTKEGYYYRMIFEKHFPQQSARMTVPGGPSVACSTATAVAWDEAWANNLDPSGRAALGCHDSAYTDKHSEKAAPAAEANGTASHENGHTFSKPKSTLDATILKTQAVH

SEQ ID NO: 13834 - protein, 140 aa, Physcomitrella patens subsp. patens
APSRYEAQKRRDWNTFGQYLRNHRPPLALARCTGVHVLEFVRYLDQFGKTKVHVQSCPFFGLPHPPHPCPCPLRQAWGSLDALIGRLRAAFEENGGKPESNPFGARQVRLYLREVREMQAKARGIAYEKKKRKRMPNAAS

SEQ ID NO: 13835 - protein, 648 aa, Physcomitrella patens subsp. patens
MASDERESRTGHGEVVPLVHKVEVPPKRNVFQEIGSELWELFFHDAPVDQFKGQTKMKKGILSLKFIFPILDWIPKYNYKMLIADIISGCTIASLAIPQDLGYAKLAGVPPVNGLYSSFVPPLVYAVFGSSRDIAIGPVAVVSLLMGTLLKQEIDPIQDPVNYLKLAFTATFFCGIFQAGLGVFRLGFVTEFLSHAAIVGFMAGAAITIALQQLKGLLNITNFTTDTDFVSVMRSVFGHIDEWNWRSIVIGLAFLAFLITTKTMAKKKKKLFWVSAIAPLTSVGLSTLFVFLTRVDKHGVKIVGHIKKGINPVSIGDIFFSGSLAAAGAKVGLIAAIIALTEGVAIGRTFAALRDYHIDGNKEMIAFGVMNLCGSFTSCYVATGSFSRSAVNYQSGVCTAMSNVIMAIVVLVTLLVLTPLFKYTPNCILSAIIISAVLSLIDLRAALLIWKIDKFDFLACLGAFVGVFFVSVEIGLLIAVCISFVKILYNVTRPHTARLGNIPGTNVYRNVTQYPNATLVPGILAIRVDAAIYFSNSNYIHDKILHYLEEEMQRLSKSDGAPIKYLIVDLTPVTNIDTSGIIAFEELEKTLKRKNIQLAFANPGASVIIKLDDSKFLAHLGSEWVFFTVSEAIQVCTMLLNQSASEQV

SEQ ID NO: 13836 - protein, 463 aa, Listeria innocua Clip11262
MTKVNSFFRKKSFHNPATDKHHLNKTLGAFDLTMLGVGAVVGGGIFILPGQVASVIAGPGIIISFIIAGIACCLAALCYSEFASKLPVAGSAYTYSYHVFGEGVAWILGWSLILEYGLAVAAIASGWSSYMKSLLAGFDLHIPTAISSAYNPSAGTYFDLLAFVVVMVIGILLSFGIRESTRVNNIMVLVKIAVVVLFIIVGAFYVKPDNWTPFLPFGVQGVITGASTVFFAYIGFDAVSSAAEEVKNPQKNMPIGIIASLAVCTLLYILLSAVLTGVVPYTDLVGVSAPVAFALQAINQNWIAGLLSVGAIVGMTTVVLVMSYGGTRLLFAMGRDGLLPKSFSKISKNDTPVRNTMIFATVMGLIASTVPMEDLAQLINIGTLFAFAMVSVGIFFLRRNPELNQKGFKTPFYPVVPALSFLLCVYLMLNLSKTTWIAFGVWFVLGIIVYTFYGRKHSALRLK

SEQ ID NO: 13837 - protein, 264 aa, Physcomitrella patens subsp. patens
MATACLQGPQGQVQSQHGEPFLPPGFRFHPTDEELVSYYLTNKVLDSSFAVHAIAEVDLNKCEPWDLPEKAKMGEKEWYFFSLRDRKYPTGIRTNRATDAGYWKATGKDRDVFAHGRPPLVGMKKTLVFYRGRAPKGEKTSWIMHEYRLEGDGGHSLSPRVNKDEWVVCRIFQKNSGGKGSFLFSDSCMRSHAVMYQIEDTRSSLPPVMNNNSPNPTVTDGGTCTDCETCAGTEQMPACYNCVDDFDHGKETNSVMSWINAQST

SEQ ID NO: 13838 - protein, 1123 aa, Physcomitrella patens subsp. patens
MASAKLAYSTGSGIKSKHSVRVQQTTADAKLQAAYEESNDSGDSFDYSKSVGQAAKSTVQQVPAQAVTAYLQRMQRGGLTQTFGCMLAVEENTFRVIAYSENALDMLDLMPQAVPSVGQQDVLGIGTDSRSLFTPSSAAALERATQQSDLSMVNPVSVHSRSSGKPFYAILHRIDVGIVMDFEPVRPNDVVVSSAGTIHSHKLAAKAISRLQSLPGGDIGLLCDTVVEEVRELTGYDRVMAYKFHEDEHGEVLAEIRRSDLEPYLGLHYPATDIPQASRFLFMKNRFRMIVDCYAPPVKVIQDKDLRQPLTLAGSTLRAPHGCHAQYMGNMGSIASVTMAVVVNDQEDDGGSQKARRLWGLVVCHHTSARMISFPLRSACEFLMQVFGLQLNMEVELAAQLREKHILRTQTLLCDMLLRDAPIGIVSQSPNIMDLVKCDGAALYYGNRFWLLGITPSEQQIKEIADWLLECHKDSTGLSTDSLADAGYPGANLLGDAVCGMAAARITPKDFLFWFRSHTAKEIKWGGAKHDADDRDDGRKMTPRSSFNAFLEVVKRRSVPWEDIEMDAIHSLQLILRGSFQDIDDSDTKTMIHARLNDLKLQGMDELSTVANEMVRLIETATTPILAVDSSGFINGWNAKVAELTGLSVGDAMGRSLVKDLILEESVEDVQRLLYLALQGEEEQNVEIRLRTFGPQKAKGAVILIVNACSSRDVQENVVGVCFVGQDVTGQKMLHDKFTRIHGDYKSIVQNPNPLIPPIFGSDDLGYCTEWSPSMEKLTGWKRDEVLGKMLVGEVFGMHLMCCRLKGQDAVTKFMIVLNNAMDGQDTDKYPFSFFDRQGKFVEALLTANKRTDADGYITGVFCFLHIASPELLQALTVQRATEKVAFAKLKELAYIRQEIKNPLYGIMFTRNLMEDTDLSDDQKQFMDTSAVCERQLRKILDDMDLESIEDGYLELETAEFEMGSMMDAVVSQGMVTSREKGLQLIRETPREIKDMCLFGDQVRLQQVLADFLLNAVRFTPSSEGWVGIKVVATKRRLGGGFHVVHLEFRVTHPGSGLPEELIHEMFDRGRGMTQEGLGLNMCRKLVKLMNGNVQYKRETGKSYFLVTLELPLAVRDDTGTMR

SEQ ID NO: 13839 - protein, 54 aa, Physcomitrella patens subsp. patens
QWRKYGQKMAKGNPCPRAYYRCTVAPGCPVRKQVQRCADDISILVTTYEGTHNH

SEQ ID NO: 13840 - protein, 594 aa, Physcomitrella patens subsp. patens
MRGSWLPEESFQSWGNYRRALAATPSRLKDRVFARTEVNEEVISMKARSNVDMKKNLNWWDLMWFGIGAVVGAGIFVITGVEAKNYAGPAIVISYAIAGFSAMLSVFCYTEFAVEIPVAGGSFAYLRVELGDFVAFIGAGNIVLEYVIGGAAVARGWTSYFASLIFSGIDVGDRLRIHTDLAEGYNKLDPIAVGVLILVGLLATWSTKGTSFVNWIASILNMFIIAFVIVAGLAHSHSHNLTDDFFHYGARGIFSAASVLFFAYLGFDAVSTMAEEVKNPGRDIPIGLLGSMVICTFIYIMMALTLSLMVPFTDIDEGAPFSVAFSSVGWNWAKYVVALGALKGITTVLLVSAVGQARYLTHIARSHMIPPWFARVNKRTQTPINATVTMILASSIVGFFTDLPILGNLLSMSSLFIFFLVAVALLVRRYYVPGETSPKHGGLFITYMLIIIAASIVIAAFWGMNKSGYIVYAVCGPIWFLATLALHTTLKPLRQPKTWGVPLVPWIPSLSIAFNVFLLGSLDRASFVRFGYWTGLMLVYYFFFGLHASYDTAMYHSPDLDPKTLRDEEALSSKSNEPVTGPTAAAAPTKTSIT

SEQ ID NO: 13841 - protein, 357 aa, Physcomitrella patens subsp. patens
MGVAEMAGVVRDANSKGDLDNAVKKQGSLVVVHFWASWCEPSKAMEPVFTQIAIETPNAQFFRVEAEEQSDISETYEVDAVPLFIWIKDGVVVDKMQGANAPELASKVAKWVKDTPAPFNEVKKEVPSAGVAVVGPAVSSQGETKANLAEAEKGRLHELVNSKKVMLFMKGSPEEPRCGFSRKVVNVLNDQGVEFGSFDILSDETVRQGMKTYANWPTFPQLYVEGELLGGCDIILEMNENGELKEVFAEKGLLPKETLETRLKNVINQSATMLFMKGTPDAPRCGFSTKVVNALKEEGIEFGSFNILEDEEVRQGLKTYSNWPTYPQLYYKGELLGGCDIILEMKASGELKSALTE

SEQ ID NO: 13842 - protein, 459 aa, Listeria innocua Clip11262
MRDQSKMPLVERLDAHAKSCPISLHVPGHKSGAIYPAVWQNLLKWDVTEITGMDDLHHPEDVILEAEELLSECYGSKKSYFLVNGTSGGSLAVIMATLKRGEKVLVPRDAHKSILHGIELAGGKPIFLTPATNKEVGVASGVTTELLEETLHNHPDIKLCIFTYPSYYGTTFNLEKCIRIAHQYGAVVFVDEAHGAHFLTSSEFPKSAVELGADVVVQSAHKTLPALTMGSYLHVVNDLPVFEKLAYYLQVFQTSSPSYLIMASLDAARKYAATYTAADVEAFWKMRARWIKWLTKNKFEVILPDDPLKIIVRKTGYTGYELQTIFEESSYFPELADESQVLLILPLIKKGIDFTPISRIHSPSKKEIAKQPYEMSAPFASGLALTYEEMHARATEFVSLDEATTRVSAETISLYPPGIPAIIRGESITEKHIRELKSIRSRHYQGGEKLAENYIRIFR

SEQ ID NO: 13843 - protein, 170 aa, Physcomitrella patens subsp. patens
DYSSGNMGSCECAESSLSSAMTLQEQREMLRSVFPGRCSDNSQDYEDDDEGSSQKLRFTKAQLRVLEDTFQRLQRPNAHQKSTLAMELGVQTRQVEVWFQNRRARGKAKRNESDCEVLRQRCQDLIVENHHLNYLIQSERMGYDSRHLTSNGGPLLRMALCNNCKKLRNS

SEQ ID NO: 13844 - protein, 111 aa, Physcomitrella patens subsp. patens
MAGGRSSPAQQASSVDQKSKSNDSVPVHNSESSPTVARAPIQKPPRSLNYRGVRRRPWGKFAAEIRDSAQNGARIWLGTYDTAYDAACAYDQAAFEMRGCKALLNFPLKAN

SEQ ID NO: 13845 - protein, 214 aa, Listeria innocua Clip11262
MRFFIDTANVEEIKKANRMGFIAGVTTNPSLVAKEGRDFNEVIQEITSIVDGPISGEVVSLNAEEMIEEGRVIAKIHPNMVVKIPMTGEGLAAVKVLTEEGIKTNVTLVFSATQALLAARAGATYVSPFLGRLDDIGDDGLVLIRDIAEIFETHGIPTEIISASVRHPIHVIECAKAGADIATVPYKVFEQMLKHPLTDSGIDKFLADWEAAKK

SEQ ID NO: 13846 - protein, 575 aa, Listeria innocua Clip11262
MDQKKYSWRNFFQLIISAKPANWIIFCALIASVVTTVAGLVVPLFTKNLIDGFSIASLDVKMVALIVLAFILQAITNGFSIFLLNYMGQKVVATIRERLWRKIVHLPVSYFDNTKTGEMVSRMVNDTVVVKELIADHLPQFVTGIISVVGAIIILFFMDWKMTLIILIAVPITALVVAPLGQKMFKISKGLQNETADFTGSISQTLSEARLVKASNAETRETEAGHKGINRLFGFGIREAKVVAVLGPLIFFVVMGVIVGIIGYGGIRVSAGTMTTGTLIAFLLYLFQIIVPVTSFATFFAQLQKAKGATERIADILNEAEEDFDAGKKVDVSGKTIRATDISFSYNEGEPILKDVSFDTKPGEVIAFAGPSGGGKSTLFAILERFYQPKTGEILVGDIPLSEISINSWRSQIGYVSQESAMLSGTIRDNLCYGLDREINEEELWNVAKLAYADGFISELPDKMATEVGERGVKLSGGQRQRIAIARAFLRNPNILMLDEATASLDSQSEQIVQQALANLMEGRTTFVIAHRLSTIVNADQILFIEHGEITGRGTHSELVASHPLYASFAEQQLK

SEQ ID NO: 13847 - protein, 397 aa, Physcomitrella patens subsp. patens
MAIENIKQQYNLSDWSGDPCFPYPYNWLACTLDSSGPRISTLFLQDNHLEGSVPKFGNKQLIMNRNSWMPLGLDGHLCYLPFEPKQMQSPYGIRCDSSLNFFQNHTQVFSLRELRVASKNFSKKIGEGGFGPVYYGKLADGQEVAIKVSNGISKQGQSEFFTEVDLLSRIHHKNLVSLIGYCQEKDNQTLIYEYFPNGSLRDHLYGPSATTPLSWNTRVHIALDAAQGLEYLHLACRPNIIHRDVKSSNILLTDRMEAKVSDFGLSKLALQAEGVSHISTLVKGTAGYLDPEYYISQKLTVKSDVYSFGVVLLELVCGRPPISMPHLQAGNLQEIVDPDLRSDFSLESMWKVIEIAMTSVEPKENHRPNMQEVVQELREAAAIEQQRSAKIRTWPQK

SEQ ID NO: 13848 - protein, 175 aa, Physcomitrella patens subsp. patens
VVQLNETTLEKALDLVHSSNGTYMAVLHYATWCPFSRQVRPVYDVLSTIFPTVHHVAIEESSVRPSVLSQYGVHSFPVLFMHNRTARVRYYGPRQLESLILFYQNYTGRKEDCAFARLVYDAGTEMKEGCPYPWAISPEKWLQDDMYLNLAVVFLVLRLVYVLIPAVLIRLKEHW

SEQ ID NO: 13849 - protein, 378 aa, Physcomitrella patens subsp. patens
MACGEGHDHVGEDVYSTNQQKATTHIDKVRLAAIELVGQAAIPGTLASLARLNVFEALARAGDGVELTPQELGNQAMPGKVINLSYLGRMLRLASSVKVLREVATMSEDGSTEHRYGLEPIGKFLVDDAEKGSLVHLLLMYQDPVFLSTWNHLPESVLDDSVQPFARAHGGLHAWEYGMQNPEFDEKFNKAMAGHSKLYMRAFLDVYQGFEGVRVLIDVGGGFGSAISTITARYPHIKGINFDQPHVIKACPELPGVEHMSGDMFESIPSGGDAIFLKYILHDWDDESCIKLLKNCHKVLPANGKVIAVDSVLTDTINFEGGDRMAFMVDMNMMAFNHSGARERNEGEMRKLGLYAGFLRVDVVCKVDQLSVTEFIKA

SEQ ID NO: 13850 - protein, 475 aa, Physcomitrella patens subsp. patens
MALTPPAPVTPEWLNKGDNAWQLTASTLVGIQTVPALVILYGSIVKKKWAVNSAFMAFYAFAAVLLCWVAWAYKMSFGEKLIPIWGKAGTTLSFKYLLSQAELPASATPDVPKLMPFYPMATHVYFQFVFAAITLVLLAGSVLGRMSFRAWMLFVPLWLTCSYTVGAFSLWGGGFLWQWGVIDYAGGFVIHLSSGIAGFTAAYWVGPRLTRDRERFPPNNVLLMLAGAGLLWMGWAGFNGGAAVSANLIASIAVINTNVCAATSLLVWTGLDVVVFGKPSVIGAVQGMITGLVVITPGAGLVQGWAALVMGVFAGSVPWFTMMVVHKKSKLLQKVDDTLGVFHTHAVAGLLGGLLSGCLAENTLCDYFLPVVGLQGAFYGGSGGKQLGKQIVAALFIIGWNIVVTSIILNVIKLITPLRMSDEHLLIGDDAEHGEEAYALWGDGEIYDLSKHGASELDNTKHGSMEFDKQPTVAL

SEQ ID NO: 13851 - protein, 756 aa, Physcomitrella patens subsp. patens
GGGGGGGFGVGRKGGVYGEEITVRQWLSKPNREVDRVQSLHIFKQVLDFVDLAHGQGVMLRNIRPSCFLLSPLNRVAFIDSAKGERRAGSRDGVQSSEMNSSSGKRVDLNSSDGALRNGEDCFPQRQLLHMEQAWYTSPEEHATGTSTYASDIYSLGVLMFELFCSFGSEVERARVMADLRNRILPPRLLSECPKEASFCLWLLHPDPACRPKSRDIYNCEILSEAGDAIAERQAAVQLEEKEAESEVLLEFLLRMQNQKQENARKLAQDVSRLSADIQEVERRRLALKKKRGPITKGENSGQRRITGVNLQERKGILGKRPHPEDGIGGREKGIACTDGRGKMLSKSARFMSNFNHLEKVYFSMNWRAGAPGMGMSKPSSRLGAQSLSIGCASNDDKKGISRAGEDNEEDWLGCFFDSLCKYARYSRFEVKATLRHGDLLNTANMVCSLSFDRDEEYFATAGVCKRIKVFECDTILNEHVDIHYPVVEMPCRSKLSSVCWNGYIKSHLASCDYEGVVQLWDANVPRVLRDYEEHEKRAWSVDFSKADPTKLASGSDDGTVKLWSINQSSIGTIKTKANVCCVQFPPDSGHLLTFGSADYKVYVYDLRTTKLPLCILASHQKAVSYVKFVDSVTLVSASTDNTLKLWDLTRANTTPHAQTGCSLTYTGHTNEKNFIGLSIADGYIACGSETNAVFAYHKSLPMEMASHKFGCTDPITGREVEEDGGQFVSSVCWRGKSQTLVAANSMGNIKILEMV

SEQ ID NO: 13852 - protein, 577 aa, Physcomitrella patens subsp. patens
MKGPILTAMEIYKICDPLVAPTNDRDWAAIESIKVDMNLTSWRGDPCLPKPHHWINCSSVDKTENPAVLTVVLSAENLTGAISPSFNDLLDLTTLKLDGNSLTGQLPDLSALTNLKTLHLQDNALSGPLPEWLAFLPKLRELIVQNNNFSGKIPSAFSSKNWNFTYYGNPLLNATLPASPSTNTAAIVGGVAGGVAFVAIVVALVYYLVCRRNRRPAKDMDTLIVGNSNPNIVSKEININLTSNIHGGARKFSPDEIVAATANYKKVIGRGGFGPVYYGRLTDGREVAVKVLDKESRQGETEFLNEVDILSRVHHKHLVNLVGYCRVPGMQMMLIYEYIHRGSLRDHLSGTVTSEGSANSGPDVLDWKTRLNIALHAASGLEYLHKGCSPSLIHRDVKSSNILITTKYEGRLTDFGLSRLVGDEDITKVVTFVKGTAGYLDPEYFSTNVLSAKSDVFSFGVVLLELITGRLPVDRSKPTEWNICDWVRASLAQGNIEAILDPAVRASHPNVDALWKVAEIALQSVEPRSKHRPTINEVVLELTGAIALEGSASNDSSYGNFSSSAEIHGTQFLPWAR

SEQ ID NO: 13853 - protein, 318 aa, Listeria monocytogenes EGD-e
MTASVFVAGKLLPETMEALSKWDVKAFSGEENITEAELINNVTEVDAIICPLSSPISAKVLESAKNLKIVANIGAGFDNIDVKKAQELGIAVTNTPDVSTEATAELTLGLILDVARRISEGDRLCRETPEQFKGWAPTFFLGTELSGKTLGIIGLGRIGQAVAKRAAAFGMNIIYSGHQPKEAAKEWNAEFVSQKELLKRSDVVTIHAAYSPSLKHLLNETTLKTMKSSAFLINAARGPVVEEAALIKALETGVIAGAALDVFEFEPKIGEDFAKLDNVVLTPHIGNATVETRAAMGKIAIANVEAVLAGKAPLHSVY

SEQ ID NO: 13854 - protein, 576 aa, Physcomitrella patens subsp. patens
MKVIEDVVSETEGTLGYYIARRLVEIGVRDVFTVPGDFNLVLLDHLIAEPKLRLVGCCNELNAGYAADGYARAHGVGACVVTFTVGGLSVINAIAGAYSENLPIICIVGGPNSNDFGTNRIIHHTIGEPDFGQEHRCFQQITCAQIVIQNLDDAHELLDRAISTALNKSKPVYVSVSCNLPSLPHPSFKISPIPYSITQGTETNSLCLESALDTVAEILNTAVKPVLIAGPNLRIAKAIDAFEALATASGYAVAVMPSGKGHFRETHPHFVGTYWGAVSTSYVSEIVESADIYVFVGPIFNDYSSVGYSLLCKKEKMIIVQPERVTIGNGSSFGCVLMKDFLLALAKKVKRNTTSFDNYLRMYVPPGVPLKQKPNESLKTVNLYKHIQGMLSRHTAVIAETGDSWFNCQKLKLPDGCGYEFQMQYGSIGWSVGATLGYAQGAPNKRVIACIGDGSFQVTAQDVSTMIRCGQRSIIFLINNGGYTIEVEIHDGPYNIIKNWNYTGVVEAFHNGEGKLWTCKVRTEDDLIDAIATAQGEKKDHLCFIEIMVHRDDTSKELLEWGSRVAAANSRPPNPQ

SEQ ID NO: 13855 - protein, 580 aa, Listeria monocytogenes EGD-e
MESMKWIWQYVRKYRLLMIGVFILIFIASGISIIYPLLGGKVIDDVVYQNKTNLLIPLLLIMIISTIIRTICRYTYQIMCERIGQNSLFRIREDLYKKLQSLDFDFFNNTRVGDIMARMTGDTDAIRHFVSWVSYNILENVFLFSFAIIIMATIDWKLTLALVIVTPLIAVLTMKMSSKAQPVFYEIRESFSRLNSMVEENISGNRVVKAFAREDFEMKKFHEHNEDFKKRNLDSADVSRTYLPVLDSLAGMLVVITLIFGGYLVIKGQMTLGDLVAFNGFLWMLNGPMRMSGWLINDVQRFIASSFKIQDMMVTDAKIPIHAEKPAPSLQGHVEFKNVSFHFEDDPNTDVLKNISLKASPGQTIAILGETGAGKSTLVNLICRFYDPTSGEILIDGVDARKWHVRELRNHIATVMQDIFLFSDTIEGNIAFGAPDATMEDVRRMARIADADHFIETMPESYDTIVGERGVGLSGGQKQRISLARALLKNPSILILDDTTSAVDMETEVKIQGELKKITENTTTFIIAHRISSVKEADEILILNHGEIIERGTHTSLLAEKGYYFDIYNKQLGTEANVNG

SEQ ID NO: 13856 - protein, 86 aa, Physcomitrella patens subsp. patens
MPKKDDVPLRANLQTLQVNSKRTRLFNYRGVRRRPWGKFAAEIRDSSQNGARIWLGTYETAEAAAVAYDHAAFEMRGCKALLNFPL

SEQ ID NO: 13857 - protein, 106 aa, Physcomitrella patens subsp. patens
MAGVEDSSNPGVQHQDEKKPLDGAGQHINLKVKGQDGGEVFFRIKSTATLRKLMNAYCDRQSVDPSSIAFLFDGRRLRAEQTPAELDMEDGDEIDAMLHQTGGASS

SEQ ID NO: 13858 - protein, 162 aa, Physcomitrella patens subsp. patens
MDGERYIGVALDYSPSSRYALKWSIKNVLRENDHLIIVVVNKDNLLEGGQPALWEASGTPLIPLQEAENIIYQQNYQLTIDEELKTVLHEAVARVQIVVVFKVYWGDAKEKLCSSVVDVPLDYLVMGCRGLSSIKRAFMGSVSNYVVNNVPCPVTIVKLPPS

SEQ ID NO: 13859 - protein, 102 aa, Physcomitrella patens subsp. patens
MQEIEKLVQENAVVVFSQSRCCMCHVVKRLFCNLGVGPTVHELDERKEGVDMEKALLRLNNTVVLPTVFVGGKLVGGVDAVMAAHVSGNLVPRLKEAGALWL

SEQ ID NO: 13860 - protein, 396 aa, Physcomitrella patens subsp. patens
MSDFQIQVAKRLEQFKTTIFTEISILALKHNAINLGQGFPNFDGPDFVKKAAIEAIQDGGKNQYARGFGIPPLNAAIAESFKKESGITVNPETEVTVTSGCTEAIAATILGLVNPEDEIIVFEPFYDSYQATVSMSGATLKTVTLRAPNFDVPEQELRAAFSSKTRAIMVNTPHNPTGKVFSRQELELIASLCKEHDALAFCDEVYNKLVFNGEHVSLASLDGMYERTVTMNSLGKTFSLTGWKIGWAVAPPHLMRGVRLAHSYITFATATPFQWAAAEALRAPDSFYAELIKDYSAKKDILVEGLKSVGFEVYEPDGTYFVMVDHTPFGFESDVAFCKYLIEEVGIAAIPPSVFYTNPVDGKNLVRFAFCKDEETLKAAVEKLKTKLKKPVASSS

SEQ ID NO: 13861 - protein, 318 aa, Listeria monocytogenes EGD-e
MSNEYFDPKLKIFSLNSNRELAEEIAKEVGIELGKSSVTHFSDGEIQINIEESIRGCHVYVIQSTSNPVNQNLMELLIMIDALKRASAATINIVMPYYGYARQDRKARSREPITAKLVANLIETAGATRMITLDMHAPQIQGFFDIPIDHLNAVRLLSDYFSERHLGDDLVVVSPDHGGVTRARKMADRLKAPIAIIDKRRPRPNVAEVMNIVGNVEGKVCIIIDDIIDTAGTITLAAKALREAGATKVYACCSHPVLSGPAMKRIEESPIEKLVVTNSIALPEEKWIDKMEQLSVAALLGEAIVRVHENASVSSLFE

SEQ ID NO: 13862 - protein, 948 aa, Physcomitrella patens subsp. patens
ALIELKRVFENGELELYDWSEGSQSPCHWRGVTCDNTTFLVTNLNISVLALSGEISPAIGNLHSLQYLDMSENNISGQIPTEISNCISLVYLNLQYNNLTGEIPYLMSQLQQLEFLALGYNHLNGPIPSTFSSLTNLEHLDLQMNELSGPIPSLIYWSESLQYLMLRGNYLTGSLSADMCQLTQLAYFNVRNNNLTGPIPDGIGNCTSFQILDLSCNDLNGEIPYNIGYLQVSTLSLEGNRLSGRIPEVLGLMQALVILDLSSNHLEGPIPPILGNLTSVTKLYLYNNRLTGSIPAELGNMTRLNYLELNNNQLTGEIPSELGSLTDLFELKVSENELTGPIPGNISSLAALNLLDLHGNRLNGTILPDLEKLTNLTNLNLSSNSFSGFIPEEVGLILNLDKLDLSHNNLTGPVPSSIGSLEHLLYLDLHANKLSGPIGVQGGTSNSTTLSYFDLSHNEFFGPIPIELGQLEEVNFIDLSFNNLSGSIPRQLNNCFNLKNLNLSYNHLSGEVPVSDIFARFPLSSYYGNPQLCTAINNLCKKTMPKGASRTNATAAWGISISVICLLALLLFGAMRIMRPRHLLKMSKAPQAGPPKLVTFHLGMAPQSYEEMMRLTENLSEKYVAGRGGSSTVYKCTLKNGHSIAIKKLFNYYPQNIHEFETELKTLGNIKHRNVVSLRGYSMSSAGNFLFYDFMEYGSLYDHLHGHAKRSKKMDWNTRLKIALGASQGLAYLHQDCKPQVIHRDVKSCNILLNANMEAHLCDFGLAKNIQPTRTHTSTFVLGTIGYIDPEYAQTSRLNEKSDVYSFGIVLLELLMGKKAVDDEVNLLDWVRSKIEDKNLLEFVDPYVRATCPSMNHLEKALKLALLCAKQTPSQRPTMYDVAQVLSSLLPVASSPYKPPTYPSPGSKHRRYIDTYSAKPAEGINANSTSSGGDLLDQFENVINSRNM

SEQ ID NO: 13863 - protein, 427 aa, Physcomitrella patens subsp. patens
MTVCATSNGVNGGSTPVDTTISPRVAALKPSKTMAIADAATALVESGVPVIRLAAGEPDFDTPKAIVEAGTKAIQEGFTRYTPNAGTLELRKAICHKLQEENGLSYKPDEILVSNGAKQSIMQAVLAVCSPGDEVIVPAPFWVSYPEMARLADATPVIVQTKVSENFILKPEALSAVLTEKSRVLILCSPSNPTGSVYTLEDLQAIAAIVAKHPRLLVISDEIYEHIMYTPATHHSFAALPGMWERTLTVNGFSKCFAMTGWRLGYLAAPKHFLVACNRIQSQSTSGASSISQKAGVAALALGKAGGEDVVTMVKAFRERRDFLVQRLQAMDGVVLAVPQGAFYLFPDFSAYFGSHADGFGFISDAETLCRFFLEKAKVALVPGDAFGNGGCIRISYAASMEELKTAIESIESVMALLKPASAASLA

SEQ ID NO: 13864 - protein, 691 aa, Listeria monocytogenes EGD-e
MNRFFRNAIFYVIIFLVIIGIVASFNSNKEAAKDISYSEFVSKLEDGKVKSVEIQPDRSVYTINGEFKSSDKSSDDKKTGLGQSKTSSTAFTTYALNSDTSLGDLQKTLDKEDVKMNVVPAKQNSGWVTFLTSIVPFVIIFILFFFLMSQSQGGGGGKVMSFGKSKAKLYNDDKKKVRFTDVAGADEEKQELVEVVEFLKDPRKFAELGARIPKGVLLVGPPGTGKTLLARAVAGEAGVPFFSISGSDFVEMFVGVGASRVRDLFENAKKNAPCIIFIDEIDAVGRQRGAGMGGGHDEREQTLNQLLVEMDGFGGNEGIIIIAATNRADVLDPALLRPGRFDRQIMVDRPDVKGREAVLRVHARNKPLAKSVDLKAIAQRTPGFSGADLENLLNEAALVAARSDKKEIDMSDLDEASDRVIAGPAKKNRVISEKERRTVAYHEGGHVIVGMVLDEAEVVHKVTIVPRGQAGGYAVMLPKEDRFLMTKAELMDRITGLLGGRVAEEVTFGEVTTGASNDFERATELARRMVTEWGMSDKIGPLQFTSGNGQVFMGRDFGSDKGYSDKIAYEIDTEVQSLIRYCYDRAKTIITEHQEQHKLIAETLLKVETLDARQIRSLFDDGVMPPDIDTIDVEAEYPSEKDEEVAGKSFEEEREELKEEEKVEETQEEPKEVTSEDAPNIEQTPNDKKDE

SEQ ID NO: 13865 - protein, 198 aa, Physcomitrella patens subsp. patens
MAEEGASVNVGAKETGKVKWFNSSKGFGFITPDKGGDDLFVHQTSIHAEGFRSLREGEVVEFQVESSEDGRTKALAVTGPGGAFVQGASYRRDGYGGGGRGGGEGGGRGFGGGAARGRGRGGRGSGGFGGERGGVGGGDRSCYNCGEGGHMARDCQNESTGNARQGGGGGGGVGGSRSCYTCGEAGHFARDCTPAAAA

SEQ ID NO: 13866 - protein, 320 aa, Physcomitrella patens subsp. patens
MSTIAQTSRHCVRGSSCRAVANERCCWLYMRVKLERPEMLENWKRKVKYRRMMDGGRGAGDEDGGGGGGGAGVALATDLSMCFQCGNLIENTVTYCHTCYDLRSESDFRNEQRWRNLESNLLAVEADLQKERAATKRLEGTLQSFRHMLLQGIHADVTIETGEFDKTPAHRAVLASRSPVFRAMFEHELKEKTCACIHVADVPTPAMRALLLYLYTGDHDAKVMKEHGMALLTAAHKYDIPDLKRVCETAVANAVQPSNVLEILHQARLYDATWVKKACIECIAQNLKQVAFTKEFRNLVYRNDDPEAILDIIQSIAALQ

SEQ ID NO: 13867 - protein, 346 aa, Physcomitrella patens subsp. patens
MCFGATVFECDQNLWVSLFIPSSSIAVGTSDCLLLVLFPVSRLGGGLEDAIAGCGQKRPFFPTFGNGPGEEPEDGDDGGDDGSQPVEKKRRLSFDQVRSLERSFEVENKLEPERKMQLAKELGLQPRQVAVWFQNRRARWKTKQLERDYEMLNSGYIKLKADFETALREKDVLKAEVQRLSGKTSPQGSQSSQSADSSQCESDSHCMPDTEESPKLGKKPYNLAITKDHHHTRSSPTMTVCSTPKLEVEKTSTSSGSNSSDLLDADSPHTSDSNPSDEEKLACCSQFPPPESLVGPLGVDDDVNASQQSFPVKLEEGCHAFQVDPNCGYFFAPAVEQSVLPWWDWP

SEQ ID NO: 13868 - protein, 393 aa, Listeria monocytogenes EGD-e
MKISKRLQNLPDQFFSSLVEKVGKKVAEGHDVINLGQGNPDQPTPKHIVEAMKTASEKPLNHKYSLFRGKQELKQAAADFYAREYNVTIDPNTEVAILFGTKTGLVELPMCLMDPGDTMLLPDPGYPDYLSGVVLGEVQFEKMPLIAENDFLPDFTKIPEDIAEKTELMYLNYPNNPTGAVATADFFEETVAFAKNHNIVVAHDFAYGGIGFDGKKPISFLETNGAKEVGIELYTLSKTYNMAGWRVGFAVGNSEVIEAINLIQDHMYVSLFPGIQDAAIEALTGDQACVRELTARYENRRDAFISACREIGWEAVAPAGSFFAWMPVPEDFTSSEFADYLLEEVSVAVADGSGFGEFGEGYVRVGLLMDEERLEEAVTRVSKLHLFDKVTQQ

SEQ ID NO: 13869 - protein, 61 aa, Physcomitrella patens subsp. patens
KKRRYRGVRQRPWGKWAAEIRDPKKAARVWLGTFDTAEEAAMAYDISATKFRGLRAKLNFP

SEQ ID NO: 13870 - protein, 180 aa, Physcomitrella patens subsp. patens
MARSIDPLVVGKVIGDVIDTFVPSVDMAIHYSSRQVTNGCQMKPSATAQAPEIQLSDNSEGNNYYTLIMTDPDAPSPSEPSLREWLHWIVTDIPGNSGEQVTHTSSSGRELVPYMGPRPPIGIHRYAFILFKQPSTPFLISPPTVRNNFSTRNFASHYGLGLPVAATYCNAQKEPGSRRR

SEQ ID NO: 13871 - protein, 1015 aa, Physcomitrella patens subsp. patens
MAENRNDCSTYSSLVCKNKPSPCDLLRGAEHTTEKHVPVTARAYFRERESEGERQRETEKRWCCFLIFNCLLVVVTSHRFVCCVFPVLLRSFPGHHISAPAYVALDWKLCYAAASTSIFSGDGESDAGSMRFWGSSGSRRVSSCGCSAIAVWSFKTFLEDGLRVWCTRKQCGTDNRCRIVTVEALVGVLLVANDAAYQCFWVAGIFRRPSGWQWSMWHIRLQHCRTMSLYVPERERSGGMLDAVIPLNDFHRSKKSHFSQLALAPVPDQDTLEVAWNDNGKIDIQGQDSQRSKSPWQINCISDWSSGQEAEAGVTPSKPDTPKGGNLLETGGNGSNTAPNPVHNIDVDNDEMVSWLQYPLDDPFCSDFFGEIQEANTQLLRESFTHGSTKTLPRTNFPGASGNDAGINRETPSDSAMLLGVGRVSGLLPQGGVEAFNKVRSLHSLQQHSSLPRWPQPLTPNSSSGSSLLATNNLTFTKASAPTLASPSHHMLPPKTQRVAPVLNSQNTPQPSSPGSMNFSHFSRPAAMVKANLHSLVGINCGPPPSTRVKQQHNSPVVRPIMEACTSTGSSIAESTTAGQGPSGSYQEVKTQPAVLEREQNNGIEESRWPSAPCPSPTKDSDCVVSEGNFRSTPPDQETCRLSGVTNGAVLASSDKGASHGTQHPDVQEPTITSSSGGYGTSIEPLQKVRTSNKRKCSEREETECQSEDGEDESVDTKHKPITTGRGSTTKRSRAAEVHNQSERRRRDRINEKMRALQELIPNSNKTDKASMLDEAIDYLKILQLQLQMMSIRTGMTLPPMVMPPGLQHMQMPQMPQVAAMPSMGMVQMGLGMGMMEQAAQRRTRMPMQSHTGPPLNVCLANTSSMVDVHDLRYQQPGVLGYNTSMSRQHQPMQTTKGLDLDKCNAYMLQQHQLLFQQQQLQQHQLHQHQQHLQHHQRAPNMGGVQTLGEGCRQCKLNVIYLFAILVEWNKSLNVKPRSWSLPFHSGIFSRIRVLLGVAMSHHLGSIFRQLCREL

SEQ ID NO: 13872 - protein, 351 aa, Physcomitrella patens subsp. patens
MVSRSSFCQRFAAGVGGLPTSIRNGAARAGDVGRARVPVVAGRVQLREKGVLVCGEEVGSLKTQSRRRWREGSSSSVTVSTNAMSAQLEEEPAAKGEARVILEVQGLRAVVADTRQEILNGVDLVIREGEVHAIMGKNGSGKSTLSKVLVGHPDYEVTGGTAIFKGENLFDKEPEERSHCGLFLSFQSPVEIPGVSNMDFLRMACNARRNARGLEELGPLEFYGFVAEKLTALNMDPRFLDRNVNEGFSGGEKKRNEILQLSVLEADMAILDEIDSGLDIDALRDVANAVVGLKKDNNAILMITHYQRLLDYIMPTYVHIMEAGRIVKTGDMSLAAQLEAGGYNAVQAMKM

SEQ ID NO: 13873 - protein, 101 aa, Physcomitrella patens subsp. patens
TDTDWTTGLCGCLEDVPNCVFTMFCPCLAFGRVAEHLDEGNTSCITAAVVWYVIQQLTSFGCVYSYSYRKKLRHKYNLPSRPLPDWFIHYFCWFCAICQVH

SEQ ID NO: 13874 - protein, 679 aa, Physcomitrella patens subsp. patens
MAIMAPAPDQAFMNLYSNMSGAVPILHPSSDSNELSSNLEKIVEHSACGIYPYSGPSTASALQYPSWHPIQEMPITSNSNFGYGVPEIQRSTLSNDRPNPSHSRFSSTLPPSSRGLSASRGIMEEVRMRDVIGKPGRNLGAQRPSLWSSMETGGITVDPFRGGLALHGVPSEVDNLAQITSDSAFVERAAKFSTFGTRTGEYVPEMLQRPAAGFVAATTKSVPGDVREESKCIAIDTIPGKQSVLEAVEGASKVTVDAISNIKVEAAAFHENTNISSCAELQPGSQGEISPDTISPARSTPPQDEPASRNKRKKPSTIDNDLASPDPKVGDVENSKAKRCKGEDTKSDCKGERSSSEISSESAGSPKVPQKENNQKAKEFSKQDYIHVRARRGQATDSHSLAERVRREKISERMKYLQDLVPGCRKVTGKAVMLDEIINYVQSLQRQVESLSMKVASVNPTHSGRLTLESRLSNEDIIQSQLSSIHGSSDSSINAAAFGSHHLQQQSELLLNVYCGFDHLQANLGNCFDISSHHTTNPPIGRLAEMQSMVRSFDNNLVSQSSGWDGSPQSVNVHELFEVHEQFETCLEIGRLAPQDSLQRKRRMSMSLMIALTDEDMKPSSTRGYRSVVSSRSEIPQKRNFNANQGPSMSKEASLYSRSFGNVGWDESRASLQGRAALK

SEQ ID NO: 13875 - protein, 118 aa, Physcomitrella patens subsp. patens
RGKKVKNKEQPPKQGFIHVRARRGQATNSHSLAERARREKISNRMKFLQALVPGCSEVTGKAVMLEEIINYVKSLQRQIEFLSMKLAAVDPRLDTNVEGLLKMEVCAVRLVSVPMGVQ

SEQ ID NO: 13876 - protein, 273 aa, Physcomitrella patens subsp. patens
WGQISMVFRIVYSLAMYGGLAFAGSVICSFTGVDLWGGFELSPQVITTGFGYAVPPMMVLLFILEDEIVKSWGPARAIRDVEDEELMDFFVGMSPWQFPFVVAAGAVAEELFFRVAIQGGLTHALQMSDKSVTDSTAGLAALTGVIPLFVPFAQFFATALTAALTGSMYYVISSPKDPKYVVAPVVRGRNNRIDIKERVSAWYERRQQKKIYSPLMESLLAMYLGFEWMHTGNILAPIITHTLYSLVIVGNGLRRIHDNRVKLRQRVSKISVE

SEQ ID NO: 13877 - protein, 319 aa, Physcomitrella patens subsp. patens
MSSQVFVPAANEKTFASFMTDFLMGGVSAAVSKTAAAPIERVKLLIQNQDEMLKSGRLSHPYKGIGECFSRTIKDEGMMSLWRGNTANVIRYFPTQALNFAFKDYFKALFGYKKDKDGYWKWFAGNLASGGAAGASSLLFVYSLDYARTRLANDAKSSKKGGGERQFNGLVDVYKKTLATDGIAGLYRGFAISCAGIIVYRGLYFGIYDSLKPVVLVGNLEGNFLASFLLGWGITIGAGLASYPIDTVRRRMMMTSGEAVKYNGSMDAFRQILAKEGAKSLFKGAGANILRAVAGAGVLSGYDQLQILLLGKAYSGGSG

SEQ ID NO: 13878 - protein, 801 aa, Physcomitrella patens subsp. patens
MDERTNEQVNEYADVRMNTWMGRWMDGWKEEGIIGKGGEWLGGDRAGEVVIWPSLGSSLLWSLNRSFLCNCRTMSLCVPEWDRNNDMLDVVIPSNDFHGPVNWKGEDVRSMKIHFSQLALAPVPDQDTLGVGWNDNEHVGMHGQGCKGNKSQWDVNYSSGWNSGQETEDGVTPCKPDTPKTGASPEAVANETATEPHPPHNIDVDSDEMVSWLQYPLDDTLERNYCSDFFGELPDANTQLLKESFAHGSTKISPRISFSGASGLDGGSNRGTTADAAMLLGAGRAAGFFPQAGVEAFSKVRTIHSPQQHSSLPRWPQPHNPNSPNGSSECATSYLTSAKVSTSTSASPSSPMLPPRMLLGSPIPNSSNTPQASRPGSMNFSHFSRPAAMVKANLHSLAGMNCTPPPCGRFKQQQGLPGCRPIIEACTSTESSIAESTTTGQGPLVSHQEVKTQPAVLEREQINNVEESRWPSAPGLSPTKDRDCVVSGGDCKSLTPDQETCRLSGVTNGAVLASSEKGASHCTQHLDIQEPTITSSSGRYATSAEPPKEPVTGTKRKSSEREEPECQSEDMEDESVDTKQKPATTGRVSTTKRSRAAEVHNQSERRRRDRINEKMRALQELIPNSNKTDKASMLDEAIEYLKMLQLQLQMMSIRTGMTLPPMVMPPGLQHMQMPQMGAIPSMGMVQMGLGMGMMDMAAQGRAVMSMQSHAGPSLNGNMASTSSMIDPHDLRYQQPGDMDFNTYTAHQHQSMPMTQALNTDKYNAYMLQQHQFILQQQQQHLHQQPQQHHQQAPNMSGVPPH

SEQ ID NO: 13879 - protein, 351 aa, Physcomitrella patens subsp. patens
MSLKKHARPRETATCGSHPAECELSSLSSTEGAAGRSYHNREQENVAAVHHCKDSNVSGTLTTAQSRDRRRFRYDPPRPGWPATSDVSPTSQGVGFGGVWAMSEASSGPSTVRHPWAGGVRLRVNGVLPGHSGKKVKKKEQPPKQGFIHVRARRGQATDGHSLAERARREKISNRMKFLQALVPGCSEVTGKAVMLEEIINYVKSLQRQIEFLSMKLAAVDPRVDTNVEGLLKMEAEHWTGKNARCSAVQSLHTMQYQVEEEIALLTSDPSELYKLKSSNITSAKERDRDSAPVRFYPPSSIRLRQQLIGCNGCHIANHAIGDGGMNSVLTTVLPKLGRRQNVTISLYLQK

SEQ ID NO: 13880 - protein, 161 aa, Physcomitrella patens subsp. patens
MGFMSFMGRVTFSAIFILAAWQKIQDFGQDGGEALRAMDPKFSLFLKNVNEALNLHLTLPSGVETKHLLMVAIALEGLGGILFTLGSTLGAYLLLIFLAAVTPVMHDFYNYDIATGDYLHQFNSFLKNLSLFGALLFFLGMKNSAQRAMMRKKQSLKAKFQ

SEQ ID NO: 13881 - protein, 180 aa, Physcomitrella patens subsp. patens
MASAVVNQSEAAAVRAPSKPVKTYSKENEQLVKQSWEILKKDAQRNGINFFRKVFEIAPGAKAMYSFLRDSTIPFEENPKVKNHARYVFMMTGDAAVQLGEKGAYQVLESKLQKLAATHVNAGVTDDQFEIVKEAILYAIEMGVPDLWSPELKSAWGDAYDMLAEQVKAEMHAQRSAATS

SEQ ID NO: 13882 - protein, 338 aa, Physcomitrella patens subsp. patens
MDVAASRVGGEKIHGSSCQNLCAFWEEGQQRVVEASLTLVRELARLKADHVRKRGGSIATSCMLGVPLGHNSSFLQGPAFSPPRIREAIWCGSTNSTTETGKQLEDVRVLTDVGDVPIQEMRGCGIGDEVLMRTITDSVKLVMDEPPLRPLVLGGDHSISFPVVRGVSEFLGGPVDILHIDAHPDIYHAFEGKHYSHASPFARIMEGGHARRLIQVGLRSITQEQRDQAKKFGVEQHEMRNFDQHREKLQNLHLGEGVKGVYISIDVDCLDPAYAPGVSHIEPGGLSFRDVLNIVQTVKGDIVGCDVVEFNPQRDTVDGMTAMVAAKLVRELCAKMSK

SEQ ID NO: 13883 - protein, 232 aa, Physcomitrella patens subsp. patens
MAAKEGFSATTVKDSAFREIFECNICFREASEAVVTCCGHLFCWPCLYMWLHVHSSRQSCPVCKGTIEDGDVTPIYGPANSADALWAEGASAGEQGERLIPPRPPARRMHRVQRAQRLDEMWGGRGVRRGENPLERDALPFMEDQPPRPDGDVQQMLQLVSSIPLPDETGPQSIVVTDPVADDFEDTNLVIHFETGGSRRGDNIQGNILTHLDQRQRNGLNSLQNLHEPNDA

SEQ ID NO: 13884 - protein, 90 aa, Physcomitrella patens subsp. patens
MSIDSVPSNNSESSPSVPRSTTLKLPRSLNYRGVRRRPWGKFAAEIRDSAQNGARIWLGTYDTAYDAACAYDQAAFEMRGCKALLNFPLK

SEQ ID NO: 13885 - protein, 394 aa, Physcomitrella patens subsp. patens
MADRGAFERQYADERSWEELQEDESGMLRVDVAQQQRQHRKRMSAMAGPRIQRGIIRYLFVLLDFSRAAAEMDLRPSRMGIVVDCVEAFVREFFDQNPLSHLGVILLKDGIAHQLTDLSGSPETHIRALRSNMESTGDASIQNGLDLARGYLTQIPSYGHREVLLVYSALSTIDPGDVMETVQECKKANIRCSVVGLSAEIYICKLLCEQTGGMYSVATNEGHLKELIMEHAPPPAAQAEMSVASLVRMGFPQRGAEDAVALCACHREVKMGGGYTCPRCKARVCELPTQCHICGLTLVSSPHLARSYHHLFPVSPFEEVENLASANGRQSLSKSCYGCLQELPTPGGKVKGVRLECPRCRQHFCFDCDNYIHESLHNCPGCESNSVILSQLSQ

SEQ ID NO: 13886 - protein, 603 aa, Physcomitrella patens subsp. patens
RAIRLAKNEACLLACALLCLGLSSLSSLILPSYQGRILDHVIQRDVSLFKRDVLLLIAFSLMTGLFEAVRNLCFAVVGKRVLKTLQDKLFMGIVIQDIAYFDGTTSGELTSRLTNDVSSMAEPVNWMLSALLRNCLSLVGGFTMCFMISWKLSMLAFTTMAPIMHITAVYSSRWSRELNRKRYALLAEANSAASEAIGNIRTVRAFSTEDTELDRFKSKTYGAMQKGVRDAYAYAGAVAVNDWLDLGASVLILWYGGVLVMNDRLSAGKLITFQLYWNQIQSAYQSIMSVLMSLTRAAGAAQRVLSLVDALPDIDRNSGTQISKLDGEIKLENLYFCYQMRPQHPVLQGVDLTVGKGDVCALVGRSGGGKSTIVHLLMRFYDPTAGRILLDGWDLRDLNLKSVHQHMGLVAQETQMFACSILENITYGLSSWRQEDLEEAAKYANAHDFIMKFPEGYATRVGERGVRLSGGQRQRIAIARMLLRRPKVLLLDEATSSLDTESEALVQQALDRLIGEGGRTIVLVAHRLSTVRNADNIAVLDKGRLVEQGTHEELLMQKSGVYEKLVRRQLHKVSNRIMEDPEELDTAADTIDALIDETSNGKL

SEQ ID NO: 13887 - protein, 142 aa, Physcomitrella patens subsp. patens
PSRYEAQKRRDWNTFGQYLRNHRPPLALARCTGLHVLEFVRYLDQFGKTKVHIASCSFFGLPHPPHPCPCPLRQAWGSLDALIGRLRAAFEENGGKPESNPFGARQVRLYLREVREMQAKARGIAYEKKKRKRIPPPSELGG

SEQ ID NO: 13888 - protein, 795 aa, Physcomitrella patens subsp. patens
MFLARLANVAHNTSEGEVRRLLEQVSTTGEERGWNSHGIQALFRMIEFNENTGALQALLARPELDVNYRNKENLTPLHVAAAKNREYAVKLLMERKDLDVNATAEFDLTPLHLAARLGHTRVLKQLFNDDDRLFLHSKTTHDFCALHLVAEGDEENLGPHLNSKRSSVEQRSTVVRLLRAEQERRGLIGFEHFKDVFGRTALHYAAMNGYVEMVRELLEYPHLNPNAVDNYGLTPLHLAVKKGHISVSCLLIQAHNIDLNCKAVFRHVRPQVPPLQYSNGSYMMHLFYPSMCDDNETYEIVNAGVTPLHIAAGGSHAEILRCLLESKCVNLHAVDFRGFTALHFAVMYGDIKVVKLLMDQPNVNLNCCDGEGLMPLLLAVERSRLDVVKFLLGDVTTTMPMPEDKLHISIKLLDIVTRHGSSGNGEIAHYLIDCIEDSVKNSEGNFDSNLVHWAVKHGNAKLMVLILFWRPEDANITNKKKETPLHLAILNGQTDLVSELCREQGWQLRAAEVDKAGAIPLDYAFDHGKEMLGIQRLLLYRQDVKEYVDRVFRYEMNTINALFVGAALFASITYVAWLQPPLGFVENYNFPMKSPPAPPDTYMVFAASNRINVKLFFIFNTISFVFSLVTIFRGVEALWSDRKKLHQGYVGRSLRQSFRHCYWYFAMSTSFIIAAFEQASKSVLAPGEIWYISILIHCTKASSAQIQKMAEFKEYITMYVLHFVTAQARTIFSKEHADCLIYTQMVAARLTIHFAIAISKSKFLARIEGCRILNTRHEHHWETSEVETTLQDLLY

SEQ ID NO: 13889 - protein, 216 aa, Listeria monocytogenes EGD-e
MHLDSANLDDVKKIQASSIFKGITTNPTILVKEKCNRQTAINRILELTDKQVFVQTVGFTYEEILADARMLLTMFGKDKIAIKIPAHEAGTNVIDTLKKEDKTIQILGTAIYSADQAITAALAGADFVAPYVNRMSAANIDPFKEITQMRHFFDKKALKTQIMAASFKHSGQVMQAYESGADTVTIPYEIYSQMTNKVLAVEAIRVFNEDAVLYEK

SEQ ID NO: 13890 - protein, 200 aa, Listeria monocytogenes EGD-e
MDKQAILNNIHQTWQEEANAISRLPEVTSEEALVKTVEKIAECTGKIVVAGCGTSGVAAKKLVHSFNCIERPAVFLTPSDAVHGTLGVLQKEDILILISKGGNTGELLNLIPACKTKGSTLIGVTENPDSVIAKEADIFFPVSVSKEPDPFNMLATASTMAVIASFDAVIVCLMTYMNYTKEQFSVIHPGGAVGNKLLNK

SEQ ID NO: 13891 - protein, 311 aa, Listeria monocytogenes EGD-e
MAGKMKLFSVTSERPLATKIADYLDIPLCEVELQKFSDGEVKINIEESIRGTNAYVVQSMNSNVNERLMELLIMVDALKRASVHSINIIMPYYGYARQDRKARSREPITAKLMANLIQRAGANRLITVDLHAAQIQGFFNIPIDHLSAIPLIGDYLIENYGEKDVVVVAPDHSGVVRARRIADRLNAPIAILNRKPRPHEDEIMSVIGDVKGKVAIVVDDIIDTGVRATTSADILLEKGAVEVIACATHSVMAGNATERLQNSNIKEVITSDSIDLPEDKQFDKLTTISIGRILGRAIEGVQENRSLHPLF

SEQ ID NO: 13892 - protein, 448 aa, Physcomitrella patens subsp. patens
MSPEACGGEDKAIYGTAIIKDGGALFVLESKGNWKHAGFHLSTSIVAPALLSLPYAMKGLGWAPGFLALIIGAVVSFYAYMRISKVLEQAELEGHRLLRFRDMGGYVLGRTWGYYPVSVLQIGLCLGAMIGCIVLGGQSMKLIYKVFHPNGSMQLYVFTIIFGMVMAVFSQLPSFHSLRYINLLSLLCSLGYSLSAVGGCIYAGHSNEAPPRDYAVVGSPGSKAYGVFNSLVIIATTYGNGIIPEIQATLAPPVTGKMFKGLLVCYAVVITTFFSVAAAGYWAFGNEAQGNIFINIEPFVPKWLNFLSNALVLAQLLAVALVYAQPTFEIFEGKSSNIQKGKYSARNLVPRLILRSALVAITTLISAAIPFFGDINAVIGSFGFTPLDFVLPFILYAGVFHPSPRTPKYWLHWTIVIVFSIVGLLGCVASVRQVVLVASTYKLFANIV

SEQ ID NO: 13893 - protein, 553 aa, Listeria monocytogenes EGD-e
MFKHILLSLNGYKISYLRNDVISGVGVAALTIPVAMGYAQVAGLPPIYGLYASFLPVIAYVIFASSPQLIFGIDATASAITGSIILGTAGLAAGSKEAIALAPILAFFCAIFLVLFSVLKLGRFAKYISAPVLSGFISGLSVSIIMGQIPKIMGLKESGDSFFSSLGIIFGQFFQSNWISFAMGVVTVIIVITCKKVIPKIPMSLVVLVLGTMAAYFFKLDQYNVDIVGKIPVGFPSLALPDFGASSWALAIGGGLVCAIATFAGSLLPSESFAMRNKYTIDDNRELFAYGVSNFVAAFSGCSPASASVSRTAANEQFRGKTQMVSIVAATIIALIVAFLSGLLYYMPQPVLSGIVFAALVGIIDVDVLKGLFKVSRREATVWIVAALGTLLVGVIFGVLLGIFLSFINVVSRSMKTPIAILGVIEGRHGYFDLKRKSEAKPIPNVVIYRYSASLFFGNFNKFADGLKEAVQDDTKLVIFEASAIINIDTTATESMKDLLKWLDDKGIEYYFADLIDHLKTSFRKHDLGYLIDNGYTKKTVEDALDAYYAEHK

SEQ ID NO: 13894 - protein, 442 aa, Physcomitrella patens subsp. patens
MYSNFKEQAIEYVRQAVAEDNAGNYAKAFPLYMNALEYFKTHLKYEKNPKIKEAITQKFTEYLRRAEEIRAVLDDGPTGPSANGDAAVQAKPKSKSGKKDGGGGDGDGDSEDPEQQKLRSGLNSAIIREKPNVRWADVAGLESAKQALQEAVILPVKFPQFFTGKRRPWRAFLLYGPPGTGKSYLAKAVATEADSTFFSISSSDLVSKWMGESEKLVANLFQMAREAAPSIIFIDEIDSLCGTRGEGNESEASRRIKTELLVQMQGVGNQDTKVLVLAATNTPYSLDQAVRRRFDKRIYIPLPESKARQHMFKVHLGDTPNNLTERDYEDLARKTDGFSGSDIAVCVKDVLFEPVRKTQDAMHFKRINTKEGEMWMPCGPREPGARQTTMTELAAEGQASKILPPPITKSDFDKVLAKQRPTVSKGDLIIQEKFTKEFGEEG

SEQ ID NO: 13895 - protein, 575 aa, Physcomitrella patens subsp. patens
MAVREGVAYQAPSSFSSVSEYGYAILDTPGRLCDRALAVSTLTEEMTEVKAMSGAEMTRNLRWWDVIALGVGGMVGAGIFVSTGSAARLSGPAVVLAYLVAGISALLSALCYTEFAVEMPVAGGAFSYLRITFGEFPAFIVGANLLMEYVLSNAAVARSFTSYAASAYGVLQVDAWRLHVGGLAAGYNQIDLVAVSVVMFLTVFLCCSTKKSSVFNLVMTVLHMAFILFIIIAGFVKGDTKNLTHAGDPAANPSGFVPMGIRGILGGAAIVYFSYIGFDSVSTTAEEVKNPAKNMPIGVSGSVVVVTVLYSLIAVALCMLQPYDMIDIGAPFSTAFQHVVGWEWATNFIGVGASLGIITSLLVAMLGQARYMCVLGRAHIVPQWFAVVNSSTGTPINATVFLGGCTAAISLFTDLTVLLNLISIGTLFVFYMVANALIYRRHHVPEKTNPFRTIAFLTIFSVDAVTFVTIWQFDHHNRHTWALYLLGGLALAMTTLFWFKVPTAQKNKDWSVPCMPWVAAASIFLNVFLLGSVDRASYVRFVTWTIVAVVFYLLYGVHSTYDGIMPTTVVREMIK

SEQ ID NO: 13896 - protein, 512 aa, Physcomitrella patens subsp. patens
MTPESSCDQTNFGSNLIASPWRSPTNRAAGRPPSNFVSPIGTPLHRSLHNLQHYLEEGGHSTTLHVRDTWLPLTESRNGNMVYAAFHNLNAMIGYQALFLPFAFIYLGWYVTWGLTVLCLAFTWQMYTKWQLIMLHETEPGKRIRNYVELSQEAFGQTIGFHTTIPAVLNLTVGTSIGLVVVGGSALELFYLTVCHKCVDNPLSMIEWCIVFSALCLILAQLPNMNSIASVSLAGALMAVSYTTLIWMISVFKKRPQDISYSLATKGDSPLVTTVAVLNAIGIITFAFRGHNLVLEIQGTLPSTLKEPSSISMWKGAKLANLVLVFCFFPLAIGGYRGFGNKANYPHLKMLNSGILYSLQAADLSKTARGFLALTFLFVMFSCLSSFQIFSMPVFDMIEQFYTGKWNKKCSPCVRLFSRSVYVLVVFFMAIAFPFLTSLAGLIGGLNSIPVTFVIPCFMWLSIRRPNKRSFTWCLNWFLAIFGIITSCLVSAASVGVIIQRGIKLEFFKPHA

SEQ ID NO: 13897 - protein, 371 aa, Physcomitrella patens subsp. patens
EEKTPKNVSAGLYFDALKGPELETPRESEDLLLPREELWPFLLRFPIGAFRIGLGLGCQSVLWRDLSGVDSMSALHIPHTIHVGIWWVALATLVVNSAIYLAKCAVYFEAVRREFHHPVRINYFFTPWITGMFLAQTFSLGDGVVSSTVLAVLIVPIVVLELKIYGQWFSGGERRLSKIANPSTHLAVVGNFVAAKLSSYVGFAEIAVLLWAIGFAHYLVLFVTLYQRLPSSNVTLARELHPIYFLFVAVPSSASVSWKYISGSFGNVSKIFFFISLFIYALLGVRLNFFRGASRFSVAWWAYSFPMTAAAIASIHYSQQVPSYISKGIAIFLSVVASVTVLILFCLTFLHAVVWRSLFPNDMAIAIATTK

SEQ ID NO: 13898 - protein, 466 aa, Physcomitrella patens subsp. patens
MTLGRMDSSLDTHNIELQKQSSVLLAPPQRSENSQNTTDLEAWLPISTADRNANWKHAAFHNVTAMMGAGVLALPNAMVYLTWGPGLLMLILSWVITLFTLWQMVEMHEAVPGKRFDRYHELGQEAFGPKLGLWIVVPMQLVVEVGVDIVYMVTAGKSMQHAYNITCGDHCPLQDAIVFWIFLFAIVQLVLAQLPNFNSITAISLAAAIMSISYSTIAWIIPAHYGHTLPGGQVPDDLSYNDRLFGAFTALGTIAFAYAGHNVVLEIQSTLPSTPEEPSKLAMWRGVKFAYGVVAAGYFPVALVGYWAYGNQVTDDIITFVSRPTWLVLIANLMVVVHVIGSYQIYAMPVFDMMESTLVGRLRFKPSTPLRLITRSLYVVFTMFIAITFPFFSALLGFFGGFAFSPTTYFLPSIIWLRIYHPNRWSWSWVINWAVIVFGVVLMFVSTIGGFRSLMVEAANFHFYKN

SEQ ID NO: 13899 - protein, 374 aa, Physcomitrella patens subsp. patens
MTGGVKSLNSKSELDAAVKSGVSVLHFWASWCEPSKAMEPVLAQLAVDCPQAHFFRVEAEEQADISDAYDVGAVPYFLFMKDGTVVDKLQGADAPELANKVAKWAGDNTSVSEAVPASLGLAAGSNVIEAVKKDLAPHVSSETSGNSAAAGSLTEFEKGSLLKLINSNPIMLFMKGTPEAPRCGFSRKVVNALVAEGLQFGSFDILTDDIVRQGLKTYSNWPTYPQLYVKGELLGGCDIILEMKENGELKETTSEAVVSTLPDQPTEESAGGSNIQSRLEQLTKEHPIMLFMKGNPSEPRCKFSRKVVQALNEAGLEFGSFDILSDETVRQGLKEYSNWPTYPQLYVKGEFIGGCDIVLEMQKNGELNEVLQNA

SEQ ID NO: 13900 - protein, 605 aa, Listeria monocytogenes EGD-e
MSGPGPGGGMRMQTAAKPKNFKQTLFRLLGYMKPRSVAIIVVFIFAILSTIFNIFSPKELGKATTEIFKGVMSQDGINNDKIFNILMIVLVLYLGSSLFSFIQQYVMSSVAQRTVYDMRKDLKAKMARLPLKYYDTRSNGDILSRSVNDMDNIANTLQQSLTQAITAIVQMIGVLIMMLTISWQMTLIVLVTVPISIILVAIIAGRSQRYFGAQQRNLGILNDTVEETYGGQTIIKAFGQEKKTLVKFDEVNEDYFKAAKKAQFISGIMMPVMQFVGNLGYVGVCVAGGIFVTNGTLQVGDIQSFTQYVQLFTQPISSVANIANIIQSTIASAERVFEMMDEEEEKDEIPANVNQVAGEEHSIVFDHVKFGYTPDKPLMTDLNIHVEEGQMVAIVGPTGAGKTTIINLLMRFYDVDGGQIRMKGIDTRDMTKDAVREKFGMVLQDTWLFNGTIADNIAYGREGATKDEVIGAAKAAYADDFIRRLPNGYDTILNEEGSNISQGQKQLLTIARAILSDPSILILDEATSSVDTRTELNIQLAMGNLMEGRTSFVIAHRLSTIRDADLILVMNHGSVIEQGTHQELLDAKGFYADLYNSQFTGAQAV

SEQ ID NO: 13901 - protein, 117 aa, Physcomitrella patens subsp. patens
GNESDSDVRRVPELSAKTSGGVSGSHTQDKGLTGSSHRKRGGASADKEHKRLKRLLRNRVSAQQARERKKAYLGELEVRSKELEHRNAELEERVSTLQRENQMLRQVRASDYWLLCA

SEQ ID NO: 13902 - protein, 216 aa, Listeria monocytogenes EGD-e
MFLDTGNLEEIKKALQFPFFEGVTTNPTILLKENRPRKTHIGSIQAKVVFVQAAGLTEEEIWEDVLRIQAIEPAEGTVIGLKIPAHEAGIKVIAKVRANFPNEIILATAIFSSEQGYIAALSGADYLAPYYNRMEVSGLDAAKTIEELRYVLDLQGLEDVKIMGASFKNSRQIMQALASGADTVTIGYDLFLQMMNKPLALESIEKFNEHHAALPK

SEQ ID NO: 13903 - protein, 463 aa, Listeria monocytogenes EGD-e
MNSLFRRKPIEDLMHNKSGSTHLKQTLGPLDLTLLGVGAIVGTGIFILPGTVAAKNAGPAIIFSFVIAAIVCAIAAMCYSEFASSVPVAGSAYTYGYVVFGELIGWLLGWALILEYGLAVASVASGWSSYLNALLSGFHISIPEAISGPFNPEVGTFINLPAIIIVLVIAFLLTLGIKESTRVNTIMVVIKVGVILLFLVVGVFYVKPDNWQPFMPFGISGVMNGAALVFFAYLGFDAVSSAAEEVKDPQRTMPIGIIGSLLICTVLYVAVSAVLTGMVPYTDLNVTDPVAYALQVINQDWVAGIVSLGAVVGMITVILVMSYGATRLIFAMGRDGLLPKVLAEINQKYQTPVKNTWIFAVIVAIISGLVPLDRLAELVNIGTLLAFMMVSIGIIFLRKNKDIQARGFKVPLYPVLPIVSFLLCAFLISRLSVHTWILCGIWFVIGLIVYFAYGRKHSELLKK

SEQ ID NO: 13904 - protein, 1123 aa, Physcomitrella patens subsp. patens
MSAPKKTYSSTSSAKSKAHSVRVAQTTADAALHAVFEKSGVSGDNFDYSKSVSKSTAGSLHTGAVTAYLQRMQRGGLTQSFGCMVAVEETGFRVIAYSENAPEFLDLMPQAVPNIGEINTLGIGTDVRTLFTPSSAASLEKAAETQEISLLNPITVYCRSKKPLYAIAHRIDIGIVIDFEAVNMNDVTISADGALQSHKLAAKAITRLQALPGGDIGLLCDTVVEEVRELTGYDRVMAYKFHEDEHGEVVAEIRRTDLEPYLGLHYPATDIPQASRFLFMKNRVRMIGDCSAPPVKIVQDPNLRQPVSLAGSTLRSPHGCHAQYMGNMGSISSIVMAVIINDNEDDSRGSVQRGRKLWGLVVCHHTSPRTVPFPLRSACEFLMQVFGLQLNMEVELAAQLREKHILRTQTLLCDMLLRDAPIGIVSQVPNIMDLVKCDGAALYYGKRFWLLGTTPTESQIKDIAEWLLEYHKDSTGLSTDSLADANYPAAHLLGDAVCGMAAAKITSKDFLFWFRSHTAKEIKWGGAKHDPGEKDDNRKMHPRSSFKAFLEVVKRRSLPWEDVEMDAIHSLQLILRGSFQDIDDSDTKTMIHARLNDLKLHDMDELSIVANEMVRLIETATAPILAVDSNGMINGWNAKIAQETGLPVAEAMGRSLVKDLVMDESLEVVERLLYLALRGSEEEQGVEIKLKTFGAQTVKGAVILIVNACASRDVSENVVGVCFVGQDVTGQKMFMDKFTRIQGDYKTIVQNPHPLIPPIFGADEFGYCFEWNPAMEGLTGWKRDEVIGKLLVGEIFGMQKMCCQMKSQDAMTKFMISLNSAMDGQNTDKFSLSFFDREGRYVDALLSTNKRTNADGAITGVICFLQIASSELQQALRVQQATEKVAIAKLKELAYIRQEIKNPLCGITFTRQLLEDTDLSNDQKQFLDTSAVCEQQLQKVLNDLDLESIEDGYLELDTAEFEMRTVMDAVISQGMTISREKGLQIIRETPREIITMRLFGDQVRLQQVLSDFLLNAVRFTPSSEGWVKIKVVPTRKRLGGNEHVMHLEFRVSHPGAGLPEELVLEMFDKGKGMTQEGLGLNICRKLVRLMNGDVQYVREAMQCYFVLYVELPLAQQDDAASQM

SEQ ID NO: 13905 - protein, 488 aa, Physcomitrella patens subsp. patens
MTSTAGQPQFRYTQPPSKVLHVRNLPWECSEEELIELCKPFGKVVNTKVNVGANHNQAFVEFADLNQAIAMVSYYASSSEPAQVRGKTVYLQYSNRQEIVTSKNSGDVASNVLLVTIEGVEAGDVSIDVLHLVFSAFGFVHKIATFEKSAGFQALVQFSDANTASAAKSALEGRSIPRYLLPDHVGPCHLRISFSAHNDLNVKFQSHRSRDYTNPYLPVAPSAIDGSGQFSVGPDGKRREPESNVLLVSIENMQYAVTIDVIHTVFSAFGFVQKIAIFEKSAGFQALVQYPDIPTAVGAKEALEGHCIYDGGFCKLHLSYSRHTDLNVKALSLLYVNNDRSRDYTNPGLPATQPPVLSQAPGVAQQQSWDTEGSGKAQQVSGPMPGQPMSGPMYMSHQHGGAVGHHGPPGASGSYQGPPGPVTSMGPMSGPGPSMAPPGYMGPGMHQQGQQSHHLGPPGHSMPPYQQMHGPGHQGMPPANGGPGGYYM

SEQ ID NO: 13906 - protein, 160 aa, Physcomitrella patens subsp. patens
MNGERYVGVALDYSPRGRYALQWAVDNTLRGNDHLIDVVVNKDGLEAGPAALWEASGTRFIPLAAAESPHNQHAYHLKIDEEVTKTLHEAEAKKIVVVSKLYWVDPKEMICNAIVDVPLDHLIKGCRGHSKLKRSIMGSVSNYVSNNVPCPFTIVILPPS

SEQ ID NO: 13907 - protein, 81 aa, Physcomitrella patens subsp. patens
GEDESVDTKKPVTGRGSTAKRSRAAEVHNQSERRRRDRINEKMRALQELIPNSNKTDKASMLDEAIEYLKMLQLQLQVCAV

SEQ ID NO: 13908 - protein, 330 aa, Physcomitrella patens subsp. patens
MADCISKVETTTRLVQLRVDSLGTGCYRRSDPFKIGLWNWHILIEKKASLIVRLYPEHCRKEPSPIATFTVRILVRGSDGQRVESKVSDKLLRSSSDDFMWPLEYSVAYGRFLVEIEFHDLKVASSHSGDPHSIWTGEEYLQSRAEVGIARCLSRMLEEGLHTDVTICSATGCVGAHRAILAARSPVFDSMFSHNLMEKQSATVRINDMCLESCRALLSFLYGNLKYPDFRKHRVALVRAAHKYDIVDLKEACESSLVDDIDGSNVLVRLHDAWLYQLKDLKRECLRYLLEFGKVHDLRNEFDAFLQDVDKDLVVELVQEQIKLLKIHGL

SEQ ID NO: 13909 - protein, 122 aa, Physcomitrella patens subsp. patens
SLNSSVVVVMGVLLFALIAAAFINTIARCLLRRRQTQPSDDHNEREKGLDKSVIEALPVVAYSPDSIKSSFDPSGENDCVVCLSGFVEGEKVRLLPHCKHGFHLVCIDTWLLSHTTCPVCRR

SEQ ID NO: 13910 - protein, 458 aa, Listeria monocytogenes EGD-e
MEEQKEELQRGLKNRHIQLIAIGGAIGTGLFLGAGKSIHLAGPSIMLVYLIIGAILFFVMRALGELLIHNPTTGSFTEFAEQFIGPWAGFITGWTYWFCWIVTGIAEITAVGMYVKFWVPDLPQWIPALACVLILLLFNLATVKAFGEIEFWFAIIKVVVIIALIVIGFVLVFIGYKHGTSTASFSNLVDYGGFFPNGIAGFLLAFQMATFSFVGIELVGVTAGEADDPERTLPKAINNIPIRILIFYIGALLVLMSIYPWSNIDPNTSPFVSVFTMIGIPAAAGIINFVVLTAAMSSCNSGIFSTSRMLYTLSAEGKAPKKMHHLSSNGVPATALITSTACLLIGVFLNYFLPEQVFILVTSIATICFIWVWGVILVAHLRFRHKHPEISEKSKFKMPLSPLMNWVSLIFFGGLLVILGFAADTRIALFVTPVWFLILGIAYQILKASNRKTKIRHN

SEQ ID NO: 13911 - protein, 634 aa, Physcomitrella patens subsp. patens
PLVIANGGTSGLFPDQTFLANADAVNSTSFPMALLCDLQLTKDNFGICRTGWNLSDSTDLKNIVSNATVMSTYAMRRESRTGYFSVDFTSIELNKTTAIQSNPSRTPVFDENFTPETPESTALNSANGAQYGLFFWLNVEYPTFYQQHPGKNSLASYLTTFLKEYEPEYLSATEIGILKLLKPTALKSETNLVLKFLDAGLVEESTNTTYGEIIKDLPSIATYAQGILVPKEFVYPIITFTNDTSYGYYSAPATTLVQDAHKAGLEVFVYGFANDFFPSSYNYSFDPILEVLSYVGDTFTVDGVLTDFPTTAAEAITSTIPVQNPIILSHNGASGDFPGNTLPAYVAAINDGADYIDCTVQITKDGVPVCREDVNLIKSTNIDSVSVLYEQYYASYPEFGSGVFTFDLPLKDIRTLKAKMYSPWSEYFVRRDPSNDGKEGVLTLDEFLVFAKKNSGVGVYVNLQNAHYLRTQKNLDMVDAVVASLTKANLTNGSHKVFVASEDSSALAAIQSSIPVVKRVYVVQYDEKSPVSITTSEIKKFADTIALDGRFVDPLDIFGSSFLSSTTSVVRSAQSLNMTVFYYFLSNEFNSRAIDYRSDPILHINSLVGEYNVNGFITDHPATLYNFLYSKCLV

SEQ ID NO: 13912 - protein, 565 aa, Physcomitrella patens subsp. patens
MAVNSASTAAASPTATKNEKSVAKPTVLVAEKLGAAGIELLEKVAVVDCSYNLSQEDLCAKISDCDALIVRSGTKVTREVFEASKGRLKVVGRAGVGIDNVDLQAATEVGCLVVNAPTANTVAAAEHGIALLTAMARNVAQASASMKAGKWQRNKWVGVSLVDKTLAVMGFGKVGSEVARRAKGLGMHVVAYDPYASAERAKAVGVELVNFEEALATADFISLHMPLTPTTDKIFNDESFGKCKKGVRIINVARGGVIDEPALVRALDAGIVAQAALDVFTVEPPPEGDALVNHENVIVTPHLGASTMEAQEGVAVEIAEAVAGALAGELSATAVNAPMVPAEVITELAPYVSLAERLGRLAVQLVSGGAGVKQVKVVYRSARADDDLDTRLLRAMITKGLIEPVSSAFINLVNADYVAKQRGLKISEERQPTDGAIEVPLQSISVMISGVESKFASSESNGAITLEGKVKDGVPYLSRVGSFSVDVSLEGSIILYRQVDQPGMIGKVGSILGEENVNISFMSVGRKSPREHAVMAIGVDEEPSKATLQKLGDIPAVEEFVFLKL

SEQ ID NO: 13913 - protein, 130 aa, Physcomitrella patens subsp. patens
MKDGNESDCDVRRVPELSAKTGGGVAGSHTQEKGPTGSSHRKRGGASADKEHKRLKRLLRNRVSAQQARERKKAYLSELEIRSKELEHRNAELEERVSTLQRENQMLRQIVKTTALKKTYSGGNAEGGAQ

SEQ ID NO: 13914 - protein, 160 aa, Physcomitrella patens subsp. patens
MKEAKGKKGVGAVAKRDVKEKVTKVQDKDIKKRKGPVKEPKGRKAKSAKKAKDPNAPKRPATAFFIFLNEFREVFKKENPNVKGVAAVGKAGGEKWKSMSEAEKQPYMQKAVQKKSEYDKTLSAYNKKQDDDEEDEEVEAEESDKSKSEINDDEEDEEVG

SEQ ID NO: 13915 - protein, 56 aa, Physcomitrella patens subsp. patens
FRGVRKRPWGRFAAEIRDPWKKTRVWLGTFDTAEEAARAYDSAARALRGSKAKTNF

SEQ ID NO: 13916 - protein, 668 aa, Physcomitrella patens subsp. patens
MLPKAFASGSGCLTSEFVDTSWRRVALNTTSAESRRRIGVCVARTPAVQDVKDVGIQTPGNGRVSTSEEKNVSPPRTRPLRVLVAGGGIGGLVFALAAKNRGLDVVVFERDLSAIRGEGQYRGPIQIQSNALAALEAVDRQAAEEIMANGCVTGDRINGLVDGITGEWYCKFDTFSPAAERGLPVTRVISRMKLQEILSGALGSEYIQNGSNVVDFVDDGNKVEVVLEDGRTFEGDILVGADGIRSKVRTKLLGESSTVYSDYTCYTGIADFVPADIDTVGYRVFLGHKQYFVSSDVGQGKMQWYAFYNEPAGGVDAPGGRKARLMSLFGGWCDKVVDLLLATPEEQILRRDIYDRIPILTWSKGRVTLLGDSAHAMQPNLGQGGCMAIEDGFQLALDLSKAAKQPSADLQGVLKTYEGKRRIRVGVIHGLARMAAIMATTYKPYLGEGLGPLSFIKQLKIPHPGRVGGRFFITIGMPTMLSWILGGNSFALEGRAPYCSLEDKADSNLKKWFWNDDALERATNADWYLVPASERMPIDGDVTESGRPLLRLCREDSKPTIVGCESCEIELGEFRAVTEPEVAPQHAKLVFKDGALFVTDLDSKTGTWITSISGGRCKLTPKMPTRVHPEDIIEFGPAKEAQYKVKLRRSQPARSNSYKTDLNALKVA

SEQ ID NO: 13917 - protein, 1131 aa, Physcomitrella patens subsp. patens
MSSTKLSYSSGTSVKSKHSVRVQQTTADAKLQAVYEESNDSGDSFDYSKSVGQATKSTVQQVPAQAVTAYLQRMQRGGLTQNFGCMLAVEESTFRVIAYSENAPEMLDLMPQAVPSVGLKEVLGIGTDARLLFTPSSASTLERAAATSDLTMVNPISVHSRNSGKPFYAIVHRIDVGIVIDFEPVRSNDVVISTAGALHSHKLAAKAVSRLQSLPGGDIGLLCDAVVEEVRELTGYDRVMAYKFHDDEHGEVLAEIRRSDLESYLGLHYPSTDIPQASRFLFMKNRVRMIADCCAPPVKVIQDKDLRQPITLAGSTLRAPHGCHAQYMGNMGSVASITLAVIVHDQEEDFGVQQKGRRLWGLVVCHHTSPRTISFPLRSACEFLMQVFGLQLNMEVELQAQMKEKHILRTQTLLCDMLLRDAPVGIVSQSPNIMDLVKCDGAALYYENQFWLLGTTPSEEQIEEIAAWLLEHHKDSTGLSTDSLADAGYPGANLLGDAVCGMAAARISSKDFLLWFRSHSAKEIKWGGAKHDAEDRDDSRKMTPRSSFNAFLEVVKRRSVPWEDIEMDAIHSLQLILRGSFQDVDGSGGKTMIHSRLHDLKLQGMDELSTVANEMVRLIETATAPILAVDSNGFINGWNAKVAELTGLPVGEAMGRSLVKDLILEEYVEVVERLLYLALQGEEEQNIEVSLKTFGAQKAKGAVILVVNACSSRDVQENVVGVCFVGQDVTGQKMVHDKFTRIHGDYKSIVQSPNPLIPPIFGSDELGYCIEWSPSMEKLTGWKREEVLGKMLVGEIFGVHQMCCRLKGQDAVTKFMIVLNNAMDGQDTDKYPFSFHDRQGKLVEALLTANKRTDADGYITGVFCFLHIASPELLQALTVQRATEKVAFAKLKELAYIRQEIKNPLYGIMFTRNLMEDTDLSDEQKQYMDTSAVCERQLRKILDDMDLESIEDGYLELETMEFEMGSMMDAVVSQGMVTSREKGLQLIRETPREIQGMCLFGDQVRLQQVLADFLLNAVRFTPSSEGWVGIKVVPTRKRLGGGFHVVHLEFRVTHPGSGLPEELVHEMFDRGRGMTQEGLGLSMCRKLVKLMNGEVKYIRDTGKSCFLVSLELPLTVSDDAGSVRQSGPLNC

SEQ ID NO: 13918 - protein, 690 aa, Physcomitrella patens subsp. patens
MWTLGILSCAILAFLNQFFAYRAEPLIISATSAQIAALPLGRFMAATLPTTKFKVPFTNLEWTMNPGPFNVKEHVLITIFANSGAGGAYAISIVTIVKAYYKKKITFFVGLLITITTQMIGYGWAGIFRDYLVKPAQMWWPQNLVQVSLFRTLHEKDPRPKGGVTRIQFFLIALTCSFGYYALPGYMFAMLSSLSWVCWAWPHSVRAHQIGSGLKGLGVGAIAFDWATVSSYLLSPLSTPFFAIANVFAGFLFVMYVITPIAYYNNLYSAKKFPIFSGMFFRSDGQRYDINKVIDENFALNEAVYDEYGQLHLSTFFAFTYGVGFAALTATLSHVILFHGWDIWQRSKSSLKEKPDVHTRLMKNYKEVPQAWFLGILGVMILVSIVACEVYNEQLQLRWWGVLLACGLAFFFTLPIGVITAVTNQTPGLNIITEYMIGYIYPGRPVANVCFKTYGYISMTHAVSFLADFKLGHYMKIPPRAMFHAQLLGTVIAAVLNLGTAWWLLTSVPDICQQDLLPANSPWTCPGDTIFYDASVIWGLIGPKRMFGSLGLYNAVNWFFLFGALAPVPFWVLHKIFPDKKWITYIYTPVLIGATGMMPPATAVNYTSWFLIGYIFNHLVFKYRKGWWQRYNYILSAALDAGLAFMGVLLYFVLQLEDKNMSWWGENLDNCPLAACPTAPGVTRNGCPVF

SEQ ID NO: 13919 - protein, 671 aa, Physcomitrella patens subsp. patens
MRKGSRRMRNEDLMFRITRLALDVLWITSWLVDSGLVQLRRPRFARVVTSLGHADKCARGVPTSTCLMLLLAAVAWSCWSTMQLAGATPAAAVEQCSESGCTLDNAYDVWNDRSPCKAASVVYPRNEAEVLNAVADAVRTNRKIKVSTRYGHSIPKLACPGTSSGVIISSKMYNSIVSIDTENATVTAQGGITMRQLIDQIASKSLALTVAPSFDGVTLAGLLANGVHGSSLFGKGGAIHEYVIGMTIVTPASAAEGYSKLRILGSDDPDLNAAKVNLGVLGFVSTVTLQLEPMFKRQATMRVLHENDTGELVDEVNRISKSEEYGEIMWYPSLREVVYKYDHRVPVTTPGEGKNNYYGLQSQLATTVMVARLTEEAAEAVGGSKGRLMKCELALSTVTAQQTVAYGYQKNKNIDIPNIDIISVNITAVNVTKTFLNAFPVVGYQNDMATAGGCQRDLKPGFYCAWDQRVKGIVFFDAGIALPLRNLGPFLEDVRKLRDAAPAHSLCDMDIYTGFLFRFVKKTDTYLGTAQEDTVAVDFAWSRGNDGMTPRLDMDVFQELEQIAIDKYGARPHWGKNRNCAFEGVWKKYPKLLQFLDTKNRFDPSGFFSSEWSDAVLGLNGQGAPGVSTDAPFCAIEGNCNCVIDEHCAPQMNSFCRPGRVFTEARVCRSR

SEQ ID NO: 13920 - protein, 286 aa, Listeria monocytogenes EGD-e
MEKIGFVGTGVMGSSMAGHLLEAGYEVLVYTRTKTKAEDLLDKGALWVETPGELANKVDILISMVGYPKDVEELYLGENGFLENLAVGTVAIDMTTSSPALAKKMAEFGREKGIGVLDAPVSGGDIGAKNGTLSIMVGGSEDVFLKVKPIFDILGSSVILQGDAGAGQHTKMVNQIAIASNMIGVTEAIIYAEAAGLNPSRVLDSISGGAAGSWSLANLIPRVLKDDFSPGFFIKHFIKDMGIAISEAKQMGLELPGLTLAEKMYQTLAEQGLSEEGTQALIKYYR

SEQ ID NO: 13921 - protein, 381 aa, Listeria monocytogenes EGD-e
MTKSIRPELRDIQVSGIRTFNTRVTGIPDMIRLTLGEPDFPTPDHVKQAAISAIEENFTNYTPNAGMPELLEAASIYFHEKYDLSYSNKEIIVTVGATEAISVALQTILEPGDEVILPDPIYPGYEPLITLNKAHPVKVDTTETNFKLTPEQLKAHITPKTKALIIPYPSNPTGVTLSKDELSALAEVLKETGIFVIADEIYSELTYHEEHVSIAPMLRDQTIVINGLSKSHAMIGWRIGFLLAPEILTQEMLKIHQYSVTCASSISQKAALEAITNGKDDAFQMRTEYKTRANFTQDRLEKMGFTVIPPDGAFYFFVKLPDEIAENSFDWAVKLAEEAKVAVVPGNAFSEKGDRYFRLSYATSFNNLAEALDRMAQFVEK

SEQ ID NO: 13922 - protein, 374 aa, Physcomitrella patens subsp. patens
MAKILRKCELCDGAAALYCAADNAHICWSCDAKVHGANFLVARHTRSVLCKTCGISTTRRTTGANPTPLTGLCSGCLQGEVQGECTTYCNRSVVSSRRAASRSCLAVAGRSDSGSESGCSLHVPNSSRDMECVIVDRSAQESVSSASSQSLKRKRSLDCRAAASNPQAEQVVTRTLEDVHSRVAQLQCECTSATSSAINRSSASHDHQDTTLETRDGNRSQPPVMGSNNGAFVTLRSASAKRLRMDDSAQTSPSLRRSQQSAALATSRLTRILAKWHWDLHLSSPDTVPLALRLFRKAYRALAPAVLSNAGTSVVLAACLLLAAGLDEAQITAPKASDLAAFAGVSTRTLCITEIHLVALLGRRRSAVWAGTRN

SEQ ID NO: 13923 - protein, 531 aa, Physcomitrella patens subsp. patens
MDFAKSTVARISFEGLKPEDGLSNQRVEIIVFLAAMFILPFVLLKLMRRPKLKLPPSPPAYPIIGHLHLLGKLPHHSIANIAKTYGEIYSLRLGSVPAIVVTTPEMAKEFLLTHDKIWASRTVRDVSGYYLSYNHTGIAFAPFTPVWRNLRKICTSELFTQKRMEASQGVRDVEMQCMIRRLIDLKLEVNALTANVVTRMVLNKRFMRCVDSTAEEESRAQQFKEIMKDHFTLQGIFMIGDYIPWLRPLDLGGKEKRMKALRKRLDAFLNEILDDHEVKRAKGPIAEEDQDMIDVLLNEMHQQDPNEPHKMDLNNIKSTILNMFAGGTDTATITIEWAMSELLRNPPIMAKLKAELDALIGQDRRVRETDVPNLPYLQAITKETFRLHPAGPLLVPHESTHDCEVAGYRIPAGTRLFVNIYAIGRSSKAWDRPLEFDPERFMTGPDASVDTKGKHYRLLPFGTGRRGCPGMSLGLLLVQFTLAALVHALDWSLPPGMDPEDVDMTEACGLKVPREHALSLNAKPRAAAQFY

SEQ ID NO: 13924 - protein, 86 aa, Physcomitrella patens subsp. patens
KRRVRRPFSVVEVEALVHAVEKLGTGRWRDVKIQAFEQAKHRTYVDLKDKWKTLVHTARIAPHQRRGEPVPQELLERVTRAHTYWT

SEQ ID NO: 13925 - protein, 351 aa, Physcomitrella patens subsp. patens
MEAQSHTVGDVFLGYNRSILSGALRSTQEKEEAIKQQTNCKKRPRFFELLATVAGQFLQNDGDFEGNSEFIDPKGFSNDCKRLMLDTEASHLVEIPIPTNCQLNLNIHCQEDMFMKHDCSQATVEENVAPTKQAFFNGIATCTRQRTSRRIPLKRKQFEDGNKCSLEPQMNTNYPINVEYNAVYGEPPAAAAKLRRVKFGINSFTIPEFFVDLPESASISTLKEGGGWMWGKQEAIMEATMRLLEGPLRVRVLMHGNKVMDEGATLLQSGIISSSSSTPPPHLNYNSNSSLHLPMDAVSFMLEPSSSPSSPCAMFDNHAFQLHSSLSPSAKDLRTSYVHGANHIDPLPLPR

SEQ ID NO: 13926 - protein, 420 aa, Physcomitrella patens subsp. patens
MPLKSLIREFQEMKGGIGNISRRSFELKFPHHHRGRSSGMVLDESQLRPERVVEQSCWANMPPELLRDVIQRVEVSESTWPSRKHVVACAAVCSSWREITKELVRTPEQSGRLTFPIALKQPGPRENTVQCFIKRDRTTSTYQLFLGLPPSLIENGKFLLAARKFRRATSTDYIISLNQEDMSRGSNTYVGKLRSNFLGTKFTIYDSQPPHNRGVASNRSSRRIGSKQLTSRVHAGSYNVAHIAYELNVLGTRGPRRMQCMLHTIPMSAMESGGSAPTPTEFTASTLEDTHVAYSGILSSPRSRAAVVDSSTLDCDFVSGPLTKDAPLILKNKAPRWHEQLQCWCLNFRGRVTVASVKNFQLVAATDLPPTNSQNDHDKVLLQFGKIGKDMFTMDYRYPLSAFQAFAICLSSFDTKLACE

SEQ ID NO: 13927 - protein, 178 aa, Physcomitrella patens subsp. patens
AKETGKVKWFNSSKGFGFITPDKGGEDLFVHQTSIHAEGFRSLREGEVVEFQVESSEDGRTKALAVTGPGGAFVQGASYRRDGYGGPGRGAGEGGGRGTVGGAGRGRGRGGRGVGGFVGERSGAAGGERTCYNCGEGGHIARECQNESTGNARQGGGGGGGNRSCYTCGEAGHLARDC

SEQ ID NO: 13928 - protein, 397 aa, Listeria monocytogenes EGD-e
MHKIMAINAGSSSLKFQIFTMPGEEVLVKGLIERIGLPDAIFNMSFQNEKIKETRAINDHGKAVEILLEQLKAHQVINDLSEITGVGHRVAHGGEDFVTSCVVTDEVVKGIEAVTNLAPLHNPANIIGIKTFRELLPNAVSVAVFDTAFHQTIPQENFLYALPYELYEKHHIRKYGFHGTSHKYVAGKAAEVLEKPLEKLKIISCHLGNGASVCAIEAGKSVNTSMGFTPNAGLMMGTRSGTIDATIIPYLVDELGYSLDEVMHMMSNESGVLGVSGISSDFRDIEIAAKEGNSRALLTLRMFTGQICNYIGAYASAMNGCDALLFTAGVGENSPLIRQMVTEQLSYLGVTCHVTKNNAGDMIISNDNEAVKVCIIPTNEELMIARDVEKYAKQTIG

SEQ ID NO: 13929 - protein, 432 aa, Physcomitrella patens subsp. patens
DLESWLPITAADRSANWKHAAFHNVTAMMGAGVLALPNAMVYLTWGPGILMLILSWIITLFTLWQMVEMHEAVPGRRFDRYHELGQEAFGPKLGLWIVVPMQLVVEVGVDIVYMVTAGKSLQHAYSITCGDHCQLQDSIVFWIFLFAIVQLVLAQLPNFNSIAAISLAAAIMSISYSTIAWAIPAHYGHTLPGNIELLQPAPEDLSTADRWFGAFTALGTIAFAYAGHNVVLEIQSTLPSTPHEPSKIAMWRGVKFAYGVVAIGYFPVALIGYWAYGNQVTDDIITFVSRPTWLVVIANLMVVVHVIGSYQIYAMPVYDMLESTLVGHLRFNPSMLLRLVTRSLYVSFTMFVAMTFPFFAALLGFFGGFAFSPTTYFLPSIMWLMIYRPSPMSWSWITNWAVIVFGVVLMFVSTIGGFRSLMTEAANFHFYT

SEQ ID NO: 13930 - protein, 57 aa, Physcomitrella patens subsp. patens
HFRGVRKRPWGRFAAEIRDPWKKTRVWLGTFDTAEGAARAYDTAARALRGSKAKTNF

SEQ ID NO: 13931 - protein, 198 aa, Physcomitrella patens subsp. patens
WKVIPEECEDLVARYMNNGQYAVDMEGVAVAVLDYLKDIIPGEDGKDVVIFDIDETALSNLPYYRKHRYGAEVFDHPLFSKWVEEGVAPAIPAMLSLYKVLQAENWGIVFMTGRTESQRNITSQNLLDVGYSGWTTLLLRSPAEAHTSAVEYKTRKRLQLQHEGYRIWTSLGDQWSDLAGAAVGNRTFKLPNPMYHIP

SEQ ID NO: 13932 - protein, 110 aa, Physcomitrella patens subsp. patens
KGGKKLKDPNAPKRPPTAFFIFLNEFREVFKRENPNVKGVTAVGKAGGEKWKSMSEAEKQPFMTKAVQKKSEYDKTISAYNKKQDAEEVEAEESDKSKSEINDDEDEEVG

SEQ ID NO: 13933 - protein, 404 aa, Listeria monocytogenes EGD-e
MGLVVLKFGGTSVSTVDKIGKTADQAIYEKKQGNKVIVVVSAMGKSTDKLVAMAEEISEAPDKREMDMLLSTGEQITIALLAMTLKEKGHDAISYTGWQAGIETEAVHSNARIADIDSARIESALDAGQIVVVAGFQGFTTDGEITTLGRGGSDTTAVAIASALNAEKCAICTDVVGVFTTDPRYVKKAQKLEQITYDEMLELANLGAGVLHPRSVEYAKNFRIPLEVRASHEQVPGTMIEEDLTMENTKVVRGIAFEDQITRVTIHWKQKEAMRVSKVFTKLAENNIDVDIIIQGITGLGHGNLSFTIKTSALLATLAVLEESKELLQIEKLESEQELAKVSIVGSGMVSNPGVAAQMFEALTENNIPIKMISTSEIKVSTVVPARKMVEAAQVLHDQFELDK

SEQ ID NO: 13934 - protein, 532 aa, Physcomitrella patens subsp. patens
MPSQSQARQVGLQSTYPTQLNFNALPPSTARAHCRSNAPPSATVVDMESWFPASTGASEFVTRNCGLNSCQQRTEMPVGAVSDSTGISTGCVFSQLVDFQSDTWWPPITVQAALPTDILTQRSMATPLSTNCLFDRYLVAAKLYAYEGQIGCDTKTGALNNSASFSTGNEMESWRRETVNVDVSDLGLVSEHPEPAMAVVSVAPILVSLSCTKSAGRKESQRLEKGESVSAPTSPSELRLVKEKTNQLGVKKSKGSGKRPVSQRENHIWSERERRKGMNCLFTRLRNLLPHPTSKTDKSTVIGEIIKYIQSLQVKLEMLTKKRQQVMAAVLARPGMFVSNNSGLTLVDHSNFDPSSMTAITALPPPGKESCLQSYLGTNVGLHVCGLNVFITTSSPRGRQGLLQQLLVTIHKHQLDVINATISTSSTSVFHCLHCQASQNAEVLNNDLHSALQSIITNFGLPQCLCHKHPIKHRSTEDFEALLNKLENVHICSAIEDGGHWRCKLVQLKAWNKRWDTDPMSRREKAMHEAHF

SEQ ID NO: 13935 - protein, 505 aa, Physcomitrella patens subsp. patens
MDGDHVILGLTGNAKLGQTDDNALGHGEKGRAGFDGVDKPIHDPNLNDDDGKPRRKGTVITSAAHIITAVIGSGVLALSWSFAQMGWIAGPIVLLAFAWCTYYTSRLLADCYRSPDPIHGKRNYIYMDAIKANLGRKQQLVCACVQYSNLIGTSIGYTIATATSAKAIQYQNCIHDNGPDDPCLTSTTVYIAIFGVIQIVLSQIPNFGELWWLSYLAAAMSFTYSFIGLGLGISKAATGENSHGSLGGTSVCYPSNGETCFTRPQKTWNVFTALGNMAFAYSFSMILIEIQDTIKSPPSESSQMKKATLLGIITTTFFYMSVAIAGYAAFGDAAPGNLLTGFSTPYWLVDFANTCIVIHLIGAYQVYTQPVYAFVERWCSLRWPNNSFLNLEYNVRLPGRRNFRVSAFRLIWRTIYVIITTIISMLIPFFNSVLGILGAIGFWPLTVYYPVEMYIRQTHVQRWSRKFLLLQLLSFVTLLISIAGLIGGVSGIIQELQHVALFAKT

SEQ ID NO: 13936 - protein, 345 aa, Physcomitrella patens subsp. patens
MAITSMGGYPCQSAMQQLIRNESSSDSLAAILTPCSPHVGLQAPPHVGGSLEDAVLVASEGSRQKRPFFATYDAPTVEDGPVEDDEGADDSQGASQLEKKRRLTFDQVRSLERNFEMENKLEPERKMQLAKELGLRPRQVAVWFQNRRARWKTKQLERDYEALAADYKSLKHDYDLVLAEKNNLKAEVQRLSGKAPTSPCADGNQIVAGESAQTPEVDVETSELVARQHTSRSTPTVDVSLACVKDKDFETSGCTDGNSSDVLDADSPRTTDSSSLSAMSDHDQLIYSHEIPPPESFMGLSGMLHDVTVKLEEGSGHGFHDDNSSNYFLLHLEDQAGVLPWWDWP

SEQ ID NO: 13937 - protein, 176 aa, Physcomitrella patens subsp. patens
MSRSVDPLVVGRVIGDVIDMFAPSVDMAVVYTSRKVSNGCQMKPSATNEAPTVHVTGNNGDNNFFTLIMTDPDAPSPSEPSLREWVHWIVTDIPGNSSTTTSGKEVVPYVGPCPPIGIHRYIFVLFKQPTGKPLLVTAPSVRNNFNTRTFAVEHGLGFPVAATYFNAAKEPGSRRR

SEQ ID NO: 13938 - protein, 242 aa, Physcomitrella patens subsp. patens
MYPPIHQCPNGHTLCSNCKQRVHNRCPTCRYELGNIRCLALEKVAESLELPCRYQSLGCPDIFPYYSKLKHEAQCTYRPYNCPYAGSECSVTGDIEWLVAHLRDEHKVDMHNGFTFNHRYVKSNPQEVENATWMLTVFNCFGQHFCLHFEAFQLGMAPVYMAFLRFMGDDNEAKNFSYSLEVGANGRKLVWQGVPRSIRDSHRKVRDSHDGLIIQRNMALFFSGGDRKELKLRVTGRIWKEQ

SEQ ID NO: 13939 - protein, 591 aa, Physcomitrella patens subsp. patens
MNAVGGAPDSEYPQDGTVDLRGNPVLKANTGGWKACPYILGNECCERLAYYGIATNLVTYLSHELHQNPSTAANNVTNWSGTCYITTLIGAFLADAYLGRFWTIVVFSIIYFLGMVLLTLSAALPSLKPPSGEGVVASSTQLAVFYLALYLIALGTGGIKPCVSSFGADQFDENDVKEKKRKSSFFNWFYFTINIGALIASSALVYIQENVGWGWGFGIPAVAMGIAIVSFLIGSPLYRHQKPGGSPITRIAQVLVAATRKLSMKVQPNGKHLYEADDKESGIEGSRKLEHTEEFRFLDKAAIPRGDEELQGTRPSGWRLTSVTQVEEVKIVMRLLPIWASGIVFATVYSQMSTMFVQQGALMNVSMGKANIPSASLSIFDTISVIVCVVIYDRFLVPVVRKRTGHVRGFTQLQRMGIGLFISVLAMVVAAIVEIERLKLARRDGVAGNPQDEALPVESLTIFVQIPQYFLIGAAEVFTFVGQLEFFYDQAPDAMRSLMSALSLTTVALGNYLSSVLVTIVTEVTTKGGKPGWIPNNLNRGHLDYFFWMLAILSILNIIFYLVVAKFYTYKRVHNAADVGEDGKPSKSGYE

SEQ ID NO: 13940 - protein, 363 aa, Physcomitrella patens subsp. patens
RSGGMPTCAGCHRTLGSGKFLTCLNQDWHPSCFCCLYCLQPIVDQEVLSTACANGIMQFSVQESDPYHRVCYKKLFHPKCEICYNYIQANAQGQIEYRSHPFWNQKYCPSHERDGSRCCCSCDRIEPVDQRYQSLPDGRRVCSECLESAMMATKDCQPLYRDIIRFYSDMGMRIEQEIPMLLVEREALNHARESEEGGHSHEPETRGLCLSEEQTFPVRQRKSFFELNLQHSLQFMQQTRHSEVTAILVLCGLPRLLTGSILAHELMHAWIRLDGRFPNLDNVIEEGICQVIAHMWLSSELESLTRRGGSPISKRLGEFFLHQIETDSSPTYGDGFRAAYAAVATYGLTRTLHHLRHTGEIIR

SEQ ID NO: 13941 - protein, 228 aa, Physcomitrella patens subsp. patens
MLGKCQKKPLSNACASFAFNTEMNNLQGYLLPQECEGYVAGYVNSGQYHSDFAVAIEAARTYLNTIEADQDGKDLIVLDIDETALSNMPYYVDHHYGVETFNGETWNAWVNNASAPALDAMLSLYTDFRAQNWSFAFITGRSKSQYNKTAQNLYDTGYTGWKTLVLRSVILPDEENLTADEYKSKHRKRLEEEGYRIKSCLGDQWSDCSGESAGKRTFKLPNPMYYIY

SEQ ID NO: 13942 - protein, 66 aa, Physcomitrella patens subsp. patens
QHYRGVRRRTWGRYAAEIRDSSRPGSHLWLGTFDTAEEAALAYDDAALRLRGSRALLNFPLRAASG

SEQ ID NO: 13943 - protein, 355 aa, Listeria monocytogenes EGD-e
MSFDVLTINPGSTSTKLAVYQGDKVLFEETVRHTMQELADFNNVQEQFDFRWQVLRRVMDAHGYDVKKLQAVVGRGGLLRPVAGGTYMVTEKMIDDLKENKYGEHASNLGAMLAKKLADELTIPSFIVDPVVVDEMQEIARISGNAFVTRKSIFHALNHKAAGRKIAKELGKDYEKMNFVIAHLGGGISVAAHRQGKAVDVNNALDGDGPFSPERSGSLPMNDFLEACFSGKWTKRELHELIVGRGGMISYLGTNSMLEVEAKVQAGEEKAIEAFDAMAYQVSKEIGACSVVLQGKVDAIILTGGLARSELFTSKIIEQTNWITSVIIEPGEDELEALNSGVQRVLAGLEKEKEY

SEQ ID NO: 13944 - protein, 275 aa, Listeria monocytogenes EGD-e
MKKKNIILISVLLGALLLLTGCSMDPSQNTDGFFSTYLIQPFTSFIMFVAKFVGGNYGIAIIITTLLIRALIMPLNLRTAKAQMGMQSKMAVAKPEIDEIQARLKRATSKEEQATIQKEMMAVYSKYNINPMQMGCLPLLIQMPILMAFYYAIRGSSEIASHTFLWFNLGSPDMVLAIIAGLVYLAQYFVSMIGYSPEQKKQMKIIGLMSPIMILFVSFTAPSALALYWAVGGLFLAGQTLLTKKLYMNKHPEIKVMEQEEKEFEQIVEEQKKEK

SEQ ID NO: 13945 - protein, 128 aa, Physcomitrella patens subsp. patens
MVRWSILESPKYVVTDVPRPSGGNLEKLDQAGKVGDGSSHQQESSEAGPLVTQQVLAPPPKKRRYRGVRQRPWGKWAAEIRDPQKAARVWLGTFDTAEQAAMAYDTAAIRFRGLRAKLNFPDGLISPA

SEQ ID NO: 13946 - protein, 389 aa, Listeria monocytogenes EGD-e
MKEVVIIDAVRTPIGKFGGSLKDISAVDLGATALKGVLERANIAPERVDQVIFGNVLQAGLGQNVARQIAIKAGIPYKVPGVTINEVCGSGLKSVMLGRQAIQLGEADIVAVGGTENMSQAPLLLNPELAGEEINPKKLRNSMLIDGLTDVYGEYHMGITAENVAEKFSVTREEQDEFAHNSQMKAASAQEKKLFEEEIIPVKLPDGSFFEADETIRANSTLEKLATLKSVFKEGGTVTAGNASGINDGASAIILMSKEKAVAENIPYIATIKVTSEVGVDPALMGYAPYYAVNEALTKGGYSIDEIDLFHLNEAFASQSVAVARDLKIPEEKLNIYGGAIALGHPIGASGARIIASLLNELKHENKHIGVASLCVGGGIGIAIILERA

SEQ ID NO: 13947 - protein, 283 aa, Physcomitrella patens subsp. patens
MGRGKIEIKKIENTTSRQVTFSKRRGGLLKKAHELAVLCDAEVALVIFSSTGKLFEYASSGSMRDIIERYKKSPNGAMKSGASTDFLGREVVKLQEQVERLKSSQRRMLGEDLSALKVPDLLQLEQQLDLGASRVRARKNQLILEEIEGLQKKEQELMVANEDLRKKIADAEAVARANLSEARPESPRHLARTLSRDVSASSHPAATVYPHPNLRDVQRSQTSLQLGMFSSESYPPSSSRWPSEQQFPSASEGCAGESSMKWDHPHYHIQNRLHANILPSVRI

SEQ ID NO: 13948 - protein, 403 aa, Listeria monocytogenes EGD-e
MKIIVQKFGGTSVQNEKSRLMAFNHIKQVLKEGYKVVVVVSAIGRYGDPYATDTLLELIGAKNTKLTAREQDTLLSVGETISASVFTNMLKEANIKAEAFSGGQAGIITSDDHLNAKITEVDTARLKDALTNLDVAVVAGFQGITANGDISTLGRGGSDTSAAALGVSLQANYIDIFTDVDGMMTADPRIVEHARSLPRVSYNEVSNMAYQGAKVIHPRAVEIAMTAKIPMRIRSTYLESTGTLVTSLADDSGHFDVKERMVTGVAHVTNLTQISVQADTVKAQQLAFKILADAGISLDFINISTNSVIFTVPEEKSHVVKQLLEDADLQTTVRQACAKVSIVGAGITGVPGVTAKIVGALSEKNIPILQSADSHTTIWVLVREKDLISAVNALHDVFCLEIK

SEQ ID NO: 13949 - protein, 313 aa, Physcomitrella patens subsp. patens
MQALDANWNVDLRQSNQSSETEASWEQIGMIFRIVYSLAMYGGLAFVGNVICGFTGVDLWGGFDISPQVITTGFGYAVPPMMMLLFILEDEVVKSWAPARAIRDVEDEELMDFFVGMSPWQFPFVVAAGAVAEELFFRVAIQGGLTHALQISDKGVTDSTVGLAALTGVIPLFVPFAQFFATALTAALTGSMYYVISSPKDPKYVVAPVVRGRNNRGDIKERVSAWYERRQQKKIYSPLMEGLLAMYLGFEWMHTGNILAPIITHTLYSLVIVGNGLRRIHDNREKLRQRVNKISGGRLARIGVGEKRSERAQ

SEQ ID NO: 13950 - protein, 484 aa, Physcomitrella patens subsp. patens
MPKKNPVSIQSINPKVLNAEYAVRGEIVIRAQALAEELKSNPGSHPFDEIIYCNIGNPQSLGQKPITFFREVVALCDHPSLLDKPETHALFSSDAISRASRIINKIPGQTTGAYSHSQGVTVCRDDIAAGIAARDGYPANPEDIFVTDGASPGVHMMMQLLLSSEKDGILCPIPQYPLYSASIALHGGTLVPYYLNENSGWGLELNELKKRLQEAHDAGTTVRALVVINPGNPTGQVLSEENQQDIVNFCKDEGLVLLADEVYQENIYAEGKTFNSFKKVARSMGLEDKDIVIVSFQSVSKGYYGECGRRGGYMEVTGLPKDVKDQLYKLASVNLCSNVSGQILVSLVMNPPKPGDSSYEQFARERDSILSSLARRAKVLTEAMNKLEGVSCNAAEGAMYVFPRLYLPKKAQIAAGEAGMKADVFYTRRLLDSTGIVMVPGSGFGQVPGTWHVRCTILPSEENFGAIIDRLTTFHKKFMDEFRD

SEQ ID NO: 13951 - protein, 301 aa, Listeria monocytogenes EGD-e
MSEPFKSGFVAIVGRPNVGKSTLLNHIIGQKIAIMSDKAQTTRNKVQGVYTTDESQIIFIDTPGIHKPKHKLGDFMVKIALNTFQEVDLIYFVIDASTGFGRGDEFIIEKLKNVQTPVFLLINKIDLIAPEDLFKLIEQYRDLMDFDEIIPISALQGNNVPNLLEQTNANLEIGPMYYPKDQITDHPERFIISELIREQVLQLTREEVPHSVAVVIEGIEKNPKTEKLTINATIIVERSTQKGIIIGKQGQMLKQIGMRARKEIERLLGSKVFLEIWVKVQKNWRDKEHYLQDYGFDREEY

SEQ ID NO: 13952 - protein, 498 aa, Physcomitrella patens subsp. patens
MEAPPPLPPGVTSAYTNSGYGVEPEWLNKGDAAWQLAAATLVGIQSMPGLVILYGSIVKKKWAVNSAFMALYAFAATAICWVLWAYKMSFGEQLVPIWGKAGSVLGFEFLLSQAGLPSSAHYDSNGALVTPALKAHFGMASMVLFQFFFAALTVILLAGSVLGRMSFRAWMLFVPLWLTFSYTVGAFTMWGGGFLWQWGVIDYAGGYVIHVSSGAAGFVAAYWVGPRLPKDRERFPPNNMLLVLTGAGLLWLGWSGFNGGASFSAHVVTGLAVLNTHISAATSMLTWTAMDVFFFGKPSVIGAVQGVMTGLVVITPAAGLVPGWSALLMGILAGSIPWWTMMVLHKRWWVLQKVDDTLGVIHTHGVGGVLGGICVGLFADPTLCKYMHVAGDYTNGAFYGGNGGIQLLKQIVGALFIAGWNLVLTTLILFAIGLVTPLRMSEEHLLVGDDAEHGEEAYALWGDGEKFDVTRHPTATIAAEFEQRSAVNYADRAVTLHI

SEQ ID NO: 13953 - protein, 948 aa, Physcomitrella patens subsp. patens
MSQTVLLLAVHILVNIKATFVNGEKELEDWSVGSQSPCEWTGVTCNNVTFEVTALNLSALALGGEISPLIGLLESLQVLDLSGNNISGQIPVGICNCTNLIHLDLSSNKLVGEIPYLLSQLQLLEFLNLRSNKLSGSIPSSFAGLPNLRHLDMQFNILSGPIPPLLFWSETLQYLMLKSNQLTGGLSDDMCKLTQLAYFNVRENKLSGPLPAGIGNCTSFQILDLSYNNFSGEIPYNIGYLQVSTLSLESNNLTGVIPDVLGLMQALVILDLSNNKLEGQIPRSLGNLTSLTKLYLYNNNISGPIPKEFGNMSRLNYLELSANSLIGEIPSEICYLTGLFELDLSNNQLKGSIPENISSLAALNLLNLHGNQLTGSISPALQQLTNLTLLNLAFNNFTGSVPEEIGMIVNLDILNLSKNSLTGQIPPSISNLEHLLEIDLQNNKLSGTIPIALGNLKSLGSLDLSQNQLQGPIPPELGKLLELSYFVWSFSSLSPSQNMFCRNLSNNHLSGTIPRDQVFSRFPTSSYFGNPLLCLNSTSPSLGPSATWGITISALILLALLTVVAIRYSQPHGFKISSNKTAQAGPPSFVIFHLGMAPQSYEEMMQITENLSEKYVIARGGSSTVYRCSLRNGHPIAIKKLYNQFSQNVNEFETELITLGNIKHRNLVTLRGFSMSSIGNFLFYDCMDNGSLYDNLHGRVKNKLDWNTRLKIASGAAQGLAYLHKDCKPQVVHRDVKSCNILLDADMEPHVADFGIAKNIQPARTHTSTHVMGTIGYIDPEYAQTSRLNEKSDVYSFGILLLEILTNKKAVDDEVNLLNWVMSRLEGKTMQNVIDPYVTATCQDLDSLEKTLKLALLCSKDNPSHRPSMYDVSQVLLSLLPPQYSDDFHTSNSFPSTQRRYVDMYSTKHTESFSLSKTSSGDTLLYQFKEAISGEFPQPQDQNLQRHD

SEQ ID NO: 13954 - protein, 462 aa, Physcomitrella patens subsp. patens
MRAFEVIGTGYSSLVRDRSAVEEEEGFEAKDAGALFVLESKGTWFHAGYHLTTAIAGPSLLTLPYAFHFLGWGPGLFALTIAGAVSSYAYCLLSRVLEHYASQGKRCLRFRDLSDVVIGKRWTIWFVIPVQFGVCFVTLIGVILTGGYGCKLIYLGLVPDGAIRLWVFVALFGAVMMILAQLPSFHSLRHLSLFSLFCCLAYSACAVIGSIIAGHNPNVPPKNYSVTGSPVQKVFGVFTAISIMAGVYGVALIPEIQATVAPPVTGKMQKGIALCYTVVLITFYPVAISGYWAFGNQASGNIVDNLAPDKGPDLLPTWLLGILSIAIVAQLLAIGLVYLQPISEVLESKTGDAKQGKYSIRNVMPRLVFRSLYLAVVTLLAAMLPFFGDIISLIGAFGYTPLDFVLPMLFYQIVFQPSRQKPIFWLNWTIIIVFTVVGVIGCIASFRSIYMNVQKYHLFGDV

SEQ ID NO: 13955 - protein, 382 aa, Listeria monocytogenes EGD-e
MENRIYLDHAATSPIHPEVIQTMLGAITNTYGNPSSIHYAGREARKALDEARHTIAKSIHATEKEIIFTSGGTEGDNLALIGTALAHKENGTHIITSQIEHHAVLKTCEYLETQGFEVTYLPVDEHGIVSVESVQAALRPETILVSIMYGNNEIGSIQPIAEIGALLRDQQAIFHTDAVQAYGLLNINVMELGVDLLTTSSHKINGPRGVGFLYVKNGTRLAYQMHGGEQERKRRAGTENLAGICGFSAASSIMTNERELKNEEYISFKKRMAEIWRSAELDFEVNGLEADTLPHVFSVRFPGVSIEQLLMNLDMEGIAVSSGSACTAGTVDPSHVLVALFGENHPAIQETVRISFGLGNHLEEVEMAATKISEVVTRLMKI

SEQ ID NO: 13956 - protein, 306 aa, Physcomitrella patens subsp. patens
MKSIYTTYSSNPSGMTLQHFIILFGVVELFLSQFPDIHSLRFLNALCTGCTIGFSVSVVALCAHALRNGDADGSSYDIVGSPSDKTFGIFAALGTIAFSFGDAMLPEIQATLREPAKLNMYKGSTLAYTVIAVSYWTVAFMGYAVFGNTVNPYLVNSFFGPDWLITLANIFAIIQVLGCYQIYCRPTYLYVEQQVMDYNKHPWSLQNALARVGVTATYIVVITVIAAAVPFFGDFVALCGAIGFTPLDFIIPVIAFLKVRNPKNPLVKLINVAIVVVYSIVAILGAIGAIQFIHHDTNRYQFFANL

SEQ ID NO: 13957 - protein, 371 aa, Physcomitrella patens subsp. patens
MVEWVMKMLMACWRPVQKYTHLGEENGDNHDPLLWHKDLGDHAAGQFSIAAVQANAILEDMVQVETGPFGTFVGVYDGHGGPEASRYVNDSLYRHLQKFATQHGGMSSEVLQQAFKQTEEGFLEIVRDSWLTKPQIAAVGSCCLVGVVWECKLYIASLGDSKAVLGRFSRNLQSVIATEISTEHNASVEAVRQDLQAAHPDDPRIVVLRHGVWRVKGLIQVSRSIGDVYLKKAEFNREPLIGRFRLPEPLQRPVMSAEPDIRVIDLTPDVEFVIFASDGLWEHLSNQEAVDIVHKYPRAGIARQLIRYALHEAAKKREMRYSDLKKIERGIRRHFHDDITVVVVFLDHNLVSNGSGISHHISVKGGVDKPS

SEQ ID NO: 13958 - protein, 321 aa, Physcomitrella patens subsp. patens
MRSENRLKIFSGTANKALSQEIAYYMGLDLGKITIKRFADGEIYVQLQESVRGCDVFLVQPTGPPANENLMELLIMIDACRRASAKNVTAVIPYFGYARADRKTQGRESIAAKLMANLITEAGANRVLACDLHSGQSMGYFDISVDHVYGQPVILDYLASKMISSNDLVVVSPDVGGVARARAFAKKLSDAPLAIVDKRRQGHNVSEVMNLIGDVKGKVAVMLDDMIDTAGTIYNGAALLHAEGAREVYACCTHAVFSPPAIERLSGGLFHEVITTNTIPIAEGNYFPQLTVLSVANLLGETIWRVHEEGSVSSTLSFAAL

SEQ ID NO: 13959 - protein, 659 aa, Physcomitrella patens subsp. patens
MQTAITSPTLSLVKLPVNYSTHGLDSISATLYCYIAELDASANATSRSFRLELGGTDGAMLFNPYNDTGGAFISSVWGTAEYLISSDTVVSLIPEPGSIFPPLLNALEIYLNLPDAVAGTNELDVAAMEKIKVALRLTGWGGDPCLPVPHSWVSCSPATKSSAARVISVRLSGYNLTGIIPADFANLTALQTLWLDNNKLDGIIPNLQTLQQLKSLHLNDNALIGSIPNSLSFIPTLEELFLQNKNFNGTVPDALKNKPWLKLNINGNPACGPTCSTPFTNSDSGSKPNVGLIVGVVVASFILAVAGVSNFEVPNLSGTNAQGAKPFSHPEIKAATSNFSKQIGSGGFGPVYYGKLANGREVAVKVSDVNSHQGAAEFNNEVQLLSRVHHKNLVSLLGYCQEDGQQMLVYEYLHKGTVREHLWERPLAKEPLDWKQRLDVSLNAAQGLEYLHTGCSPNIIHRDIKSNNILLTDKYVAKVADFGVLRLGPEESSGATHVSTVVKGTIGYLDPEFLSTNQLSVKSDVFTFGVVLLEVLCGRQPINNGLLDKSQSDIVEWVRNLMLAGDIESILDPTIRDCHPNMDSVWKVAELAIQCVEPLGIHRPFMRDVVKQLHEAIVLEDGHLGTFSEMDRSNNTRTSIASAEYNRGNSDEHYSGNDP

SEQ ID NO: 13960 - protein, 76 aa, Physcomitrella patens subsp. patens
MAARDEKASTKSSQAYQGVHFRGVRKRPWGRFAAEIRDPWKKTRVWLGTFDTAEEAARAYDSAARALRGSKAKTNF

SEQ ID NO: 13961 - protein, 429 aa, Listeria monocytogenes EGD-e
MFVDQVKIYVKAGNGGDGMVAFRREKFVPNGGPAGGDGGKGADVVFVVDEGLRTLVDFRFKRIFKAEHGEHGMSKSMHGRGAEDLVVKVPQGTIVKDIDTGEIIADLVAHGQRAVIAKAGRGGRGNKRFATPANPAPELSENGEPGQERNVQLELKVLADVGLVGFPSVGKSTLLSVVSAARPKIAAYHFTTIVPNLGMVDAGDGRSFVMADLPGLIEGASQGVGLGHQFLRHIERTRVIVHVIDMSGSEGRVPYEDYMAINNELEQYNLRLMERPQIIVANKMDMPDAEENLNEFKTKIAEDIPVFPISAVTKTGLRELLLAIADKLETTPEFPLNEILEQEDEDTVLYKYVAEEPDFEISREPDGTFVLSGAKIERLFTMTNFERDASISRFARQLRAMGVDEALRKRGAKDGDIVRLLDYEFEFMD

SEQ ID NO: 13962 - protein, 102 aa, Listeria monocytogenes EGD-e
MYAIIETGGKQIKVEAGQEIYVEKLAGEVGDVVTFDKVLFVGGDSAKVGVPFVEGATVTAKVEKQGRAKKLTVYKYKPKKNYHKKQGHRQPYTKLTIDAINA

SEQ ID NO: 13963 - protein, 947 aa, Physcomitrella patens subsp. patens
ALIELKNGFENGEIELFDWREGSQSPCFWRGVTCDNTTFLVTNLNISMLALTGEISPSIGNLHSLQYLDMSENNISGQLPTEISNCMSLVHLDLQYNNLTGEIPYLMLQLQQLEYLALGYNHLIGPIPSTFSSLTNLRHLDLQMNELSGPIPALIFWSESLQYLMLKGNYLTGSLSADMCQLTQLAYFNVRNNNLTGPIPDGIGNCTSFQILDLSYNGLSGVIPYNIGYLQVSTLSLEGNRFSGRIPEVLGLMQALVILDLSSNRLEGPIPPILGNLTSVTKLYLYNNRLTGSIPPELGNMTRLNYLELNNNELTGRIPSELGCLTDLFELKLSENELTGPLPGNISSLAALNLLDLHGNKLNGTILPELEKLTNLTNLNLSSNFFSGNIPNEVGLIFNLDKLDLSKNNLTGPIPRSIGRLEHLLYLDLHDNKLSGPIGVQVGTGNSTAHSYLDLSHNALYGPIPIELGQLEEVNFIDFSFNNLSGPIPRQLNNCFNLKNLNLSYNNLSGEVPVSEVFARFPLSSYFGNPRLCLAINNLCGSTLPTGVSRTNATAAWGISISAICLLALLLFGAMRIMRPRDLLKMSKAPQAGPPKLVTFHMGMAPQSFEEMMCLTENLSEKYVAGRGGSSTVYKCTLKNGHSIAIKKLFNYYPQNVREFETELKTLGNIKHRNVVSLRGYSMSSAGNFLFYDFMEYGSLYDHLHGHAKRSKKMDWNTRLKIALGSAQGLAYLHQDCTPQVIHRDVKSCNILLNANMDAHLCDFGLAKNIQPTRTHTSTFVLGTIGYIDPEYAQTSRLNEKSDVYSFGIVLLELLMGKKAVDDEVNLLDWVRSKIEQKNLLEFVDPYVRSTCPSMDHLEKALKLALLCAKQTPSQRPTMYDVAQVLSSLLPVVSPRKPPSYPSPGSKHRRYVDTYSAKPAEGMIASSSTSGGDLLDQFENVINSRNM

SEQ ID NO: 13964 - protein, 102 aa, Physcomitrella patens subsp. patens
MQEIEKLVQENAVVVFSQSGCCMCHVVKRLFCSLGVGPTVHELDERKEGGDMEKALLRLNNKVALPTVFVGGKLVGGVDAVMAAHVSGNLVPRLKEAGALWL

SEQ ID NO: 13965 - protein, 566 aa, Physcomitrella patens subsp. patens
MRGYTLRLGILQLGIKFWSTWEAFCVSFEVLAWFGWERAARACGLECDALVIARESRDVFSWWLGDQRLAVTSTTRTNPINCSLLKENANASEGPKNLDTEPHKYFDQVVITVRSGDGGNGATLKFPKPKVDDGDKKFKKEKKIPGTYKRGPDGSLILPLGGHGGDVILVADESADTLLPLHRKKRHNAKRGSNVSAMGTLSPSLRDGLDAPVLRIPVPVGTVVKRKRGGKFLADLAKPGDEIMVARGGRGGISVVEAANNKRLRDSGLPTIQDPDDKVLTLGAPGEEIALELTLRVVADIGLVGLPNAGKSSLLAAVTVAKPEIAAYPFTTLMPNLGCLEGDPLKNDGGFSSGATMADLPGLIKDAHLGKGLGRMFLRHLRRTRVLVHVVDASSPDPVEDYTVLREELHLYNPEYVRRPHIVVLNKLDLPEAREKFESLREVIQNMGVDPEVADEETGNADSNGSRLARLDDVERDSSSQGVSKADQRKSNLKEETARKVQDFRRPEAVVGISARVGEGMKELLEVIRDTLQKEQKEAQKLKREKLRARRLQSSTNLMKAPQWQL

SEQ ID NO: 13966 - protein, 326 aa, Physcomitrella patens subsp. patens
MAGVVRDASAKEDLDNAVTKQGGLVVVHFWASWCEPSKAMEPVFAQLAAETPQAQFFRVEAEEQSDISEAYDVTAVPLFIWIKEGVVVDKMQGANAPELANKVAKWVNDAGAATASLSEAEKGKLHELVNSNKIMLFMKGSPEEPRCGFSRKVVNVLKDQDVEFGSFDILSDEAVRQGMKTYANWPTFPQLYVDGELLGGCDIILEMNENGELKQVFAEKGLLPKESLESRLENVINQSTTMLFMKGTPDAPRCGFSKKVVNALNEEGIEFGSFDILEDEEVRQGLKTYSNWPTYPQLYYKGELLGGCDIVLEMKANGELKSALTE

SEQ ID NO: 13967 - protein, 370 aa, Listeria monocytogenes EGD-e
MLVGVPKEIKNNENRVAMTPASVFSYVNAGHTVYVEKDAGIGSNYQDADFVQAGAKIVETAKEAWDVDMVVKVKEPIASEYTYFKEGLLLFTYLHLANEPTLAKALMESKVNSVAYETVELADHTLPLLSPMSEVAGRMAAQIGAQFLQRTNGGMGVLLGGVPGVERSEVVIIGGGIAGTNAAKIAAGLGANVTILDMNLKRLRELDDIFGNQVQTLMSNDFNIETAVKKADLVIGAVLIPGAKAPKLVKEHVVKQMIPGSVLVDIAIDQGGIFETTDHVSTHDNPTYEKYGVLHYAVANMPGAVPRTSTLALTNATLPFGLKLANQGLEAAVQNDPFLLRGLNTYQGHITYKAVADSLDLPYTDSKELI

SEQ ID NO: 13968 - protein, 397 aa, Listeria monocytogenes EGD-e
MEKTIAINAGSSSLKFQLYDMPSERVITAGIVERIGLKDSIFTITVDGEKIKEIIDIPDHEIAVQMLLEKLINHKVIGSYDEITGIGHRVVHGGERFPESVYIDDQVIKDIEALSELAPLHNPANVTGIKAFRKILPDVVSVAVFDTAFHQTMPPASYLYSLPYSYYEDYGIRKYGFHGTSHKYVSERAAELLGRPVEELRLLTCHLGNGASIAAIEGGKSMDTSMGFTPLAGVSMGTRSGNIDPALIPFIMEKTGKTAEQVLDVLNKESGMLGVSGISSDLRDLEDEAAKGNDRAELALQVFVDRIHKYIGSYAARMNGVDAIIFTAGIGENSSYIREKVLRGLEFMGVYWDPALNQVRGEERFLNYPHSPVKVIIIPTNEELMIARDVETIKNNR

SEQ ID NO: 13969 - protein, 300 aa, Physcomitrella patens subsp. patens
MALRSDDRAGSTTKAHQAELGVHFRGVRKRPWGRFAAEIRDPWKKTRVWLGTFDTAEEAARAYDSAARALRGTKAKTNFSPPPPSGDDHSMTSQSSTVESLSNGPMKQSSHHPSKSIHINLYRSSGGASESSSWRNRLDLNVSVAQDPLPVTDDGQLQYKSVSAGRSCVEEGVTCALSSKRAGPSPIHALFEEAGHVVESKRQRVMKKPTPITPTERLSVGRDWLGSEENTVLGMEQHASEITPETRACHSDCDSSSSVILNSEAACATPPTPHDAKPVMRRTPYPFLLDLNQPPCKDRQ

SEQ ID NO: 13970 - protein, 379 aa, Listeria monocytogenes EGD-e
MIYFDNSATTKPNAAVLETYTKVASNYFANPSSLHRFGAKSKELLDASRKQIAAMMSALPEEIIFTSGGTEGNNLAIKGLVYSYQNRGKHIITSSIEHPSVRVVMEELEQEGFTVKYLPVDKNGVIKLEELKAALTDETILVSIMGVNNEVGSIQPLQEIGEMLSVLENTFFHVDFVQAIGKIPLTLDANSIDLLTFSGHKFHALRGTGILFKRKNVHLHPEILGGGQEMGYRSGTENLAGNVALAKALRLTLENEPRKEALIEIRDYLLTKIAQMSDMTVHTKQSVAAPHIVCFSAKGHRGEILVHALEKEDIYISTTSACSSKQKLASSTLKAMGVTDEEATGAVRVSLSYENRLSEAKIFIQKLQEIIENLNKVVK

SEQ ID NO: 13971 - protein, 102 aa, Physcomitrella patens subsp. patens
MAVAKAQALISQNAVVVFSKSYCPFCLRVKSLLKSIGAEMKVVELDEESDGSDIQAALAKLSGQRTVPNVFIGGQHIGGRDDTTAMHKKGQLLPLLNGAGAL

SEQ ID NO: 13972 - protein, 378 aa, Physcomitrella patens subsp. patens
MAHAAACLQASSAAHVAVSRAVSAPSSSSSDTSVFFSGLRLPALQCRSSSSHRAAFSQRRVFTAALTEQASKVALTADLEGEPEPPMHLFKNKEPFIGTVKSVERIVGPNATGETCHIVIDHGGQMPYWEGQSYGIIPPGENPKKPGQPNTVRLYSIASTRYGDEFDGKTASLCVRRAVYWCPELQAEDPAKKGICSNFLCDCKPGDKVQITGPSGKVMLLPESDPNATHIMVATGTGIAPYRGFLRRMFMEDVPTFKFGGLAWLFLGVANSDSLLYHDEFTKYKEAFPENFRYDTALSREEKNSKGGKMYVQDKIEEYSEELFNLLDKGAHIYFCGLRGMMPGIQDTLKRVAEARGENWEEKLAKLKKNKQWHVEVY

SEQ ID NO: 13973 - protein, 496 aa, Physcomitrella patens subsp. patens
MPRLFFCAWVCAFVPLARVLGAPNGAAVESVPGFSGDLPSRHFAGYVSVNDTNGRELFYYFVESEGSPATDPVVLWLNGGPGCSSFDGFVYEHGPFKFEAAADSDSLPKLTLNPYAWSKAANILYLDSPAGVGFSYSQTPTDYITGDLQTALDTHAFLLKWFQAYPEYQSNPFFISGESYAGIYVPTLSRNVAHGIKAGVKPVINFKGYLVGNGCTDDQFDGDAIVPFIYGMGLISVDMYKSAQKACNGSYWNASDPTCLAKLNDIYNDVEEVNIYDILEPCYYPDSESDSSRYHSRLPQSFRRLGETKGPHKIRKRQFGRAYPLRLPLRAGRVPTWPSLSHALFDSENVPCTDDRIAGTWLNNAEVRAALHAKPAADIGPWDLCTDNIIFYHDAGSMIPIHRELTTSGYRALIYSGDHDMCVPYTGSEAWTSSMGYEVTDQWRAWFVGRQVAGFTQGYANNLTFATIKGSGHTVPEYKPAEALAFFQRFLSAQPL

SEQ ID NO: 13974 - protein, 106 aa, Physcomitrella patens subsp. patens
MSRALDNGKRRVRRPFSVSEVEALVHAVEKLGTGRWRDVKLRAFEQAKHRTYVDLKDKWKTLVHTARIAPHQRRGEPVPQELLERVTRAHAFWTAHAAKQQAELDL

SEQ ID NO: 13975 - protein, 402 aa, Physcomitrella patens subsp. patens
MAYAWYTVAFHIVTALNSGFILGYPALIMAYLGWTAGVLCLLGGGIISFYKNCLLGELHETGGKRQVRYRDLAGHIYGTLIACITIRMILKKYWNHRFFFGGGESLKAIAAAFTVGRHVTLPGWVGVAGAVICVFAFLVPTLHAFRFFSTCSLLLSCVYIFTSVGIALTDGVKAKFSRDYSLKGSNTEKAFNALGAMATIAFAFNTGILPEMQATVKEPSVRNMKKALDLQFTVGTLPILMLTFVGYWAYGNDVVPYMLNSVSGPKSAVTVANAAAFLQTVVSLHIYCSHIYEFMDTSFSKKGRHEWSFYSITVRLIKRTTYISLSTFLGALLLFFGDFIVLTGAVAVFPPESGLVHHMYTKRLIWHWGMVIISAALTVGTVAVGFRFIVVDSINYPAFADL

SEQ ID NO: 13976 - protein, 621 aa, Listeria monocytogenes EGD-e
MCGFVGCVHDRITEITGADKETFRQMNSMITHRGPDDEGYFTDDHVQFGFRRLSIIDVENGHQPLTYENERYWIIFNGEVYNYVELREQLVAEGMTFETESDTEVIIATYAKYKEKTAERLRGMFGFVIWDKQEELVYGARDPFGIKPFFYAEEDDKLFMGSEKKSILHALKEKELDEVSLQNYMTYQFVPEPDSLTKNVKRLEPGHQFTKKIGQPMEITTYWKASFAPVTKSEDAWIKEVRDVMYDSVKMHMRSDVPVGSFLSGGIDSSIIAAIAKEYHPAIKTFSVGFERDGFSEIDVAKETADKLGVENISYVISPEEYMKELPKIVWHMDDPLADPAAIPLYFLSREARKQVTVALSGEGADELFGGYNIYNEPNSLAMFNKMPGVFKSMLNNLARIMPEGMRGKSFLERGTTPMEERYIGNAKMFTEKEKQILLPKYQAGHDYTNITDPFYAETTNYHPVERMQYIDIHTWLRGDILLKADRMTMANSLEVRVPFLDKEVYNVARNIPDTMKTTNGTTKYILRKAAATFVPEHVLNRRKLGFPVPIRHWLKDEMNAWVKNIIKESPTDHLINKQYVLDLLDDHCAGKFDYSRKIWTVVIFMIWYDVYVADKYDFGK

SEQ ID NO: 13977 - protein, 450 aa, Physcomitrella patens subsp. patens
MTPSNQEHCVGIDDPNRKSMYKRMLSHPCDELRYFRNGLRWLGLDQSTKPKMLFSWIVFLLFTFVVPFVNLTSISCPDCDSQHRHPFEELVQIAETAMAAVSFLCLSHIVRRYGLRRTLLLDRIARESEEVRKGYESELHSSFSSLGRILLPAAVIEIAFRLWWYVYVSVSIPFIQNNQRLNIIFNVLLCTSGLLSWLYRTSVFLFTCILFRLLCSLQILRFKGYTSLLEVTSNVSVIMSEHLRLRSQLTIISHRFRSFLLAALFIISFTQFCSVFVLLRTYEKFNFFRCGDLVVCSVVQLTGLMLCLGGAAKITHRAQRIVGIVSQWHALATCNPHAVTESLKTDGCDSNDPPQYSSAMRGPAHPRLYNDSSDEVDSSDEESPRYSSDVDQTIHDMESYQKRQALVCYLQQAKAGISLFGVVLDRGFLYGIFGCTFSLTLFVLGKTIIT

SEQ ID NO: 13978 - protein, 307 aa, Physcomitrella patens subsp. patens
MMALLMPYLRDSLESKFNLLPLWEQSNKDEYLASVADCVRAVVTSTNSVVDAKLLEKLPKVEIVSSFSVGTDKVDVAYCKERGIAVTNTPDVLTDDCADLAIALLLTTMRQICSADRYVRKGCWPKQGDYPLSYKMSGKDLGIVGLGRIGKAVAKRAEAFGCKIKYYARSDKKDVPYEYYGSVLELAKNSDMLVVCCAFTKETAKIIDKRVLDALGPEGFLVNISRGGVVDEPELVKALLECRLGGAGLDVYENEPHVPQELWNMDNVVLLPHVASGTLDTRRAMADLVSGNLEAHFSGKPLFTPVT

SEQ ID NO: 13979 - protein, 291 aa, Physcomitrella patens subsp. patens
RFKVLQPSRIPIPRQGAYLTIPPGLSPTTLFDSSPVLVSTSQSEPSPTTGTYPMPPFFNGSLTRPVAKVGEVSKEPIDSQPSQPTASHSSQGSEQQAPPAAVSTIVDRPSEDGYNWRKYGQKHVKGSEYPRSYYKCTHINCLMKKKVERSRDGQVTEIIYKGDHNHPKPQPTRRLALSGAHLISDSSGEEHHMIRLKTDKKSKDPVPPPRMIREPRVVVQTTSDVDILDDGYRWRKYGQKVVKGNPHPRSYYKCTNVGCPVRKHVERASNDPKAVITTYEGKHNHDVPAAR

SEQ ID NO: 13980 - protein, 135 aa, Physcomitrella patens subsp. patens
MGVEKVQELILQNPLIIFSKSYCPYCRNVKELLKGLGAEAKVVELDREMPNVFVGGEHIGGNDATKAAHKKGTLHPKLKNAGAFKKGKGEATKVEALTTKDTAKVEETKADVVQNMLKGVEDKTKVGLPVKDIVV

SEQ ID NO: 13981 - protein, 418 aa, Physcomitrella patens subsp. patens
MASLSLSINGVAQESAMPASQNSDPPRVQVAKRLEQFKTTIFTEISILASKHNAINLGQGFPNFDGPEFVKNAAIEAIRDGGKNQYARGFGVPQLNAAIAESFNKESGIVVDPETHVTVTSGCTEAIAATVLGLVNPGDEIIVFEPFYDSYQATVSMSGAILKTVTMRAPEFAVPEEELRAAFSSKTRAILVNTPHNPTGKVFPRHELELIASLCKEHNTLAFCDEVYNKLVFKGEHVSLASLDGMYERTVTMNSLGKTFSLTGWKIGWAVAPPHLTRGIRLAHSYLTFATATPLQWASVEALRAPDSFYAELIKSYSAKKDILVEGLNSVGFEVYEPEGTYFVMVDHTPFGFENDVAFCKYLIEEVGIAAIPPSVFYTNPEDGKNLVRFAFCKDEETLKTAVERLRTKLKKAVSLSS

SEQ ID NO: 13982 - protein, 1530 aa, Listeria monocytogenes EGD-e
MKQTNLPKKHGLYNPENEQDACGIGFVANIKKISSHKIVEQGIHMLCQLKHRGGEVGGDTGDGAGILLEISDSFFRRECSKLGITLPEKYHYAVGMFNFPQNKTERECLMDETEKLIASEGQMFLGWRKLPTDVTKVGAGARKTEPAIYQLFIQKNAKLDEAGFERALYLIRKQIEKFAATSKLITETFYVPSLSTRTVIFKGMLLPEQINQYYLDLADPAYVSAFALVHSRFSTNTFPSWERAHPYRYLIHNGEINTQRGNVNWMKAREKRAESGLLGEDLAKLLPIIDESGSDSATLDNALEFLVQAGRSLPHAAMMLIPEPWDKNPHMTDPKRAFYEYHSTLMEPWDGPTSISFTNGRVIGTILDRNGLRPARYYETKDHTIIYSSETGVVPVDPSEIIRKETVGAGTMLLIDLEEGRIVADAELKEELTTEKPYRAWLEAEMTEIADLAAADLHYEAMDKSERFKKQRAFGYTQDELNKILIPMVTEKKDPMGAMGYDAPLAVLSQRPQVLFNYFKQLFAQVTNPPIDGIREETVTSAMTLLGDEGNILNPTAQNANRIRLKTPILSRKEFAALEQQTKFAQPTVTLPILFKAEERDGLEARLEALFAEADEKIAAGAELLILSDEGVNADWIGIPSLLAVSGLHHHLVKAGTRTQVSIIVKTAEARDVHQCALLIGYGADAVFPSLAIDTFDGLIKEGRIKGFTLDEAESRYIEAITDGILKIMSKMGISTVQSYRGAQIFEAIGIGDDVIRNYFPGTASQIGGIPLEVIAQEAWLRHREAYHDIGYQSFTLNTGGEYQWRSNGEYHVYNPLAIHSLQQATRENDRETYNLYSDLMQNQNNAFLRGLLTFTSDRKPIPLDEVEPAEAIFKRFKSGAMSYGSISQEAHEALAIAMNRIGGKSNSGEGGENPNRFTPDENGDWRRSAIKQIASGRFGVTSHYLVNAEELQIKMAQGAKPGEGGHLPGNKVYPWISKTRGSTTGVGLISPPPHHDIYSIEDLSQLIFDLKNANQNARINVKLVSKTGIGTIAAGVAKGNADVILVSGYEGGTGAAARTSIRHAGVPWEIGLAETHQTLLLNGLRNKVVVETDGKLMTGKDVLVAAMLGAEEFGFATAPLVTLGCVMMRVCHLDTCPVGVATQNPELRKKFSGSADYVVNFFHFIVAEMREMMAELGFRSLTEIIGHKEFLTTHEKKEAHWKAKYIDFSNMLYSDDFYKNQVQYCTKQQDHKIDQTLDMRELVPLIQPALENGEKVTGTFAVRNVDRAIGTIAGSFISKKYGAAGLPEDTISLDFVGSAGQSFGAYTPLGMTLRIHGDANDYFGKGLSGGKLIVSPDAKTPIKPHDSAIVGNVTLYGATGGFAYMHGKAGARFAVRNSGATAVVEGIGDNGCEYMTGGAVVVLGDIGENFAAGMSGGVAYIYTNNKQATTAKINHELVNSRSTFSTSELTKLKQLIEQHANLTGSDFAQDILQNWEAEKANFIFVIPNEYEMMLTRITTLEQTGKTHDEAELQAFYEHKDGKLVAGVAK

SEQ ID NO: 13983 - protein, 368 aa, Listeria monocytogenes EGD-e
MLNKELIVRGAPQEYLCQVGAWDTLPTHLERRGLKNVLVVRGNASWEVAKKKFPVLSTVTSTFEVYNGGSTYEERDRLVAIMETNKMDAIIAVGGGKIADVCKAAAAVLRLPVIILPTLASTCAAYTPLSVMYDEEGAMIRYDVFASSNALLLIDPEMILDSPKELLIAGIGDTLAKWYEADVIINSLPTKSVEIEIAHFAAKMCRDNLLQYSGEALAAMDKQVLNEAFVKIIETNILVGGMVGGFGDDYGRCAGAHSIHDALTMVPETHHLLHGNKVAYGILVQLVIENRWDEIERLLPFYSELGLPMSLYDMGLATLAEETLVDVSRRATEPHETIHMMPGEMTADVVLNAMKQLEDSMAMKRVTK

SEQ ID NO: 13984 - protein, 344 aa, Physcomitrella patens subsp. patens
MALDDIVINLDANFTGAWGGERREVETPHGPISVLLCGDQSKPALVTYPDVGLNYLACFEGLFSCPEASSVLFYNFCIYHLDPPGHQDGATEIPDNQPLLTVEDLADQVAEVLDHFGVHEAICLGVGAGSYVLSLFAVKYRERAIGLILVSPLCRKPSWTEWFYDKAIINILYYCGTTSFVKDALLQRYFSQEVLASPLGSEVLKNFRKHLEDHPSKNLMRYIQSLNERNDITESMRKLKCRTLVIVGENSPFHCEAVHMSTAMSRRYQALIEVQACGTLVTQEQPHSMLVPIELFLMFYSFYKRPLSISTPTSPLSPPCVPPELLSSESLGLKLKPIKTRVAQ

SEQ ID NO: 13985 - protein, 148 aa, Physcomitrella patens subsp. patens
RRIPTTTASGSGDPHINGSVIVILAILSLVFILSGLLHLLARCMARQRHPPARYHSPLVSALHGQLQHLFHLHDAGVEQAFIDTLPVFTFGSIRGLKDSTDCAVCLTEFGDDDRLRLLPKCKHAFHLDCIDTWLLSNSTCPVCRRSLL

SEQ ID NO: 13986 - protein, 258 aa, Physcomitrella patens subsp. patens
MANSKYEYVKDFEVNDNILPHTWIVIRIDGRAFTKFSQAHQFQKPNDLQALLLMNASAVAVVEDLADVVFAYGVSDEYSFVLRKTSTLYQRRASKLISVICSLFASSYVMNWGKYFPETKLQYAPAFDGRAVCYPSESILRDYLSWRQVDCHINNQYNTCFWNLVGSGKSTAESQNMLKGTTADVKNNLLFDTFKINYNDLPQIFRKGSIVYRKKVEKVVKVEDGQEIKRLRSCAVVEHEDIIRDNFWTQYPYILGGK

SEQ ID NO: 13987 - protein, 62 aa, Physcomitrella patens subsp. patens
QHFRGGRQRPWGKFAAEIRDSTRHGSRLWLGTFDTAEEAALACDDAAIQLRGSRALLNFPVR

SEQ ID NO: 13988 - protein, 233 aa, Physcomitrella patens subsp. patens
MAAKIRPVYCGNFEYDARQSEIERLFKEYGRVERVDMKTGFSFIYMEDERDAEDAIRHLDNMEFGRQRRRLSVEWAKQGDGAIRRREDARRNNTKLRPSKTLFVVNFDPINTRVRDLERHFEPYGKLVRVQIRKNFGFVQYETQDEATKALESTNMSKVMDRVITVEYAAREDGEPPSSGRGGSPSRYRGSSRGSPSYGRDRSPVRGSGRNRSPPARGRSRSPDYRPYAGSRR

SEQ ID NO: 13989 - protein, 336 aa, Physcomitrella patens subsp. patens
MGWIQAGRPQLKLAAADAAAKHNHPPPVHCLPACLPESVSELKGRNFEFGVFDGGFGVGVMRLRHGGPDWSGLFVDEAAGGLRRYYNPPWFDETVPAEPYDPLKLRHAFEESVIKRLITDVPFGMLLSDGLDSSLVAAVAQQHQAGSKAAKQWGSKLHSFCVGLEGSPDLKAAREVANYLGTVHKEFHFTAQEGLDAISDVIYHIETYDVTTIGASTPMFLMSRKNKALGVKMVLSGEGSDEIFGGYLYFHEAPNKEELHKETCRKEFLNLAMSIDPAEKMVNVKEGRIEKWIMCRDCDDEENLYLPKHILYRQKEQFSDGVEYSWIDGLKEHAAS

SEQ ID NO: 13990 - protein, 750 aa, Physcomitrella patens subsp. patens
MKFKIEGLTVYFPYEFIYPEQYDYMVDLKRTLDARGHCLLEMPTGTGKTITLLSLITSYMLANPSVGKLIYCTRTVHEMEKVLEELRKLQAYQEKALGKAAKMLALGLSSRKNLCIHPQVSGEGSRESVDAGCRKLTASWVRSLALDNPNIELCPYYEGYEKGGADALLPSGVYTLHDLRGFGREKRWCPYFLARHMIQFANVVVYNYQYLLDPKVAGIISKEMEKECVVVFDEAHNIDNVCIEALSVNIRQQTLDGATRNLSQVTQLIEKSKATDANRLRQEYSRLVEGLAQRGNLAGTDTWLANPALPQDILQEAVPGNIRRAEHFVAFLKRLVQYIKNRMITEKVESESPVSFVTALQNQAGIDQKSLKFCYDRLHSLLLTLEVTNTDEFMYIQTVCDFATLVGTYTRGFTIIIEPYDERMPNIPDPVLQLSCLDSSLAIKPVFEKFQSVVITSGTLSPIDLYPRLLNFHPVISNSYKMTLTRDCLCPMVLTRGSDQLPVSTKFDMRSDPGVVRNYGRLLLEMVTAVPDGIVCFFVSYSYMDGIVNSWNEMGILQEVMQHKLVFIETQDVVETTLALDNYRRACDCGRGAVFFSVARGKVAEGIDFDRHYGRLVIMYGVPFQYTLSRILRARLEYLRETFQIKENDFLTFDAVRQAAQCVGRVIRSKADYGMMIFADKRYNRHDKRSKLPGWILSHLREAHLNLSTDMSVHIAREFLRRMAQPYDKTGKGLNATLLSQADLEKMEKK

SEQ ID NO: 13991 - protein, 147 aa, Physcomitrella patens subsp. patens
DSKPKRCKGENDESVKAKAERSCSENSGDSGSPRALKDSNNRNKILSKQDYIHVRARRGQATDSHSLAERVRREKISERMKYLQDLVPGCNKVTGKAVMLDEIINYVQSLQRQVESLSMKLASVNPGPSTARLDYNFETALNKDMLQ

SEQ ID NO: 13992 - protein, 393 aa, Listeria monocytogenes EGD-e
MDLPLSKRVKGVAPSPTLAITAKAKQMKQEGIDVIGLGAGEPDFNTPQNIIDAAIESMNKGFTKYTPSSGIIELKQAIVDKLKKDQFLNYETNQIFVGTGAKHVLYSAFQTILDPGDEVIIPVPYWVTYPEQVKLAGGIPVFVETGFDADFKISAADFEKAITKKTKAIVLNSPNNPSGMCYTKEELIAIGEVAEKHQIYILSDEIYEKLYYGNKADLVSIASLSDRLYDLTIVINGVSKAYSMTGWRIGYAAANKEIIAGMSKLADHLTSNPTANAQYAALEAYVGSQEVPEKMYQAFEERMERFYPELNSIPGFKPKKPDGAFYFFIEVKEAAHKKGFQDVDAFVAALLEEAKVAVIPGSGFGMPDYIRLSYATNPDLFQEAINRIKSFMK

SEQ ID NO: 13993 - protein, 127 aa, Listeria monocytogenes EGD-e
MFRTMMNGKIHRATVTEANLNYVGSITIDSAILEAVDMLPNEKVQIVNNNNGARIETYIIPGEPGSGVICLNGAAARHVQVGDVVIIMSYGMFTDEEAKTHEPKIVVLDEKNHIEMILPEEKAHTTL

SEQ ID NO: 13994 - protein, 78 aa, Physcomitrella patens subsp. patens
GEDESIDTKKPVTGRGSTAKRSRAAEVHNQSERRRRDRINEKMRALQELIPNSNKTDKASMLEEAIEYLKMLQLQLQV

SEQ ID NO: 13995 - protein, 95 aa, Physcomitrella patens subsp. patens
MASREEKGITKRRQAGQGVHFRGVRKRLWGRFAAEIRDPWKKTRVWLGTFDTAEEAARAYDSAARALRGSKAKTNFACAPSSDDQSTNLNFTLKS

SEQ ID NO: 13996 - protein, 238 aa, Listeria monocytogenes EGD-e
MSEQVRVLVVDDEDRIRRLLKMYLERENYRIEEASDGDQALSMALNNNYEVILLDLMMPGKDGIEVCRELREFKSTPVVMLTAKGEEANRVQGFEVGADDYIVKPFSPREVVLRVKAVLRRAKQSSEESAGGTPGDIITFPHLKIDNEAHRVIVDGKEIGLTPKEYDLLYYLAKSPDKVFDRESLLKEVWRYEFFGDLRTIDTHVKRLREKLHDVSEDAARMIVTVWGLGYKFEVPED

SEQ ID NO: 13997 - protein, 251 aa, Physcomitrella patens subsp. patens
MGSSEGNKTVADGLRSLGGASEELAGSLQGWTRKLSERKGGTPKKKIVSFLAPDGEEIRNKTQLNKYLKAHPGTAVATDFDWGTPAVESVTAYTTRRSERLSLKSRSSSEAIDKEIQPKTPVKRARKTRDNGAASKDTSLGKGEPVEKTGSEEAMDIPADQALHKKEETVEDNGNHKTTDLDVPKSVTTPVEEIKRVTAENLPPKSETEKKIDAESPDDGKIKETSPVKDATDNTKGIDSQTKEDAKKDDE

SEQ ID NO: 13998 - protein, 341 aa, Physcomitrella patens subsp. patens
MHQDNWNNISFGSRPLTDLSVPELRHNSSRLKIFSGTANLQLSQEIACYMGLDLGKIKIKRFADGEIYVQLQESVRGCDVFLVQPTCPPANENLMELLIMIDACRRASAKTITAVIPYFGYARADRKTQGRESIAAKLAANLITEAGANRVLTCDLHSGQSMGYFDIPVDHVYGQPVILDYLASKMISSDDLVVVSPDVGGVARARAFAKKLSDAPLAIVDKRRQGHNISEVMNLIGDVKGKVAVMVDDMIDTAGTITNSAALLHAEGAREVYACCTHAVFSPPAIERLSGGLFQEVIITNTIPVKEQNYFPQLTVLSVANLLGETIWRVHDDCSVSSIFR

SEQ ID NO: 13999 - protein, 573 aa, Listeria monocytogenes EGD-e
MIDTTKTNEKATKKQNKSGAELLIDALKKQQVDMIFGYPGGAVLPLYDAFYDCDIPHILTRHEQGAIHAAEGYARVTGKPGVVVVTSGPGATNVLTGIADAMSDSIPLVIFTGQVHTPGIGKDAFQEADMIGLTIPITKYNYQVRDVRDLPKIVNEAFHIASTGRKGPVVVDIPKDMGIIQTESVRPDTIDLPGYQPTYSPNPLQLEKLMQSLSAASKPLILAGAGVNHARATAELLEFAERYQIPIVNTLLGLGSFPQSHDLFLGMGGMHGSYAANMALTDCDLLINFGSRFDDRLASAPKEFATKATIAHIDIDPAEIGKIIETQIPIVADINETLTQLLQMELPVHPDTSHWYKLNMTRKNRHPFNFDRTKKAEIKPQRVIELIGEITQGEALVSTDVGQHQMWAAQFYPFQFDHQIITSGGLGTMGFGFPAAVGAQLAFPDKTVVAIVGDGGFQMTNQELAILNDYQINVKTVIINNGSLGMVRQWQEKFHGERYSHSIFTSQPDFVKLSEAYGVKGVRLTNPETLEKDLRKAFAHPGPIVIDVHVAKDELVLPMVPSGKPNHQMEGVE

SEQ ID NO: 14000 - protein, 428 aa, Physcomitrella patens subsp. patens
MPLKSLIREFQEMKGGRGGISRRSFELKFPHHHKGRSSGMVLDESQLRVEAVVKQSCWANMPPELLRDVIQRVEASESAWPGRKHVVACAAVCSSWREITKELVRTPEQSGRLTFPIALKQPGPRESTVQCFIKRDRTSSTYQLYLGLPPSLVENGKFLLAAKKFRRPTRTDYIISLNHDDMSRGGTAYVGKLRSNFLGTKFTIYDSQPSHNGVAASNRGAWRMGTKQLSSRVHSGSYNVAHIAYELNVLGTRGPRRMQCTLHSIPACAMESGGSAPTPTELAAGSLEEVHVPYSSIMSSPRSKAAVVDSSALESSEFVSGLLNKEEPLVLRNKAPRWHEQLQCWCLNFRGRVTVASVKNFQLVAATSVKAVSAAATTSSSSADHDKVLLQFGKIGKDMFTMDYRYPLSAFQAFAICLSSFDTKLACE

SEQ ID NO: 14001 - protein, 352 aa, Physcomitrella patens subsp. patens
MMEEGGDSIALDMDIVPSGGQEYMVPTSFGHISVTVCGDQDKPALVTYPDVGLNYLSCFEGLFSCPEASSVLFFNFCIFHINPPGHEIGASQSDSELSSLSVDDLADQVAEVLDYFGLEEVIGMGVTGGAYVLSLFACKYTERALGLILVSPLARSPSWTEWLHNQAMISLLYFCGMTEFVKQRFIQRYFSSEVRDAAASVGGTDLLATIRRVMDDGRSESIMHYLQAIHHRQDLTESLRNLKCRTLILVGDQSPFHQEALHISEAMNKRYNALIEVEGCGSIVTEERPQSMLVPIELFLTGYAFYERPLRSLNSSPRSPLSPPCMSPELLSPQSLGLKLKPIKTRVSSPEH

SEQ ID NO: 14002 - protein, 565 aa, Listeria monocytogenes EGD-e
MAKLEKDQEKVITQGKSGADLVVDSLINQGVTHVFGIPGAKIDKVFDVMEERGPELIVSRHEQNAAFMAAAIGRLTGKPGVVLVTSGPGASNLATGLVTATAEGDPVVAIAGNVTRQDRLKRTHQSMDNAALFRPITKYSEEVVHAESIPEAITNAFRSATEPNQGAAFVSLPQDIVNEPNVPVKAIRPLAKPENGPASKEQVAKLVTRLKKAKLPVLLLGMRASSPEVTGAIRRLLQKTSIPVVETFQAAGVISRDLEDNFFGRVGLFRNQPGDILLNKADLVITVGYDPIEYDPKAWNASGDRTIVHLDDIRADIDHYYQPVTELVGNIALTLDRVNAKFSGLELAEKELETLKELHAQLEERDVPPESDETNRVHPLSVIQTLRSAIDDNVTVTVDVGSHYIWMARHFRSYEPRRLLFSNGMQTLGVALPWGIAATLVHPGEKVVSISGDGGFLFSAMELETAVRLRAPLVHLVWNDGSYDMVAFQQKMKYGKEAAVRFGDVDIVKFAESFGAKGLRVTNPAELSDVLKEALETEGPVVVDIPIDYRDNIKLGETLLPDQFY

SEQ ID NO: 14003 - protein, 239 aa, Physcomitrella patens subsp. patens
MLVRNESSTDTLVAMLASCSSVQLQVQLAGGGLEDAVASCSQKRPYYSSFEASGEDPGDEEIEDCTQQVEKKRRLTFDQVRSLEKNFEIENKLEPERKLQLAQELGLQPRQVAVWFQNRRARWKTKQLERDYEVLSLDYNQLKNKFDDVVQEKQQLQEEMDCLRGKLPTPQPSSVLGAKEQSKKLKTASQPSPPKMSEASVKLEQICTEHTASYDALVPFLEGDSSFESSDSMSSEIVN

SEQ ID NO: 14004 - protein, 259 aa, Physcomitrella patens subsp. patens
SLDPTQSRSSSIFEDWGSSNLKVLAERLRHYRPSPSSWASSDDETHGGVTSQVGMPTSIANANDLKVPPKSKRAAVLLCLFQGAERELRVILTKRASSLSSHSGEVALPGGKRDEGEDDKATALREAHEEIGLEPSHVKIVTVLEPFLSKHLLTVTPVVGIIPEHHKFEPRPNAGEVDAIFDVPLEMFLKACTQSISDERHRVEDRQWLNIQYRVHYFDYDAPDGKKYIIWGLTAAILIHAASIILQRPPDFPEFWPDF

SEQ ID NO: 14005 - protein, 368 aa, Listeria monocytogenes EGD-e
MIYFDHAATTKMSEAALEVFMSASREFFANSESLHDAGTKSAALLEKCRGSFAEILHVPSRGIMFTSGGTESNQIAIQTLLHSTKKKEVLVSPLEHASVWQQLEALEEAGACWLRLLPVDAFGRVDPAVLSDMISPDTGLVIIQHVNSEIGSIQPIRELAHIAKQAGVYFHTDIVQSFGKLDLTLDDVTSFSISSHKIYGPKGAGLLFIKPDVPMQVPLPNVHHEFGFRPGTVNVPAIAAFTTAAYDIMGNREKEARRIAELKKAICEALTAKVKVEGGLNTSPFILGITLPNMQGQEALLALNEADIQISTTSACSLRDPAPSRTLLATGKTIEEASRFIRLSFGRENELSDSLIFKKELDKLLRKR

SEQ ID NO: 14006 - protein, 161 aa, Physcomitrella patens subsp. patens
MSDDEHQFESKADAGASKTYPQQAGTIRKGAHLVIKQRPCKVVEVSTSKTGKHGHAKCHFVAIDIFTGKKLEDIVPSSHNCDVPHVSRSDYQLIDISEDGFVSLLTENGVTKDDLRLPTDEGLLTQIRDGFAEGKDLVVTVMSAMGEEQIAALKDIGGRNN

SEQ ID NO: 14007 - protein, 365 aa, Physcomitrella patens subsp. patens
GFTAPVAAARGEYLATVRLGTPERVFSVIVDTGSDLTWVQCSPCGKCYSQNDALFLPNTSTSFTKLACGSALCNGLPFPMCNQTTCVYWYSYGDGSLTTGDFVYDTITMDGINGQKQQVPNFAFGCGHDNEGSFAGADGILGLGQGPLSFHSQLKSVYNGKFSYCLVDWLAPPTQTSPLLFGDAAVPILPDVKYLPILANPKVPTYYYVKLNGISVGDNLLNISSTVFDIDSVGGAGTIFDSGTTVTQLAEAAYKEVLAAMNASTMAYSRKIDDISRLDLCLSGFPKDQLPTVPAMTFHFEGGDMVLPPSNYFIYLESSQSYCFAMTSSPDVNIIGSVQQQNFQVYYDTAGRKLGFVPKDCVGRR

SEQ ID NO: 14008 - protein, 61 aa, Physcomitrella patens subsp. patens
MNDGCQWRKYGQKMAKGNPCPRAYYRCTVAPGCPVRKQVQRCADDVSILITTYEGTHNHPL

SEQ ID NO: 14009 - protein, 404 aa, Listeria monocytogenes EGD-e
MAKEKIVLAYSGGLDTSVAIQWLVESGYEVIACCLDVGEGKNLDFIKEKAITVGASESYTIDAKEEFAEDFALIALQAHAYYEGKYPLISALSRPLIAKKLVEVARQEGASAIAHGCTGKGNDQVRFEVAIHALAPDLKVVSPVRDWKWSREEEINYAKEHDIPVPIDLDNPFSIDQNLWGRSNECGVLENPWTTPPEAAYDLTVSLEDAPDTADIVEITFDAGIPISLNGENMSLANLILTLNEIAGKHGVGRIDHIENRLVGIKSREVYECPAAVTLITAHKELEDLTFVREVAHFKPIIEQKISETIYNGLWFSPLTEALVAFLKSTQKFVNGTIRVKLFKGHAIVEGRKSPNSLYDENLATYTSSDTFDQDAAVGFIKLWGLPTKVNAEVNSKVTITTEV

SEQ ID NO: 14010 - protein, 507 aa, Listeria monocytogenes EGD-e
MKKLTNVFWGSGFLVLLAVLFGAFLPEQFETFTNHIQKFLTSNFGWYYLIVVAIIIIFCLFLVLSPIGSIRLGKPGEEPGYSNKSWFAMLFSAGMGIGLVFWGAAEPLSHYAVQAPGGEVGTQAAMKDALRYSFFHWGISAWSIYAIVALALAYFKFRKNAPGLISATLYPILGKHAKGPIGQLIDIIAVFATVIGVATTLGLGAQQINGGLTYLFGVPNNFTVQFTIIVIVTILFMLSAMSGLDKGIQLLSNVNIYVAGVLLVLTLILGPTLFIMNNFTNSFGDYLQNIIQMSFQTAPDAPDARKWIDSWTIFYWAWWLSWSPFVGIFIARISRGRTIRQFLLGVIVLPALVSVFWFAVFGGSAIFVEQHGNSGLSSLATEQVLFGVFNEFPGGMMLSIVAMILIAVFFITSADSATFVLGMQTTGGSLNPPNSVKVTWGLLQAGIASVLLYAGGLTALQNASIIAAFPFSIVIILMIVSLFVSLTREQEKLGLYVRPKKSQRSQL

SEQ ID NO: 14011 - protein, 325 aa, Listeria monocytogenes EGD-e
MSDLFTTIKGQVTGKNVRIVLPEGTDERIVGAAARLQKENIVKPILLGNKAEIEAKAKEIGVSVEGIAIHEPATDPLFDELVAAFVERRKGKATEEAARKMLVDPNYFGTMLVYTGKAEGLVSGAAHSTGDTVRPALQIIKTKPGVSKVAGAMIMVRGEERYLFSDVAINIAPVAADLAENAIVSAETAEIFGIDPRVAMLSFSTKGSAKSDETEKVVEATALAKEKAPELTLDGEFQFDAAFVPTVAEKKAPGSVIKGDANVFIFPSLEAGNIGYKIAQRLGNFEAVGPILQGLNAPVNDLSRGCNTDDVYNLTLITAAQAVNK

SEQ ID NO: 14012 - protein, 404 aa, Physcomitrella patens subsp. patens
MGSDAPDSIAPRDVCIVGVARTPMGGLSGSLSSLSATKLGSTAIQAAVKRSGVDPSLVEEVFFGNVLSANLGQAPARQASIGAGLPNTAPCTTVNKVCASGMKAVMLAAQSIQLGQNDVVVAGGMESMSNAPYYLPKARGGLRFGHGEVVDGMLKDGLWDVYNDYAMGMAAELCADNHSVSREAQDDYAIQSYEKAIAANNSGLFKWEIVPVEIPGGRGKPSIFVDKDDGIDKLDAGKLRKLRPAFKSDGGSVTAGNASSISDGAAALVLVSGAKAKELGLQVIAKIRGYADAAQAPELFTTSPAIAIPKAISRAGIDQSQVDFYEINEAFAVVSVANQQILKLKPESVNAHGGAVSLGHPLGCSGARILVTLLGVLKEKNGHFGVAGVCNGGGGASAVVVELM

SEQ ID NO: 14013 - protein, 431 aa, Physcomitrella patens subsp. patens
MLSNNNLTGPIPAGLKDLTDLTTLRLFNNKLTGSIPSWLALLPNLTELDLRNNDLSGRVPEALLTNSALAFRFEGNSRLCVNATSCPGDKSNVGVVVGVVVGTVAVAIIVALVVVYFFWSARKKRAPLEKIPLQGGENPRGSKFTYAQVMFATKNNHKMLGKGGFGPVYYGKLQDGQEVAVKVSSKVSAQGSREFINEIDLLTKVHHKNLVTLVGYCNDGNNLMLMYEYMPLGSLQDHLYGTLCCFLRDKLFLDWPTRIHIALQAAQGLEYLHRGCSPAIFHRDVKSNNILLGHKMVAKVADFGLSKSTNSNEAVSHVSTMVKGTMGYLDPDYFNTNQLTEKSDVYSFGIVLLELICGRAPLVPDLPEQERRLDQWARPYLSNENIQMIVDPSFGDKYHLESVWRVAELAMQSVEPRGIHRPKMREVVQEL

SEQ ID NO: 14014 - protein, 578 aa, Physcomitrella patens subsp. patens
MAVSSLVFIAPTSSSCGCSGIQYRALNLAHTARGRGLESSSSLYFFGGKLQTWKFVENAAKWRNAAGSLRVRCDAGVALVEQRVEEEQKQRLSSDFTTVMKFGGSSVASAHRMREVAQLILSFPDERPVIVLSAMGKTTNNLLKAGEKAVSCGVEESGNIEELQVIRDLHKTTARELKVDESLVTELFEELEQLVMGIALMKELTLRTKDYLVSFGERLSTRLFTAYLNSIGTYARQYDAFDLGIITTDEFTNAEILEVTYPTVRERLLKDLKADADRGTPICVVTGFLGKGVETGCVTTLGRGGSDLTATALGKALGLREIQVWKDVDGVLTCDPRVYSNALPVPFLTFDEASELAYFGAQVLHPQSMRPARDANIPVRVKNSYNPQAPGTLITGERDMSEAEMTSIVLKKDVTMLDIQSTRMLGQVGFLAKVFTTFEHLGISVDVVATSEVSISLTLDPSKLWERELIEQASQCLWLQQELDKMKSELSKIANVQLLKKKSIISLISNVKQSSAVLEKVFRVFKKNDINVQMISQGASKVNISMVVDDDDAPKCVQELHKVFWPDADEATERNGHV

SEQ ID NO: 14015 - protein, 1126 aa, Physcomitrella patens subsp. patens
MSTTKLAYSSGSSVKSKHSVRVAQTTADAKLQAVYEESGDSGDSFDYSKSVHASKSTGENVPALAVTAYLQRMQRGGLVQTFGCMLCVDESSFRVIAYSENAPEMLDLMPQAVPSVGQQEVLGIGTDARTLFTPSSAAALEKCAGAVDVTMLNPISVHCRSSGKPFYAILHRIDVGLVIDFEPVRPNDAVVSSAGALQSHKLAAKAISRLQALPGGDIGLLCDTVVEEVRQLSGYDRVMAYKFHEDEHGEVLAEIRRSDLEPYLGLHYPATDIPQASRFLFMKNRVRMIGDCYAPPVKVVQDKDLRQPISLAGSTLRAPHGCHAQYMGNMNSIASLVMAVIVNDPDEDPNSRGGQQRGRKLWGLVVCHHTSPRTVSFPLRSACEFLMQVFGLQLNMEVELAAQLREKHILRTQTLLCDMLLRDAPIGIVSQSPNIMDLVKCDGAALYYGKRFWLLGITPNEVQIKEIADWLLEHHQDSTGLSTDSLADAGYPGAAQLGDAVCGMAAAKITPRDFLFWFRSHTAKEIKWGGAKHDPDEKDDGRKMHPRSSFKAFLEVVKRRSLPWEDIEMDAIHSLQLILRGSFQDIDDSDTKTMIHARLNDLKLQGMDELSTVANEMVRLIETATAPILAVDSSGFINGWNAKVAELTGLPVGEAMGRSLVKDLILEESIDVVQRLLYLALQGEEEQNIEIQLKTFGPQKEKGAVILIVNACSSRDVQDNVVGVCFVGQDVTGQKQVLDKFTRIQGDYKAIVQNPNPLIPPIFGTDEYGYCSEWNPSMEKLTGWKREEVLGKLLVGEIFGMQLMCCRLKGQDAMTKFMIALNSAMDGQDTDRFPFSFFDRQGKYVDALLTVNKRTDAEGSITGVFCFLHTTSVELLQALTVQRATEKVAFAKLKELAYIRQEIKNPLYGIMFTRNLMEDTDLSEDQRQFVETSAVCERQLRKVLDDMDLESIEDGYLELDTNEFVMGTVMDAVVSQGMITSREKGLQLIRETPREIKNMCLFGDQVRLQQVLADFLLNAVRFTPSSEGWVGIKVVPTKKRLGGGIHVMHLEFRVTHSGMGLPEELVHEMFDRGRGMTQEGLGLSMCRKLVKLMNGNVQYIRETGKSYFLVEVELPLAQRDDAGSVR

SEQ ID NO: 14016 - protein, 234 aa, Physcomitrella patens subsp. patens
MKHGEDGGSSRVQDDGDPHPVGGEETSAAGSSDQGGSFDCNICLELAQDPVVTLCGHLFCWPCLYRWLQMHSICQECPVCKGSVEEDKVIPLYGRGKVNCVDPRTKAVPGLNIPHRPVGQRPETARHAEHQYPPQGFNFMAGPTGPAATARFGNITLSAGFGLFPSLFGFQLHGFSETSGLGGGSSVHLGSAGGLAGSHMHGTQPIMPDQQQEALLSRLLLLLGVFVIICLLLF

SEQ ID NO: 14017 - protein, 404 aa, Physcomitrella patens subsp. patens
MAGRPLYLDMQATSPVDPRVLDSMLPYYIDQYGNPHSRTHMYGWESDGAVEKAREQIAKLIGANPKEIIFTSGATEANNIALKGVMHFYKEKKRHVITTQTEHKCVLDSCRHLQQEGFEVTYLPVKKDGLIDLDELKAAIRPDTGIVSIMAVNNEIGVIQPLAEIGELCRKNKVFFHTDAAQAVGKININVDDLKVDLMSLSAHKIYGPKGVGALYLRRRPRVRVEAQMSGGGQERGIRSGTVPTPLVVGMGAACQIAMEEMECDEKHIKELSDRLYKGITSKLDGVILNGSEEHRYAGNLNLSFAYVEGESLLMGLKEVAVSSGSACTSASLEPSYVLRALGVEEDMAHTSIRFGIGRFTTKEEVDRAIALTVDQVAKLRQMSPLWEMVQEGIDLKSIQWAQH

SEQ ID NO: 14018 - protein, 147 aa, Physcomitrella patens subsp. patens
MRQLQQLSPSKPHINPSVLVIVIILSVVFFCSGVLHILARCLGRRRTRAPAGELHSPGNSIRGQLQHLFSMHDSGVEQVFIDTLPVFLYGSIRGLKDSADCAVCLNEFANEDKLRLLPKCKHAFHMECIDTWLLSNSTCPLCRRSLL

SEQ ID NO: 14019 - protein, 413 aa, Physcomitrella patens subsp. patens
MATAPRTGGLIEPDGGVLVDLHVSEQEKDSKKAEAATLPKIQLVLVDLQWVHTVAEGWASPLTGFMRQNEYLQSLHFNCLRLPDGTFTNMSLPIVLAIDDEKKQSLSGVNAVTLVGPDGNDVAILRNIEIYKHNKEERIARTWGTTAPGLPYVDEAIANAGNWLIGGDLEVLERIKYNDGLDHYRLSPAELRAEFERREADAVFAFQLRNPVHNGHALLMTDTRRRLLEMGYKNPILLLHPLGGYTKADDVPLEWRMKQHDEVLAAGVLDPATTVVAIFPSPMHYAGPTEVQWHAKARINAGADFYIVGRDPAGMGHPTAGRDLYDANHGKMVLSMAPGLEKLNILPFRVAAYDKTQSQMAFFDPSRAQDFLFISGTKMRNFAKSNELPPDGFMCPGGWQVLVDYYQGLQKLE

SEQ ID NO: 14020 - protein, 113 aa, Physcomitrella patens subsp. patens
MGGVWIFKDGFTQLVENPLAEPLDGRNMTGVRRKVLVHVATNESIINYDQLEQKLREKGWTRYYAGDPNLRQYHKSDCTNDLISLPKSFAYIRTMHMYDIVVKVPNTFVVRDS

SEQ ID NO: 14021 - protein, 382 aa, Listeria monocytogenes EGD-e
MNHSKIAKKHQQMPVNILADIGTLAKTMPDILDLSIGDPDLITDESIINAAFEDVRAGHTKYTESGGDVELIDAIRGYFSRNYDLSFERSQIRATVGALHGMYLTLQTILDDGDEVIIHEPYFSPYKDQVLNSGGTPIIIPTYEKDDFAINVDILEAAITDKTKALILNSPNNPTGAVFSPETFEKIANLAKKYDFFILSDEVYDGFSFYEDFVPMAKFAPDHTITFGSMSKNFAMTGWRLGYMIAPTYLNEAAKIINEGITYSAPTPSQRAAIYALNHSETLIPLVAETFQKRLEYIAKRVEKIPYLSLHPLKGSIYAFINISKTNMDSVSFTEYVLKETQVLVIPGLAFGESGDNYVRLAATQDISVLEEAFNRLAKLTF

SEQ ID NO: 14022 - protein, 347 aa, Physcomitrella patens subsp. patens
MESNGDAYDLYSSENIDAQHCEKHGFDIRQLKQLFQDQQQLLDHFFKNLNYKEVQAFTQLCADTKGVIFFSGVGKSGFVAQKCAQTLVSTGTKAVFLSPTDALHGDIGLVGPNDVLVLFSKSGATEELNKLIPCARAKSAYLVGISSLKHSNFRKMCDMHVYLPLERELCPFDLAPVTSTAIQMLFCDTVAIALMKAKNLTREQYALNHPAGRIGRRLSFRVEDIMRKGDSLPLCRESDLIMDQLVELTVKGYGCLIVIDASNRLLGTFTDGDLRRALNSSRENIFHLQVGEMCNREPRWIEENVMAIAAMKKMEEGASAVTFLPVLDYNKVVIGLITLHDLVSAGL

SEQ ID NO: 14023 - protein, 109 aa, Physcomitrella patens subsp. patens
MIPSSSNHEQQQQQAQLQQQEKKASQLFAQRALQERRLKPPDQVIACPRCQSLNTKFCYYNNYSLTQPRHFCKSCRRYWTAGGTLRNVPVGGGCRKNKRTKPRTPEGQN

SEQ ID NO: 14024 - protein, 579 aa, Physcomitrella patens subsp. patens
MSSPPPIYPVIESTACLARHLARRLVEIGCNDIFTVPGDFNLILLDHLLNEPGINNIGCCNEINAGYAAEGYARWKGVGCVVVTFTVGGLSVINSIAGAYSENLPVICIVGGPNTNDYGTNRILHHTIGIPDFSQEFRCFQTVTCFQAVINHLDDAHELVDRAISKALHKNKPVYISVSCNITNTVHPSFTGSTIPYTIKQQVSNKVSLDAAVESTVKFLNTCAKPVLIGGPKMRLGKAKEAFAKLVTACGYAYAVMPSAKGQVSEQHPRFMGTYWGAVSTPYCLEIVESADAYIFVGPIFNDYSSVGYSLLLKKQHMIIVNPDRVKVCGKAEFGCVLMKDFVEALAEKIVKNSNSYDNYKRIFVPEGTVPSSVPGEPLRVNSLFKHIQGMLSGDTAVLAETGDSWFNCQKLRLPEDCGYEFEMQYGSIGWSVGATLGYSQALKGIKRVIACIGDGSFQVTCQDISTMIRQEQNSIIFLINNGGYTIEVEIHDGPYNVIKNWSYTGFVDAIHNGEGKVWTTKVTTEDELIPAISTALGAQRDCLCFIECVVHKDDTSRELLEWGSRVSAANSRPPTSYT

SEQ ID NO: 14025 - protein, 296 aa, Physcomitrella patens subsp. patens
MGRGKIEIKKIENPTSRQVTFSKRRGGLLKKAHELAVLCDAEVALIIFSSTGKLFEFASSGSMRDILERYSKCPDGVQTTGNVDFMGREVVKLRQQLERMQHSQRQMLGEDLQVLTVSDLLQLEQQLDVGASRVRARKNQLLLEEIEQLRQKELDLQAENEDLRKKLAHVKETAEVSGHTGTSESPSQVASASAYETGGISAQVTMVYPTHPNLRDPQTSQTSLHLGLFPESFVPNTSRRPSQRSPTDPEVSWLDSLSIFNLYRPCDLELRVSTICHTFCFAGESSIRWERYRGQE

SEQ ID NO: 14026 - protein, 2173 aa, Physcomitrella patens subsp. patens
MGASVDGAPVHAVVKSCALFGSLFVVLCALSVVILVAVNWRPWRIYSWIFARRWRSFMQGHRLSIITAVLAAAAWTIVLSPIAVLILWGARLIILLNHDTIGLAVILAGTALLLAFYAIMLWWRTQWQSSRAVAILLLLAVSLLCAYELSAVYVTAGRSASNQFSPSAFFFGVSAIAMGINMLFICKMVFNGAGLDVDEYVRRSYKFAHAETLEVGPIACLPEPPEPRDASIQRKSRCTWRLAQLYQASVVVLAAYSVLYGLTAREARWLGGVTSAAVIILDMNIGACLFGFKLLKSRIAALLVAGSYRMILICFGVHFWYLGHCVGYSVVASVLLGAVVVRHVSVVNPEAARRAALKNTVIRLREGFGRRGPGSSSSVSEGRTSSVVHSSVGAEQIGAAIELISRANARPQGETLGAGFVGHNGGTGLTDAFTAGFGLQSVDSHVSTERVGSSQQPSSPDHDTTDSNRISCAGSVAAIEPLNAVERSSTFASLTDQQTLDLNLALMFQERMNDPRITSILRQNPEFARGGEHELMTLLQDKGLDPNFATMLKEKGLDPTILALLQRSSIDAGRDPGGNENSTAGLKQSQSLAPDDAVGWTGESHKHACGNWFKSVEDVVQFFVGTPERAWVFFSVIFVVECVIVAVFRPTTVTVINGRHEQFEFGFSALLLSPVTCSLLAFLRSLQAENMALTKKVRKFGLIAWLLSTGVGLLLAFLSKSSIILGLAVTVPLMLAALSVALPIWVHNGYNFYQAPVLEYHATRAWEQQARRGRTKEDNVMTLCILVTVICIIALGVIISFSPLDDIKYHSWSSVTRYSTSPYTSPLYLGWAIASAFALVITGVLPAISWFATYRFSLSSAVCVAIFTVVLMTFCGGSYVGIVRSRIGKTPTEADFLAALLPLVCIPAVFSLGCGLYKWRDEGWRFSKGAYVFVGLGLTLLLGAISAVIATINPWMVGAAFLLVLVLVVLTIAVIHHWASHNFYLTRMEVLFVCLAALVLALAAFLIGLLADEPFVGASVGYFAFLGVLAGRSFTVLLSPAVVVYSPRVLPVYVYDAHADSAKNVSGAFLVLYGIALATAGWGVVASLEIYPPFAGSAVSAITLVVAYAFAISRPQLTLKMMEDALQFLRKETIAQAIARSSTKTRNAMSGTCSAPQRSASSAALLVGDASVTRDKAGNYVLPRADVLKLREWLRNEEHAAGLRWWPPFSAFGSPFDSTTDTRFRRKLCAHARILALEEAIDTEWVYMWDKFGGYLLLVLGHATRAERVQDEVRLRLFLDSIGFSNLSAKKIKTWTPEDRKQFETVQENYMREKETEEELLQQRREEEGKGRERRRALLEKEERRRHEIEASVISTVPDAGTKEAAAMAAAVRAVGRDILLDENSASDQVSSLARRILVAQRAQRAQQTGVHGTVCVMDNEPRNSGRCCGLIDPSVCGSQKVSFSAAVMIQPDSGPVCILGVEAHNKKCLEFLVAGAEQGLEAGQVGLRLVSKGAGQSTHNREWFIGHTCVADGRWHSVTITVDASTGEASAFIDGGFDGDNRCDLLLLGEGGVWEEGMEVWVGIRPPMDLDAFGRSDSEGAESKMHAMDVFMWGRCLTEDEILMVHNCANLEEQNELDIMDDYWQGSPMETPMRFEDWRYDPDLSYERDEIFWDEQQSSGAKRKAADIENVAVDIEYLSRKIRRPKIETKEEVLQRMQAVELAIKEALVARGEKRFTDQEFPPSDQSLFVDTDHPAAKLQVVNKWSRPEEVLREQGQDSRPCLFAGTANPSDVCQGHLGDCWFLSAVAVLTEASRISDVMITPEFNEEGIYTVRFCIQGEWVPVVVDDWIPCEARGKPAFATSRKGNELWVSILEKAYAKLHGSYEALEGGQVHDALVDLTGGAGEEIDLTNEVAQLDLASGHLWSQLQRFKQEGFLLGAGSPSGSDVHVSSSGIVQNHAYSLLQVREVDGHKLVQIRNPWANEVEWNGPWSDFSPEWTDRMKHKLKYSPQAANGVFWMSWQDFQLHFRSLYVCRIYPPEMKYSVRGQWRGPTAGGCQDYETWHLNPQFHLKAVGSDAREPIHVFATLTQGVQSTSRSTASFGNYQLVGDAPRFYIGMRVIKTGGRRSGKNIFMHEAVNGTDYVNAREISCEMVLDPDPKGYTIVPTTHAPGEECQFLLSVFTKASIILEPL

SEQ ID NO: 14027 - protein, 419 aa, Physcomitrella patens subsp. patens
MNQFQAINSFYDFSFQVLRTELIHREHPSSPLRSNTSKTTTEIFLAAVKRGAERRAQLSKHILAEGRLFSTPVASGNGEYLIDISFGSPPQKASVIVDTGSDLIWTQCLPCETCNAAASVIFDPVKSSTYDTVSCASNFCSSLPFQSCTTSCKYDYMYGDGSSTSGALSTETVTVGTGTIPNVAFGCGHTNLGSFAGAAGIVGLGQGPLSLISQASSITSKKFSYCLVPLGSTKTSPMLIGDSAAAGGVAYTALLTNTANPTFYYADLTGISVSGKAVTYPVGTFSIDASGQGGFILDSGTTLTYLETGAFNALVAALKAEVPFPEADGSLYGLDYCFSTAGVANPTYPTMTFHFKGADYELPPENVFVALDTGGSICLAMAASTGFSIMGNIQQQNHLIVHDLVNQRVGFKEANCETI

SEQ ID NO: 14028 - protein, 291 aa, Physcomitrella patens subsp. patens
MHLFKNKEPFIGTIKSVERIVGPKAPGETCHIVIDHEGNVPYWEGQSYGIIPPGENPKKPGQPNSVRLYSIASTRYGDDFDGRTASFCVRRAVYWDPETGKEDPAKKGICSNFLCDSKPGDKVQIVGPSGKVLLLPEEDPSATHIMVATGTGIAPYRGYLRRMFMEDTEFKFNGLAWLFMGVANTDSLLYHDEFNTYLKEYPDNFRYDIALSREQKNSRGGKLYVQDKMEEYSEELFDKLDKGAHIYFCGLRGMMPGIQDMLKRVAESRGESWETKLAALKKNKQWHVEVY

SEQ ID NO: 14029 - protein, 137 aa, Physcomitrella patens subsp. patens
MGSPTFSDALFNKFLPSNNEDEEAWPVVDMYGCDQFRMFEFKVRRCMRGRSHDWTECPFAHPGEKARRRDPRRYHYSGTACPDFRKGSCRRGDACEFAHGVFECWLHPARYRTQPCKDGRNCRRRVCFFAHTPEQLR

SEQ ID NO: 14030 - protein, 453 aa, Listeria monocytogenes EGD-e
MKVIKFGGSSLASGIQLNKVFQLVAEDPDRKIIVVSAPGKRFKEDTKVTDLLIDCAAKALLGEDTSELFESVIARYAGIALDTGMSDEIINQIRADLQATISSDKSDPDKFLDRMKASGEDNNAKLIAAYFKFKGLNANYINPKDAGLLVTDEHASAQVLPESYDRLFALREREGIIVFPGFFGYTKDGEISTFSRSGSDITGAIVANGAQAELYENFTDVDAVYAVNPTIVKNPKKVLELTYREMRELSYAGFSVFHDEALIPAFHAGIPVHIKNTNNPDSCGTRVVHERENNNGPVVGIASDDGFCSIYISKYLMNREIGFGRKVLQILEDAGLNYEHMPSGIDDLTIIIRENQFGEDTERTIMSRLKEELNADQVIMQHGISLIMVVGETMRHNVGITSRASKALSDAKVNIEMINQGSSEVSIMFGVKEEQENTAVRALYNEFFSEVFV

SEQ ID NO: 14031 - protein, 662 aa, Physcomitrella patens subsp. patens
MGRHTLLVLGLLFAAGVAGSFGAAEEAAKLGTVIGIDLGTTYSCVGVYKNGHVEIIANDQGNRITPSWVAFTDNERLIGEAAKNQAAVNPERTVFDVKRLIGRKFEDKEVQKDIKLFPYKIVNKDGKPHIQVKVKDGEVKVFTPEEISAMVLVKMKETAEAYLGKKIKDAVVTVPAYFNDAQRQATKDAGVIAGLNVARIINEPTAAAIAYGLDKKGGEKNILVFDLGGGTFDVSVLTIDNGVFEVLSTNGDTHLGGEDFDQRIMEYFIKLIKKKHNRDISKDKKAIGKLRREAERAKRALSNQHQIRVEIESLFDGVDFSEPLTRARFEELNNDLFRKTMGPVKKAMDDAGLQKTDIHEIVLVGGSTRIPKVQQLLRDYFDGKEPNKGVNPDEAVAYGAAVQGGILSGEGGEETKDILLLDVAPLTLGIETVGGVMTKLIPRNTVIPTKKSQVFTTYQDQQTTVSIQVFEGERSLTKDCHELGKFDLTGIPAAPRGVPQIEVTFEIDANGILNVKAEDKGTGKSEKIVITNDKGRLSQEEIDRMVQEAEEFAEEDKKVKERIDARNSLETYVYNMKNQLGDKLGEKISAEDKETIETAMKEALEWLDENQSAEKEDFQEKLKEVEGICNPIVTKLYQAAGGAPGAGASEDGESDDESHEEL

SEQ ID NO: 14032 - protein, 106 aa, Physcomitrella patens subsp. patens
TAIEESTGIGENFECNICFQKANEAVVTCCGHLFCWPCLYRWLHVHSYHKECPVCKGSLTEYSITPIYGRESALASARMQGALGTERIPPRPAARRIEGSRQQRER

SEQ ID NO: 14033 - protein, 261 aa, Listeria monocytogenes EGD-e
MATLKIQDLHVEIEGKEILKGVNLEISTGEIHAIMGPNGTGKSTLSSAIMGHPKYEVTQGTITLDGEDVLEMEVDERARAGLFLAMQYPSEISGVTNAEFIRAAINSRREEGDEIPVMQFIRKLDAKMDILDMDEEMAERYLNEGFSGGEKKRNEILQLLMIEPKLAILDEIDSGLDIDALKVVSKGVNEMRGEGFGCLIITHYQRLLNYITPDFVHVMMQGKVVKEGGPELAKRLEAEGYDWIKQELGIELEEEEAVDQQ

SEQ ID NO: 14034 - protein, 523 aa, Physcomitrella patens subsp. patens
MTTITSHEMNFLIFRYLHESGFTHSAFVLGYEAGLYKSNIDGNSVPTGALISFVQKGLQYLEMEANLNDDGTEVDGDFSLLQPVDLLTKDMMELRMMIKEKRSKVEREKEKEKEKEREKERERDRSEREKERDEKTKIKVEEPRGAPVGDQMEVASGTTFQGSEISHADVTILEGHTSEVFICAWSPSGSLLASGSGDSTARIWSISDGPSGNSAAASKPLVLKHFKGKTNEKSKDVTTLDWNGEGTLLATGSYDGQARIWSKDGELKNTLNKHKGPIFSLKWNKKGDCLLSGSVDKTAIIWDAKTGDVKQQFEYHTAPTLDVDWRNNLSFATCSTDKMIYVCKLGDTRPVKVFQGHQDEVNAIKWDPTGTLLASCSDDFTAKIWSLKQDRCLHDLKEHTKEIYTIKWSPTGSGSANPNRDLVLASASFDATIKLWDVEQGSQLFSLTHHSEPVYSVAFSPNGEYLASGSFDKCLHIWSVKDGSLVKTYRGSGGIFEVCWNREGDKVAACFSNNTVCVLDFRM

SEQ ID NO: 14035 - protein, 142 aa, Physcomitrella patens subsp. patens
MASRTGAVWVSFAVAGMILMQLGSPVEARTDSLAFVKKTLAEHPLVIFSKSYCPYCKRAKSVFESMSVKPFVLELDEREDGDDIQQALGKFVGRRTVPQVFINGVHLGGSDDTVAAQQSGRLKKLLAGSASAVNAENLKSEL

SEQ ID NO: 14036 - protein, 463 aa, Listeria monocytogenes EGD-e
MTKVNSFFRKKSFHNPATDKHHLNKSLGAFDLTMLGVGAVVGGGIFILPGQVASVIAGPGIIISFIIAGIACCLAALCYSEFASKLPVAGSAYTYSYHVFGEGVAWILGWSLILEYGLAVAAIASGWSSYMKSLLAGFDLHIPTAISSAYDPSAGTYFDLLAFVVVMVIGILLSFGIRESTRVNNIMVLVKIAVVVLFILVGAFYVKPDNWTPFLPFGVQGVITGASTVFFAYIGFDAVSSAAEEVKNPQKNMPIGIISSLAVCTLLYILLSAVLTGVVPYTDLVDVSAPVAFALQAINQNWIAGLLSVGAIVGMTTVVLVMSYGGTRLLFAMGRDGLLPKSFSKISKNDTPVRNTMIFATVMGLIASTVPMADLAQLINIGTLFAFAMVSIGIFFLRRNPDLNQKGFKTPFYPVVPALSFLLCVYLMINLSKTTWIAFGIWFVIGILVYTFYGRKHSALRIK

SEQ ID NO: 14037 - protein, 115 aa, Physcomitrella patens subsp. patens
MAVLLFALVVAAFINTIVRCLVRRRRQQPVDDHNDTEKGLQKSAIEALPLFDSLGGKECVVCLSEFASGEKVRLLPICKHGFHPFCIEKWLLTRTTCPVCRCSVLPAESYSKERH

SEQ ID NO: 14038 - protein, 442 aa, Physcomitrella patens subsp. patens
MVVVNNIEADILPARILKPNLQTNWAQNIVYGTNTLHEVISIEEIQALLQSQEKVTTAGTGHTFNFIADNLHSRLSLRSLHQVLHLDEATRTVVVDAGIKYGQLCSFLDSRGFALQNLASLTELSIAGAISTAAHGSGNKNGNLATSVSALEMVTGNGEIVKLSRQSDGEVFSGAVVGLGALGVITQITLDIHPAFTMRQFVYKDLPLAQVIDHFDAIMGSGYTVSLFTDWQDQRMYQMWLKVRVEDGQTFEAPHEFFGAKLLTENVNVVRGMAAERCTEQLGVPGPSYQRLPHFREGYLPGVGDELQSEYFMPRHHAAAAILSMERLRDQISPILFESEIRTIAADDLWMSTCYGRDSVAIHFCWKNDWPAVQRLLPIIESKLAPFDPRPHWGKLFAMSPALVQSKYEKLVDFVKLAAKYDPKGKFRNEFLNTNVFTNCNP

SEQ ID NO: 14039 - protein, 142 aa, Physcomitrella patens subsp. patens
MGSNPPIGSEQWSSGLCDCFQDCGTCCCAWCCPCVVVGQLVEIIDQGITSCSSAGCLYCLLQSCTGMGCLYTCGYRARLRAKYGLSPEPCGDVCVDWCCLPCSLSQQYRELAARGVQADLGWAANRQAYEQSAPPAQKMAGY

SEQ ID NO: 14040 - protein, 107 aa, Physcomitrella patens subsp. patens
WSTGLFDCCADVPMCCVTMFLPCFAFGWNVEALDESKDSCWTAAAMWWVLQHTIALGCLYSSSYRGKLRSKYNIPEEPVSDCVIHCLCWPCAFCQEHREIHYRSFGP

SEQ ID NO: 14041 - protein, 162 aa, Physcomitrella patens subsp. patens
GKGKVSSEDSKSMEAATEKTTPLKRQKSDTEDVKVVKTEQGSASENSGDSISPRSTLKGATSKPPQDLPKQDYIHVRARRGQATDSHSLAERVRREKISERMKFLQDLVPGCSKVTGKAVMLDEIINYVQSLQRQIEFLSMKLAAVNPPRLDHNYDLLSKDM

SEQ ID NO: 14042 - protein, 157 aa, Physcomitrella patens subsp. patens
MGFISFVGRVTFSAIFILAAWQKIQDFGDDGGSALKTLEPKLDLFKGHIFETLHFKVPPVETKHLLMGAIALEGFGGLLFTVGSSVGAYLLLIFLAAITPIIHDFYNYELSSPEYVHQFNQFLKNLALFGALLFFLGMKNSTSRQNRRKQPSKSKVQ

SEQ ID NO: 14043 - protein, 602 aa, Physcomitrella patens subsp. patens
MQGAMQTKMWRGELISTSTHFIGGTRLQPKLNQDARKPTKSENCIVRVSMEREVKAKAAVSPPAVAADRLTPRVQERDGYYVLKEEFRQGINPQEKIKLGKEPMKFFIENEIEELAKTPFAELDSSKPGKDDIDVRLKWLGLFHRRKHQYGRFMMRFKLPNGITNSTQTRFLAETISKYGKEGCADLTTRQNWQIRGIMLEDVPSLLKGLESVGLSSLQSGMDNVRNAVGNPLAGIDPDEIVDTIPICQALNDYIINRGKGNTEITNLPRKWNVCVVGTHDLFEHPHINDLAYVPATKNGVFGFNILVGGFFSSKRCAEAIPMDAWVPTDDVVPLCKAILETYRDLGTRGNRQKTRMMWLIDEMGVEEFRAEVERRMPSGTIRRAGQDLIDPSWKRRSFFGVNPQKQAGLNYVGLHVPVGRLHAPEMFELARIADEYGNGEIRITVEQNLILPNIPTEKIDKLMQEPLLQKYSPNPTPLLANLVACTGSQFCGQAIAETKALSLQLTQQLEDTMETTRPIRLHFTGCPNTCAQIQVADIGFMGTMARDENRKPVEGFDIYLGGRIGSDSHLGELVVPGVPATKLLPVVQELMIQHFGAKRKP

SEQ ID NO: 14044 - protein, 313 aa, Physcomitrella patens subsp. patens
LLTRTEGLFFTLADAAVATDPGQVTDAVVQKQDGGWLGGITNTLELALTFLKDGIAKIGLPYSYGFAIILLTVIVKAATYPLTKKQVESTLAMQNLQPKIKAIQTRYQGDQERIQLETARLYKQAGVNPLAGCLPTLATLPVWIGLYRALSNVANEGLLTEGFFWIPSLAGPTTIAARSSGSGISWLFPFVDGAPPLGWGDTIAYLVLPVLLIGSQYVSMQIMQPATASNDPAQNQSQLILKFLPLMIGYFSLSVPSGLSLYWLTNNVLSTAQQVYLRQLGGAQPIVDKEGSGIISAGQAKRTPLPPPSATAT

SEQ ID NO: 14045 - protein, 387 aa, Physcomitrella patens subsp. patens
MGILGWIAGPICLVGGAVISFYNNYLLGGLHETGGKRHVRYRDLAGYIYGPTMYKLTWVAQFLCLIVINIGTIILAGLSLKSMARAFSDGSEIVKLPGWIAVTGAVVCIFALMVPTLHALRFFSTCSLLLSSIYTFIAIVVAFKDGLKAEGPRDYSLRGNVTDRTFNAIGALATIAFAFNTGILPEMQATVRQPTTRNIRKALGLQFTVGTFPILVLTFVGYWAYGNTVSVYMFSSVSRPRSTAVTVANAVAFLQAIISLHVYASPIYEFMDTQFARKGDHEWSRHSVLVRFFTRTAYIGISTFLGALLPLFGDFIALTGALVAFPLEWGLIHHMYLKVKGKEFGKGRLLWHWSMIVIAVVLTFTTATAGLRFIISDSILYHEFADL

SEQ ID NO: 14046 - protein, 443 aa, Physcomitrella patens subsp. patens
MYSNFKEQAIEYVRQAVAEDNAGNYAKAFPLYMNALEYFKTHLKYEKNPKIKEAITQKFTEYLRRAEEIRAVLDDGPTGPTANGDAAVQAKPKSKAGKKDGGGRGDGDGDSEDPEQQKLRSGLNSAIIREKPNVRWADVAGLESAKQALQEAVILPVKFPQFFTGKRRPWRAFLLYGPPGTGKSYLAKAVATEADSTFFSISSSDLVSKWMGESEKLVANLFQMAHEAAPSIIFIDEIDSLCGIRGEGNESEASRRIKTELLVQMQGVGKQDTKVLVLAATNTPYSLDQAVRRRFDKRIYIPLPEFKARQHMFKVHLGDTPNNLTERDYEDLARKTDGFSGSDIAVCVKDVLFEPVRKTQDAMHFKKVHTKDGEMWMPCGPREAGARQTTMTELAAEGLASKILPPPITKSDFDKVLAKQRPTVSKDDLIIQEKFTKEFGEEG

SEQ ID NO: 14047 - protein, 459 aa, Listeria monocytogenes EGD-e
MRNQSKMPLVERLDAHAKSCPISLHVPGHKSGAIYPDAWQKLLKWDVTEITGMDDLHHPEDVILEAEELLAECYGSKKSYFLVNGTSGGNVAVIMATLKRGEKVLVPRDAHKSILHGIELAGGEPIFLTPATNKEVGVASGVTTELLEETLHNHPDVKLCIFTYPSYYGTTFNLQKCIRIAHDFGAVVFVDEAHGAHFLTSSEFPKSAVELGADVVVQSAHKTLPALTMGSYLHVVNDLPIFEKLAYYLQVFQTSSPSYLIMASLDAARKYVATYTAADVEAFWKMRARWIKWLTKNKFEVILPDDPLKIIVRKTGYTGYELQAIFEESSYFPELADESQVLLILPLIKKGIDFTPISRIHSPMKKEIAKEPYEMSTPCASGLALTYEEMHARATEFVLLDEATTRVSAETISLYPPGIPAIIRGEGITEKHIRELKNIRTRHYQGGEKLAENYIRVFR

SEQ ID NO: 14048 - protein, 173 aa, Physcomitrella patens subsp. patens
LQDFSAGSNGNCECDDSSQRSRQYLHLDQRLILKTVFPGGLSDNSPEYDDDEGANQKLRFTMAQLRHLEDAFARLQRPNAHQKAALATELGIQPRQVEVWFQNRRARGKAKRTETNCEVLRQRCHDLIVENQQLNYLIQTESVGLDSHDLMGNGESPLQLQLALCNSCKKAPS

SEQ ID NO: 14049 - protein, 214 aa, Listeria monocytogenes EGD-e
MRFFIDTANVEEIKKANRMGFISGVTTNPSLVAKEGRDFNEVIQEITSIVDGPISGEVVSLEADEMIAEGRVIAKIHPNMVVKIPMTGEGLAAVKVLTEEGIKTNVTLVFSATQALLAARAGATYVSPFLGRLDDIGDDGLVLIRDIADIFEIHGIPTEIISASVRHPIHVIECAKAGADIATVPFKVFEQMLKHPLTDSGIDKFLADWEAAKK

SEQ ID NO: 14050 - protein, 575 aa, Listeria monocytogenes EGD-e
MDQKKYSWRKFFQLLISAKPANWIIFCALFASVITTVAGLVVPLFTKNLIDGFSIASLDVKMIALIVLAFILQAITNGFSIFLLNYMGQKVVATIRERLWKKIVHLPVSYFDNTKTGEMVSRMVNDTVVVKELIADHLPQFVTGIISVVGAIIILFFMDWKMTLIILVAVPITALVVAPLGQKMFKISKGLQNETANFTGSISQTLSEARLVKASNAETLETEAGHQGINRLFGFGIREAKVVAVLGPLIFFVVMGVIVGIIGYGGIRVSAGTMTTGTLIAFLLYLFQIIVPVTSFATFFAQLQKAKGATERIADILNETEEDFDAGKKVDVSGKTIRASDISFSYNEGEPILKHVSFDTKPGEVIAFAGPSGGGKSTLFAILERFYQPKTGEILVGDIPLSEISINSWRTQIGYVSQESAMLSGTIRDNLCYGLDREITEDELWNVAKLAYADGFISELPDKMATEVGERGVKLSGGQRQRIAIARAFLRNPNILMLDEATASLDSQSEQIVQQALANLMEGRTTFVIAHRLSTIVNADQILFIEHGEITGRGTHSELVASHPLYASFAEQQLK

SEQ ID NO: 14051 - protein, 445 aa, Physcomitrella patens subsp. patens
MRKVGKYEVGRTIGEGTFAKVKFAQNTETGESVAMKVLDRQTVLKHKMVEQQIKREISIMKLVRHPNVVRLHEVLASRCKIYIILEFVTGGELFDKIVHQGRLNENDSRKYFQQLMDGVDYCHSKGVSHRDLKPENLLLDSLDNLKISDFGLSALPQQEDGLLHTTCGTPNYVAPEVLNDKGYDGAVADIWSCGVILFVLMAGFLPFDEADLNTLYSKIREADFTCPPWFSSGAKTLITNILDPNPLTRIRMKGIRDDEWFKKNYVPVRMYDDEDINLDDVEAAFDDSKVCCHFIFTSYVGPSLMNAFELISLSQGLNLSALFDRRQDHVKRQTRFTSKKPARDIINRMETAAKSMGFGVGTRNYKMRLEAASECRISQHLAVAIEVYEVAPSLFMIEVRKAAGDTLEYHKFYKSFCTRLKDIIWTTAVDKDEVKTLTPSVVKNK

SEQ ID NO: 14052 - protein, 371 aa, Physcomitrella patens subsp. patens
MVEWVMKMLMACWRPVQKYTHIGEESGDNHDPLLWYKDLVDHATGQFSISSVQANAILEDMSQVETGPFGTFVGVYDGHGGPEASRYVNDSLYRHLQKFASQEGGMSAEVLRQAFKQTEEGFLEIVKDLWLTKPQIAAVGSCCLVGVVWESKLYVASLGDSKAVLGRYSRHLQSVIATEISTEHNASVEIVRQDLQAAHPDDPRIVVLKHGVWRVKGLIQVSRSIGDVYLKKAEFNREPLIGRFRLPEPLQRPVMSAEPDIKVFDLCADVEFVIFASDGLWEHLSNQEAVDIVHNHPRAGIAKRLIRFALHEAAKKREMRYSDLKKIERGIRRHFHDDITVVVVFLDHNLLSNGSSFSHHISVKGGVDKPS

SEQ ID NO: 14053 - protein, 174 aa, Physcomitrella patens subsp. patens
MSRVYVGNLDPRATERELEDEFRVYGVLRSVWVGRKPPGFAFIEFEDRRDADDAIRALNGKNGWRVELSRSSGGGGGPRGRGGDDMKCYECGEPGHFARECRLRIGAGGLGSGGRGKSPRASPRYRRSPSYGGRRSKSSPRLRSVSPVRRGRSPSRSPPPRRDRRGSPVANGYV

SEQ ID NO: 14054 - protein, 284 aa, Physcomitrella patens subsp. patens
MGRGKIEIKKIENPTSRQVTFSKRRGGLLKKAHELAVLCDAEVALIIFSSTGKLFEFASSGSMRDILERYSKCPDGVQTDGNSDFMGREVVKLRQQLERLQHSQRHMLGEDLQVLTVPDLLQLEQQLDMGVSRVRARKNQLLLEEVEELRRKEHDLQAANEELRQKLADAKGMLTLEAGTARAGTSESPGDQGGSWPTREVGGITQHQAITTFPAHLNLRDPQTSQTSLHLGLFPKSHMPSASRRPSQQSPTEPEVLNSCIYALITGAGESSMRWEHPHFRSQK

SEQ ID NO: 14055 - protein, 441 aa, Physcomitrella patens subsp. patens
MRKVGKYEVGRTIGEGTFAKVKFAINTETSEFLAMKVLDKDTVLRNKMVEQIKREISIMKMIRHPNVVRLHEVLASRAKIYIVLEFVSGGELLDTIAHKGRLSEGHSRRYFQQLIDAVAYCHSKGISHRDLKPENLLLDAKGNLKVSDFGLSALPHQEDGLLHTTCGTPNYVAPEVLDNNGYDGAVADIWSCGVILFVLMAGYLPFNEADLKTLYEKIQHASFLCPAWFSPGAKSLILKMLDPNTRTRITLEGIYNHPWFKKNYVPARLSDAEEASDLDDVESVFDNSEERFVDDQLVKESGPSMMNAFELITLSQGLNLSALFDRRQDHVKRQTCFTSNIPANEIISRMEGAAQSMGFRVETRKYKMRLEGRGGGKINQHLAVAIEVFEMAPSVFMIEVRKAMGDTLEYHKFYKTFCDRMKDVTSKMPTLGIDRGKQLAP

SEQ ID NO: 14056 - protein, 422 aa, Physcomitrella patens subsp. patens
MTPLKKLMREFQEMKSGVGRISRRSFELKFPHHHRGRSSGMVLDESQLNSEPVVEQSCWANMPPELLRDVIQRVEASESAWPSRKHVVACAAVCSSWREVTKELVRAPEQSGRLTFPVALKQPGPREDTVQCFIKRDRTTSTYQLFLGLPPCKFLANGKFLLAAQKFRRATSTDYIISLNQEDMSRGSSTYVGKLRSNFLGTKFTIYDSQPPQNGPVLSNRSSRRLTSKQLSYRAHAGSFNVAHIAYELNVLGTRGPRRMQCTLHGIPLSTMESVGSAPSPTEVTADSLERAHVPHSGVMSSSRSKAAVVDISTLDYDFASGLLAKDEPLVLKNKAPRWHEQLQCWCLNFRGRVTVASVKNFQLVASMESLPTSSQSDRDKVLLQFGKIGKDIFTMDYRYPLSAFQAFAICLSSFDTKLACE

SEQ ID NO: 14057 - protein, 106 aa, Physcomitrella patens subsp. patens
LSPEMKEALDKYLSENKVVLFMKGNKMFPQCGFSNTCVRILNSLNVPYETVNILEDDRLRQGMKEYSDWPTFPQLYIDGEFFGGCDITYGKRLIISALKLPNSDMH

SEQ ID NO: 14058 - protein, 333 aa, Physcomitrella patens subsp. patens
MSLGARTLTDVGVRELRSDTNRLKIFSGSANPLLSQEIACYMGLNLGQIKIKRFADGEIYVQLEESVRGCDVFLVQPTCPPANENLMELLVMIDACRRASAKTITAVIPYFGYARADRKTQGRESIAAKLAANLITEAGAHRVLTCDLHSGQAMGYFDIPVDHVYGQPVILDYLASKMISAEDLVVVSPDVGGVARARAFAKKLSDAPLAIVDKRRQGHNVSEVMNLIGDVHGKVAVMVDDMIDTAGTITNSAALLHAEGAREVYACCTHAVFSPPAIERLSGGLFQEVICTNTIPVKESNYFPQLTILSVANLLGETIWRVYDDCSVSSIFR

SEQ ID NO: 14059 - protein, 1626 aa, Physcomitrella patens subsp. patens
MALATKSCLVSPLLAEKRPTVAASSSINSVTASSAHNRLSLCTKLRLTDHLRYSEVFGIKVRSLKKNGWRSCRNSQGSGWCMKLVASAVKDARQYEVANLDDILAERDACGVGYIASLKNEASHKIVKDALTSLGCMEHRGGCGADNDSGDGAGVMTSIPWGLFKKWCKEQGLPEIDESHSAVGQVFLPRDESLAAAAKAVVEDVFKKEGVEVLAWRPVPVTESVVGHFAKITMPRIEQVFVKVAAEDAMDDIERELYISRKLIEKAASTEPWGEDFYFCSLSSRTIVYKGMLRSEVVGQFYDDLRNEDYVTPFAIYHRRFSTNTTPKWPLAQPMRFLGHNGEINTLQGNLNWMRSREATMESPIWRGRDNELRPFGNIKASDSANLDMIAELLMRSGYSPEETMMMMVPEAYKKHPTLMVKYPEVVDFYEYYKGQMEAWDGPALLLFSNGRTVGACLDRNGLRPARYWRTKDDLIYVASEVGVLDIEPSNVTMKGRLGPGMMICVNLETGEVYENTEVKKRVANAKPYGEWLKAGSQKLEPVEFKDMVMYSADNLLKHQQAFGYSIEDVQMIIESMASTGKEPTFCMGDDTPLAVLSEKAHLLYDYFKQRFAQVTNPAIDSLREGLVMSLEMNLGKRANLLNAGSENAAQVTLSDPILSEGELASLEASELLKPTILPTFFEIDDGIEGSLQRGLDKLCEAADEAVRSGSQLLILSDRTTNMEATKPAIPVLLAVGAVHHHLISNGLRMSASIVVDTAQCFSTHHFACLIGYGASAICPYLALETCRQWRMSPKTVAFIKNGKLPSITVEQTQKNFKKAVKAGLLKILSKMGISLLTSYHGAQIFEIYGLGQDVVDTAFRGSTSRIGGLTMDELARETVSFWSKGFTEEAAKKLENFGFIQLRPGGEYHGNNPEMSKLLHKAVREKNQSAYAVYQEHLANRPVNVLRDLLEFTSDRQPIPIDQVEDASGIMERFVTGGMSLGAISRETHEVIAIAMNRIGGKSNSGEGGEDPIRWKHLDDVNDGLSETLPHLKGLENGDIASSAIKQIASGRFGVTPSFLVNSEQLEIKIAQGAKPGEGGQLPGKKVSPYIATLRNSKAGVPLISPPPHHDIYSIEDLAQLIFDLHQIAPHAKVSVKLVAEAGIGTVASGVAKANADVIQVSGFDGGTGASPISSIKHAGGPWELGLAETHQTLLANSLRERVALRVDGGFKSGVDVIMAAAMGADEYGFGSLAMIATGCVMARICHTNNCPVGVASQREEMRAKFPGVPADLVNYFLYVAEEVRGILAQLGYEKLDDIIGKADILKRRDVQLAKTKSLDLSFLVANTGMPTWTSTQIRKQEVHSNGPVLDDTILADLDVIEAIENEKTIEKTIKIYNVDRAVGGRVSGRIAKKYGDTGFAGEIKLTFEGSAGQSFGCFLTPGMHLRLVGEANDYVGKGMAGGKIVILPVEGSGFNAEDATIVGNTCLYGATGGQLFANGKAGERFAVRNSLAEAVIEGTGDHACEYMTGGCIVAIGKVGRNVAAGMTGGLGYFLDEDDTFPSKVNKEIVKIQRVTAPAGQQQLQRLLQSHLDETGSKKAKEILSNWEKFLPLFWQLVPPSEEETPEANADVEDRKVENLVAQPA

SEQ ID NO: 14060 - protein, 287 aa, Listeria monocytogenes EGD-e
MKKKKRFKQKLLIASLVIGLMAVLSGCGYSTDPITSESTGFWSHYIVFPLSWTITWFSDLFGGSYAVGIIVVTILIRLLIMPLMIKQLKSQKAMTNLQPKIKELQEKYSSKDNETKQKLQQETMRLYQENSVNPMMGCLPLLIQMPILLGFYQAISRTAEIKTDSFLWMQLGNPDPYYILPVVAALTTFLSSKISMMGQTQQNKSMAMIVYIMPVMILFMGITLPSALALYWIIGNIFTVFQTLLINNPFKNKREQEALAAAQVAEDRLKKKAANMKASKKGGKKRK

SEQ ID NO: 14061 - protein, 602 aa, Physcomitrella patens subsp. patens
MQGTMQSQMWRGQVSGASLHFTGATRVQGNSHQDLVYPTQFHKHGVRASAEREVKAKAVAAPPTIAADRLVPRVEERDGYYVLKEEFRQGINPSEKIKIAKEPMKFFMENEIEELAKTPFAELDSSKAGKDDIDVRLKWLGLFHRRKHQYGRFMMRFKLPNGITNSSQTRFLAETISKYGEYGCADLTTRQNWQIRGIVLEDVPALLKGLESVGLSSLQSGMDNVRNPVGNPLAGIDPDEIVDTAPFCKVLSDYIINRGQGNPQITNLPRKWNVCVVGTHDLFEHPHINDLAYMPATKNGVFGFNILVGGFFSPKRCAEAIPMDAWVPADDVVPLCKAILETYRDLGTRGNRQKTRMMWLIDEMGIEEFRAEVERRMPGGSILRAGKDLVDPSWTRRSFYGVNPQKQPGLNYVGLHIPVGRLHAPEMFELARIADEYGNGEIRISVEQNLILPNVPTEKIEKLLKEPLLEKYSPNPTPLLANLVACTGSQFCGQAIAETKARSLQLTQELEATMETTRPIRLHFTGCPNTCAQIQVADIGFMGTMARDENRKPVEGFDIYLGGRIGSDSHLGELVVPGVPATKLLPVVQDLMIQHFGAKRKT

SEQ ID NO: 14062 - protein, 1288 aa, Physcomitrella patens subsp. patens
MKANRDEEREKGRRIKINGELLEKSFKKNSARSTFCQGQTSKSGQTSKSGQPRQKEKRRKERKIARQAKCWRANSDVVDDVVEDDGNARALLPGVEEGRRFQTTTFDVIECKCDCVRSLGEAQPPSRGAEGTLKPPKISTGGVFVNYIDSVAVVLEVVVEDWKKDGVVRCQGKIRGVRGKWCDALAAPGYGCSLLSTFGFLGKLFVEDVRVDSGGTEGSLHFESLHMDPSEPLRAYGADSDKNLQTDSYNGSLMASDSYNFLTGAGVLDVPLKEQNESTHAHKSSKEGAAQNSSGPSIETLYTNHEPSPSSGSFPGRSSPAPECNSWDNINGGGLYGNSNMQNILISGSGMMAAPTSTTTAQLLIGGLHGGSFNDGSESDQGSIYYTSSNHHDDSMAQLYYVNAAAGFSNPGFHSDGRQAGLVTTSLYPSQHGGTSAQQSSTDQSQQQFGVPFISHASLAHGSVRQRALESTGAVPILSLHEHSGSHDGNHHYNWRNGGNEHPFLPMNAESNQNHQSQFDTDLPQYAMSRASHADLSHMQRTDHLQSEISLHMDRSHGSSTTGQVLSLSLSSHQSQFNSSGGQLSESEHMNAVAAQAAAMAKTKELASRYLTGANADLSRFRTPSRDDVVGIGARFLQKHNSGGGRKHLESSNYSGPSGTAGSSNHISASKFERSAQAILNEVCSVTPLKRPPKPIRSPDQQHWSVAGGRSIGADANLTYTGRDDRSAMLAGEVDSVRDPALFVTASSLVTVSQLPLDSETVQELADAARCENRVDLELKKQKLNLMLDEVETRYRRYCEHLQLVITGFNSQAGPSTATPYTILALQAMSRHFRCLKDAIGSQLKIVKRSFGEDERTGQGETSRIRYVDQQIRQQRTLQQLGMLQQHAWRPQRGLPERAVSVLRAWLFEHFLHPYPKDVDKMSLAKQTGLTRSQVSNWFINARVRLWKPMVEEMYVEEQKEYPGDHTAALAQSERMARDQVDIESHTYEQYKGGRGHTGLLQEISAGAQSSRLPNGLKRNEDREHDTGASVSEAGGISSDTNAELYSQLIPRSHHLDIGAAGNYNQEGREAKKPRTSGSDAFNMTSSTTLMHPGMDVEASESCARTQNFSSGGELDLQRKSDVDFGTQCQVLNQINQDENGYTISQQGTTIVDQIEPSVASGTFAAYNSNIGHRYGNEDYSSRTISAALTTSTGVSLTLGLCHCDTNQLRSSLVSPILVKSTYNMDVNDQMNQLNGVEHFESRTKSVSNNCQSSATMSNGHYNQISAVQDDSDNSTQQLSPHHEFVTS

SEQ ID NO: 14063 - protein, 333 aa, Physcomitrella patens subsp. patens
QEYLVPTSFGSVTVTVCGDQEKPALVTYPDVGLNYFSCFEGLFSSPEASSVLFYNFCVYHIDPPGHEVGAPEISPEEYSLSVDDLAYQVAEVLDYFGIDEVIGLGATAGAYILSLFACKYPDRALGLILVSPVAQATSWTEWLHNQVAMINLLYFCGMTNFVKDNLMKRYFGLEVRDAADAAGRTDVLQTIRQNLDDRRCENVMRYLQAIHQRHDLTENLKKLRCRTLILVGEESPFYHEALHISNAMNRRYNALIEVEGCGSLVTEERPQSMLVPIELFLTGYSFYQRPLRSLTSSPRSPLSPLCMAAELLSPESLGLKLKPIKTRVSSPVQ

SEQ ID NO: 14064 - protein, 351 aa, Physcomitrella patens subsp. patens
MEYGCDSIALDMDIAPWGGQEYMVSTSYGPISVTVCGDQDKPALVTYPDVGLNYLSCFEGLFSCPEASSVLFHNFCIFHIDPPGHEIGTPESSPEKPPLSVDDLADQVAEVLDYFGLDEVIGMGVTGGAYVLSLFACKYTDRALGLILVSPLARTPSWTEWLNNQALISLLYFCGMTGFVKEKLLQRYFSAEVRDASAAAGDTDPLMTFRRSMDDRRSKQVMHYLQAIQYRRDLTENLKKLKCRTLILVGDQSPFHREAVHISDAMNRRYNALIEVEGCGTIVTEERPQSMLIPIELFLTGYAFYQRPLLSLTSSPKSPLSPPCMPPELLSSESLGLKLKPIKTRVSSPVH

SEQ ID NO: 14065 - protein, 425 aa, Physcomitrella patens subsp. patens
MPLKSLIREFQEMKGGIGNISRRSFELKFPHHHKGRSSGMVLDESQLRAEPVVEQSCWANMPPELLRDVIQRVEASENAWPSRKHVVACAAVCSSWREITKELVRTPEQSGRLTFPIALKQPGPRDSTMQCFIKRDRTTSTYQLFLGLPPSLVENGKFLLAARKCRRATSTDYIVSLNHEDMSRGSNTYVGKLRSNFLGTKFTIYDSQPPHSGVVASNRGTRRLGSKQLTSRVHCGSHNVAHIAYELNVLGTRGPRRMQCTMHSIPASAMASGGSAPTPTEFTSCGLEEAHVPYSSILLSPRSKAAVVDSSALESSELVSGVLCKEEPLVLKNKAPRWHEQLQCWCLNFRGRVTVASVKNFQLVAATTSSTTTTPTSSGSDHDKVLLQFGKIGKDMFTMDYRYPLSAFQAFAICLSSFDTKLACE

SEQ ID NO: 14066 - protein, 425 aa, Physcomitrella patens subsp. patens
MPLKSLIREFQEMKGGIGNISRRSFELKFPHHHKGRSSGMVLDESQLRAEPVVEQSCWANMPPELLRDVIQRVEASENAWPSRKHVVACAAVCSSWREITKELVRTPEQSGRLTFPIALKQPGPRENTVQCFIKRDRTTSTYQLFLGLPPSLVENGKFLLAARKFRRATSTDYIISLNQENMSRGSNTYVGKLRSNFLGTKFTIYDSQPPHSGVVASNRGTRRMGSKQLTSRVHCGSYNVAHIAYELNVLGTRGPRRMQCTMHSIPASAMASGGSAPTPTEFTSCGLEEAHVPYSSILLSPRSKAAVVDSSALESSELVSGVLCKEEPLVLKNKAPRWHEQLQCWCLNFRGRVTVASVKNFQLVAATTSSTTTTPTSSGSDHDKVLLQFGKIGKDMFTMDYRYPLSAFQAFAICLSSFDTKLACE

SEQ ID NO: 14067 - protein, 907 aa, Physcomitrella patens subsp. patens
MCLPPNLKKRVKGVGQETNGPAHVLKKVRKNQEHTIIPEVSLDYHAFGEFGNRKDSPSRSFQGPGELDGLDSELKGSRGTNSSDAYSLEDFDLGEIVWAKSGKRNDPVWPARVIDPFREAPPMVRELSLPNSLCVMFYGPSSSKGKHSRDYAWVKQGMIFPFNAYLERFQSQTQLNRSRPVDFRQAISEAKLADLGYEEGHDALPGKVHPSMASTVTRSSVLESEEPEDDVSIGGKAKRVCPGCGVQLSVGKKESAKETPLCKHCVKLYKSKQYCGACKKVWLPNDKSSFAQCDSCQIWVHADCDKLTAKNFVGIVEYIIGVFRGTWKFASAERYNSDSRSDFGNCPTSYIVPERLAVICTHVEGDYLPNKHEVICKCSSCLGTKHPMRPSEWERHTGCRKKKWKESIRVKNQEQPLFAWLKDMLSNGAIGLAFEGPDLVPTRTKEQALLATLDQPYEPVDTTWTSERCAVCRMVEDWHHNKMIICNRCQIAVHEECYGVRASDSVGSWVCRACETPDVERECCLCPVRGGALKPSNTANLWVHVTCAWFVPEVKFKNIVKMEPAEGLTNVHLSTFQQKCGICKQVHGVCVSCAHKNCRRSFHIMCAFKSCYHMEMKAVTKNGLEMTQMNLFCSIHRTPNPDMHLMLKSPSGKIPVKRDAAHPSGSESVVSLFGGYASGTGNTSLEHTRSVTNSVAARCLPYSTYDAKAKYKKRGKAIAYRVSGVSWNTIENINSLRDFAVLDQRKVFTNEERLKFLQKTEKKTVCFGKSAIHGWGLFSRRAIQEGEMVIEYRGERVRGSVADLREIRYHKEGKDCYLFKINEEIVIDATDKGNIARLINHSCDPSCYAKILDFQRDDGEGDSRIVLIARKYIAAGEELTYNYRFDEEDTQKVPCLCGSSNCRKYMN

SEQ ID NO: 14068 - protein, 378 aa, Physcomitrella patens subsp. patens
MKLVRQDITKNGAGSVKLVPEEPEDMWHVYNLVAKGDRVSGVTVRKVMRETASGAGEAERVRLKLEVEVETVEYDKVASVLRVRGKNMLESEHVKLGAYHTMELDQQRPFVLAKAVWDAMAIDYLKQACDPAASADVAAVMMQEGLANICLVGASITTVKGRVETSIPRKHGPAVAGYDKALNKFFENVLQAVLRHVNFAVVRCLVVASPGFTKDQFFSYMMLEATRRDLRPIVENKGKIVLTHSSSGYKHALKEVLAAPAVLALIKDTKAVKEVKALDDFHTMLANDSSRAFYGPGHVFAAHDRLAIQTLLITDELFRSADITTRRKYVDLVESVKAGGGDVYVFSSMHISGEQLQQLTGIAAILRFPLPDLEDMEL

SEQ ID NO: 14069 - protein, 106 aa, Physcomitrella patens subsp. patens
TALEESSGIGENFECNICFQKANEAVVTCCGHLFCWPCLYRWLHVHSYHKECPVCKGAIAEYSITPIYGREDAIASARMQGGLGSERIPPRPAARRIESARQQRER

SEQ ID NO: 14070 - protein, 210 aa, Physcomitrella patens subsp. patens
MADTSVQGPQDTDQSQQGEPFLPPGFRFHPTDEELVSYYLTKKVLDSRFTVHAIAEVDLNKCEPWDLPVKAKMGEKEWYFFSLRDRKYPTGMRTNRATDAGYWKATGKDRDVFAHGRSHLVGMKKTLVFYRGRAPKGEKTNWIMHEYRLEGDGGHSLPPRDEWVVCRIFQKSSGAKRSFLFSDSQTSHHHHCCRNLRHSVLASCSRQCLP

SEQ ID NO: 14071 - protein, 364 aa, Physcomitrella patens subsp. patens
GVAVYALGRGDLGQLGIGDYSDHPTPTSLSTLVGKDIVHIAASDYHTAFLTDEGEVYTTGSNDAGQLGVRGMEEQVVPIRVAALDTHMVTHIACGFKHTVAVTETGALASWGGDEYGQLGFDSGNIVDGVQPRIVKGSRDLHFSRVAAGGYHTLALTGSGDVYSFGDGSSGALGHGNLDGCSTPSLVKSLWGLGVTQIACGENHSAALTVDGKVFTWGRGKYGQLGHGSTQNIKLPVAVKALVDHDVIQIACGGDHTLAITSDGRLFSWGHGLWGQTGHGTKEDVLSPKQVHQLEGRVLVQVSAGARHTVVLLDRGEVYGWGDCEQRQLGTCDRCDFSTYGHICVSLCRCECVLMNTSCNLLTL

SEQ ID NO: 14072 - protein, 532 aa, Physcomitrella patens subsp. patens
MDSCGYGGGWVTPGQASSGIPEFQDVVGSPCLLPDSGQTDAVAFCGTDGILLLRFVEKQKQQPRSSSVTVTVEHRTMPSHRHELDAGGPALQLRAAALFPNYLLSCTPQAHCRSDSLNSYPLASLVDMDTWLTASGLETTTRNCGSPTALHNYQQQAEKPMGSVDTNPGIGTGNVFPQIGGYQSDTWWPPINAQMFPRDISTQHGISGTKPGAGNSMTFTTNNYTMDSSWCHNIANTVTTVANADMCDLNAPGEPPSAIPVASVAPCMAIVAAAGAASTRATKISRKGNQSKGGAVSAPTSPSELRPPREKSLGVQKKWNGKRPVSQRENHIWSERQRRKGMNYLFSTLRSLLPHPTSKTDKSTVVGEIIKYIESLQVKLDMLTKKRQQVMAARTLSAFHSIDTLPKAFVSNGLTLVDHSSDPMSMTAITALPPPGSESCLQSYLGSNVGLHVCGLNVFITTSSPRGQRGLLQQLLVTIHKHALDVINATISTSNASIFHCLHCQASQDAELLNNDLHSALQSVITNFEPQF

SEQ ID NO: 14073 - protein, 345 aa, Physcomitrella patens subsp. patens
MFNGNRGLCRSVGLATCAGCHRTLGFGRFLTCLNQNWHPACFCCRYCLQGIVDKEFSVHGNDPYHRDCYKKLFHPKCEICYNHIPLNPKGQIEYRSHPFWNQRYCPSHELDGSQCCCSCDRIQPVDQRYRRLPDGRKVCSECMDSAVMTTKDCQPLYRDVLKFYRNLGMPIEQEISMLLVEREALNHAREVEEGGHTHAPETRGLCLSEEQILPVKMRKLTRHCEVTAILVLYGLPRLLTGSILAHELMHAWIRLDGRYPNLDNDVEEGICQVIAHMWLKSELETLMRTGVSLVIKRLGEFFLHQIETDSSPIYGDGFRTASAAVSSHGLTRTLHHLRQTGEILH

SEQ ID NO: 14074 - protein, 1123 aa, Physcomitrella patens subsp. patens
MSTPKKTYSSTSSAKSKAHSVRVAQTTADAALQAVFEKSGDSGDSFDYSKSVSKSTAESLPSGAVTAYLQRMQRGGLTQSFGCMIAVEGTGFRVIAYSENAPEILDLVPQAVPSVGEMDTLRIGTDVRTLFTASSVASLEKAAEAQEMSLLNPITVNCRRSGKQLYAIAHRIDIGIVIDFEAVKTDDHLVSAAGALQSHKLAAKAITRLQALPGGDIGLLCDTVVEEVRELTGYDRVMAYRFHEDEHGEVVAEIRRADLEPYLGLHYPGTDIPQASRFLFMKNKVRIIADCSAPPVKVIQDPTLRQPVSLAGSTLRSPHGCHAQYMGNMGSIASLVMAVIINDNEEDSHGSVQRGRKLWGLVVCHHTSPRTVPFPLRSACGFLMQVFGLQLNMEVELAAQLREKHILRTQTLLCDMLLRDAPIGIVSQIPNIMDLVKCDGAALYYGKRFWLLGTTPTESQIKDIAEWLLEYHKDSTGLSTDSLADANYPAAHLLGDAVCGMAAAKITAKDFLFWFRSHTAKEIKWGGAKHDPGEKDDGRKMHPRSSFKAFLEVVKRRSLPWEDVEMDAIHSLQLILRGSFQDIDDSDTKTMIHARLNDLKLHDMDELSVVANEMVRLIETATAPILAVDSNGMINGWNAKIAQVTGLPVSEAMGRSLVKDLVTDESVAVVERLLYLALRGEEEQNVEIKLKTFGTQTEKGVVILIVNACSSRDVSENVVGVCFVGQDVTGQKMFMDKFTRIQGDYKTIVQNPHPLIPPIFGADEFGYCFEWNPAMEGLTGWKKDEVVGKLLVGEIFGMQMMCCRMKSQDAMTKFMIALNTAMDGQSTDKFTFSFFDREGKYVDVLLSTNKRTNADGVITGVFCFLQIASSELQQALKVQRATEKVAVAKLKELAYIRQEIKNPLCGITFTRQLLEDTDLSDDQQQFLDTSAVCEQQLQKVLNDMDLESIEDGYLELDTAEFEMGTVMNAVISQGMTTSREKGLQIFRETPREINTMRLLGDQIRLQQVLSDFLLNTVRFTPSPEGWVKIKVVPTRKRLGGSVHVVHLEFRVSHPGAGLPEELVLEMYDRGKGMTQEGLGLNMCRKLVRLMNGDVHYVREAMQCYFVVNVELPMAQRDDASSQM

SEQ ID NO: 14075 - protein, 54 aa, Physcomitrella patens subsp. patens
MLRYKEKRKIRRFDKRVRYESRKARADIRKRVKGRFVKAGQAYDYDPLATTRSF

SEQ ID NO: 14076 - protein, 360 aa, Physcomitrella patens subsp. patens
MGGVVSPTEDRVDGRNLTPFLVVGSDADSHRVGDPELGILGESSEGSIRFIACWIRCCRGSLPWDITLVSWVCEGAAEMLDNWNRELNYRKLMDGGRGAGAGDGAVPAAAAAEAVTVDLSMCNQCGNLIENTVTYCHACYDLRSESDFRNERRWRELEGDFMVVEADLHKERAATKRLEGALQSFRHMLLQGIHADVTIETGEFDRTPAHRAVLASRSPVFRAMFEHELKEKTCAHIHVADVSTPAMRALLLYLYTGDHDTKVMKEHGMALLTAAHKYDIPDLKRVCETAVANSVKPSNVIETLQQARLYDATWVKRACVDCIAQNLEKVAFTEEFRNLIFRNDDPEAILDTIQSIAALQ

SEQ ID NO: 14077 - protein, 461 aa, Physcomitrella patens subsp. patens
MNTGEVLPDWLNKGDNAWQLTAVTFVGLQSMPGLVILFGSIVKKKWAVNSAFMSLYAFAATLLCWVTWAYKMSFGEWLLPMWGKAGTTLGYEFLLEQAKMPSTVHFYKNGTVESDAVEAMYGMADFVLFQFFFAAITLILLGGSVLGRMSFRAWMLFVPLWLALSYTVGAFSLWGGGFLWQWGVIDYAGGYVIHVSSGVAGFVAAFWVGPRLPKDRERFPPNNMLLMLTGAGLLWMGWSGFNGGAPFSANIISGLAVLNTHVCAATSLLTWTTLDVIFFGKPSVIGAVQGMMTGLVTITPAAGFVPGWAALIMGVLARSVPWWSMMWLHKHWSLLQDVDDTLGVFHTHAVAGCLGGVCVGLLADPTLCAYMDVPVTNSNGLLYGGNGGVQVLKQIVGALFIIGWNIVVTTLIIFAIGMVMPLRMSEEHLLVGDDAEHGEEAYALWGDGEKFDDLSLNTYRR

SEQ ID NO: 14078 - protein, 108 aa, Physcomitrella patens subsp. patens
FRMFEFKVRRCMRETSHDWTDCPFAQPGEKVRRHDLQRHHYSRMACPDFRKESCRRGNACELAHGVFECWMHPARYQTQPYKDGRNCPRPVYFFMHTPEQLRLLPATA

SEQ ID NO: 14079 - protein, 310 aa, Physcomitrella patens subsp. patens
MTVCGEKLEILNPHCHRKWRRGSCGGAVALSANALAAQFDEVVAEKSDSPVILEVQGLTAVVSDTRQEILKGVDLVIRAGEVHAIMGKNGSGKSTLSKVLVGHPDYEVTGGTAIFKGENLRDKEPEERSHCGLFLSFQSPVEIPGVSNMDFLRMACNARRKAQNLEELGPLEFYGFVAEKLGALNMDPKFLDRNVNEGFSGGEKKRNEILVLTGDGGEQVLEADMAILDEIDSGLDTDALRDVATAVIGLKKDDNAILMITHYQRLLNYIAPTYVHIMEAGRIMQTGDMSLAAQLEAGGYNAVQRLIASN

SEQ ID NO: 14080 - protein, 183 aa, Physcomitrella patens subsp. patens
MARSIDPLVVGKVIGDVIDTFVPSVDMAIHYSTRQVTNGCQMMPSATAQAPEIHLSDKSGGNNLYTLIMIDPDAPSPSEPTLREWLHWIVTDIPGNSGGSEMTSAPSKSCGRELVPYMGPRPPVGIHRYIFVLFKQPLTPFHITPPTVRSNFNTRYFAAQCGLGLPVAATYLNAQKEPGSRRR

SEQ ID NO: 14081 - protein, 461 aa, Physcomitrella patens subsp. patens
MEDAKASSSRGVRRQVLALSAGASHSVALLSGDLVCSWGRGEDGQLGHGDAEERHFPTIVSALDDCEISSVTCGADHTTALSNSTKTVYSWGWGDFGRLGHGNSSDLFIPQPIKALKGLEVKQIACGDSHCLAITTDGEVLGWGRNQNGQLGLGHTEDVLTPHKLTAFEGVAVKMLAAGAEHTTAVTENGKLYGWGWGRYGNLGLGDREDRLVPDQVAAVAGELMKMVACGWRHTICVAESGNMYTFGWSKYGQLGHGDFADHLIPHQVQALKSKKIQAITGGWRHTFALDSDGRLYGWGWNKFGQVGCGNTEDQSSPQLVKGLQDQVVTVVQCGWRHTLAMTDRGNVYSWGRGTSGQLGHGDTVDRSTPKRIEILSSDGFACEQIESSGSSNCTSKTSNWISPAERYAVVPDETLGPLARRLHQTTNFEGEELEVPTASDDSSGDANVPDTDTKRMRTTL

SEQ ID NO: 14082 - protein, 61 aa, Physcomitrella patens subsp. patens
INDGCQWRKYGQKMAKGNPCPRAYYRCTVMSGCPVRKQVQRCAKDTSILVSTYEGTHNHPL

SEQ ID NO: 14083 - protein, 1060 aa, Physcomitrella patens subsp. patens
MDSSEPLRAYAADTNHNLQADSYNSSLMASDSYNFLTGVGVLEVPLKEPSQSQAPKTSEGAAQNSSGPLIDTLYTNHEPSPTSGSFPSRSTPVSKSNNWENINGGGLYSNSNMQNILISGSGIMAAPTSTATAQLLIGGLHGGSFNDGGHSDHGSVYYTPSNNQEESMAQLYYVNAAAGFSNAGFHSDGRQAGLVTTLLYPPQEGGTTAPQSSSDQSQQQFGVPFISQTALAHGAVSQRALEASGAIPGLSLHDHSASRSGNHHYNWRNGGNEHSFLPMNEELNQNHQSQFDTDLPQYGITRACQADLSRMHQTDHLQSEIGLQMDRSHGVSVTGQGLSLSLSSHQSHFHSGGGQLPDSEQMNAVAAQAAAIAKTKELASRYLTGASADLSRFRTSSRDDVMGMGARFLQEHMDSGGRKHLASSSYSGPSGTAGSSNHISASKFLRSAQAILNEVCRVTPLKRPPKSVRSSDQQHWSMAGGSSTSVDANLTYNGREERSGMLAGEVDSARDPASFVTTSSLVTVSQVPLESEMIQGLAEAARCESRDDLELKKQKLSLMLDEVEARYRRYCDHLQLVITGFNSQAGPNTATPYTILALQAMSRHFRCLKDAIGSQLRIVKRTLGEDDRTGQGETSRLRYVDQQIRQQRALQQLGMLQQHAWRPQRGLPERAVSVLRAWLFEHFLHPYPKDVDKLSLAKQTGLTRSQVSNWFINARVRLWKPMVEEMYVEEQKEYSEDHSTALAQSERMARDQVEIENNTYEQYEGGRGHSGLLHEISAGAQSSRLPNGVKRNDDREHDAGASVSEAGAMSSDTNTEFHSQPLPRGHHLDVGVAGSYNPEGREVKKPKLNSVSDAFNSNSSTALIHPGMNVDTGENCAQPQNFSPEDELDLQGKGDTDFGAHSQSMNQINQDENGYTISQRGATTVDQLEANVASGTFGSYNSNIGHRYGNEDYASRTISAGLTTSTGVSLTLGLRHCDANQLGSSMVSPTLTKNPYNMDMNDQMNQLNRVDHFEGRIEGISSNGQSSATMSNGHYNQITVHENTNNSTQQLSPHHEFVTS

SEQ ID NO: 14084 - protein, 61 aa, Physcomitrella patens subsp. patens
KKRRYRGVRQRPWGKWAAEIRDPQKAARVWLGTFNTAEEAAMAYDKAAIRFRGLRAKLNFP

SEQ ID NO: 14085 - protein, 138 aa, Physcomitrella patens subsp. patens
GPLPMDQNDSDDMFIYSILKDASHSAADSSILQETTFDPMKSIQVKIKQERSPRATTTSQKPAEMKPSVKSHYIGVRRRPWGKFAAEVRDSKRNGVWVWLGTFDTAEQAALAYDRAAFNMRDSRAILNFPTRITTDSS

SEQ ID NO: 14086 - protein, 352 aa, Physcomitrella patens subsp. patens
CAGCKKPLGYGRFLSCLGKNWHPSCFACKLCSRPIAEREFSVQEGEPYHRDCYKELFHPKCEVCLQFIPTNAAGLIEYRSHPFWNQKYCPKHEADGTPRCCSCDRVETHDEQYVPLADGRKLCLECLETAVFDTKECQPLYREILKFYKNVGMMIDQEVPMLLVERSALNDAREGEKEGMHMTSETRGLCLSEEQTITTVFGGKPVFSRGPWSLWTEPRQLRRHCEVTAILVLYGLPRLLTGAILAHELMHAWLRLTGGFPHMSPEVEEGICQVMSHIWLSAELKRSQNRTSTNATSPAQERLGKFYLHQIANDTSPIYGNGFRRGLKAVNYHGLVRVLEHLRMTANFPPGP

SEQ ID NO: 14087 - protein, 283 aa, Physcomitrella patens subsp. patens
MGRGKIEIKKIENTTSRQVTFSKRRGGLLKKAHELAVLCDAEVALVIFSSTGKHFEFASSGSMRDIIERYRKSSDGAVKRGTNTDLLGREVIKLKQQVERLESSQRHMLGEDLSALKVSDLLELEQQLDQGASRVRARKNQLILEEIEDLRRKEHELMIANEALRKKIADAEGAAEAAARANFPDARLESPKPFASDFSRDMSVSSQLAASVYPHPNLLQAQRSQTSLQLGWLSEQQIPSTEESAGCAGESSLKWDHPHFHIQNRLHANISPSVRIYKLHVDR

SEQ ID NO: 14088 - protein, 319 aa, Physcomitrella patens subsp. patens
MSSQVFVPAANEKTFASFMTDFLMGGVSAAVSKTAAAPIERVKLLIQNQDEMLKSGRLSHPYKGIGECFSRTVKDEGMMSLWRGNTANVIRYFPTQALNFAFKDYFKSLFGYKKDKDGYWKWFAGNLASGGAAGASSLLFVYSLDYARTRLANDAKSSKKGGGERQFNGLVDVYKKTLATDGIAGLYRGFAISCAGIIVYRGLYFGIYDSLKPVVLVGNLEGNFLASFLLGWGITIGAGLASYPIDTVRRRMMMTSGEAVKYNGSMDAFKQILAKEGAKSLFKGAGANILRAVAGAGVLSGYDQLQILLLGKAYSGGSG

SEQ ID NO: 14089 - protein, 160 aa, Physcomitrella patens subsp. patens
TSTSSVVSDGKNSKSLEANEQTSLKRQRSGLVKAERSASENSGDSASPRSLKATSKPPQDLSKQDYIHVRARRGQATDSHSLAERVRREKISERMKFLQDLVPGCSKITGKAVMLDEIINYVQSLQRQIEFLSMKLAAVNPRLDYSYDLLGKDMLQSRSP

SEQ ID NO: 14090 - protein, 590 aa, Physcomitrella patens subsp. patens
MALLNRWNSAIDGLNVHCGSRSLCVKNWLLGAQIVSLERGWKIKNLSTASRPALSKWNCSVLSTSLEEAIVGKPDCDDSSGREVIGEEETASEAPLLSALRECAEMDAASFHFPGHRRGSGAPPVMEALIGKSAFAADLPELPELDNLHAAEGVILEAQCKAARLFGAEQTWFLVNGSTCGIQAAVMATCAPGEYLILPRNVHMSAVSAMVLSGALPKYVSPISDSTWGVAHGVQIAQFEAAIREIRSTGGKIGALLVVSPTYFGICSLIRDLAQVCHAQDIPLIIDEAHGAHFRFHSKLPQTALEQGADIAVQSTHKVLGSLTQSAMLHAQGSRINRARLAQCLQMLQSSSPSYLLLASLDASRAHMEVNRQDSKLDAALSLAFMVRNALQQLPGLMILDLASMPSDAVAESSIAGTDPLRITVGLWGLGLTGFEADDILRFEFGVIAELPSLRSITFAVSVGSSHRDATRLIDSFTALSSRYACRTDQIVGPISNPLLQDQAIVWENQLMYLSPREAFYSKSEEIMVECALGRVSADLLCPYPPGIAVLTPGEVITKEAVDYIQAVIAAGGAVSGAIDDDFKSVRVLL

SEQ ID NO: 14091 - protein, 388 aa, Physcomitrella patens subsp. patens
MFDWLVKMVMACWRPVRRYTQGRDGTDRQDPLLWSKDLCPHAVGEFSYAVVQANSILEDMSQVETGSFGTYVGIYDGHGGPDASRCINASLYDFVLKNTTEQGGMSCDVLCQSFKEVEGKFLEIVERAWAVKPQIAAVGSCCLVGAVWDSKLYIASLGDSRAVLGSCSRDTGLPVAKQISTEHNASIESIRNELFAKHSDDPQIVVLKHGVWRVKGIIQISRSIGDFYLKKAEFNQPPLIARFRLPDPLKRPVISSEPECNVITLGPDDEFVIFASDGLWEHLSSKEAVDIVYSHPRAGIARRLIKAALQKAATKREMRYSDLKGIERGIRRHFHDDITVVVLYLDTKLLNRGGSISNHISSKCPIDMPKGDNPPSLVSSNMNLAFNK

SEQ ID NO: 14092 - protein, 221 aa, Physcomitrella patens subsp. patens
MEASTDNSAPLKRHKSDGEDVRAVKAEQASASENSGDSISPRSTLKGATSKRPQDFPKQDYIHVRARRGQATDSHSLAERVRREKISERMKFLQDLVPGCSKVTGKAVMLDEIINYVQSLQRQVEFLSMKLATVNVPRLDYSYDLLSKEMPMQSRSPETTLLGPDPLAAPFGDHSQCSPMQSISTPSCHFEALYLRRSMSVPTMMSRFDSAGHFSDLFSQV

SEQ ID NO: 14093 - protein, 308 aa, Physcomitrella patens subsp. patens; identical to SEQ ID NO: 366

SEQ ID NO: 14094 - protein, 527 aa, Physcomitrella patens subsp. patens
MPAGSSLLQEFKFVENSRRDRTRVWSLQVRCDAGVSVVKELVGEDEGRRIVQDFTTVMKFGGSSVASAHRMKEVAQLILSFPEEKPIIVLSAMGKTTNNLLKAGDKAISCGVKNSGRIEELQVVRDLHKTTARELKLDESLITGLLDELEQLLMGIALMKELTSRTKDYLVSFGERLSTRLFAAYLNSIGTYARQYDSFDLGIITTDEFTNAEILDVTYPTVRERLFNDLEKDAAKGTPICIVTGFLGKGIETGCVTTLGRGGSDLTATALGKALGLREIQQVWKDVDGVLTCDPRVFPSALSVPFLTFNEASELAYFGAQVLHPQSMRPARDANIPVRVKNSYNPKAPGTLITRERDMSQVEMTSIVLKKDVTMLDIQSTRMLGQVGFLAKVFTTFEELGISVDVVATSEVSISLTLDPAKLWERALIEQANKMKSELSRIANVQLLKKKAIISLISNVKQSSAVLEKVFSVFKSNNINVQMISQGASKVNISMVVDDDDGPKCVQELHQAFWPDSDEVLAVNGHL

SEQ ID NO: 14095 - protein, 662 aa, Physcomitrella patens subsp. patens
MGRHLLLVLGLVLAAGVVGSFGAAEEAAKLGTVIGIDLGTTYSCVGVYKNGHVEIIANDQGNRITPSWVAFTDSERLIGEAAKNQAAVNPERTVFDVKRLIGRKFEDKEVQKDIKLFPYKIINKDGKPHIQVQVKDDEAKVFTPEEISAMVLLKMKETAEAYLGKKIKDAVVTVPAYFNDAQRQATKDAGVIAGLNVARIINEPTAAAIAYGLDKKGGEKNILVFDLGGGTFDVSVLTIDNGVFEVLSTNSDTHLGGEDFDQRIMEYFIKLIKKKYNRDIGNDKKAIGKLRREAERAKRALSNQNQIRVEIESLFDGVDFSEPLTRARFEELNNDLFRKTMGPVKKAMDDAGLKKTDIDEVVLVGGSTRIPKVQQLLKDYFDGKEPNKGVNPDEAVAYGAAVQGGILSGEGGQETKDVILLDVTPLTLGIETAGGVMTKLIPRNTMIPTKKSQVFTTYQDQQTTVSILVFEGERSLTKDCRELGRFELTGVPGAPRGVPQIEVTFEVDANGILNVKAEDKGTGKSEKIVITNDKGRLSQEDIDRMVKEAEEFAEEDKKMKERIDARNSLETYVYNMKNQVGDKLGEKMSVEDKETIETATKEALEWLDENQSAEKEDFAEKLKEVEGICNPIVSKVYQAAGGAGKGGAVEEGESDNESHEDL

SEQ ID NO: 14096 - protein, 91 aa, Physcomitrella patens subsp. patens
DSFKCNICFQKANEAVVTCCGHLFCWPCLYRWLHVHSYHKECPVCKGSVAEYNITPIYGRENALAEAGMQDGLGTETTPPRPVARRVESAR

SEQ ID NO: 14097 - protein, 209 aa, Physcomitrella patens subsp. patens
MAAPWHQEPQGKDQSQRVESFLPPGFRFHPTDEELVSYYLTKKVLDSRFAVRAIAEVDLNKCEPWDLPEKAKMGEKEWYFFSLRDRKYPTGMRTNRATDAGYWKATGKDRDVLAHGRPRLIGMKKTLVFYMGRAPKGEKTNWIMHEYRLENDGGHPLSPRANKDEWVVCRIFEKSSGGKRGFSMSESHMRQGMAYQLEDARSSLPPLMD

SEQ ID NO: 14098 - protein, 61 aa, Physcomitrella patens subsp. patens
HFRGVRQRPRGKFAAEIRDPAKQGARLWLGTFDTAEEAAIAYDRAAVRMRGSRALLNFPLR

SEQ ID NO: 14099 - protein, 351 aa, Physcomitrella patens subsp. patens
MEQRLDSVALDMDIAPWGGQEYLVPTSFGPISVTVCGDLDKCALVTYPDVGLNYLSCFEGLFSTPEASSVLFHNFCIYHIDPPGHEVGAPEISPDQGFLSVDDLADQVAEVVDYFGINEVIGLGATAGAYVLSLFACKYPDRALGLILVSPVAQCASWTEWLQNQAMINLLYFCGMTHFVRESLIKRYFGSEVRDAAASVGGADMLKTLCQYMDNGRSENVMRYLQAIHRRRDLTEDLKVLRCRTLILVGEESPFHHETLHMSNAMNRRYNALIEVEGCGSLVTEERPQSMLVPIELFLTGYAFYQRPSRSVSSSPSSPLSSLCVAAELLSPESLGVKLKPIKTRVCAPMQ

SEQ ID NO: 14100 - protein, 319 aa, Physcomitrella patens subsp. patens
MLKLRQLFAEQKRYLDYFFDHIDYSQLQNFTQLLLECKGVIFFSGIGKSGFIAQKICQTLVSTGTKSVFLSPTNALHGDIGIVGPKDIVVVFSKSGATEELLKLVPCVRAKGAYIVGVSSHNESMVAEFCDMHVYLPLERELCPFDLAPVTSTAIQMLFGDTVAIALMQAKNLTREEYAMNHPAGRIGKRLTLRVQDVMKKGADLPICRESDLMIEQLVELSARGCGCLLVVDSAKRLVGTFTDGDLRRSLHPFAETIFKVTVRELCNRSPRTILVDAMASEAMTRMEQQPVVEFLPIVNHANILVGLVTLRGLVAAGL

SEQ ID NO: 14101 - protein, 137 aa, Physcomitrella patens subsp. patens
MGSPTFSDALFNKFLPSNNEDEEAWPAVDMYGCDQFRMFEFKVRRCMRGRSHDWTECPFAHPGEKARRRDPRRFHYSGTACPDFRKGSCRRGDMCEFAHGVFECWLHPARYRTQPCKDGRNCRRRVCFFAHTPEQLR

SEQ ID NO: 14102 - protein, 495 aa, Physcomitrella patens subsp. patens
MIAESTSYVPSAYQNTGGVLPDWLNKGDNAWLLTASTLVGLQSMPGLVILYGSIVKKKWAVNSAFMALYAFAATLLCWVGWAYKMSFGDQLLPLWGKAGTTLRYTYLLSQAGMPSTIHLFKNGTQEASALTLNYGMANMVLFQFFFAAITIILLAGSVLGRMSFRAWMLFVPLWLTFSYTVGAFSVWGGGFLWQWGVIDYAGGYVIHVSSGVAGFVAAYWVGPRLPKDRERFPPNNMLLMLTGAGLLWMGWSGFNGGAPFSANIVSGLAVLNTHVCAATSLLTWTTLDVIIFGKPSVIGAVQGMMTGLVTITPAAGFVPGWAALIMGVLAGSIPWWTMMWLHKRWSLLQNVDDTLGVFHTHAVAGCLGGLCVGLFAEPELCTYMNLPVTNSNGLFYGGNGGVQVLKQIVGALFIIGWNIVVTTLIIFAVGMLMPLRMSEEHLLVGDDAEHGEEAYALWGDGEKFDVSRHARSADSYEMEQSHHGPRPDRNAILHI

SEQ ID NO: 14103 - protein, 113 aa, Physcomitrella patens subsp. patens
MGGVWMFKEGFTQLVENPLAEPLDGRNMTGVRRKVLVHVATNGAITNYDQLEEKLREKGWTRYYAGDSNLRQYHKSDCTNDLISLPKSFAYIKTMHMYDIVVKVPNTFVVRDS

SEQ ID NO: 14104 - protein, 908 aa, Physcomitrella patens subsp. patens
MNPEKFTHKTNEALAAGQELATEAGHAQYTPVHLTLALLNDNEGLLRQAIATVSGGDQTINSVERVLKNTLKKIPSQSPAPDASPANNALIKCLKKAQSLQKSRGDSHLAVDQLILALLEDTQIADCFKEAGVSATRVKRELEAVRGSSKKVDNATGDSNFQALKKYGRDLVEDAGKLDPVIGRDDEIRRVVRILSRRTKNNPVLIGEPGVGKTAVVEGLAQRIVRGDVPSNLLEVRLVALDMGALVAGAKYRGEFEERLKAVLKEVEDSDGKVILFIDEIHLVLGAGRTEGSMDAANLLKPMLARGQLRCIGATTLDEYRKYVEKDAAFERRFQQVMVSEPSIADTISILRGLKERYEGHHGVRLLDRALVVAAQLSSRYITSRFLPDKAIDLIDEACANVRVQLDSQPEEIDVLERRRIQLEVEAHAMEKEKDKASKARLVEIRQELQNLEDQLRPLKMKYQREKERVDELRKLKQKREDLQASLLDAERRYDLARAADLKYGALVEVDKAIQKMEQQESGENTMLTESVGPEHIAEVVSRWTGIPVTRLGQNEKARLLGLADRLHQRVVGQDEAVQAVAEAILRSRAGLGRQQQPTGSFLFLGPTGVGKTELAKALAEQLFDKENQLVRMDMSEYMEQHSVARLIGSPPGYVGHEEGGQLTEAVRRRPYSVVLFDEVEKAHPAVFNTLLQLLDDGRLTDGQGRTVDFTNTVIIMTSNLGAEHLLMGLSGMMSMDIAKEKVLEQVRVHFRPELLNRLDEIVVFEPLKHDQLRKVARMQMKDVAVRLAERGVALAVTDAALDLVLTESYDPVYGARPLRRWLERKVVTNLSRMLINDEVDDNSTVFIDVKPGENLLTYTVERNGGLVNSVTGKKADILIEVPRAEQHDLKRMRVEEPDSDLDDEMED

SEQ ID NO: 14105 - protein, 360 aa, Physcomitrella patens subsp. patens
MRTETENENFVYVNGTRYQKLGKIGKGGSSEVFKVIATNCSIYALKRINLKGRDWSTAQEFYQEIKYLKALRGKRHIIQLIDSEVTNKKVLEKRWEGREITEEAFIYMVLEYGEIDLAGMLASKRKEMQMMNESKLDENWLRFYWQQMLEAVRTIHDERIVHSDLKPANFMLVRGELKLIDFGIAKAIQNDTTNIVRDSQAGTLNYMSPEACLQNQTDEEGLEIKQGRASDIWSLGCILYQMVYGHTPFAELSFYSKIQAITNPHHKINYPAVTSPWLLDIMKKCLTWDRRKRLRIPELLEHPFLQPHLSPFCARCEQLSARMTSSERKQLVDQFLSSYENWGQRYASRNSAPCGQGSPT

SEQ ID NO: 14106 - protein, 656 aa, Physcomitrella patens subsp. patens
MAFMSPAPDQATVFGGLVKKSMSIPSSFNTAAMSPTDSMNSLYSLEKQLVGQPRSNAALSGVPGVSGFSRSATNYWGHATSTDMQQILGDSASVSPQEALGSGMVSSDWQQLLDAKSSAYKYPPGVSAAATPARGGIMENARIREMLTGRVGGSPVPHKSWSPLDTVAAGIAVDQSKGGLALHGVDLATSHCLAQFTSDPAFAERAAKFSSFGNGKYPQIALSLPVNDAHCKPRSRSSESGCKSSRTTCNPNSAKKSTATVAAGMEENTAAAPAAASVLAAPAAADRSCDMDVDGVGNNDKSPTRTASVPELEAIEGASLVTMDRTHELAEVAAGLEPNNSSSVTEQQQASAASPARSPTGSDDSDRRKRKSSSADKLDVDSKAADVADSQPKRCKGDNDDLVKAKAERSSSENSGDSGSPRAHKENNSSKDHAKQDYIHVRARRGQATDSHSLAERVRREKISERMKYLQDLVPGCSKVTGKAVMLDEIINYVQSLQRQVENLSMKLASVNPGPSSTRIDHNFETTMNKDMLQSQMSGSLGGSESTTTFGMMQQHQHQPQPQGHMMNGHCGLDFRAMGTSMDGYLRRSNSAPIRVQSGITSLDSFGDDVSQSIGWDGELQSIVNQMGFSFQGRYGSSPLDSLQCQLPVGHMKVEM

SEQ ID NO: 14107 - protein, 102 aa, Physcomitrella patens subsp. patens
MANNQTNTQDQEEKKPLDGAGQHINLKVKGQDGGEVFFRIKSTATLRKLMNAYCDRQSVDPSSIAFLFDGRRLRADQTPAELEMEDGDEIDAMLHQTGGNAC

SEQ ID NO: 14108 - protein, 407 aa, Physcomitrella patens subsp. patens
MAKFVLVLNSGSSSLKYALYDLAKAATCISVGIVGGIGTERSFISHKNVQTSQDVTLQGLDIGHHKQGLQKVLDLLRLGEGSSHNVMAVGHRVVHGGEALTRPTLVTESVKQAIEKAAPLAPLHNPPNLEGILVSEEIFECPQVAVFDTAFHSTMPPAAYHYAIPYNLYEELGIRRYGFHGTSYQYLLGQVSNILGKSQADVNMIALHLGAGASMAAIRNGKCIDTSMGVTPLQGLVMATRSGDIDPAIIQILASEKGMDVDEVTNMLNKKSGLFGLCGEKDLRSVWDAAEAGNARHKLALEVYVHRIRSYLGSYFFQLEGQVDALVFSAGVGEASGRTRALICEGLEKFGIEIDSSQNGEGKLKEAKAIHKKGSKVQILVIPTNEELSIAQQTLQVVEAQQQHMKR

SEQ ID NO: 14109 - protein, 468 aa, Physcomitrella patens subsp. patens
MNPALNLLYPPRQFHRFSPVSCAMTPPFPSKPLVDKVVIVGGGLGGLSAAIQLRNVGIDAQVYERGGRLTGGEGTLISLFPNGCKCLNQGDPNVVQKIREAGRLDAPAMMINPFTGDLLGSWELSERMEKTYGQPVVSVLWRHALGILSDALPDECKHFGHECQDVTQDDEGATVHFKKDDKTVLVKAPLVIGADGIRSVIRSKTFGDMTPRDNGRTMWRAVIDAKLCNHPALRVGTTTAAQNGRTIFVVNGVGDKLYWAYSLTDEATDGRAQVRSKTLEEAKQRLRQEFQGWDLALHILEATDPELILERRVLDLPVLTKWTFGRVAVLGDAAHAVTPALGQGANLAFEDGLELAIQLSSASDLSSALKAYEHRRIPRAQIVSAKTQATGAAHPQSFYDWLYKEIPSYSRDPVCKVDMECAIMYCYATFNKATRYSLREYHETMKSCYGIKATSRETSARPATSVAA

SEQ ID NO: 14110 - protein, 113 aa, Physcomitrella patens subsp. patens
MAAGSGSDLELWIKKKNSSEPVVVYSKTYCPYYRYCMRVKKLFSTLGYDFEVIELDAGGQLGLQDALERVSGQYTVPNVFIGGKHIGGCDDTVALHSKGQLEPLLQAAGANRS

SEQ ID NO: 14111 - protein, 196 aa, Physcomitrella patens subsp. patens
MGIYGEGGSNAPPEPVLGHPVYPPPNPYTHQGGPYAPQPSYDHMPAQAPIGGPPMVIPTALTGEWTTDLCGCCSDCDLCCQTCWCPCVSFGQITEVLDEGRSSCFVQGTIYALLCTIGVPCVYSYRWRQRLRRKYMLEKGCCGDFCLHCCCGWCAICQEHRELQNRGLDPSLGWEVAQQNYVRPMVAPTAPGVMLR

SEQ ID NO: 14112 - protein, 636 aa, Physcomitrella patens subsp. patens
MASEVAKPVENGIHPKLEQSFDAPAATKPSNSELLKLHRDGVPFVMPSKRGIDTTAPDFDPQDFLDLLAEDVMFIQHEKLREILEVQADVEYLRRVGLNGRTDVESFRKCVPIVSYGDLEADIMRVVNGEKTPIFTVDPIVTLNLSSGTTAGKPKFIPSTTRAYEYFMFLQTFVTSIYRREFPGYKDGTSFTLAFAGKQIDTPSGIKAGAQSTNHFRGPMFRNRVRNANREYCVPDEVILSDDTTQSMYCHLLCALAQAPEIVKVYGTFAASIVSAVRALQKHWSEIVEDIRTGTLNAKITEPEMRTAVQQMLHPNPDLASRIEEECSKDNWEGILPRLFPNAHFVSCVISGSMLQYAPALKHFSGHLPTISLAYAACECSFIGFNPSMKCAPEDITYMLWPETAYYEFIPLDEDSNPEQDGDVVRTVEACDLEVGRQYELVVTNVIGLYRYRLGDVLTMKRFHKTAPVFEFVRRKNVILSVHTDKTDEKELQSVVNLATEALAGTGMELSDYTSTADVSTLPGRYVIFWEMVDSSDLDYDVLQHCANTLDANFNSDYRRWRSGHQIGPLELRIVKEGTFNRVMDSAVARGASPSQYKPPRCVNNPHTRQILDDGLVASFHSTITPNPAPIALTGS

SEQ ID NO: 14113 - protein, 379 aa, Physcomitrella patens subsp. patens
MECAGVFSVHPNVDVRGDGVHADVLSSSTHGWRCDVENEDEKNSSISPKRKPRGPLCDDSQALAKRRDTSSGDLQPSRIPLRFRVWDFVFIVGILKRHGNPASSSGRDFVSIAGRTRLVGAWASAQHADNSAAQNVCENYKGRLRLFIDTADSKSWQRWLPSGAFYGVTTNPLLLERANVRCELKTLSELANRAFDLGAEEVQIQTWGQTVEEMVNTGSKLAEINPGAIVVKIPTTKNGLVTASHLAKSGIPVTMTGVYSVHQALLAVGVGAAYAAPYLGRMVALGKPGMEDIQEMQQMVGGVKSDMRLLVASIKDVKQITGLAARGVESFAIPVPVVEKLFQDGDTEKAAAEFEDAVSRTLEMSASTSTYASYPHENR

SEQ ID NO: 14114 - protein, 348 aa, Physcomitrella patens subsp. patens
MTSTAGQPQFRYTQPPSKVLHVRNLPWECSEEELIELCKPFGKVVNTKVNVGANHNQAFVEFADLNQAIAMVSYYASSSEPAQVRGKTVYLQYSNRQEIVTSKNSGDVASNVLLVTIEGVEAGDVSIDVLHLVFSAFGFVHKIATFEKSAGFQALVQFSDANTASAAKSALEGRSIPRYLLPDHVGPCHLRISFSAHNDLNVKFQSHRSRDYTNPYLPVAPSAIDGSGQFSVGPDGKRREPESNVLLVSIENMQYAVTIDVIHTVFSAFGFVQKIAIFEKSAGFQALVQYPDIPTAVGAKEALEGHCIYDGGFCKLHLSYSRHTDLNVKVNNDRSRDYTNPGLPPTQP

SEQ ID NO: 14115 - protein, 1130 aa, Physcomitrella patens subsp. patens
MSTPKLAYSSGSSVKSKHSVRVAQTTADAKLQAVYEESGDSGDSFDYSKSVHASKSTGENVSAQAVTAYLQRMQRGGLMQTFGCMLCVEESNFRVIAFSENAPEMLDLMPQAVPSVGQQEVLGIGTDARTLFTPSSAAALEKCAGAVDVTMLNPISVHCRSSGKPFYAILHRIDVGLVIDFEPVRSNDAIVSSAGVLQSHKLAAKAISRLQALPGGDIGLLCDIVVQEVRELSGYDRVMAYKFHEDEHGEVLAEIRRSDLEPYLGLHYPATDIPQASRFLFMKNKVRMIGDCFASPVKVIQDKDLRQPISLAGSTLRAPHGCHAQYMGNMNSIASLVMAVIVNDPDEDPNARGGQQRGRKLWGLVVCHHTSPRTVSFPLRSACEFLMQVFGLQLNMEVELAAQLREKHILRTQTLLCDMLLRDAPIGIVSQSPNIMDLVKCDGAALYYGKRFWLLGITPNDAQIKEIADWLLEHHQDSTGLSTDSLADAGYPGAAQLGDAVCGMAAAKITSKDFLFWFRSHTAKEIKWGGAKHDPDEKDDGRKMHPRSSFKAFLVVVKRRSLPWEDIEMDAIHSLQLILRGSFQDIDDSDTKTMIHARLNDLKLQGMDELSTVANEMVRLIETATAPILAVDSGGFINGWNAKVAELTGLPVEEAMGRSLVKDLILNESIDVVQRLLHLALQGDEEQNIEIQLKTFGPQKEKGAVILIVNACSSRDVQDNVVGVCFVGQDVTGQKQVLDKFTRIQGDYKAIVQNPNPLIPPIFGTDEYGYCSEWNPSMEKLTGWKREEVIGKLLVGEIFGIQLMCCRLKSQDAMTKFMIVLNGAMDGQDTDRFPFSFFDRQGKYVDPLLTVNKRTDAEGSITGVFCFLHTTSVELLQALTVQRSTEKVAFAKLKELAYIRQEIKNPLYGIVFTRNLMEDTDLSVDQRQFVETSAVCERQLRKILDDLDLESIEDGYLELDTTEFEMGTVMDAVVSQGMITSREKGLQLIRETPSEIKNMCLYGDQVRLQQVLADFLLNAVRFTPSSEGWVGIKVVPTKKRLGRGVHVMHLEFRVTHPGLGLPEELVHEMFGRGRGMTQEGLGLSMCRKLVKLMNGTVQYIRETGKSCFLVEVELPLAQRDDAGSVRSTVV

SEQ ID NO: 14116 - protein, 190 aa, Physcomitrella patens subsp. patens
MDLPPGFRFHPTDEELVVYYLARKIREPGFEVKTICEVDLNKCEPWDLPEKAKLGEKEWYFFSLRDRKYPTGMRTNRATEKGYWKATGKDRDVMNSGTHALVGMKKTLVFYRGRAPRGVKTHWIMHEYRLTRSNHCSHDDDVVITCNSGALQHDEWVVCRVFQKIAGNKKPGFMCGDMPYQLTDSYSVLH

SEQ ID NO: 14117 - protein, 413 aa, Physcomitrella patens subsp. patens
MTPTPRAGGLIEPDGGVLVDLHVPEQEKESKKAEAATLSKIQLNLVDLQWVHTVAEGWASPLTGFMRQNEYLQSLHFNCLRLADGTFTNMSLPIVLAIDDEKKESLSGVNAVTLVGPDGNDVAILRNIEIYKHNKEERIARTWGTTAPGLPYVDEAIANAGDWLIGGDLEVLERIKYNDGLDHYRLSPAELRAEFERREADAVFAFQLRNPVHNGHALLMTDTRRRLLEMGYKNPLLLLHPLGGFTKADDVPLEWRMKQHDQVLEAGVLDPATTVVAIFPSPMHYAGPTEVQWHAKARINAGADFYIVGRDPAGMGHPTAGRDLYDADHGKMVLSMAPGLEKLNILPFRVAAYDKTKSQMAFFDPSRAQDFLFISGTKMRNFAKNNESPPEGFMCPGGWQVLVDYYQGLQKQE

SEQ ID NO: 14118 - protein, 224 aa, Physcomitrella patens subsp. patens
MSRVYVGNLDPRATERELEDEFRVYGVLRSVWVGRKPPGFAFIEFEDRRDADDAIRALNGKNGWRVELSRSSGGGGGPRGRGGDDMKCYECGEPGHFARECRLRIGAGGLGTGGRGKSPRASPRYRRSPSYGARRSKSSPRLRSVSPVARRGRSPSRSPPPRRDRRGSPVGNGYAASPRRDRRGSPVVNGYVLLAVPFLYFYGVKWFYTHWWLLSLVILKPNYV

SEQ ID NO: 14119 - protein, 357 aa, Physcomitrella patens subsp. patens
MVFSPLEVMEEGLDSVALDMDLAPWDGQVYMVPTSFGQISVTVCGDQDKPALITYPDVALNYLSCFEGLLSCPEAESVLFHHFCIFHIDPPGHEFGAPENASEHSSLSADDLADQVAEVLDYFGLDEVIGLGVTGGAYILSLFACKHAERALGLILVSPLARSPSWTEWLHNQAMISLLYFCGMTEFVKQRLLQRYFSSGVRDAAASVGGTYKLATIRGFMDQGRSKCFMHYLQAIHHRRGLTEELKKLKCRTLILVGDQSPFHPEAMHISEVMNRRYNALIEVEGCGSIVTEERPQSMLVPIELFLMGYAFYERSLKSALSSPRSPLSPPCMAPELLSPESLGLKLKPIKTRVPVH

SEQ ID NO: 14120 - protein, 72 aa, Physcomitrella patens subsp. patens
AYRGVRKRPWGRWSAEIRDKIGKCRHWLGTFDTAEDAARAYDAAARRLRGAKARTNFELPATLLSPPPAESP

SEQ ID NO: 14121 - protein, 579 aa, Physcomitrella patens subsp. patens
MSRPEPVYPVTESTACLGRHLARRLVEIGCNDIFTVPGDFNLVLLDHLISEPGINNIGCCNEINAGYAADGYARWKGVGCVVVTFTVGGLSVINSIAGAYSENLPVICIVGGPNSNDFGTNRILHHTIGVSDFSQEARCFQAVTCFQAVINCLDDAHQLVDRAISTCLLESKPVYISVSCNLAGIEHPSFTHSTIPYAIKEQRSNKTSLEAALDAAVKFLNHTVKPVLVGGPKLRLGKAKEAFQELVEASGYAYATMPSAKGQPLESHPHFIGTYWGAVSSPFCLEIVESADAYIFVGPIFNDYSSVGYSLFLKKDHMIVVNPDRVQICGKAEFGCVLMKDFCMELSKRITRNSTSFENYKRIHVPEGTIPSSGAQDPLRVNVLFKHIQGMLSHDTAVLAETGDSWFNCQKLKLPAGCGYEFQMQYGSIGWSVGALLGYSQALKGIKRVIACIGDGSFQVTCQDVSTMMRQNQNSIVFLINNGGYTIEVEIHDGPYNVIKNWNYVAMIQAIHNGEGNVWATKVTNEPQLIAAIATATTDKKDAFCFIEVICHKDDTSKELLEWGSRVSAANGRPPSIQI

SEQ ID NO: 14122 - protein, 360 aa, Physcomitrella patens subsp. patens
MTSLDELLHISLEESTSEIIAEYIWIGGSGTDLRSKARTLPKPVTDPKLLPKWNYDGSSTGQAPGEDSEVILYPQAIFRDPFRRGNNILVICDAYTPQGVPIPTNKRAAAAEIFSKKEVVDEEPWYGLEQEYTLLQKDVKWPLGWPVGGYPGPQGPYYCGTGADKAWGRDIVNAHYKACLYAGIQISGINGEVMPGQWEFQVGPAKGIAAADQLWAARYILERITEIAGVVLSLDPKPIDGDWNGAGCHTNYSTKSMRADGGYEVIKKAIEKLGLRHKEHIASYGEGNERRLTGKHETADMKSFSWGVANRGASVRVGRDTEKEGKGYFEDRRPASNMDPYVVTGLVAYTTILWNPTESK

SEQ ID NO: 14123 - protein, 360 aa, Physcomitrella patens subsp. patens
MTSLDELLNLSLEETTTEIIAEYIWIGGSGTDLRSKARTLPKPVTDPKLLPKWNYDGSSTGQAPGEDSEVILYPQAIFRDPFRRGNNILVICDAYTPQGVPIPTNKRAAAAEIFSKKEVVDEEPWYGLEQEYTLLQKDVKWPLGWPVGGYPGPQGPYYCGTGADKAWGRDIVNAHYKACLYAGIQISGINGEVMPGQWEFQVGPAKGIAAADQLWAARYILERITEIAGVVLSLDPKPIDGDWNGAGCHTNYSTKSMRADGGYEVIKKAIEKLGLRHKEHIASYGEGNERRLTGKHETADMNSFSWGVANRGASVRVGRDTEKEGKGYFEDRRPASNMDPYVVTGMVAYTTILWSPSESK

SEQ ID NO: 14124 - protein, 300 aa, Physcomitrella patens subsp. patens
MDFLLGGVSAAVSKTSAAPIERIKLLVQNQDEMIKQGRLAEPFKGVVDCFKRTISEEGVFALWRGNTANVIRYFPTQALNFAFKDHFNKLFGMKKDRDGYWWWFAGNLASGGAAGACSLFFVYSLDYSRTRLANDSKSSKKGGGERQFNGLIDVYKKTLASDGVAGLYRGFVISCVGIVVYRGLYFGMYDSLKPVLLVGTLQDNFFASFMLGWSITIGAGLASYPLDTVRRRMMMTSGAAVKYKSSMDAAQQIVVKEGYKSLFKGAGANILRAVAGPGVLSGYDQLQIIFFGKTYSGGGG

SEQ ID NO: 14125 - protein, 592 aa, Physcomitrella patens subsp. patens
MCGILAILGCHDKSVTRRHRCLELSRRLRHRGPDWSGLFVDEASGCYLAHERLAIIDPTSGDQPLFNENKDIVVAVNGEIYNHEALKASMKAHKYHTQSDCEVIAHLYEEIGEEVVEKLDGMFSFVLVDLRDKSFIAARDPLGITPLYLGWGNDGSVWFASEMKALKDDCERFESFPPGHMYSSKQGGLRRYYNPPWFNESIPAEPYDPLILRHAFEKSVIKRLMTDVPFGVLLSGGLDSSLVAAVAQRHLAGSTAAKQWGNKLHSFCVGLEGSPDLKAGREVADYIGTVHKEFHFTVQEGLDAISDVIYHIETYDVTTIRASTPMFLMSRKIKALGVKMVLSGEGSDEIFGGYLYFHKAPNKEEFHKETCRKLKALHLYDCLRANKSTSAWGLEARVPFLDRDFVNLAMSIDPAEKMINKKEGKIEKWIIRKAFDDEENPYLPKHILYRQKEQFSDGVGYSWIDGLKDHAASQVSDQMLANAKHIYPHNTPGTKEGYYYRMIFERCFPQESARLTVPGGPSVACSTAAAIAWDKAWANNLDPSGRAATGVHDSAYEGGEVESSAVSHKEGGEDGLANSKVGDKVQEAIAVA

SEQ ID NO: 14126 - protein, 224 aa, Physcomitrella patens subsp. patens
MLGQCEDKPKILEKPNQCASFALSAEVYNLRNWTLPQDCITNAEIYIGSGQYYVDFALAIDAARTYLRSVVVESDGRDLLVLDLDDTMLSSLPLLRLHHFGAEYFKQDVWDGYVNLAKMPPLDPMLSLYKELKALNWSIAIISDRDEGQRNATVTNLNSAGYKDYILILRSEPGPIVDFKSKSRLELEKQGFRLWAGIGDQWSDLTGQAVGKRTFKLPNSLYYA

SEQ ID NO: 14127 - protein, 946 aa, Physcomitrella patens subsp. patens
RALVNLKAAFVNGEHELINWDSNSQSPCGWMGVTCNNVTFEVTALNLSDHALAGEISPSIGLLRSLQVLDLSQNNISGQLPIEICNCTSLTWIDLSGNNLDGEIPYLLSQLQLLEFLNLRNNKLSGPIPSSFASLSNLRHLDMQINNLSGPIPPLLYWSETLQYLMLKSNQLTGGLSDDMCKLTQLAYFNVRENRLSGPLPAGIGNCTSFQILDLSYNNFSGEIPYNIGYLQVSTLSLEANMLSGGIPDVLGLMQALVILDLSNNQLEGEIPPILGNLTSLTKLYLYNNNITGSIPMEFGNMSRLNYLELSGNSLSGQIPSELSYLTGLFELDLSDNQLSGSIPENISSLTALNILNVHGNQLTGSIPPGLQQLTNLTLLNLSSNHFTGIVPEEIGMIVNLDILDLSHNNLTGQLPASISTLEHLLTIDLHGNKLNGTIPMTFGNLKSLNFLDLSHNHIQGSLPPELGQLLELLHLDLSYNNLSGSIPVPLKECFGLKYLNLSYNHLSGTIPQDELFSRFPSSSYAGNPLLCTNSSASCGLIPLQPMNIESHPPATWGITISALCLLVLLTVVAIRYAQPRIFIKTSSKTSQGPPSFVILNLGMAPQSYDEMMRLTENLSEKYVIGRGGSSTVYRCYLKNGHPIAIKRLYNQFAQNVHEFETELKTLGTIKHRNLVTLRGYSMSSIGNFLFYDYMENGSLHDHLHGHVSKTELDWNTRLRIATGAAQGLAYLHRDCKPQVVHRDVKSCNILLDADMEAHVADFGIAKNIQAARTHTSTHILGTIGYIDPEYAQTSRLNVKSDVYSFGIVLLELLTNKMAVDDEVNLLDWVMSKLEGKTIQDVIHPHVRATCQDLDALEKTLKLALLCSKLNPSHRPSMYDVSQVLLSLLPMQSETDDPMSKSSLPANQRRYIDMYSTKHTEAISLSNSSSGDTLLYQFKEVISGKL

SEQ ID NO: 14128 - protein, 479 aa, Physcomitrella patens subsp. patens
MACNMVCSKAVAMQPALALPESRVTSASWGASTSRMWGESLSKTCTVSAQRKVSQAKGIRATIAAGEVKDEKKGGIRGTLNKVVLAYSGGLDTSVIVPWLRENYGCEVVCFTADVGQGIGETLGLEAKAKASGASQLFIVDLREEFVKDYIFPCLRAGAVYERKYLLGTSMARPIIAKAMVDVAKHVGADAVSHGCTGKGNDQVRFELTFFALDPKLAVVAPWREWDIKGREDAIEYAKKHNIPVSATKKSIYSRDRNLWHISHEGDILEDPANEPVEDMYVMTVDPKDAPDTPEYVTIQIEKGLPVGYNGNKLSPATLLEELNELGGKHGIGRIDMVENRLVGMKSRGVYETPGGTILAVACRELEALTLDRESMQTKDMLALKYAELVYAGRWFDPLRESMDAFMEKMTETTTGEVTLKLFKGSVNVASRSSPNSLYREDISSFEEGSGIYNQADAAGFIRLYGLPTRVRAMQNNGL

SEQ ID NO: 14129 - protein, 225 aa, Physcomitrella patens subsp. patens
MLGKCQKKPVSNSCASFSLNAETNNLQGYLLPQECEGFVAGYVGSGQYYSDFAVAVEAARTYLNAIQANEDGKDLIVLDIDETSLSNMPYYIAHHYGVERWNEETWNEWVNNASAPPLDAMVSLYRDLRAQNWSFAFITGRPESQTEKTKQNLLDAGYSDWGPLIFRSPEEETVSAVNYKSKYRKMLEKDGYRIRSCLGDQWSDCSGGHAGERVFKLPNPMYYIY

SEQ ID NO: 14130 - protein, 66 aa, Physcomitrella patens subsp. patens
MHYRGVRQRPWGKFAAEIRDSSRQGSRLWLGTFDTAEEAALAYDDAALRLRGSRALLNFPLRAASG

SEQ ID NO: 14131 - protein, 268 aa, Physcomitrella patens subsp. patens
MLDTPDEFPVGMRVLVVDDDPTCLVLLERMLILCSYRVTTCGRATDALLLLREDIGKFDLVISDVDMPDMDGFKLLELVGLEMDLPVIMMSGNGETSAVMEGVIHGACDYLIKPVGIKELRNVWQHVVRKKRQEVKAVSMKSIEEAGGCERQKRAGGADDADYTSSATDTTDGNWKLSKRRKGEFKEENEDDNEENDDPSTMKKPRVVWSVELHQQFVSAVNQLGIDKAVPKRILELMGVQGLTRENVASHLQKYRLYLKRLSGVTNQ

SEQ ID NO: 14132 - protein, 412 aa, Physcomitrella patens subsp. patens
MAKMHRGCELCDSVACLYCSADEAYICWTCDAKVHGANFLVARHTRSVLCGTCGISTPWRISGANPTPLTGFCTDCSQGESQGECTTYKDGTVLDSRRVALRLIPGVVERSDSVCESGCSSSIRKICEGVEGVEGTLPPSLCASSLSQLSSGDMGSNRSDQASPSSGICQSLKRKRSFECCSGESSPQSKQIATRTTEDVKRTATHSQKSTASGEPMERLDHPDQKSLKIWAFVKCCIRCFAKVLQCECDSVSSSSLGCRTSPTHAHQDPFFETRDCIRSQPQAFRSSSRALTTLLTSSTKRHRMEDRTQMRPSFPRNQQQAPWYSSPCVAHISQGNQNHGSRCSLKFRRACHSGRLPAVGCSIRRSPNYVPKASEVAACARVSTRKLVMTEIQLLAILRWRRCPIWAGVRR

SEQ ID NO: 14133 - protein, 346 aa, Physcomitrella patens subsp. patens
TCAGCKQSLSHGRFLTCLHQNWHPSCFCCRSCGKAIVDREFSVQEDAPYHRECYKKSFHPKCEICYNFIPPNSKGLIEYRSHPFWDQKYCPSHEWDGRRRCCSCDRIEKIDQQYTPLGDGRKLCEDCMESNVMDTRGCQPLYREILKFYKGLGMPIEQEIPMLLVKRAALNHAREAEKDEHIHAPETRGLCLSEEQTITTVFVSDRGEYGDYAHPEMQTRKLTRHCEVTAILVLFGLPRLLTGSILAHELMHAWIRLDGRFPNLDNDIEEGICQVIAHIWLKEELEKLKRSVSRETKRLGEFFLHQIETDSSPIYGDGFRAAYTAYKNYGLAKTLNHLRNTGRILQ

SEQ ID NO: 14134 - protein, 164 aa, Physcomitrella patens subsp. patens
GKGKTSTSSFASDGKDSKSMEANEQTSLKRQRSGPVKAERSASENSGDSVGPSSLKASSKSVQNLPKQDYIHVRARRGQATDSHSLAERVRREKISERMKFLQDLVPGCSKVTGKAVMLDEIINYVQSLQRQIEFLSMKLAAVNPRLDYGFDVLGKDLLQLRSP

SEQ ID NO: 14135 - protein, 321 aa, Physcomitrella patens subsp. patens
AVVQKQDGGWLGGVSNSLEIALTFLKDTIAKLGIPYSYGFAIILLTILVKAATYPLTKKQVESTLAMQNLQPKIKAIQTRYQGDQERIQLETARLYKQAGVNPLAGCLPTLATLPVWIGLYRALSNVANEGLLTEGFFWIPSLAGPTTIAARSSGSGISWLFPFVDGAPSLGWADTIAYLVLPVLLIGSQYVSMQIMQPPTTNDPAQNQSQLILKFLPLMIGYFSLSVPSGLSLYWLTNNVLSTAQQVYLRQLGGAQPIVDKEGSGIISAGQAKRTPLPPSASTSATQLKEEDAKKKGSRRKSAEEASKAAAAKGAEERDN

SEQ ID NO: 14136 - protein, 459 aa, Physcomitrella patens subsp. patens
MLTRVGGLHCTGSFWTASAHVITAVIGSGVLSLAWSMAQMGWVAGPLVLLLFSFVTYYTSSLLADCYRHPDPVTGKRNYTYMDAVKANLGPRQVLLCGVVQYANLLGTSIGYTITAASSMVAITRSDCFHHKGTKGPCQASNIPYMSMFGFVQIILSQIPEFGELWFLSVLAAVMSFLYSTIGLGLGIAKAVDHQHGYGSITGISVGDPSVGYVSMSNKIWGICSALGNIAFAYSFSMILIEIQDTLKSSPPENKTMKRASLFGIITTTIFYMSVGCAGYAAFGDNAPGNLLTGFGFYNPYWLVDFGNACVVVHLVGAYQVYTQPLFAFFENTLSSRWPKSQFIHKEYYLKVPWGEPLHFNLFRLVWRSMYVVVTTVLSMVLPFFNDVMGLIGAFAFWPLTVYFPVQMFIVQRQVQRWSPKWCWLHLLSVSCFAVSLAAALGSSECMISDLKKYKPFQG

SEQ ID NO: 14137 - protein, 320 aa, Physcomitrella patens subsp. patens
VETSHGPISVLVCGDQSKPALVTYPDVGLNYLACFEGLFSFPEATSVLYHNFCIYHVDPPGHQDGAAEIPADLPLLSMEDLADQVAEVLDHFGVHEMIGLGVGAGSYILNLFAIKYRERAIGLILVSPICRKPSWSEWLYNKAMINILYYCGATNFVKDSLLQRYFSQEVRASPVGAEVLDNYRKHFGDHPSRNIMRYMQSIHQRADITENLRKLKCRTLVIVGENSPFHSEALHMSTVMRPRYQALIEVQACGSLVTEEQPQSMIVPIELFLMFYTFYKRPVSLSSPKSSLSPPCVSPELLSSESMGLKLKPIKTRVSR

SEQ ID NO: 14138 - protein, 330 aa, Physcomitrella patens subsp. patens
MEAESIGNEQDVGTDWISSLLPGVAERVPGDRRGWRKIATPVRSYGASSPPRSQTFTILMCEPPHHFIPPVPSSYNPENEEQIHLQSVLLHFVHFLSLRSPFSQMKTPFRKSGRTLRWMASPEINGAALRSSGSPDCSILKLSGPLRGWKKKLTSEKGCAQKRKDVSYIAPNGEEIKSSRHLIRYLKAHPGGLKAENFVWETVKAPRRSARLNRKPGRRIHFEELDMIPTRRRKRSSSSNGKDKLKSGRIKKRAGISRARDNLKVAKEKLLVDSQLLQASELHPCTLQNSHPETKAVKTEDTKNLENINSSQVDNQILAVDVTEVPDLKI

SEQ ID NO: 14139 - protein, 396 aa, Physcomitrella patens subsp. patens
LDEDEQLARAMQESLNFGHRDPYAYSSSYAPPPSRSSGMNVCAGCGESLGFGRFLSCLGKNWHPNCFCCKKCNNAIAEREFSVQGNEAYHRECYKEIFHPKCEVCNHFIPTNPAGLIEYRSHPFWNQKYCPRHERDGTPRCCSCDRIEVRLSQGSLADDRKVCLECYDTIVVDNQACQPLYREILKYYRSINMPIAQEIPMLLVARSALNAARDGEKDGHTHNAETRGLCLSEEQTITTVRSTNAVYGGGKSRNPMRYLRTEKQKLTRHCEVTAILVLYGLPRLLTGSILAHELMHAWIRLQGNFRPMAPHVEEGICQVMSHIWLTAELKKLKGARSSSNSSAAIEARLGEFYLHQISSDSSPVYGDGFRHGMAAVQQFGLERVLDHLRLTGNFPL

SEQ ID NO: 14140 - protein, 300 aa, Physcomitrella patens subsp. patens
YAGYVALVGKPNAGKSTLLNQIIGQKLSIVTNKPQTTRHRILGICSGPDYQMVLYDTPGVISKQVKKLDEMMMRNVRTATLNADCVLIVVDACEQPEEVMSRLTDGQQTLVTDNRPTLLVLNKKDLIKPGEIAKKKAWYELNGGTTEVIAVSAKQGAGVDKIKEWLLGRLPYGPAYYPKDVVSEHPERFFVSEILREKIFLQYRQEIPYVCQVNVTSYMERRVAKDFIQLEIVVEKEGQKGILLGKGGESLKMLATAARLDIEDFVGKEVYVEIKVKVKEDWRGNEELLDQYGYSGKISY

SEQ ID NO: 14141 - protein, 161 aa, Physcomitrella patens subsp. patens
MNGERYIGVALDFSPSSRYALQWTVSNILRENDHLIVIVVNKEPMLESGRSALWQATGTPFVPLAAAENPVNQQAYQLKLDEEISKLLHEAAAKKVVVVFKIYWGDPKEKICNSVVDAPLDFLIMGCRGLSRLRRSILGSVSNYVSNNVPCPVTIVKLPPS

SEQ ID NO: 14142 - protein, 341 aa, Physcomitrella patens subsp. patens
MHQDNWNNLSLGSRTLTDLGVRELRNANNRLKIFSGTANPQLSQEIACYMGLNLGQIKIKRFADGEIYVQLEESVRGCDVFLVQPTCPPANENVMELLIMIDACRRASAKTITAVIPYFGYARADRKTQGRESIAAKLAANLITEAGANRVLTCDLHSGQSMGYFDIPVDHVYGQPVILDYLASKMISSDDLVVVSPDVGGVARARAFAKKLSDAPLAIVDKRRHGHNVSEVMNLIGDVKGKVAVMVDDMIDTAGTIANSAALLHAEGAKEVYACCTHAVFSPPAIERLSGGLFQEVIITNTIPVQEGNYFPQLTVLSVANLLGETIWRVYDDCSVSSIFR

SEQ ID NO: 14143 - protein, 116 aa, Physcomitrella patens subsp. patens
MLRGLCTSALTPELEQAIDKFLSENKVVLFMKGNKQFPQCGFSNTCVQILNTLNVPYETVNILEDDNLRQGMKEYSAWPTFPQLYIDGEFFGGCDITYESYNSGELKELLDRAMLS

SEQ ID NO: 14144 - protein, 581 aa, Physcomitrella patens subsp. patens
MCGILAILGSHDASPARRDRILELSRRLRHRGPDWSGLFAGQKCWCYLAHERLAIIDPASGDQPLYNENKDIVVAANGEIYNHEALKKSMKPHKYHTQSDCEVIAHLFEDVGEDVVNMLDGMFSFVLVDNRDNSFIAARDPIGITPLYYGWGADGSVWFASEMKALKDDCERFEIFPPGHIYSSKAGGLRRYYNPAWFSETFVPSTPYQSLVLRAAFEKAVIKRLMTDVPFGVLLSGGLDSSLVAAVASRHIAGTKAANIWGKQLHSFCVGLQGSPDLKAAREVANYIGTQHHEFHFTVQEGLDALSDVIYHVETYDVTTIRASTPMFLMTRKIKALGVKMVLSGEGSDEIFGGYLYFHKAPNREEFHHELVRKIKALHMYDCQRANKSTSAWGLEARVPFLDKEFMEVAMAIDPAEKLIRKDQGRIEKWVLRKAFYDEKNPYLPKHILYRQKEQFSDGVGYSWIDGLKAHAQSHVSDQMLKHAKHVYPYNTPQTKEAYYYRMLFEKHFPQQSARLTVPGGASVACSTATAVAWDKSWAGNLDPSGRAALGCHDAAYTENSAAMSYITKNMSNVGQKMTIH

SEQ ID NO: 14145 - protein, 391 aa, Physcomitrella patens subsp. patens
MARKLAVQVYNAGGHLRVVSTKPMPGNQWIQALTSVGCRVEVCVENKTILSVDDILSLIGTKCDGVIGQLTEDWGDVLFAALKKAGGHAYSNMAVGYNNVDVEAATRHGIAVGNTPGVLTETTAELAAALTLSAARRVVEADDFMRAGKYEGWLPTLFVGNLLKGQTVGIIGAGRIGTAYARMMVEGFKMNVIYYDLYQSTRLEKFVTAYGEFLKTQGEAPVHWRRASSPEDVLREADVISLHPVLDKTTYHLINKDRLALMKKEAVLVNASRGPVIDEVALVEHLKANPMFRVGLDVFEDEPYMKPGLGDLPNAVVVPHIASASKWTREGMATLAAQNVAAKLKGYPVWPNSNNIEPFLDESKPAPAAAPSIVNAKALGLPTGDGSKSRL

SEQ ID NO: 14146 - protein, 83 aa, Physcomitrella patens subsp. patens
VRRCMRGRSHDWTEGPFVHPGEKARRCNLRWYEDSGTACREFRKRELSERRCCRRGDACKFAHGVFEYRPHPARYLAQPCKDG

SEQ ID NO: 14147 - protein, 304 aa, Physcomitrella patens subsp. patens
MGSDGMDIGFLGLGIMGIAMARNLLKKGFNVTVWNRSPGKCEELAKEGASIGSSPADVVKKCSITIAMLADPSVAISVALGPGGVVEGITPGKGYVDMSTVDSATSSQIAKAIEAKGGDFLEAPVSGSKQPAEAGTLIILAAGSESLFAKVKPAFDAMGKKSFFLNDVGSGAKMKLVVNMIMGSMMTAFSEGLALADKAGLSQQTLLEVLELGAIGNPMFKLKGPSMISGKCPTAFPLKHQQKDMRLALALGDEVGQSMPVAAAANEIYKKARSLGLGEQDFSSVHQALTQEAANASDSAKAAA

SEQ ID NO: 14148 - protein, 389 aa, Physcomitrella patens subsp. patens
QVQCGNFLARQCWGSPGYSGIILRQQPDLSEVQGVFNPSTARLDMASNVGRGGYSRGGSNVVPVRNDSSTDTLVAMLASCSPVALQVQRTGGSLEDAVVSCGQKRSFFPLFEASREDAGDEDLGDDCTHNVEKKRRLTFDQVRSLELNFEVENKLEPERKMQLAKELGLQPRQVAVWFQNRRARWKTKQLERDYEVLTLDYNRLKSEFEAVLQEKQELQGEMECLTGRLQTSPQLASGDGVSEKPSKKSSKAVASQLSLQKMVSEECVKLESKPQDPNDSSNDDKEEGSRATSSDSISSGILDADSPLTTEMITTTTLPHISIHVAAEMPLSSNIINMSDNLCNQMLSPHACQQISVKLEDGSSQDESSSNYILTQLDEERGLPWWDWP

SEQ ID NO: 14149 - protein, 438 aa, Physcomitrella patens subsp. patens
MPSKDVDGGALFVLESKAGNWKHAGFHLTVSIATPALLTLPFALRELGWVAGVLALGLCAGVSFYAYNILSQVLENSERRGHRFLRFRDLGAHVLGPWGYYGIGGIQFLVCFGTVIGSCIVGGQSMKLIYSILEPESTRQLSEFVAIFGIFMLVLAQLPSFHSLRYINLASLMCCLGFSLCVVGGCIYAGNSVDAPPKDYSISGTPASKLFGVFEALAIIATTFGNGIIPEIQATLAPPVENKMFKGLLVCYTVVVTTFFSVAISGYWAFGNQVAGYVLTNLAPTDGPALVPSWLILLANGFALAQLTAVALVYSQPTFEIFEGQTSDVKEGKYSMRNLVPRFLLRSSYVAFATFVSAALPFFGDINGVLGAFCFTPLDFILPFIFYSFTFGPSRQTPRFWIHWGIVILFSVVGFLGCISSVHQVILDAKYYKWFADL

SEQ ID NO: 14150 - protein, 247 aa, Physcomitrella patens subsp. patens
MHGQAEVVKMLLENPKRNVNVESHDKSTPLHLGVKSGHIPTVIELLRQTDINCNCEDGTGSTALDIAEREGHINLVWLLLEHPVEVRKDPGAEHLYSKQLELAAKEKHTDIVRLLFQRISDEVAFTGETSNRGQNLLHWAAEMGYKQLTGHLLVWGSARDINIRDSLYNTPLHYASQKGHIDIVRMLLARPDVDINAENHRKETPLHLAAREGWFEVVKELSLETSGRLRATEEDKYDRTALQLAVE

SEQ ID NO: 14151 - protein, 319 aa, Physcomitrella patens subsp. patens
MSQDVFVPAASEKTFTAFMTDFLMGGVSAAVSKTAAAPIERVKLLIQNQDEMLKSGRLSHPYKGIGECFGRTIKDEGVMSLWRGNTANVIRYFPTQALNFAFKDYFKSLFGYKKDKDGYWKWFAGNLASGGAAGASSLLFVYSLDYARTRLANDAKSSKKGGGERQFNGLVDVYKKTLATDGIAGLYRGFMISCAGIIVYRGLYFGIYDSLKPVVLVGSLEGNFLASFMLGWGITIGAGLASYPIDTVRRRMMMTSGEAVKYNGSMDAFRQIVAKEGTKSLFKGAGANILRAVAGAGVLSGYDQLQILLLGKAYSGGSG

SEQ ID NO: 14152 - protein, 174 aa, Physcomitrella patens subsp. patens
LQAFSSGNMGSCDCDDSSQISRQPLHLDQRFIFRAVFPGGSSDASTEYDDDDEGASQKLRFTKAQLRHLEDTFERLQRPNAHQKATLAMELGVQPRQVEVWFQNRRARGKAKRTETDCEVLRQRCQDLIVENHQLNYLIQSERMGYDSHHLMANGKSPLQLQLALCNSCKKVRS

SEQ ID NO: 14153 - protein, 670 aa, Physcomitrella patens subsp. patens
QQAEEDFQLQLALALRVAAEAAAVDDPDLSANKRGPLGSARLVPGVSRVESTAYRYWVSNCLGYEDRIEDGFYEIWGMSPYVWSMCTDSNELGRMPPLESLRSVNPAEAEFEVVLVDRNGDPHLRELEDKAVSLAYESQEVLDLAAKLAQMVAIQMGGSAVSDEALAETWRTNTSKMTLLLGSLVLPIGMLKCGLGRHRALLFKVMADSVGLPCRLVRGSSYCGKEDDAMVVVKCGDDREWMVDLLVKPGQILAPDSRLAAPPAVIASPLQFERQGPFGGSSVSVLHYSRSEVGNKEAGSGLKVGGASDATLSVPSTTAVPTVPIKIDIDQGSLTQIAREREMEKENSSPMENHLRGGQYDGSQSSQPSQNQDAGRTRHSEVGSGQSDDVAGRVHPPERGASKFAREFEIPWEDLIIGERIGQGSYGKVYRADWQGSDVAVKVFLDQDLKVEALEEFKREVAIMRRLRHPNVVLFMGAVTVPPNLSIITEFCPRGSLYRLLHRPNRELDERRRLRMALDVVKGMNYLHRSSPPIVHRDLKSPNLLVDKNWTVKVCDFGLSRLKHNTFLTSKSSAGTPEWMAPEVLRNELSDEKSDVYSFGVILWELATLQQPWAGMNPIQVVGAVGFQHRRLPIPESIDSNVSNIIKACWRMDPRSRPTFSDIMQELKPL

SEQ ID NO: 14154 - protein, 505 aa, Physcomitrella patens subsp. patens
MSIFGCQDGDLATIQGFLGAVPNATGLSSFLCDKLNLIDGRLGSTKLAVDNTYLLFSAYLVFAMQLGFAMLCAGSVRAKNTMNIMLTNVLDAACGGISYYVFGFAFAFGLGGKTNGFIGHFNWGLNGFPNGTFDYSFFLFQWAFAIAAAGITSGSIAERTQFVAYLVYSSFLTGFVYPIVSHWLWSADGWLSASKTVGPGGLLFGSGAIDFAGSGVVHMVGGVAGFWGALIEGPRIGRFDKSGNSTNFRGHSATLVVLGTFLLWFGWYGFNPGSFLTILQPYEGVKGHWSGVGRTAVTTTLAGCTAAVTTLFGKRFLDGHWNVLDVCNGLLGGFAAITASCSVVAPWASILCGFGSAWVLIGLNKLAARLHFDDPLEAAQLHGGCGAWGLLFVGLFAEKNYVNQVYQTTFDRPYGLFMGGGGKLLAAQIIEIISIAAWVTVTMGPLFYGLHKFRLLRITPQDEIAGMDVTRHGGTAYIHHDNSEHHLQMHTINGQKRTDNDQMPI

SEQ ID NO: 14155 - protein, 495 aa, Physcomitrella patens subsp. patens
MERIQGFLGAVSNATGLSIFLCDKLDNIDGRLGYTKLAVDNTYLLFSAYLVFAMQLGFAMLCAGSVRAKNTMNIMLTNVLDAACGGISYYVFGFAFAFGLGGKTNGFIGHFNWGLNGFPNGTFDYSFFLFQWAFAIAAAGITSGSIAERTQFVAYLVYSSFLTGFVYPIVSHWLWSADGWLSASKTVGPGGLLFGSGAIDFAGSGVVHMVGGVAGFWGALIEGPRIGRFDKSGNSTNFRGHSATLVVLGTFLLWFGWYGFNPGSFLTILQPYEGVKGHWSGVGRTAVTTTLAGCTAAVTTLFGKRFLDGHWNVLDVCNGLLGGFAAITASCSVVAPWASILCGFGSAWVLIGLNKLAARLHFDDPLEAAQLHGGCGAWGLLFVGLFAEKNYVNQVYQTTFDSPYGLFMGGGGKLLAAQIIEIISIAAWVTVTMGPLFYGLHKFRLLRITPQDEIAGMDVTRHGGTAYIHHDNSEHHLQMHTINGQKRTDNDQMPI

SEQ ID NO: 14156 - protein, 184 aa, Physcomitrella patens subsp. patens
MASSIGAAPVSVAPETAHGAEKVYSKESVALVKQSWELLKVDAQANAVAFFKEVFEIAPAAKGFFSFMQDTSIPFEDNPKVKFHALQVFKLTGDAAAQLGEKGAYELLQSRLHSLAAKHLSKGVQDAHFEVVKEALLRTIAAGLPDLWSPALKQAWADAYDALATTLKNEMHAQAAAAAAKSHT

SEQ ID NO: 14157 - protein, 333 aa, Physcomitrella patens subsp. patens
MFVDKAKVYVKGGDGGDGLVAFRREKYVPEGGPAGGDGGRGGDVIFRVDEGLRTLMDFRYQRHFKAKRGEKGRNKSQHGAGAEDMIVRIPPGTVLIDDDTGEVIADLTRHGQQVVVAKGGRGGRGNIRFATPNNPAPELAEHGEEGQERYVVMELKVMADVGLVGFPSVGKSTLLSVVSGARPKIGAYHFTTITPNLGVVEVAEGRSFVMADLPGLIEGAHEGVGLGHEFLRHVERTRVIIHVVDMAGSEGRDPYEDWVKINDELKQYNANLAERPQIVAANKMDMPQAEDNLAEFREKVAKDRPELEIMPISSLTRQGVQELLYRAADLLDQ

SEQ ID NO: 14158 - protein, 327 aa, Physcomitrella patens subsp. patens
LLVINPTYFGIAGDLREIVRTAHNYEIPVLVDEAHGVHIHFHEELPISAMQAGADMAATSVHKLGGSLTQTSILNVREGLVDVDRVKTVMSMLTTTSTSYIFLASLDMARQHLALNGHLLTEQAMKLANIARDRINDIPRIYCVGKEILGKPATFAMDPTKLLIHVRDLGITGWEVENWLRAKYNIEVEMSDLYNILCFVTAGDTEESIQTLVNALRDLSVEFAHVQAEEKPTISLPNIPILSTTPREAFYAPTETIPLAEAAGRVITEFIMVYPPGIPIFLPGEVISEENIAYIQENIRVGLPVQGPEDETLKTIKVVKRQTAISG

SEQ ID NO: 14159 - protein, 95 aa, Thermus thermophilus
VTVDQDLLDAAGILPFEQVDIYDITNGARLTTYALPGERGSGVIGINGAAAHLVKPGDLVILVAYGVFDEEEARNLKPTVVLVDERNRILEVRKG

SEQ ID NO: 14160 - protein, 447 aa, Saccharomyces cerevisiae
  misc_feature (274)..(274): Xaa can be any naturally occurring amino acid
  unsure (1)..(447): unsure at all Xaa locations
AGHMKQRFIRQFTNLMSTSRPKVVANKYFTSNTAKDVWSLTNEAAAKAANNSKNQGRELINLGQGFFSYSPPQFAIKEAQKALDIPMVNQYSPTRGRPSLINSLIKLYSPIYNTELKAENVTVTTGANEGILSCLMGLLNAGDEVIVFEPFFDQYIPNIELCGGKVVYVPINPPKELDQRNTRGEEWTIDFEQFEKAITSKTKAVIINTPHNPIGKVFTREELTTLGNICVKHNVVIISDEVYEHLYFTDSFTRIATLSPEIGQLTLTVGSAGXSFAATGWRIGWVLSLNAELLSYAAKAHTRICFASPSPLQEACANSINDALKIGYFEKMRQEYINKFKIFTSIFDELGLPYTAPEGTYFVLVDFSKVKIPEDYPYPEEILNKGKDFRISHWLINELGVVAIPPTEFYIKEHEKAAENLLRFAVCKDDAYLENAVERLKLLKDYL

SEQ ID NO: 14161 - protein, 257 aa, Oryza sativa Indica Group
MSMGPAAGEGCGLCGADGGGCCSRHRHDDDGFPFVFPPSACQGIGAPAPPVHEFQFFGNDGGGDDGESVAWLFDDYPPPSPVAAAAGMHHRQPPYDGVVAPPSLFRRNTGAGGLTFDVSLGGRPDLDAGLGLGGGSGRHAEAAASATIMSYCGSTFTDAASSMPKEMVAAMADVGESLNPNTVVGAMVEREAKLMRYKEKRKKRCYEKQIRYASRKAYAEMRPRVRGRFAKEADQEAVAPPSTYVDPSRLELGQWFR

SEQ ID NO: 14162 - protein, 486 aa, Zea mays
LNVARIINEPTAAAIAYGLDKKGGEKNILVFDLGGGTFDVSILTIDNGVFEVLATNGDTHLGGEDFDQRIMEYFIKLIKKKYSKDISKDNRALGKLRREAERAKRALSNQHQVRVEIESLFDGTDFSEPLTRARFEELNNDLFRKTMGPVKKAMEDAGLEKSQIHEIVLVGGSTRIPKVQQLLRDYFDGKEPNKGVNPDEAVAFGAAVQGSILSGEGGDETKDILLLDVAPLTLGIETVGGVMTKLIPRNTVIPTKKSQVFTTYQDQQTTVSIQVFEGERSMTKDCRLLGKFDLNGIAPAPRGTPQIEVTFEVDANGILNVKAEDKGTGKSEKITITNEKGRLSQEEIDRMVREAEEFAEEDKKVKERIDARNQLETYVYNMKNTVGDKDKLADKLEAEEKEKVEEALKEALEWLDDNQSAEKEDYEEKLKEVEAVCNPIVSAVYQRSGGAPGGDADGGVDDDHDELYMVVDGGGDVECREPSQIL

SEQ ID NO: 14163 - protein, 177 aa, Triticum aestivum
MAGRDRDPLVVGRVVGDVLDPFVRTTNLRVTFGNRTVSNGCELKPSMVAQQPRVEVGGNEMRTFYTLVMVDPDAPSPSDPNLREYLHWLVTDIPGTTGASFGQEVMCYESPRPTMGIHRFVLVLFQQLGRQTVYAPGWRQNFNTRDFRRALQPRPACRRRHLNCQREAGSGGRRMYN

SEQ ID NO: 14164 - protein, 182 aa, Triticum aestivum
MAGRDRDPLVVGRVVGDVLDPFVRTTNLRVTFGNRTVSNGCELKPSMVAQQPRVEVGGNEMRTFYTLVMVDPDAPSPSDPNLREYLHWLVTDIPGTTGASFGQEVMCYESPRPTMGIHRFVLVLFQQLGRQTVYAPGWRQNFNTRDFAELYNLGPPVAAVYSTASVRPAPAAGGCTIDLPTA

SEQ ID NO: 14165 - protein, 177 aa, Triticum aestivum
MAGRDRDPLVVGRVVGDVLDPFVRTTNLRVTFGNRTVSNGCELKPSMVAQQPRVEVGGNEMRTFYTLVMVDPDAPSPSDPNLREYLHWLVTDIPGTTGASFGQEVMCYESPRPTMGIHRFVLVLFQQLGRQTVYAPGWRQNFNTRDFAELYNLGPPVAAVYLNCQREAGSGGRRMYN

SEQ ID NO: 14166 - protein, 661 aa, Gemmata obscuriglobus UQM 2246
MCGIAGMFDLSGQRRAPAGVVSAMAKAIYHRGPDEDGYLERPGLHLANRRLSIVGLADGQQPISNEDRSVWTVFNGEFFDYKEKRKTLEAKGHVFRTHTDTELIPHTWEDHGTEFLQHLKGQFAICVWDSRTNEVVLARDRAGICPLFYTTVKHDGADWLLFASEMKALLASGLVERKADLNGLNHIFTFMAMPGPTTVFQGIRCLVPGRYLHFKLGQTTPEQATAQKTYWRVEYPDCGHEDYGADEKKVVDGFEEVLYAAVQRRVWADVPVVSYLSGGVDSSVVVAMANKAMGRPIPTFTVSVNAKGLDEKSEALATAKHLGCSPVVVDCGHDQLRAGYPELIAAAEFPVIDTSCLALLHLARAVHRNGYKVALTGEGADEWLGGYSWFKIRKLIGWMDRIPGVPLGFAVRQLFQRLSGAPRFPRAAYLHSLDRLGGPNGWGDLYGLISTNKLRFFTGDTRAALIGRAALDDLEIPADLHRWHPFNRQMYFGARVMLPGHLLASKGDRIAMHSSVETRYAFLDEDVIAYMAKLHPRWKLRGLLRDKFIERKVAERWLPRDVAWRTKKMFRAPMDSWAAVRGGGAGGTWIDQVLSPDSLRKAGYFDAEAVAQARQRLARPGGGVARTGLEMGLTGVLATQLWHHLYLDGSLCDLESKVDRS

SEQ ID NO: 14167 - protein, 405 aa, Gemmata obscuriglobus UQM 2246
MLASRVQHFSESVIRETSRIAQRYGAINLGQGMPDFDPPDEIKEAACRAIRDGFNQYAVTWGIAPLRQAIAAKMRAFNGLPWADPDEHVTVCCGATECMMATMLALVDPGDEVVIFQPFYENYGPDAKLTGATPKWVPLRAPAWSGGDARASGRPAARDTWGFDPDELRAAFSPRTKAVIINTPNNPTGKVFNRAELETIAGLCREFDAVAISDEIYEYINFTDRPHVSIASLPGMAERTVTISGLSKTFSATGWRLGYCVAPAAITAGIRKAHDFLTVGAPHPLQVAGAAALGLPQSYFDGLREHYRHRRDLFLPYLERAGFGALPPDGAYYVMADFSALSDLDDVSFVRRMIETVGVAGVPGSSFHDPKELGRKLVRFMFAKRDETLHAAGERLLGLREKLTD

SEQ ID NO: 14168 - protein, 126 aa, Gemmata obscuriglobus UQM 2246
MRRFMMKSKLHRATVTETNVEYEGSLTIDTNLLEAADILPHEQIHVWDVTNGTRLVTYALEGPRGSGVICVNGAGAHLIRTGDIVIIATFAEFEDAEARKHQPRVVFVDPKNQVKALAAVPGAVPG

SEQ ID NO: 14169 - protein, 367 aa, Gemmata obscuriglobus UQM 2246
MIVGVPKEVKQDEYRVAMVPAGVEELTRAGHTVLIQSGAGAGSGISDDQYAATGAQIVSNDAEVWARADLIVKVKEPMPSEWPHMRAGQTVFTYFHFAADRHLTEAVLKSGITAIAYETIRDAKGTLPLLTPMSEVAGRMSIQEGAKYLERPFDGRGILLAGVPGVPPATVSVIGAGVVGANAARVAAGLGANVFILDVNLDRLRYIDDVMPQNVTTVFSNRLNIRECLQFSDLVIGAVLIPGAKAPNLVTRDDLKYMLPRAVVIDVAIDQGGCFETSRPTTHANPTYIVDDIVHYCVTNMPGAVGRTSTYALTNVTLPYAMQLASKGPERAVKESPALLAGVNIKAGKVTNQAVAETFGLECVPAV

SEQ ID NO: 14170 - protein, 380 aa, Gemmata obscuriglobus UQM 2246
MSLVRGALGYWMVAGFVLLAAVPFLPYRDAPIYGTQAIPVLCFVILALGLNVVVGYTGLLHLGIAAFFGIGAYTAGVLTTTAFPFGSSFVVVAVASALAAAAVGVATTAPTLRLRGDYLALVTLGFGLITIYVIRNLAAITDGTQGLTPVAPDFFPGIDDPVLPKSRPGWSNSWRKYPYLYYLCLGLLAAVVVFLRNLERSRLGRAWVALREDELAASCMGLNPARLKLSAIALGAGLAGLAGALFAVSQNGTTEPKAYGFERSMIALCCVILGGLGNRPGVILGVVLLVGYDQILTPLLDNWLQAQKLNPNGKEYLKVSGWRLCIFGLALILMMRLRPEGLLPSARQKRELHPEKDEAAGEAAARAEVEGHEAGGAARA

SEQ ID NO: 14171 - protein, 425 aa, Gemmata obscuriglobus UQM 2246
MDRTVPSLSSFARGLTTETAFDVLAVARKLMTSGKDVIALQIGDSPFPTTASALKAAHAAIDAGLTRYCPSAGLPEFRETIAATVKKEFGVPATADNVVVGPGAKVFETYFCEAFLEPGDAVLVFQPAFPTFEPNIIRRGAKPVYVPLKQENQFRPDLGAIEKFVKSEPRARALFLNFPHNPTGGVATADDLKAIANIVRGTNIAVFSDEPYCHMVWNAAGPSVLGKHHSILAEPGMLEQCVGAYTFSKSYSMSGWRCGYMVTSAATAQVVSKMINTSLSCVPPIVQMAGKAALEHDAAERDDVMVKFHAKVVLLVNELRKLPDVTVLMPEGTFYVFPNVKPICDRLGITSHGLAMYLLEGADDKRGVACLGGECFGAAGQGFLRFSCAEPDERLVQAVQFFADAITRTERVKAYLEANPKYRAR

SEQ ID NO: 14172 - protein, 405 aa, Gemmata obscuriglobus UQM 2246
MSKMPVYMDNNATTRTDPRVVDAMLPYFTEKYGNAASRNHPFGWHAEEAVETARGQIAAIIGASAKEIIFTSGATESNNLAIKGVAAMYKKKGNHIVTQATEHKAVLDTCKRLERDGFQVTYLPVDKYGQVHAEQVREALTEKTVLVSIMAANNEIGSLLPIKDIGRLCKEKGVLFHTDAVQAVGKVPLDVEAMGIDLLSLTAHKIYGPKGIGALYVRKKDPRVRLEPQIDGGGHERGMRSGTLPVPLIVGLGTACDIAKNEMGEEVARTFALRERLRNGIMSKLPESYLNGHPTERLPGNANISFAYVEGEGLMMGIKDVAVSSGSACTSASLEPSYVLRALGVGDELAHSSIRFGIGRFNTEAEVDFVVELVTREVTRLREMSPLYEMVQAGIDLKSIEWAGH

SEQ ID NO: 14173 - protein, 492 aa, Gemmata obscuriglobus UQM 2246
MPRVIGPWIATAVIIGTVIGSGVFKKGRNVADNVPEFGLIMAVWVLGGLLALLGALALAEVAVLFPRAGGNYVFLREGYGRCAGFLWGWVDFWILRAASIAALATMFTESFHDVLKQSIAPGQKVDVLSFWPRQLLTTLVIGGLTVVNVRGTRLSGGVQFAITILKVASLLFLITAPFVVLAVASEPTHPPQVSHLSPAVPSNLFGINWSGFGVALVGVLWAYNGWMNIAPIAEEVKEPQRNIPRSLLLAVFTLIALYCGANLAYHLVLPRDQIVAKDANGHLSSTPVATEFCGELLGPVGVVLASAIVMTSVFGALNGNLLVGPRLLYAMGRDRLAPPAFARLHPQYHTPALATLAMAGWSVLLVLCVGALTQYQVPTVPLGFAELDLNVPRGKSPFDIMTDFVIFGSVTFETLAVASIFVFRWKYPATPGNRAYRCWGYPVVPALYVLIMALVLVNFFVNPESRTEALVGLGFIASGGVVYALFFGTRRA

SEQ ID NO: 14174 - protein, 962 aa, Gemmata obscuriglobus UQM 2246
MKYGVVWLAVTFAVGFASAAQDEPKQAKSAPAKAAPAPSRAPRFHPTPVPLSGSSGEVHTLAVSPDGKRVAYGGPTSPSGGFVAVRELDTKKELFTLALRLPPNSVAFSPDGRRVLIAGTDPEARLVEGDTGEAVFSLKLNDSTRAVFSPDGKTIATGTAAAAVQLWDAATGDELVKLPGATGRLSSVAFSPDGKKLVACSAEQAMNMTSRGRVFVWDVPTQRLTTKLDTGPGFVLTAAFTTDGKTIATGGGSTQVRLWDLATGTERAVLAGPDVPFDGVAFAFNGDIIAGLFGNGTIYVWNTATQKSLSTLITPPGTCRAVALAPGGKTLVTGGTRRAVKVWDLAGGKELAMLQQDPLPRDLPTPLALAAAPNGSLVAVATEEQGVTLRDARSGEHLGDLKGHEDAVTCLAFSANGRALASGSADKTVRLWDSVTRKELAVLKGHTNWVYAVAFSPDGKTVATGAYDKTVRMWDVATGKQIRSIDAHRGSVRAVAFSADGKTVASGGSDRTVKLWNAETGALLTALPGHQGSVRGVAFSPDGKTLASGSEDGTVRVWSVSEAKELIVLRGHTDEVVCVSYTGPDGLVSGGADGTVRVWDATTGTAIMNALAHPGGVTGCAVLGGAGLVSVGQDKVLKRWRADAPGPVRVLAGHTGAVHAAVFSPDGNRIVSGGNWPEGDKTVRVWDTATGQETLKIDLPTQVAMVAFSPNGKFVLAAGDDHSSYLLDASTGQVVRKFRGHADAVHGVAFSHDGKQVLTCGADKTARLWDTETAKELKPFTGHTGLVRRVAFHPDGRHALSAGRDGVVRMWELDTAKEVRQFRASGNWADCLSVSPNGKLVAVGGKETKVYEVETGRLVHTLDAHPYGVTTVSHSTDGKYVLTGGYDGSAKLWDAGTGKELYQFRGHSNFLWSATFSPDGKWVLTACGGVSTDGSFKKGNDFLIRLWAMPDAQTMAEFGSAN

SEQ ID NO: 14175 - protein, 631 aa, Gemmata obscuriglobus UQM 2246
MGVVVQKFGGSSVKDAESVMEAARKAIRAKHAGNSVIVVVSAQGSTTDDLIAKAAEITSEPSAREMDMLLATGEQISIALTAMAIQELGERAVSFTGPQVGIVTDSTHRKARIKKIDTQRLCEALDSGHIVVLAGFQGIDEQGDISTLGRGGSDTTAVAVAAAVKLAGYEVECEIYTDVDGVYTTDPRIVPDARKMDAISYDEMLEMASMGAGVMHSRSIEFAKKFDVPLMVRNAKSDAVGTWIMPEAPWMSEIPACGVALAADESRLLLEGVPDRPGVSHRIFAALADANIAVDMIAQSVGIGGKATIGFTVLNTELDRTKKILGPIVGELGATLNETGKVSKVSVVGAGMRAISGVAERMFQALAAEGVNLKMITTGDIKISVLVEEDGAAESAVIEPGPAEPIKKAHLESKKAVRGRRALRAVHAAFALAQPRKGAGAQPAAHGEFKPRLVPLVLPAKTEREAAIARLAGMEDVLVSGVQLNNEQSRITIYDLPDQPGNCSKVFNAVATGGILVDMIVQNQSGPAKAELSFTVPRADLTRALKRTQDVVREIDPGCRVVGDGDISVLFVLGVGMRTHTGVAKTMFGALAAKGINIAMINTSEVCVGVVVERARGEEALACLTEAFKLG

SEQ ID NO: 14176 - protein, 1128 aa, Gemmata obscuriglobus UQM 2246
MRTPASLPHPPERTVPLVIARDEPTDGTPKSHRVAAVPLPPEPPASGHPRVRGYDILSVVGIGGMGIVYEARHRELNRRVAIKMLRGESLAPEFRERFRVEAETIAKLQHPNVIQVFEVGTVEPVAGELYPSPFIALEFVDGGSLAGKTRAPQVPGYAARVVATLARTVHAAHLLGVIHRDLKPSNVLLGHNGEPKIADFGIAKQIAPASGPQPRTQTGVVLGTPEYMSPEQLEGETAPAADIYALGVILYQLLTGVVPFKGATFADTLRLALHQEPIPPRRLQPAVPRDLETVCLKCLEKQPGKRYPTAAALADDLERWLDGRPIQARRLGPLGRTARWGRRSPALAALSAVTTLVAVAALAGVMWSWDDARWSEKQARDHMAVARANELWAAENEARAKAEAAKNLDAAAKERWERYRVSLMAASSGLRLHDVRTARWALDEAPPDHRDWVWNLLAAQLDRSRHVLGGPDAPICYTQFSASGRWLVATDPARKLTVWDLTTRERWGPFPGPAAPRHALVADSGATVAYATDDHGIALLDPRTGRVRVMRGHTAEIRVIQFIANGRELVTGSDDHTARVWNVESGRETHRLRVPDGTALPLVFSPDGEVAGARWANADPPTFWGVRTGRPVGRIDPRAEPMFEYRFSPDGKRIVSSGWHPQTAMDVWEVSTGRRVARLEGHENQVSNTAFSPDGRLLASCSMDRTVRVWDIGPDARGEKREAVHVLEGHTGWIQRVAFNPDGTRLLSASDDRTLRYWDVKRGKLVAVLRGHSSEVDCGAFHIDPGTGTALIASHARDDTVRLWDVWSAENDYALRGHGSYVYSATFFPDGDRIASAGWDDTARVWDARTGKEVLKLEHGNIGIVSSVAVHPGGQLIATLGRKHNDPNAVGGVRLWDAGTGKLLHVWPLSNADFRDSRVTFSPDGTLLAAGTPDGRVRLWDVATRRAAAVLEGHTFAVCDVAFSPDGKRLASAGHHRDGSVRVWDVATGKPLAVLKPGTDFRDGVLALAWHPNGKLLAAGSSDGSVRLWEPATEKLLGELKHGSDVYGLAFTPDGKLLATGAADNLIRLWHVDTHREIAELSGHKMYVHSVAFDRTGTRLGVGVGRQDGAGVGHGVSSTAPAPNEPTD

SEQ ID NO: 14177 - protein, 309 aa, Gemmata obscuriglobus UQM 2246
MSLPRVLADLPVSQTVLDLLGGLVELVPWDAAPGRVDAVYTYGHPPVGAELMDRFPDLKVISNFGVGVDHIDVRAAAERRIPVGNTPGILDGATADLAFALLLAAGRRVVEGDRYARGPAFTHYDPSFMLGREVHGSTIGIFGMGRIGRQVAKRANGFGMKVLYHNRNRSDEAEIVLGARYAPKDELLATADHVVLTLPLTPDTRGFIGAAELALMKPTATLVNVARGAVVDKDALAVALAARRLFAAALDVTDPEPLPRDHPLLKLDNVVITPHLGSATEETRRRMAELSVQNLFAGLAGKPLMFSVT

SEQ ID NO: 14178 - protein, 842 aa, Gemmata obscuriglobus UQM 2246
MQVRRLLFASLLFAGCCWLPSVWAPASGRAFAQEENKKATKANPDDTETAIAELKKALKATEKELDATKKALNELKTGTADVKATATKVATLEKELAAATKTSTGLKADLAKLTADVNAVKAVSGDGKATAEKLVALEKGAEDSKKAAEGLKKDAEDLKKTAEKGAADAGSAATVGKERGDTAWMLVSSAFVLLMVPGLALFYGGMVRRKNVLATMMHSMAALAVVGVFWVTIGYALAFGPSVFKISALGATDGGLIGWSWDLVFLKGIEPGAKLPGYDIPVYLHVMFQGMFAIITPALISGAVAERIRFWPFCLFMLLWVTFVYCPLAHMVWAWDWFDTALPAAKRGGQAIGLLGKMGALDFAGGTVVHIAAGVAGLACCLVLGKRAGYPKQIAHPNSMVLTLLGAGLLWFGWFGFNGGSSVNSTGLSVSAFAATQVAAAAAGFAWMLVEWVHKGKPTALGLASGIVAGLVAVTPASGYVYMWGAALIGVAAAVICYIAVALKNVLGYDDSLDAFGVHGVGGFVGAVLTGVFCSQLIQPGSADGLLAYPVHRARLEAVTKDEGKLIKDATAAKDAAEKAAKDKEEATAAEIKALTDAKDAAEKAFNDAPVGKRDDQAKALTEAKDKLKEKTDDLAKVQDEAGLKADALKKLEDDKALLQPIIDKQDLDGKSAMSQLIIQTKAAVVSAVFAFVLSLVLVVVTQAVTLGNFKTSERSEAEGLDRTEHGEVGFDFSGATESVTVASTEPRAVSAPRGNGRFEVLVAGVDAKELMEVWSRLCQPTDGTPDKDFVAVYPHVTTIRGTTFRCRDGNPDAVAKRLASLFTRLTKKPVTATISVTAVRS

SEQ ID NO: 14179 - protein, 329 aa, Gemmata obscuriglobus UQM 2246
MPKVLIAPREVAKFADKFRAPLDEAGLEVVALPPAEANLPAESELIAALHGVEAVIAGSEAYNPRVFAANPQLRVIARVGVGYDAVDLAAATAAGVAVTIAPGTNQGSVAEHAFALMLGFTRHIPARHAALSAGGWNRLMSLPLRGRTLGLAGLGRIGKAVATRARAFEMRVIAFDPFPDAAFCAATGVELVPFERLLGESDFLSLHLPLTPETRHVIRASTIAVMKPGAVLVNTSRGGLVREADLVPALQSGRLGGALLDVFEDEPTPADNPLRALPNVVLTPHAAGVDTQSLEDMARSAAEAIASLRRGEWPTEKVVNPAVQAAFRW

SEQ ID NO: 14180 - protein, 398 aa, Gemmata obscuriglobus UQM 2246
MIRISQLANSVKPSATIAAGTKARQLKAAGIKVLDFSLGEPDFNTPEHICAAAEKAAAGGNTHYTPTAGTAEVKAAICKWYKSFHGLECAPENVIVSNGAKHSIHNALAATVGPGDEVIIPTPYWVSYSDLVSMTGATPVLVNSTPESGFKMSPEQLRAHTTPRTRMLMLNSPCNPTGTVYSRAELEALVDALSNTDAAILSDEIYEQLTYGDAKPTCVATLRPWLKDRTITISGASKSYAMTGWRMGWAVAPVAVVKAMDTIQSQETSCPSSVSQAALVAALTGPQDCVTEMRTEFAARRELTLGLLKQIPDVKLPAPEGAFYAFFDVSAYFKKTFSGTAVADSLSFCATLLEQAHVNLVPGSAFGAEGFVRMSFATNRETIEAGLSKLKQWLATAK

SEQ ID NO: 14181 - protein, 341 aa, Gemmata obscuriglobus UQM 2246
MPAPQSPEPLPPHAVLMQLVFGKLVTQAVSVVARFKLADQMAAGPKTAAELASAAGLNANHLYRVLRALAGLGVLRAEGERFALTPVGEFLRSDVPGSMRAIATYVCDPWSWKPWGDLAGSVKAGAPVFDRMFGEGVFDYLAKHPDEAATFNEGMTGFSQQAAAAMLKAYDFTPFGTIVDVGGGHGAILRAVLGAAPSARGIVFDAPQVAAGAHEPIRAAGLADRCKAEGGDFFRAVPAGGDLYILKHIIHDWNDAKATQILKSVRAAIPATGKLLLVEMVVPPGFAPHFAHILDLEMMVVCDGKERTEQEYRELLAGAGFKLTRIVPTEGPHGLIEAEPV

SEQ ID NO: 14182 - protein, 302 aa, Gemmata obscuriglobus UQM 2246
MQIPVAQPGKTRIGWIGTGVMGRWMCQHAMTSGYSATVYNRSADKAQPLVDAGAKLADSPKAVAEQADIVFAIVGFPKDVREVFLGADGALAGAKPGTVLVDMTTSEPSLAKEIYEAAKAKGVAALDAPVSGGDVGAKNAALSIMIGGDKEVVDAVQPVFACMGKTIVHQGAPGAGQHTKMVNQILISSNMIAVCEGLLYGYKAGLDLETVFKSVSVGAAGSKALEVLGPRMLARNFEPGFYVEHFIKDMGIALAEAEKMNLSLPGLGLAKQLYEAVRAQGYGRKGTHALLMALETLNGIKR

SEQ ID NO: 14183 - protein, 326 aa, Gemmata obscuriglobus UQM 2246
MFGTVNTKLKIFSGRANRPLAEGIARALAVPLGNLTIGDFPDKETSVRIEEDVRGRDVFIVQPTCTPVNDHLMELLIILDAFKRASPARITTVLPYYGYARQDRKDKGRVPISAKLVANLITKAGADRVLALDLHAAQIQGFFDIPVDHLYAVKEIAKYVRSLNIDQSDLVVLSPDEGSIKKALDFQKNVGGLIAVADKRRSSATEIKHGHLIGAPLEGKSVVLYDDMISTAGTISGAVRVARDHGAKHVFVCATHGVLCGPAIERLRGSAIDQIVITDSVPLPPDKQLPNMKVISVANLIANAIGRIHGNESVSELFRDDLPGRK

SEQ ID NO: 14184 - protein, 539 aa, Gemmata obscuriglobus UQM 2246
MARVLIADKLESSGIELLQAAGIEVDNRPGLKGDELKAAIQAADAVICRSQPKLSAEYFDNPGKMRAVARAGVGVDNIDVAAATRKGVVVMNTPGGNTVSAAEHTIALLLALSRRIPAADATMKAGGWDRNKFVGTEVAGKVLGVVGLGRIGREVARRAKGLDMKVIALDQFVTAAKVAELGYESAASLDELLPKVDYLTLHVPGGAETKSMVGARELGLMKKTARVLNVARGGIIDEKALAEALAAGTIAGAGVDVFSVEPIAADNPLAKAPNIVITPHLGASTLEAQENVAVEAAQLIKDFLLSGQVANAVNMAAVNPAELAEVRPYVDLARRLGLLQAQVAQGAIRKASLTYRGELAGQKTKLLTAAFTAGMLEYRLSEGVNLVNADVLARDRGIEIAESSSPKKGDFAALLHTEVETEGGTTVASGTLFGDQYVRLVQLGPFRMEGYLDGVLLVFRHHDVPGLIGFVGTIFGKHKVNIAQMTVGRTSPGGEAIGILNLDNWPSDEAVAEVKAHPQISSVTVVKLPAAGELPAWLG

SEQ ID NO: 14185 - protein, 344 aa, Gemmata obscuriglobus UQM 2246
MTAPFDQLAYARRVLRAEAASLDVVAGRLDDGFNRVADVLLACRGRVAVIGVGKSADIGQKTVGTLNSTGTRAYTLDATRAVHGDLGSVHPDDVALLLSHSGESEELIRLIAPLKKLAAGVLAITGSAASTLARAVDAAVVYGPVIEACPLNLAPSSSTTVMLALGDALAFTLVEQRQFTADEFATFHPAGSLGRKLAVVSEWMRRGDELRVAPETDTVREVFAKVRHTGRRTGAIMLTDAAGRLSGLFTDSDLARLFENREDRLLDSPIAAVMTRAPVVIGPEVRVTVALDALKARKFSELPVVDADGRPIGMLDITDLIGLDSHAGETNSQSHLRLIGRKSA

SEQ ID NO: 14186 - protein, 531 aa, Gemmata obscuriglobus UQM 2246
MGWTKERLQEVARTRLGGAKLIVVANREPYIHRYATDGAVEWIRPAGGLTTALDPVMQACGGVWVAHGSGDADRAVTDPSGRVGVPPDDPNYVLRRVWLTPEQEDGYYYGAANGMLWPLCHQVFARPAFDPGHWDAYRRVNQTFADAVLEEAQGGPALVFIQDYHFALLPRLLKAARPDLVTAQFWHIPWPGPEKFLVCPWARDILDGLLGNDLMGFHTQHDCNHFLECVDRALECRIDRERFAVQRGGQATTVKPFPISVDPALADEYLGDDWAARAGAIRRRHGLGDRPLIVGVDRVDYTKGIPERLRAVDRVLHRHPELKGGFHFVQVGAPSRSSIPAYRDLTAEVNGLAARINREHGTAGWQPVVFLNAHHGPEDIFALYRDAAGCVVSSLHDGMNLVAKEFVTARADDRGVLVLSTFTGAARELTDAVLANPFDVDELADGLYAALTMPAAEQERRMRRMRAQVDDHNIYRWAGSLLTAISKMVPDVADAASEPTVVPDPADESLDATERDIARENYFATLRLAAG

SEQ ID NO: 14187 - protein, 572 aa, Gemmata obscuriglobus UQM 2246
MTELYSEKIHMVETMATETESGFAKLGLDSRLVERLTGLGYEEPTPIQREAIPPLIEGHDLIGRAATGTGKTAAFSLPILHGLARSTARTKPTSLILVPTRELAMQVAESVAKYGQPLGVRVLPIYGGAPMDQQIRALDRGIDVVVATPGRALDHMRRTTLKLDAITVVVLDEADEMLDMGFAEDIEAILAATPTERQTALFSATMAPRIKAIAVKHLKNATEIHVTRDPVPAGELPKVRQTAYVVQRQYKLAALGRVLDGESPAAALIFCKTRSEVDELTEALGGRGYRPEALHGGMAQDARDRVMRLFRAGQANLLVATDVAARGLDVEHLTHVVNFSLPLGIENYVHRIGRVGRAGREGVAITVAEPREQGALRAIERHTGQRIEYGQVPTAATLREKRLERTKVAIRETVAAGELEAFRAMFGSLVGELDPTDVALAALKLAHRARGGDIDDGPDIPVATVPQRGDRNGRDNNPLPPRRGAGAFRGPGPRLARIFISAGREAGIMPRDLVGAIANEAGLPGREIHSIEITERFSLVDVPEDAAEHVIESLNGVRLRGRRVSARRDRQG

SEQ ID NO: 14188 - protein, 845 aa, Gemmata obscuriglobus UQM 2246
MRKNVLNVIVFLFLAAGLFFLWRYAEENLMPKPVPQKDPAEKMAENLQKQAEEQAKRQAEEEEKRKLLAATGGGLAVGTELPKPKPPEPPKAPPLTVAGVEPRAIHNAIVAGIFDAASRPTLIALGDDTFYNQVLLTTRGGGVQQVLLPKFGQADRLGREVKARDKDGNPTAASLPLHLIPGTYHPRAKHLREDYQPPDLVAGPVANPAALAEPCFTVFHYPTPDDNNPDPLLGETNWTVVSEKRPADGPHEVVFEKELGEPYFVKIRKTYTLARTDYHIGLHVGIEKLKVPGAAKGKGQLKYQLSGPRGLPIEGEWYTSTYRVAIVGWRERNGTLRRQYEDAASIGSKRGGEKARREDNTFHYMAVANQFFASAVAIDYSADEAKKTHPWSYVRATTELPLDKKQDPQMPNFDDITVRAASETIDLEPGQSTAHRYFIYNGPAKVGLLKLLPKVEVNGQKVPAVREELVDQYKDTMMMSSITDFRSDTAIGRFASFIFWTDLVIAMTNLMHILLAAIHSVLGHWALSIVMLTVCVRLVLMYPSRKQTAMSMKMMEVQKRLQPEFEKLQEKYKDDFNTYNREKTRLMMANGANPFAMAGGCLLLFAQMPVMMGLYFCLQESIFFRLDSFLWIDNLAAPDMLKWWTEQIPYVSTPDDIGSFIYLGPYFNLLPLLAVGLMLFQQSKMMPPATDPQAEQQRMMMKLMMIMMAVFFYKVAAGLALYFIVSTAWAIIERQLIPKPVIDTSSPAPATGAKVAAPTGTAGGGKMTTEEALAAAKAKNKGFLTRLREALQAKMEEMQRQADEQAKRQIRNGRPGDGPNPPPGTGTDGPQPDGRRDKKNRRRKK

SEQ ID NO: 14189 - protein, 523 aa, Gemmata obscuriglobus UQM 2246
MASTAFLAPLTDSRLVRRAADAVLLRYAHHRTAQLDRMDVAAVQRNTLMRLVRRAKRTQFGRDHDFSRIRSIADYQARVPVRTYEWFWDTYWKAAFPRIDNLTWPGKIPYYALSSGTTSGATKYVPVSWEMVASNKKAGFTTTALFRHANPGAKLFTGKFFFLGGSTDLRRQDDGSLAGDLSGIASKELLELLRPYTFPPRDLTLITNWEEKVRRFAELSAREPVTALSGIPAWMHVLFTRLKEVTGKGTIAEIWPDLRLIVHGGTKFDPYRELFKKEIGSDLVKFCEVYPCSEGFVATEDPRHQHLRIVPDHGIFFEFVPVGQLGQDRPTRHTLADVEVGVQYAVVLTSCAGVWSYLVGDTVAFERRDPPLIRFTGRTKYFLSAFGEHLISEEVEAAVARAASVCGAVAVDFHVGPVFPSVPGKAGHHLYLVEFAEGRPDLARFAKEIDDELNRINEDYGPHRVGDLAMLMPEVRVVKPGGFAEWMKARGKYGGQNKVPRMDNSGAMTKDMANWFESNGWAG

SEQ ID NO: 14190 - protein, 419 aa, Gemmata obscuriglobus UQM 2246
MTTVADLKGQTVAFAASGGLDSCTVTKWLTESGVKVVCFTADIAQPDESNFDEVGTRMRACGAADYVAIPLHEMIAESGLEVIQFQAKYEGNYWNTTGIGRHVIVAGMIPEMRKRGATVLSHGATGRGNDQVRFQLCTNMLAPEVTVYAPWRDREFLKRFPGRSEMIDYCNGHKLPIKASKSAPYSTDANLLGLTHEAGKLEHLTTEPWFVTPGMGVLPKDAPDAPESVTVRFEQGRPVAINGTATTAFQAIQTANALGGKHAVGIATHLVENRFVGIKSRGVYEAPGMELLGTAYAYLLQLVLDRRSRELFDHLSQFVSKQIYQGYGFDLATHMARSALAPITRLATGTIKLKLYKGRAEFEAAEDVPHQLYSEANASMEAIGSFDHADSEGFLRVLQVSARALAANHQVTAPAWAAR

SEQ ID NO: 14191 - protein, 380 aa, Gemmata obscuriglobus UQM 2246
MIYLDNAATSFPKPESVYVAMDRFARHSLANPGRSGHRMALESEHALSDARHRLNRFFNGRNPERWAFTLNCTDALNMAFKGVLNDGDHVITTDLEHNSVSRPLVALAEAGRITLTRVPADSGGTIDPEAVRAAIGPKTRLVAMTHASNVLGTVQPITDVGRICRERDVLFLVDAAQTAGAIAVDVQAAHIDLLAFPGHKSLLGPTGTGALYVGPRVTLRPWREGGTGGDSLTPTQPTDFPHYLEGGTPNVLGVVGLVAGLDFVEARGVESIRRHETELCERLRGALAELPGFEVFGHANEAQRVGALSFRCELLPAPEFAGVLDQSFNIAVRPGLHCSPYVHKALGTAPDGLVRVSPGPFSTAADIDVLADALKQITSV

SEQ ID NO: 14192 - protein, 446 aa, Gemmata obscuriglobus UQM 2246
MATPDPLAGLIAAVQLSPDNLPLRKHLAEAFAGLGRFAEAEAEYRAVLATHAQDLTARLGLARLYHQQGQTSQAFVVLESLVRDPQAPAEAHVLLAKLWLREGDIERAVARYKLGVEMDPDAVDAEFASRLGIDQSPDESEVSDGRLAVGDVEEAADVSARLEKPKVRFGDVGGMDAIKEEIQLKIIHPLKHPELYAAYGKAIGGGILMYGPPGCGKTHLARATAGEVNASFIAVGIEDVLDMWLGSSEKNLHALFDEARRNRPCVLFFDEVDALAANRSDLRQSSGRMIINQFLSELDGATTSNEGVLILAATNAPWHLDPAFRRPGRFDRILFVPPPDLPARASILRVLTTGKPQQSIDFEQVAKKADQFSGADLKAVIDLAVEAKLREAITSGVPKPLTTKDLLAAVPQVKPSTKEWFSTARNYATFANQGGQYDDILKYLRK

SEQ ID NO: 14193 - protein, 183 aa, Gemmata obscuriglobus UQM 2246
MSRDAVFLDRDGTLIEEVHYLARPEQVKLIPGAADAVRRLNAAGVLVVVVTNQGGVARGYFPESRVTEVHEHLAALLAQQGARVDAFYYCPHHPTEGSEAYRVACDCRKPRPGMLLTAARDLDIELSRSWMIGDKPCDAGAGRAAGCRSLLVRTGHGADLPDAVPDLAAAIAVWEQQRAAPAV

SEQ ID NO: 14194 - protein, 371 aa, Gemmata obscuriglobus UQM 2246
MISESLLADRARAVEVSGVRKIFELGKSLKSPVNLSIGQPHFPVPDPIKAAAKAAIDADHNGYTVTQGIPELLARLRADLHQRFPGQDRDVLATSGTSGGLLLALLAVVNPGDEVITADPYFVAYPNMVALAGGKLVTVDTYPDFRLDLAQIEAAVTPRTKVILLSTPSNPTGAVLDADAQKALAQFARDRGILLISDEIYRAFHYDGPAHSPAEFDPNVLVIEGFGKTYGVTGWRLGWAHGPKWLVQEMAKLQQCTFVCAPSVVQWGGVAAMDYDVSGIVADYRRKRDQLVAALKGAFEFAVPGGAFYLYPKAPWGTGTEFVTEAVKHNLLVIPGGVFSARDTHFRVSYAASDDTLARGIDILLELAKRK

SEQ ID NO: 14195 - protein, 393 aa, Gemmata obscuriglobus UQM 2246
MDAFILSAARTPIGKFLGGLADLPAPKLGAVAIAEAVKRAGVKPEQVEDVIMGNVVQAGVGQAPARQAALFAGLPDTVPAHTTNMVCGSGLKAVMLAAQSIRAGDANVVVAGGMESMSRAPFLLQGVRQGYKYGNQTTTDALVSDGLWCAFENWAMGEAAEHTATTCAVSRADQDRFAAQSHQRAAAAWAAGAFADEVVTVAPPSAGRKPADPIAKDEGIRPDTTPEGLGKLKPAFRPYGTVTAGNASQLSDGAAAVVVASARFVEQTGAKPLARIVSYTMSGVHPKDIFTAPVTAVRAACEKAKLAVSDIDLFELNEAFAAQMLACGKGLNLDEAKVNVHGGAVALGHPIGASGARVLVTLLHALKRHNKRYGLASLCLGGGNAVAMVVERL

SEQ ID NO: 14196 - protein, 372 aa, Gemmata obscuriglobus UQM 2246
MEPVYLDHNATTPLRPEVWERMRPLMLETFGNPSSAHAFGRKARQALEDAREKASALLGAHPDELTFTSGATEANNLAIFGLRPARAVASPIEHPCVVEPLRRLEAGGAAVEWLPADERGVIAWREPAADADLVCVMLANHETGAVQPVRAIAATLPKGTKLHCDAVQAVGKIGVDFHELGATTLTASAHKFGGPKGVGLLLTRRGTDLKPHTFGGHQQGGRRPGTEPVALAVGMAAALEIATRDLAANRAALAAHRARLWDALRRECAPVVLNGPEIGAADVAPAALNVSFPGCRADLLLMSLDLARVACSTGSACSSGSLLPSPVLRAMGVPDEVLKSALRFSFSPAQTSAEIDEAAARIARCVRMTRNG

SEQ ID NO: 14197 - protein, 495 aa, Gemmata obscuriglobus UQM 2246
MALPLVAIVGRPNVGKSSLFNWLAGRRISIVDPTAGVTRDRVSTVVEHGGRVWDLMDTGGIGIVDVDDLTADVERQIQFAIESAAVVVFMVDVREGVVPLDEDVAARLRAINKPVVLVANKADTAKLGEQAGEFNRLGYGEPLCVSADQKLGKDELFEAILAQLPPDTGEVAPEEPALMLAIVGRRNAGKSTFINSLAGGERVIVSEIPGTTRDSVDVRIERDGKSYVAIDTAGVRKTAKMGTNIEFYSNHRAQRSVRRADVVMHFFDARHRVSRVDKQLAEYVVEENKPAIFVVNKWDLVKEGMTTEEMAEYMRKMFPMLDHVPIAFITAKDGKNVLRVLQLAVQLHKQAAVRVGTGDLNRVIRAAMEASPPPMAGSKTPKVFYATQIGINPPTIVLFTNGPELFEQTYVRYLTKTLRDTFPFPEVAIKVVLRAKGEGGRRSADEEPVAEMSDADEEVPIVRAPRPAPEPVAESEPEPAPRARKKPRGSETWDF

SEQ ID NO: 14198 - protein, 187 aa, Gemmata obscuriglobus UQM 2246
MAQRVVFLDRDGVLNRAFPEGGTTRPPMTLDELELLPGVPAALERLRAAGFARVVVTNQPDVARGKQTRAAVEAINAKMCAELPLTDLFACYHDTADRCDCRKPKPGMLLAAAAKWDLDLPAAFLIGDRWSDVAAAAAAGCRGVLIDTPFSSPERCSPDHTAADITAAVDWVLKTAAAEATGRTAAR

SEQ ID NO: 14199 - protein, 533 aa, Gemmata obscuriglobus UQM 2246
MGWSKERLEEVARTRLGGAKLIVVANREPYIHRYATDGAVEWIRPAGGLTTALDPVMQACGGVWVAHGSGDADRAVTDPSGRVGVPPDDPNYVLRRVWLTPEQEDGYYYGAANGMLWPLCHQVFARPAFDPGHWDAYRRVNQTFADAVLEEAQGGPALVFIQDYHFALLPRLLKAARPDLVTAQFWHIPWPGPEKFLVCPWARDILDGLLGNDLMGFHTQHDCNHFLECVDRALECRIDRERFAVQRGGQATTVKPFPISVDPALADEYLGDDWAARAGAIRRRHGLGDRPLIVGVDRVDYTKGIPERLRAVDRVLHRHPELRGGFHFVQVGAPSRSSIPAYRDLTAEVNGLAARINREHGTAGWQPVVFLNAHHGPEDIFALYRDAAGCVVSSLHDGMNLVAKEFVTARADDRGVLVLSTFTGAARELTDAVLANPFDVDELADGLHAALTMPAAEQERRMRRMRAQVDDHNIYRWAGMLLSEVGKRVPDSPPPPAEKSEGEREPNKNLRAYGDEEAIARETYVTAMQLAGA

SEQ ID NO: 14200 - protein, 382 aa, Gemmata obscuriglobus UQM 2246
MPHVLVVNAGSSNVKFAVFRAGAALQEVARGKVEGADSAAAVLEQLEERGALGDLVGVGHRLVHGGPRHTAPALVTPELVRDLEELKALDPTHLPAELGLIDAVAKRWPGVPQVACFDTAFHRDLPAVARTLPIPRRYLDQGVRRYGFHGISYEYLLAELVRVAGAEVAHGRVIFAHLGSGSSLAAVRNGTCVDTTMGFTPAGGLVMGTRTGDLDPGVLVHLLRSEGLNAERLDTLVNRESGLRGLSGTSSDLRELLTNEAADPRAAEAVAVYCYQVRKWIGAMAAALGGLDTLVFSGGIGENSPDVRARICAGLSFFGVQLATEANAAGAPIISSDIAPVVVRVIPTDEEVMIARTVQRLSNATPPDEGTREWPNRSRTPC

SEQ ID NO: 14201 - protein, 293 aa, Gemmata obscuriglobus UQM 2246
MSVPELLAQLPGCVASLAGSEPYTREVIAKAAEAGLKVIARAGVGYDAVDLQAATDHGVAVCYAPGTNQEAVAEHVFLLMLALARKLREQDTEIRAGLWPRRAVGNLRGKTLGVIGLGRIGKAVARRAIPFDLKVIATEIAPDHAFAAAHNVTFVPLEQLLRESDVVTLHVPKTPLTKNIINKDTLALMKPSAFLLNTARGGIVHEKDLHDALVAKTIAGAGLDVYEVEPPKTNPLFGLDSVVLTAHTAGVDQQSRQDMARVPAQAIVKLLAGEWPEEWVVNAQVKEKFFARL

SEQ ID NO: 14202 - protein, 330 aa, Gemmata obscuriglobus UQM 2246
MPRFRVVVADFLADALQPEREILGDIADVVALNATAEADLVGHIESADAVMLYHNIAITAATISRLQQCKLIVRCGVGFDNVDHRAARAQGIPVGNVPDYGAEEVADSAIGLMLALTRGINFFNVRLQQRRGAWAFMDVAPLHRLRGRTFGVIGLGCIGTAAALRAKALGMDVAFYDPYKPDGYDKANGIRRVEKLDDLFAQSFVLSPHCPLTSETRHIVDARAIGLMPDGAYLVNTARGAVVDVTAIPAAIRSGKLRGAGIDVLPFEPPPEDHPLLVAWRDPNDPCHDRVILNPHSAFYSEEGLLDMRVKGAQACRRALLGEPLRNIVN

SEQ ID NO: 14203 - protein, 330 aa, Gemmata obscuriglobus UQM 2246
MSRPKVFVARRIPDEGLNAIRAVCDVDVWPEQLPPPPAVLRRHVADCDGLVSLLTDRVDAELLDAAPKLKVVSNFAVGFNNVDVAACTARGVCVGNTPGALTDATADIAVTLLLAAARRVGESATDAKEGRWLTWEPLGWLGSDLAGRTLGIVGMGRIGFAAAKRLHGGWGMKVLYTARGPKEDADKELGATRVELDELLARSDFVSVHADLNPTTKGLFGAAQFAKMKRTAVFVNTSRGPLVDQAALAAALRDGTIFAAGLDVTDPEPLPTDHELFRLPNCLIVPHIASATIDTRNAMARLCANNLLAGVGGAALPNWVNPEVADKRRA

SEQ ID NO: 14204 - protein, 330 aa, Gemmata obscuriglobus UQM 2246
KLIVVANREPYIHRYATDGAVEWIRPAGGLTTALDPVMQACGGVWVAHGSGDADRAVTDPSGRVGVPPDDPNYVLRRVWLTPEQEDGYYYGAANGMLWPLCHQVFARPAFDPGHWDAYRRVNQTFADAVLEEAQGGPALVFIQDYHFALLPRLLKAARPDLVTAQFWHIPWPGPEKFLVCPWARDILDGLLGNDLMGFHTQHDCNHFLECVDRALECRIDRERFAVQRGGQATTVKPFPISVDPALADEYLGDDWAARAGAIRRRHGLGDRPLIVGVDRVDYTKGIPERLRAVDRVLHRHPELRGGFHFVQVGAPSRSSIPAYGDLTAEV

SEQ ID NO: 14205 - protein, 214 aa, Gemmata obscuriglobus UQM 2246
MFVDRVELFVKGGDGGRGAASFRREKYVPMGGPDGGDGGDGGSVIVRADPNADNLAGLTMKKHWKAKNGEAGMGSKCAGKNSEDIVLLVPPGTLVRDRERGNTIKDLVEPGDEVVVAKGGRGGRGNVHFKTSTNRAPRQFEPGEEGEERWVSFELKVIADAGLVGFPNAGKSTFLSRVTRATPEIASYPFTTKSPNLGIVTVGDAGFVLADLPG

SEQ ID NO: 14206 - protein, 211 aa, Hordeum vulgare subsp. vulgare
MDKHQLFGSSNVDTTFFAANGTAQGETSKQRARRRRRRSARCGGGDGDGGEMDGGGDPKKRRLTDEQAEILELSFREDRKLETARKVYLAAELGLDPKQVAVWFQNRRARHKNKTLEEEFARLKHAHDAAILHKCHLENELLRLKERLGATDRRCGASGRQLGATGHLWMADTPLAPLACAAGARARPSRREPASSSRVSAGQTCWGGTMT

SEQ ID NO: 14207 - protein, 222 aa, Hordeum vulgare subsp. vulgare
MDKHQLFDSSNVDTTFFAANGTAQGDTSKQRARRRRRRSARCGGGDGDGGEMDGGGDPKKRRLTDEQAEILELSLREDRKLETARKVYLAAELGLDPKQVAVWFQNRRARHKNKTLEEEFARLKHAHDAAILHKCHLENELLRLKERLGATEQEVRRLRSAAGSHGASVDGGHAAGAVGVCGGSPSSSFSTGTCQQQPGFSGADVLGRDDDLMMCVPEWFLA

SEQ ID NO: 14208 - protein, 222 aa, Hordeum vulgare subsp. vulgare
MDKHQLFGSSNVDTTFFAANGTAQGETSKQRARRRRRRSARCGGGDGDGGEMDGGGDPKKRRLTDEQAEILELSFREDRKLETARKVYLAAELGLDPKQVAVWFQNRRARHKNKTLEEEFARLKHAHDAAILHKCHLENELLRLKERLGATEQEVRRLRSAAGSHGASVDGGHAAGAVGVCGGGPSSSFSTGTCQQQPGFSGADVLGRDDDLMMCVPEWFLA

SEQ ID NO: 14209 - protein, 222 aa, Hordeum vulgare subsp. vulgare
MDKHQLFGSSNVDTTFFAANGTAQGETSKQRARRRRRRSARCGGGDGDGGEMDGGGDPKKRRLTDEQAEILELSFREDRKLETARKVYLAAELGLDPKQVAVWFQNRRARHKNKTLEEEFARLKHAHDAAILHKCHLENELLRLKERLGATEQEVRRLRSAAGSHGASVDGGHAAGAVGVCGGSPSSSFSTGTCQQQPGFSGADVLGRDDDLMMCVPEWFLA

SEQ ID NO: 14210 - protein, 180 aa, Hordeum vulgare subsp. vulgare
MSAADPLVVAHVMQDVLDPFTSTVPLRIAYNNRLVLAGAELRPSAIVSKPRVDIGGSDMRVLHTLILVDPDAPSPSHPSLREYLHWMVSDIPGTTGASFGRELVVYERPEPRSGIHRMVFVLFQQLGRGTVFAPDVRQNFSCRNFARQYHLNVVAASYFNCQREGGSGGRRFRPESSQGE

SEQ ID NO: 14211 - protein, 340 aa, Pinus pinaster
MGRQPCCDKVGLKKGPWTAEEDRKLVNFITLHGHGCWREVPKLAGLLRCGKSCRLRWTNYLRPDLKRGLLSESEEKLIIDLHAAIGNRWSRIAAQLPGRTDNEIKNYWNTRIKKKLRQMGIDPVTHKPLTQMQMQSTPAQTLLLQENDTEQKQQEQHNEPDPDQNQSSNGTVETLVSRAREHHDDIEPLQNFNMEDSNFNMEDSMQLFDVCSPTSGISLSGRTEEVDSDDSDQVSKSFGNGSSTHSQYIGRESSGVKAECGLSGWDQMAGVLGDPLSEWNVDLESWAAGLDAPAASASAWIQQLPDCQWNDFQGDFEICSSKSCPETLQRLGPFLDDDEL

SEQ ID NO: 14212 - protein, 182 aa, Pinus pinaster
MAFAGTTQKCKACEKTVYLVDQLTADNSVFHKSCFRCHHCNGTLKLSNYSSFEGVLYCKPHFDQLFKRTGSLDKSFAAIPRASRNDKMHENENRTPSRVSALFSGTQDKCVACGKTVYPIEKVAVDGTSYHRPCFKCCHGGCVISPSNYVAHEGRLYCRHHSSQLFREKGNFSQLSKATPQK

SEQ ID NO: 14213 - protein, 122 aa, Pinus taeda
MAFAGTTQKCKACEKTVYLVDQLTADNSVFHKSCFRCHHCNGTLKLSNYSSFEGVLYCKPHFDQLFKRTGSLDKSFAAIPRASRNDKMHENENRTPSRVSALFSGTQDKCVACGKTVYPIEK

SEQ ID NO: 14214 - protein, 778 aa, Neurospora crassa
MASTSTGETVKKFLGIPADERLNDTACYVDGSFVESEPTTQDFLNEIRPTVQGTLNYLRELFPKAWLMQNSPISPLNMAFTLLSSVSCYSESFLEVGVRIPTSMKANRELHSWAFATSKDITIGAVAVMSTIVGNIIANVQKDHPDFDAGDIARTLAFISGAMLLFLGLIRFGFIVEFIPIVAISAFMTGSAISIAAGQVSTLMGIPNINSREETYKVIINTLKGLPNTHLDAHGLDRAIWAVLYPLVLYQMGKRYPRQQRAWFFVSTLRMVFIIILYILVSWLVNRHVKDPKKAHFKILGHVPSGFQHKGAPRLDNEILSAISGDIPTTILVLLIEHIAISKSFGRVNNYIINPSQELVAIGFTNPSVLSSAATPLPDHSRETAIKAKPCSHASRWHLYRRPRPARSLCAHLRLLLHPQQRSRRHDHPRRRPDHSSKGVYKFWLTSPLEVVIFFAGVFVSIFTSIENGIYVTVAASGAVLLWRIAKSPGKFLGQTEIYTAPRELVRGSKDSGRSRKACCRSRSTTAFLSLDRDDLSNPELQISTPWPGIFVYRFGEGLNYVNSAKHLDNLTIHVFKHTRRTELNKFEKLGDRPWNDPGPRGKAFLTDELVSRPTLRHHPRLLRRQLHRCDRRPSLQDLRNQFDRYAHPDKVEWHFAGVSNRWTKRALVASGFGVDSLRTAKVQRENHKGGVQEVDQGPLVAIGPSVSASDIEAVVRSGSGSTDEKRPEGEGGATNGGMEKGSANGEDISTVPTATSADACACGKGRWREEVGAGVWD

SEQ ID NO: 14215 - protein, 355 aa, Escherichia coli O55:H7
MSQKYLFIDRDGTLISEPPSDFQVDRFDKLAFEPGVIPQLLKLQKAGYKLVMITNQDGLGTQSFPQADFDGPHNLMMQIFTSQGVQFDEVLICPHLPADECDCRKPKVKLVERYLAEQAMDRANSYVIGDRATDIQLAENMGINGLRYDREILNWPMIGEQLTKRDRYAHVVRNTKETQIDVQVWLDREGGSKINTGVGFFDHMLDQIATHGGFRMEINVKGDLYIDDHHTVEDTGLALGEALKIALGDKRGICRFGFVLPMDECLARCALDISGRPHLEYKAEFTYQRVGDLSTEMIEHFFRSLSYTMGVTLHLKTKGKNDHHRVESLFKAFGRTLRQAIHVEGDTLPSSKGVL

SEQ ID NO: 14216 - protein, 747 aa, Cucumis sativus
MVVKESDMISHDEVESPLQSEQQLKQHRFSSLGRQSSIYSLTLDEFQHTLCESGKNFGSMNMDEFLTSIWTAEENQAINASQSGTAVVAAVAALSNAQGHLPVSGGASMEKRNIEKQASLPRQGSLTLPAPLCRKTVDEVWSEIHKSQQGRNHNSNSGNANSQNPESATRQPTFGEMTLEDFLIKAGVVREHCIGGGVPQPLPPSQQYGMYQNSNHTIGAGYVSRPIMGLNTSAAGGGASGNAAAGGITTYQPVPQGGSTIGDTSGFAGNGKRNSVFSSQPPPAVCYGGRVVNGGGGGGGGGGYPPAQPMGLAAPVSPVSPEGMCTNQVDSSNQFGLDLGGLRGRKRIIDGPVEKVVERRQRRMIKNRESAARSRARKQAYTVELEAELNQLKEENAHLKQALAELERKRKQQPFQFLSTTLINYIDTWNSLHIIVKSTDCVSRTHEPRNQREECIYIIIHENGQVLKSSGLRIYIDHFVMASCTSVHFALSDGRNPVGVLNVLGGRLSMSNDNSLGRFGCVKMQEEGSGFVGVGQKLSLRKFKCASASHSHSVNSYPNRDPFLELHPEVSMLRGDGNIMSGSPRQDSSIESNTESLGDKTSPSNYGEAKIKVIGVGGGGSNAINRMIESSMKGVEFWVVNTDVQALKMSPVQSENCLQIGRELTRGLGAGGNPEIGMNAANESKEAIEGALYGADMVFVTKRRQSVNPPSSRERFNTRAFAVDNDLGLPVAAVYFNAQRETAARRR

SEQ ID NO: 14217 - protein, 331 aa, Saccharomyces cerevisiae
MGHHHHHHSRGLVPRGSLSEKPNVKWEDVAGLEGAKEALKEAVILPVKFPHLFKGNRKPTSGILLYGPPGTGKSYLAKAVATEANSTFFSVSSSDLVSKWMGESEKLVKQLFAMARENKPSIIFIDEVDALTGTRGEGESEASRRIKTELLVQMNGVGNDSQGVLVLGATNIPWQLDSAIRRRFERRIYIPLPDLAARTTMFEINVGDTPCVLTKEDYRTLGAMTEGYSGSDIAVVVKDALMQPIRKIQSATHFKDVSTEDDETRKLTPCSPGDDGAIEMSWTDIEADELKEPDLTIKDFLKAIKSTRPTVNEDDLLKQEQFTRDFGQEGN

SEQ ID NO: 14218 - protein, 138 aa, Bacillus cereus
NLTLTGVDIYDPATYEEMDAMVASFVERRKGKATEEDARKILKDENYFGTMLVYMGKAHGLVSGAAHSTADTVRPALQIIKTKPGVTKTSGVFIMVREEEKYVFADCAINIAPNSQDLAEIGIESAKTAELFGIDPRV

SEQ ID NO: 14219 - protein, 327 aa, Comamonas testosteroni
MMPKIVVTQPIHEEVLARLMQVGEVVMNPGPEPWSEAELHRHLKDADAMMAFMPDRVDQRTLLHAPRLKTIACALKGYDNFDLKACAQAGVSVSFVPDLLTEPTAELAIGLAIAAARHVLAGDVSVRKSYAGWRPQLYGMGLHGSIVAVVGLGAVGRAIVDRLCGFGCAQLLGVDPHGDDERLTMVSLGEALSQSDYVILAVPLLDVTRHLVNDTMLEGVRRGQILVNIGRGSVVDEAAVARALKDERLGAYAADVYEMEDWLLADRPRQIHPELLQHPSTVFTPHIGSAVKKVRLAIELRAAENLLVALNGNEPLAHYEASHRAAH

SEQ ID NO: 14220 - protein, 595 aa, Arabidopsis thaliana
MGQCYGKVNQSKQNGEEEANTTTYVVSGDGNQIQPLTPVNYGRAKNTPARSSNPSPWPSPFPHGSASPLPSGVSPSPARTSTPRRFFRRPFPPPSPAKHIKASLIKRLGVKPKEGPIPEERGTEPEQSLDKSFGYGKNFGAKYELGKEVGRGHFGHTCSGRGKKGDIKDHPIAVKIISKAKMTTAIAIEDVRREVKLLKSLSGHKYLIKYYDACEDANNVYIVMELCDGGELLDRILARGGKYPEDDAKAIVVQILTVVSFCHLQGVVHRDLKPENFLFTSSAEDSDLKLIDFGLSDFIRPDERLNDIVGSAYYVAPEVLHRSYSLEADIWSIGVITYILLCGSRPFWARTESGIFRTVLRTEPNYDDVPWPSCSSEGKDFVKRLLNKDYRKRMSAVQALTHPWLRDDSRVIPLDILIYKLVKAYLHATPLRRAALKALKKALTENELVYLRAQFMLLGPNKDGSVSLENFKTALIENATDAMRESRVPEILHTMESLAYRKMYFEEFCAAAISIHQLEAVDAWEEIATAGFQHFETEGNRVITIEELARELNVGASAYGHLRDWVRSSDGKLSYLGFTKFLHGVTLRAAHARPR

SEQ ID NO: 14221 - protein, 175 aa, Oryza nivara
IAGDDDDDDGGVSMFPSGAGTMETTTEVAPAAAVVERPRRRRRVRRSYPYRGVRQRPWGRWASEIRDPVKGARVWLGTFDTAVEAARAYDAEARRIHGHKARTNFPPDEPPLPAPSQAPFCFLLDDDDDDGVARGNSPASSSAPDRASACTTSSTVASGERGDELILLECCSDDV

SEQ ID NO: 14222 - protein, 249 aa, Oryza nivara
MCGGALIPNDYGDKPPPPPSESSEWDATTKMKKKKKRGGGGDDDWEAAFREFIAGDDDDDDGGVSMFPSGAGTMETTTEVASAAAVVERPRRRRRVRRSYPYRGVRQRPWGRWASEIRDPVKGARVWLGTFDTAVEAARAYDAEARRIHGHKARTNFPPDEPPLPAPSQAPFCFLLDDDDDDGVARGNSPASSSAPDRASACTTSSTVASGERGDELILLECCSDDVMDSLLAGFDVSSEPRSVLGMVN

SEQ ID NO: 14223 - protein, 176 aa, Oryza rufipogon
IAGDDDDDDGGVSMFPSGAGTMETTTEVAPAAAVVERPRRRRRVRRSYPYRGVRQRPWGRWASEIRDPVKGARVWLGTFDTAVEAARAYDAEARRIHGHKARTNFPPDEPPLPAPSQAPFCFLLDDDDDDDGVARGNSPASSSAPDRASACTTSSTVASGERGDELILLECCSDDV

SEQ ID NO: 14224 - protein, 235 aa, Oryza nivara
MRRRVSSSSSSSSSSSPARHHKARRSRRKLAVDEDWEAAFREFLSRDHDDDDDDHDGQHVVVAPLIRGSDKCVHGHEVVASTVGGGASGGRRRADDDDGERRRRRRREKRSYPYRGIRQRPWGRWASEIRDPVKGIRVWLGTFDTAEGAARAYDDEVRRIYGGNAKTNFPPSPPTPPPPPPPEKPAAERSPSTTPPTTTEDSGDSRILIECCSDDLMDSLLAAFDMTTGDMRFWS

SEQ ID NO: 14225 - protein, 170 aa, Oryza rufipogon
LSRDHDDDDDDHDGQHVVVAPLIRGSDKCVHGHEVVASTVGGGASGGRRRADDDDGERRRRRRREKRSYPYRGIRQRPWGRWASEIRDPVKGIRVWLGTFDTAEGAARAYDDEVRRIYGGNAKTNFPPSPPTPPPPEKPAAERSPSTTPTTTTEDSGDSRILIECCSDDL

SEQ ID NO: 14226 - protein, 942 aa, Casuarina glauca
MMEGLHNWNLRLVQWFILCFFILARSTCGQEGFVSLRCCAVANFTDPNTNISWRSDDSWFPDSTGCRQELGEAYLMKKNYGRARVFNITSGKRCYNLTTIEKQDYLVRGTFLFGDSLRTTSDTSFDVLLGLTGVSRVNTSEDIEVEVIFRATKDYIDFCLEKVTGDPYISELELRPLKSLNYLLGLNSSVLKRVSRTNVGSDGGDVRYPSDASDRIWKPCTNSTAQIILEPFVDFSNYSASTVTPPLQVLQTALYHPERLEFIENVDIREYKYRISQYFFELNGTSKLGDRVFDIYVNNEKVRRNFDILANGSKYKEVVLDVRASGILNLTLIKASGSTFGPICNGYEILLVHSVQGTNGSHSEIDLQVDKNQTDKRDGEVARWLRNQLLVSNQENEMLANWSGDPCHPNPWKGFTCKPYNDSSIITSLKLSSWNLQGSIPSRITELPDIETLDLSKNRFNGSIPDFPADSKLTSVDISHNDLSGSLPESLTSLPHLKSLFYGCNPHLDKGPQSNFSITSTDNGRCPGPARVALIIGSIASGSFLLTVTVGIIFVCICRRKSMPKGRFKGKRPPLTGNVLIFIPSKDDISIKSISIEPFTLEYIEAATAKYKTLIGEGGFGSVYRGTLPDGQEVAVKVRSATSTQGTREFENELNLLSEIRHENLVPLLGYCSEEDQQILVYPFMSNGSLQDRLYREPAKRKILDWPTRLSIALGAARGLAYLHTFAGRCIIHRDVKSSNILLDQSMCAKVADFGFSKYAPQDGDIGASLEVRGTAGYLDPEYYTTQQLSVKSDVFSFGVVLLEIVTGREPLNIHRPRNEWSLVDWARPYIRESKIDEIVDPSIKGGYHAEAMWRVVEAALYCVEPYAAYRPTMADILRELEDALIIENNASEYMRSIDSLGASNSSRFSIVMEKKAVLPPISSPSETQPVIPQGPSPPQPR

SEQ ID NO: 14227 - protein, 356 aa, Zea mays
MACLTDLVNLNLSDNTEKIIAEYIWIGGSGMDLRSKARTLSGPVTDPSKLPKWNYDGSSTGQAPGEDSEVILYPQAIFKDPFRRGNNILVMCDCYTPAGEPIPTNKRYDAAKIFSSPEVAAEEPWYGIEQEYTLLQKDTNWPLGWPIGGFPGPQGPYYCGIGAEKSFGRDIVDAHYKACLYAGINISGINGEVMPGQWEFQVGPSVGISSGDQVWVARYILERITEIAGVVVTFDPKPIPGDWNAAGAHTNYSTESMRKEGGYEVIKAAIEKLKLRHREHIAAYGEGNERRLTGRHETADINTFSWGVANRGASVRVGRETEQNGKGYFEDRRPASNMDPYVVTSMIAETTIIWKP

SEQ ID NO: 14228 - protein, 328 aa, Thermoanaerobacterium saccharolyticum
MSIIQNIIEKAKSDKKKIVLPEGAEPRTLKAAEIVLKEGIADLVLLGNEDEIRNAAKDLDISKAEIIDPVKSEMFDRYANDFYELRKNKGITLEKARETIKDNIYFGCMMVKEGYADGLVSGAIHATADLLRPAFQIIKTAPGAKIVSSFFIMEVPNCEYGENGVFLFADCAVNPSPNAEELASIAVQSANTAKNLLGFEPKVAMLSFSTKGSASHELVDKVRKATEIAKELMPDVAIDGELQLDAALVKEVAELKAPGSKVAGCANVLIFPDLQAGNIGYKLVQRLAKANAIGPITQGMGAPVNDLSRGCSYRDIVDVIATTAVQAQ

SEQ ID NO: 14229 - protein, 400 aa, Thermoanaerobacterium saccharolyticum
MKILVINCGSSSLKYQLIESTDGNVLAKGLAERIGINDSMLTHNANGEKIKIKKDMKDHKDAIKLVLDALVNSDYGVIKDMSEIDAVGHRVVHGGESFTSSVLINDEVLKAITDCIELAPLHNPANIEGIKACQQIMPNVPMVAVFDTAFHQTMPDYAYLYPIPYEYYTKYRIRRYGFHGTSHKYVSNRAAEILNKPIEDLKIITCHLGNGSSIAAVKYGKSIDTSMGFTPLEGLAMGTRSGSIDPSIISYLMEKENISAEEVVNILNKKSGVYGISGISSDFRDLEDAAFKNGDERAQLALNVFAYRVKKTIGAYAAAMGGVDVIVFTAGVGENGPEIREFILDGLEFLGFSLDKEKNKVRGKETIISTPNSKVSVMVVPTNEEYMIAKDTEKIVKSIK

SEQ ID NO: 14230 - protein, 397 aa, Streptomyces exfoliatus
  misc_feature (203)..(203): Xaa can be any naturally occurring amino acid
  misc_feature (249)..(249): Xaa can be any naturally occurring amino acid
  misc_feature (259)..(259): Xaa can be any naturally occurring amino acid
  misc_feature (271)..(271): Xaa can be any naturally occurring amino acid
  unsure (1)..(397): unsure at all Xaa locations
MTERVVLAYSGGLDTSVAIGWIAEETGAEVIAVAVDVGQGGEDLDVIRKRALDCGAVEAEVADASDEFANEYCLPAIKANALYMDRYPLVSALSRPAIVKHLVAAAKKHGATTVAHGCTGKGNDQVRFEAGIVALAPDLKCIAPVRDYAMTRDKAIAFCEEKQLPIATTKKSPYSIDQNVFGRAVETGFLEDIWNAPIEDIYXYTSNPALPREADEVVISFKEGVPVAIDGKPVTVLQAIQQLNDRAGXQGIGRIDIVXDRLVGIKSREVXEDPGAIALITAHQELENVTVERELARYKRQVEQRWGEMVYDGLWFSPLKRALDGFINEANQHVTGDIRMTLHGGRAVVTGRKSDESLYDFNLATYDSGDTFDQSKAQGFIEIFGLSSKIAARRDLA

SEQ ID NO: 14231 - protein, 601 aa, Epichloe festucae
PSALRPGQTGTAEDYASRLAKEGKSRFGLETMVADLEEYDYDNLDTMPSDKVAMFVLATYGEGEPTDNAVEFYEFITGEDVSFSEGSDPPLENLNFVAFGLGNNTYEHYNSMVRNVDKALQKLGAHRIGEAGEGDDGAGTMEEDFLAWKDPMWAALADKMGLEEREAVYEPTFDIVNRENLTPESPEVYLGEPNKMHLEGAAKGPFNSHNPYIAPIAKSRELFSAKDRNCIHMEVDISGSNLSYQTGDHIAIWPTNSGDEVDRFLDIIGLKEKRNNVISVKALEPTAKVPFPTPTTYDAIVRYHLEICAPVSRQFAATLAAFSPDEEVKAEMTRLGSDKQYFHDKIGPHFYNIARFLEAVGKGQKWTNIPFSAFIEGLTKLQPRYYSISSSSLVQPKKISITAVVESRKIPGRNDPFNGVATNYLLALKQKQNGDPNPSPFGKTYALNGPRNKFDGIHVPVHVRHSNFKLPSDPGKPVIMVGPGTGVAPFRGFIQERAKQAQNGATVGKTILFFGCRKRSEDFLYETEFEEYKKALGDSLEIVTAFSRESSKKVYVQHRLKERSKEVGELLSQKACFYVCGDAAHMAREVNTVLAQILAES

SEQ ID NO: 14232 - protein, 158 aa, Retama raetam
MSLIPSVFGTGRRTNVFDPFSLDIWDPFQDFPLRTIAPSGFDTETAAVANTRIDWKETPEAHVFKADLPGLKKEEVKVEVEEGRVLQISGERTKEKEDKNDTWHRVECSAGRFLRRFRLPENAKVEQVKASLENGVLTVTVPKEEVKKPDVKPVQITG

SEQ ID NO: 14233 - protein, 141 aa, Phaseolus vulgaris
VARYILERITEIAGVVLSFDPKPIQGDWNGAGAHTNYSTKSMRNDGGYEVIKKAITKLEKRHKEHIAAYGEGNERRLTGKHETADMNTFIWGVANRGASIRVGRDTEKAGKGYFEDRRPASNMDPYVVTSMIAETTLLWKP

SEQ ID NO: 14234 - protein, 146 aa, Phaseolus vulgaris
MGAFTEKQEALVNSSWEAFKGNIPQYSVVFYTSILEKAPAAKNLFSFLANGVDPTNPKLTAHAESLFGLVRDSAAQLRANGAVVADAALGSIHSQKGVNDSQFLVVKEALLKTLKEAVGDKWTDELSTALELAYDELAAAIKKAYA

SEQ ID NO: 14235 - protein, 174 aa, Prunus mume
MPRDRDPLVVGRVVGDVLDPFTRSVSLRVTYGLKEVNNGCELKPSQVVQQPRVDIGGDDLRTFYTLVMVDPDAPSPSDPNLKEYLHWLVTDIPATTAASFGQEIVCYESPRPTVGIHRFVLVLFRQLGRQTVYAPGWRQNFNTRDFAELYNLGLPVSAVYFNCQRESGSGGRRR

SEQ ID NO: 14236 - protein, 207 aa, Pseudomonas aeruginosa
MKLKHLDKLLAHCHRRRYTAKSTIIYAGDRCETLFFIIKGSVTILIEDDDGREMIIGYLNSGDFFGELGLFEKEGSEQERSAWVRAKVECEVAEISYAKFRELSQQDSEILYTLGSQMADRLRKTTRKVGDLAFLDVTGRVARTLLDLCQQPDAMTHPDGMQIKITRQEIGRIVGCSREMVGRVLKSLEEQGLVHVKGKTMVVFGTR

SEQ ID NO: 14237 - protein, 730 aa, Neurospora crassa
MSNPPPANTGQAPGGATYGGGQQHQQPQSTTGGAPTTGGTGGTGAAGTTSTSSTAPTPQNLNQIVTDYLKKKGFTKTEAVFRQETAHLGPDGRPAQRNEENGPRKYLKAFILLRDWIENNLDIYKFELRKLLWPVFVYSYIELVSTGYVEEAKHYLATLRPHFDAVHREALDLFTTVTLPQHIRENQTIKLYRENKYRIPLNQSLSGNLFHFLEREADAGGSTITFILQTFCQVDVSARGPIEPFSFEAIYRRAHNLDLDEIDQLEGIPGVFTGVTNRDVLDSSAPLKLGPLPMEPELREDVRAELEDEDQRHPPVEGRSTLVEEFDQRIKREESADAPSRTDLPLPPSRARDVVMEMQKVRENRDRFKIEGRTGGAGVPVSACMFTFHNSLGSVSCMDFSNDHELVAVGTMDSYIRVWSMNGKPLRSSVASEKDLQVNNRKLIGHSGPVYGVSFSDSIANLDRNVFPEADGAKPDTSTKLLVSCSADGQVRLWSLDHWACLCIYKAHDGPVFRVLWGPHGHYFATGGWDKTVRVFAQDRASALRIMVGHDTPISAIAWHPNGTYIFSASDDTDKSIRMWSVVTGNCVRIFTGHTDYISALQCAPNGKILASADTGGNIFFWDIAKGARIKRCRGHGKGGIPSLSFSAESNVLVSGGLDGTVRLWDVELPADPSKSSQLAITSSGKKKGKEVQITPDQISAFATKKTPVLKVQFTRMNLVVAGGCYDPER

SEQ ID NO: 14238 - protein, 351 aa, Solanum tuberosum
SFVALALAGVAIYRNTYEAIIMNNGSLLQNASPHFDSLESGVASILTLNNKKRNSDMYLRQQLTPEACVFSAVRGVVDSAIDAETRMGASLIRLHFHDCFVDGCDGGILLDDINGTFTGEQNSPPNANSARGYEVIAQAKQSVIDTCPNISVSCADILAIAARDSVAKLGGQTYNVALGRSDARTANFTGALTQLPAPFDNLTVQIQKFNDKNFTLREMVALAGAHTVGFARCSTVCTSGNVNPAAQLQCNCSATLTDSDLQQLDTTPTMFDKVYYDNLNNNQGIMFSDQVLTGDATTAGFVTDYSNDVSVFLGDFAAAMIKMGDLPPSAGAQLEIRDVCSRVNPTSVASM

SEQ ID NO: 14239 - protein, 669 aa, Arabidopsis thaliana
MARSFGANSTVVLAIIFFGCLFALSSAIEEATKLGSVIGIDLGTTYSCVGVYKNGHVEIIANDQGNRITPSWVGFTDSERLIGEAAKNQAAVNPERTVFDVKRLIGRKFEDKEVQKDRKLVPYQIVNKDGKPYIQVKIKDGETKVFSPEEISAMILTKMKETAEAYLGKKIKDAVVTVPAYFNDAQRQATKDAGVIAGLNVARIINEPTAAAIANVLDKKGGEKNILVFDLGGGTFDVSVLTIDNGVFEVLSTNGDTHLGGEDFDHRVMEYFIKLIKKKHQKDISKDNKALGKLRRECERAKRALSSQHQVRVEIESLFDGVDFSEPLTRARFEELNNDLFRKTMGPVKKAMDDAGLQKSQIDEIVLVGGSTRIPKVQQLLKDFFEGKEPNKGVNPDEAVAYGAAVQGGILSGEGGDETKDILLLDVAPLTLGIETVGGVMTKLIPRNTVIPTKKSQVFTTYQDQQTTVSIQVFEGERSLTKDCRLLGKFDLNGIPPAPRGTPQIEVTFEVDANGILNVKAEDKASGKSEKITITNEKGRLSQEEIDRMVKEAEEFAEEDKKVKEKIDARNALETYVYNMKNQVNDKDKLADKLEGDEKEKIEAATKEALEWLDENQNSEKEEYDEKLKEVEAVCNPIITAVYQRSGGAPGGAGGESSTEEEDESHDEL

SEQ ID NO: 14240 - protein, 668 aa, Arabidopsis thaliana
MARSFGANSTVVLAIIFFGCLFAFSTAKEEATKLGSVIGIDLGTTYSCVGVYKNGHVEIIANDQGNRITPSWVGFTDSERLIGEAAKNQAAVNPERTVFDVKRLIGRKFEDKEVQKDRKLVPYQIVNKDGKPYIQVKIKDGETKVFSPEEISAMILTKMKETTEAYLGKKIKDAVVTVPAYFNDAQRQATKDAGVIAGLNVARIINEPTAAAIAYGLDKKGGEKNILVFDLGGGTFDVSVLTIDNGVFEVLSTNGDTHLGGEDFDHRIMEYFIKLIKKKHQKDISKDNKALGKLRRECERAKRALSSQHQVRVEIESLFDGVDLSEPLTRARFEELNNDLFRKTMGPVKKAMDDAGLQKSQIDEIVLVGGSTRIPKVQQLLKDFFEGKEPNKGVNPDEAVAYGAAVQGGILSGEGGDETKDILLLDVAPLTLGIETVGGVMTKLIPRNTVIPTKKSQVFTTYQDQQTTVSIQVFEGERSLTKDCRLLGKFDLTGVPPAPRGTPQIEVTFEVDANGILNVKAEDKASGKSEKITITNEKGRLSQEEIDRMVKEAEEFAEEDKKVKEKIDARNALETYVYNMKNQVSDKDKLADKLEGDEKEKIEAATKEALEWLDENQNSEKEEYDEKLKEVEAVCNPIITAVYQRSGGAPGAGGESSTEEEDESHDEL

SEQ ID NO: 14241 - protein, 154 aa, Bacillus cereus
SAKAASMNLTLAGVDIYDPATYEEMDAMVASFVERRKGKATEEDARKILKDENYFGTMLVYMGKAHGLVSGAAHSTADTVRPALQIIKTKPGVTKTSGVFIMVREEEKYVFADCAINIAPNSQDLAEIGIESAKTAELFGIDPRVAMLSFSTKG

SEQ ID NO: 14242 - protein, 159 aa, Bacillus cereus
NKEEISAKAASMNLTLAGVDIYDPATYEEMDAMVASFVERRKGKATEEDARKILKDENYFGTMLVYMGKAHGLVSGAAHSTADTVRPALQIIKTKPGVTKTSGVFIMVREEEKYVFADCAINIAPNSQDLAEIGIESAKTAELFGIDPRVAMLSFSTKG

SEQ ID NO: 14243 - protein, 1531 aa, Mycobacterium abscessus
MPHPATGLYNPAYEHDSCGVAMVVDMHGRRSRDIVDKAITALLNLEHRGAAGAEPNSGDGAGIMLQIPDKFFRAVLAEQGSFELPAEGSYASGIAFLPQGSKDAATACEAVEKIVEAEGLTVLGWREVPHDDSSLGALARDAMPTFRQLFIAGASGIDLERRVYVVRKRIEHELGNQGSGRGSLGEETVYFPSLSGRTFVYKGMLTTPQLRAFYLDLQDERVESALGIVHSRFSTNTFPSWPLAHPYRRVAHNGEINTVAGNENWMRAREALIKTDVFGDPAQLEKIFPICTRGASDTARFDEALELLHLGGRPLHHAVLMMIPEAWERHENMSAELRSFYEFHASLMEPWDGPASVCFTDGTIVGAVLDRNGLRPSRVWVTNDGLVVMASEAGVLDLDPSTVVQRTRLQPGRMFLVDTTQGRIVSDEEVKAELAAAEPYQRWLEEGLVRLEQLPDRPHQHMPHNRIVLRQQVFGYTYEEINLLVAPMARTGAEALGSMGTDTPIAVLSNRSRMLFDYFQQLFAQVTNPPLDAIREEVVTSLGGVIGPEGDLLHPTAESCHQILLPQPVLHNDELDKLIHLDPADTVNGRAHGFSSRVIRCLYPVAEGGAGLRTALESVRAEVSAAIAGGAQVIILSDRESDDLMAPIPSLLAVAAVHHHLVRERSRTKVGLVVEAGDAREVHHVAALVGFGAAAVNPYMAFESIEDLIDRGVITGVDRDKAIRNYIKAAGKGVLKVMSKMGISTLASYTGAQLFQAIGLSQELLDEYFTGLACPTGGIGLDEIAADVASRHNLAFLDRPEEWAHRELEVGGEYQWRREGEYHLFNPDTVFKLQHSTRTGQYSVFKEYTQLVDDQSERMASLRGLLKFKTGVRPPVPLDEVEPASEIVKRFSTGAMSFGSISAEAHETLAIAMNRLGGRSNSGEGGEDPRRFTPDENGDWRRSAIKQVASGRFGVTSHYLSNCTDIQIKMAQGAKPGEGGQLPAHKVYPWVAEVRHSTPGVGLISPPPHHDIYSIEDLAQLIHDLKNSNPQARIHVKLVSENGVGTVATGVSKAHADVVLISGHDGGTGATPLTSMKHAGAPWELGLAETQQTLLLNGLRDRIVVQVDGQLKTGRDVMIAMLLGGEEFGFATAPLVVSGCIMMRVCHLDTCPVGVATQNPVLRQRFNGKPEFVENFFLFIAEEVRELMAELGFRTVNEAVGQVGALDIERAVAHWKASKIDLTPVLTEPESAFMNQDLYCSGSQDHGLEKALDQQLIVMSREALDHGTPVKFETLITNVNRTVGTMLGHEVTKAYGGEGLPDDTIDITFTGSAGNSFGAFVPRGITLRLFGDANDYVGKGLSGGHIVVRPSREAPEGFVAEKNIIGGNVILFGATSGEAFLNGVVGERFAVRNSGAAAVVEGVGDHGCEYMTGGTVVVLGPTGRNFAAGMSGGVAYVYDPDKRLMDNLNDEMVDLDALDPDDQQVLRSLIEKHVAATDSAVGQRILADWSGHSDSFVKVMPRDYRRVLEAIADAELTGGDVNEAIMAAARG

SEQ ID NO: 14244 - protein, 412 aa, Mycobacterium abscessus
MLVRPRSEDELAFALRRSAGRTVRPIGSSHSFTQLCVTEDVQIDVSEMRRLISIDAQDRVRVQAGISLHELNRTLLRHGLALPNLGDIDVQTLAGAAATGTHGTGLKFGNISQTILSMRIMTADGTIHELDDGDALRAARISLGALGVVTEFTLQCVPAFRLHRSQSVHDLDTVLADLPTLLADTDHLELYLFPHTRRVLLLQSTRTDEAPWPRNPVKHWVERDLVENGALGALMWTAGRLPAAAPRISKLVAALASSNESQDESAAVFASPRKVKFTEMEYSLPLTNAREAIETALATIERDRHQVAFPLEVRFTQADDALLAPAYGRESVYLAVHQTVHGSWESYFGGLEPILIGLGGRPHWGKRHTLTAQQLSERYPEWGTFQDIRARLDPGGTFSGGYLNRLLGPVSP

SEQ ID NO: 14245 - protein, 579 aa, Mycobacterium abscessus
MARTVSQLILDTVKAAGVQRIYGLPGDSLNGFTEALRRDGTLEWVHVRHEESAAFAAGAEAALTGNLAVCAASCGPGNLHLINGLFDAHRSRVPVLAIASHIPSAEIGSGYFQETHPQNLFAECSVYSELVSSVEQLPYVLDTAIRAALDQQGVAVLTIPGDILSAKVDLAPPSAPLVAGAGIRLPGTSCLERAVRELNGSNAITILAGAGCEGAHAELLTAAHALQAPIVHTLRGKEFVEYDNPFDVGMTGLLGFRSGYDALEDTEVLLMLGTDFPYRQFYPPKATVIQVDIRGEHIGRRTRVDVALVGTVKDTLQQLNSMIQPHSDRRHLERARENYTRTRAQLDRLAVDDRNQTPVRPELVARRIDELAADDAVFIADVGTPVIWAARYLSMNGRRRLLGSFNHGSMANAVPQAIGAQASHRDRQIVTLSGDGGLTMMLGDLITLTQSQLPVKMVVFNNGALSFVELEMKAAGIVNYGTALDNPVFADVAKALGIHGLRVERPDQLDGALSEAFDHPGPVLVEVLTARQELSIPPTITAAQVAGFSLWATRTLLSGRGDELIDLAKTNLGARLRRK

SEQ ID NO: 14246 - protein, 421 aa, Mycobacterium abscessus
MALVVQKYGGSSVATAERIRRVAERIVETKKNGNDVVVVVSAMGDTTDELLDLAQQVCPAPPPRELDMLLTAGERMSNALVAMAIHSLGASARSFTGSQAGVITTGKHGSAKIIDVTPGRLRTALDEGQVVLVAGFQGVSQDSKDVTTLGRGGSDTTAVALAAALNADVCEIYTDVDGVFTADPRIVPNAARLDKVSFEEMLEMAAAGAKVLMLRCVEYARRYNVPVHVRSSYTDKPGTIVSGSMEDIPVEEAILTGVAHDRGEAKVTVVGIPDVPGYAAKVFRAVADAEINIDMVLQNVSKVEDGKTDITFTCPKENGPTAVEKLDSLKNEIGFSQVLYDDHIGKVSLVGAGMRSHPGVTATFCEALAEAGVNIELISTSEIRISVLVKDDELDAAVQAIHNAFDLGSEEEATVYAGTGR

SEQ ID NO: 14247 - protein, 224 aa, Mycobacterium abscessus
MDEILARAGIFQGVEPSAVSALTKQLQPVDFPRGHTVFAEGEPGDRLYIIITGKVKIGRRSPDGRENLLTIMGPSDMFGELSIFDPGPRTSSATTITEVRAVSMDRDALRAWIADRPEIAEQLLRVLARRLRRTNNNLADLIFTDVPGRVAKQLLQLAQRFGTQEGGALRVTHDLTQEEIAQLVGASRETVNKALADFAHRGWIRLEGKSVLISDSERLARRAR

SEQ ID NO: 14248 - protein, 254 aa, Mycobacterium abscessus
MTADEPFARRGLATAPLSPDAAPDWMRPLVDNAASVKDIYGRGVHPAVKAILQARKLPSSGRPAAVLVLVSADGAVTDPTEADLLLTVRASTLRQHSGQVSFPGGATDPGDGGPVGTALREAQEETGLDPARVQPLTVMESLFIPPSGFHVSPVLAYSPDPGPVLAVDPGETAEVSRVKIGDLVDPTNRIMVTKKTFGIRYSGPAFLLPGMLVWGFTGQIISAMLEVSGWAQPWDTHNLRDLDELLAEHLGGSV

SEQ ID NO: 14249 - protein, 67 aa, Mycobacterium abscessus
MPQGTVKWFNAEKGFGFIAPEDGSADVFVHYTEIQGNGFRTLEENQKVEFEVGQSPKGPQATGVRAV

SEQ ID NO: 14250 - protein, 750 aa, Mycobacterium abscessus
MNRTNVFRTLGVIVVVLLLGWSFFYFSDDTRGYKPVDTTVAIKQIDTDNVKSARIDDREQQLRLDLKAANGDTEGKDKVITKYPTGYGVPLLEKLNGKGAAVNTTVNQGSILGSLLLYLLPVILLVVLFFAFSRMQSGGRGMGFGFGKSRAKQLSKDMPKTTFADVAGVDEAVEELYEIKDFLQNPSRYQALGAKIPRGVLLYGPPGTGKTLLARAVAGEAGVPFFTISGSDFVEMFVGVGASRVRDLFEQAKQNSPCIIFVDEIDAVGRQRGAGLGGGHDEREQTLNQLLVEMDGFGDRQGVILIAATNRPDILDPALLRPGRFDRQIPVSSPDLAGRKAVLKVHSAGKPFGPDVDFDGLAKRTVGMSGADLANVINEAALLTARENGTVITAAALEESVDRVVGGPRRKGRIISEHEKKITAYHEAGHTLAAWAMPDIERVYKVTILARGRTGGHAIAVPEDDKGLATRSEMIAQLVFAMGGRAAEELVFREPTTGAVSDIEQATKKARAMVTEFGMSAKLGAVRYGTEHGDPFLGRTMGTQADYSHEVAREIDEEVRNLIEAAHTEAWAILTEYRDVLDTLAGALLEKETVVRKELEEIFSGVQRRPRLTMFDDFGGRIPSDKPPIKTPGELAIERGEPWPPPVPEPAFKKAIAEQAAAAAPANGVPPAPAGPHGHLPNGQGGQPVPPGVNYGAPAGWHAPGWPPPGQAPHPQPGYQPYPPQPYPYPVPTPHQQPGPAPDEGSESKG

SEQ ID NO: 14251 - protein, 141 aa, Mycobacterium abscessus
MMFRTMMKSKIHRATVTHADLHYVGSVTIDPDLMEAADLLEGEQVTIVDIDNGARLETYAITGTRGSGVIGINGAAAHLVHPGDLVIIIAYGVMTDEEARAFTPRVVFVDSDNKQVELGEHSDDPAYVPENFGLVSPRGLV

SEQ ID NO: 14252 - protein, 350 aa, Mycobacterium abscessus
MTDVPLGKHVLEVRIAEVIEETADSRSLVFEIPDGAADKFAYAPGQYLTLRIPSDRTGSVARCYSLSSSPHLDDRLAVTVKRTADGYGSNWICDNAHAGMHMHVLAPSGVFVPKQLDNDFLLLAGGSGVTPMMAICKSALSQGSGKVVLIYANRDEQSVIFGAALRELAAKYPDRLTVIHWLESVQGLPSQQQLATLTAPFAEHEAFICGPGPFMDASEAALKGNGMPHDRVHIEVFRSLESDPFAEVVLAEPSDDDEPPATATVELDGETHEVSWPRSTVLLDVLLAKGLDAPFSCREGHCMTCACVLKDGKVRMLVNDALSQNDIDDGYILACQAVPETDDVNVTFDE

SEQ ID NO: 14253 - protein, 382 aa, Mycobacterium abscessus
MSEAYIIDAVRTAVGKRNGALSKVHPLDLGAATFKGLFDRVDVDPDAIDDVYMGVLDAIGGQAGNAGRLAWLAGGYPEEVPGATVDRQCGSSQQAISFAAQAVMSGTADLIVAGGFQNMSQIPISAAMLVGKEYGFTSPTAESEGWLHRYGDQEISQFRGAEMIAEKWDISREEMERFALSSHEKAFAAIRNGHFDNEIIPVGDFRVDEGPRESTLEKLASLNPLVEGGRLTAALASQISDGGSATLVASERAVKAHGLTPRARVHHISARGDDPVFMLTGPIPATRYALEKTGLTMDDIDVVEINEAFAPVVLAWAKELDVDLKKVNPNGGAMALGHPLGATGAKLFATMLNELERTGGRYGLQTMCEGGGTANVTIIERL

SEQ ID NO: 14254 - protein, 560 aa, Mycobacterium abscessus
MTSLLPGADNAIKPVSIFGPDFPFEFDAWISHPDGLGQVPEAAFGQEVAIIGAGIAGMVAAYELMKLGLRPVLYESARIGGRLRSQQFDGAPEGVIAELGGMRFPSSSFSFFHYVDMLGLTAKPFPNPLTPAAGSTVIDIEGVTHHARAIDELPQIFQEVAEAWAEALEEVSFTPVQDAIRARDAVTLKSLWNQLVTEWDDRTFYDFVASSKAFSKLSFHHREVFGQVGFGTGGWDSDFPNSMLEILRVVMTNCDEDQQLIVGGAEQVPRGLWTYEPDSMCHWPRGTTLAKLHRGVPRSRVKRIARGPHGQLSVTDQWGVTRDYPAVLATCQSWLLTTEIDCDESLFSQKMWTALDRTRYMQSSKTFVLVDRPFWKDVDPVTGRDTMSMTLTDRMTRGTYFFDNGDDAPAVVCLTYSWMSDAMKVLPYSAQDRADMALNALKRIYPQVDINQHIVGEPISVSWEADRNFLGAFKGALPGHYRYNHRMYSHFMQDQHEAGHRGIFLAGDDVSWTPAWAEGAVQTALNAVWGIMTHFGGGSSTRNPGPGDVFAEIGPLKLPE

SEQ ID NO: 14255 - protein, 389 aa, Mycobacterium abscessus
MNQRTVERLRPFGATIFAEMSALAVRHDAINLGQGFPDEDGPASMLDAAQQAIRSGLNQYPPGLGIPELRRAITADRLARYGEELDPDTQVLVTVGATEAIAGALLGLVEPGSEVILIEPYYDSYAAVVAMAGAVRVPVPLVPDGAGFALDTDALAAAITPRTAALVINSPHNPTGKVFTDTELARIAELAVEHDLLVVSDEVYERLLFDGRTQTPMASLPGMADRTVTISSAAKTFNCTGWKIGWACGTPELVAGVRAAKQFLSYVGGGPFQPAVAVALDTEQSWVKTLRESLQRRRDRLSAALTGLGFEVHSSDGGYFVCADPRPLGFSDSAELCRRLPETVGVAAVPVSAFCDRYADQWNHLVRFTFAKRDVVIDEAITRLARLGA

SEQ ID NO: 14256 - protein, 407 aa, Mycobacterium abscessus
MVEQVFVVDGVRTAQGRYGGALASVRPDDLAARVIAEVVARAGVPADAIGEVILGAANQAGEDNRNVARMAALLAGLPNTVPGYTVNRLCASGLTAISSAAQAIRAGEADIVVAGGVESMTRAPWVMAKPSAPWARPGEVVDTSLGWRFTNPRFAQMDAGIAADAGPETVKVTLAMGETAEEVAVAEGISREDSDAFALRSHVRALAAQDAGRFVKEIVPIETVDGVVDTDEGPRRQTTLAKLAALRPVFRAGGIVTAGSSSPLSDGAAAVVLAGERAVRQHGLTVRARVVAAASAGVAPNLMGLGPVPAVRKVVDRVGWRVDAIDATEINEAFAAQTLAVLRRLGLDEDTVNADGGAIALGHPLGCSGARLIVTLLNRLEREGASRGLATLCVGVGQGVAILIEAP

SEQ ID NO: 14257 - protein, 366 aa, Mycobacterium abscessus
MTTELSAPTTGRGMRNRPFRTVRVAEVQQLCADAAAITFAVPDQYIDEFGFAPGQSITVRRNVDGVEQRRTYSICSPLGARPRIGVREVPGGACSGWLVHQLSAGDEIEVQPPSGNFVADATTPAHHVLIAAGSGITPLLSIAASVLAQPDSRVTLLYGNRRANTVMFADELADLKDTYHSRLQLVHVLSREPRTVELFSGRLDHQRIRVLLQQLVPIAAVDHVWLCGPFGMVTDAQAALRELGVEDSRIHQELFFVEDAAPPQAEHRDGVASGPVSEVTIVLDGATSTMALPRNVSVLDAAQRSRDDLPFACKGGVCGTCRAKVTGGAVDMRRNYALEPDEIDAGFVLTCQSYPTTDSLTVDFDA

SEQ ID NO: 14258 - protein, 394 aa, Mycobacterium abscessus
MAKILCVLYPDPVTGYPPVYARDSLPVIDSYPDGQSLPTPSAIDFTPGELLGCVSGELGLRRYLEAHGHELVVTSDKDGPDSVFEKELPDADVVISQPFWPAYLSAERIAKAPKLKLALTAGIGSDHVDLDAAIKAGITVAEVTYCNSISVAEHAVMQILALVRNYLPAHQWVVDGGWNIADSVERAYDLEGFDVGVIAAGRIGQAVLRRLKPFDVRLHYFDTRRLPAEVEHELGLTYHPDVQSLVRSVDIVDIHAPLHPQTYHLFDANLINSMRRGSYIVNTARAEITVQEDIVKALESGQLAGYAGDVWYPQPPAPDHPWRTMPHEAMTPHVSGTTLSAQARYAAGTREILEDFFGGRSIRDEYLIVEGGQLAGTGAKSYTADGSASPGAGT

SEQ ID NO: 14259 - protein, 290 aa, Mycobacterium abscessus
MSTIAVIGLGAMGKAMADNLVQAGHQVSVWNRSPAPVAELAAVGARPLDSVAQAFDSGVVFSVLADDHAVTETLLTPEVLAAGHGALHVNLATVSARLADRATALHDEHGVGYVAAPVFGRVPVAQAGQLQVLAAGAAAQIDKAQSFFDVIGARTWRLGDAPRQANVVKIIGNFLIASAIQSLSEAVSMAERSGVDSALLVELLTSTLFQGPAYSSYGKLIATSAYEPAGFTTTLGRKDVGLALEVAADTGLRLPFGEILRTVFDEALAGGHANLDWSSIADLQRARDAE

SEQ ID NO: 14260 - protein, 399 aa, Mycobacterium abscessus
MTVDTPTDNPTQLRFSDKETAGRVVYLDSNATTPVDPRVADEVLTYMAREFGNAGSRTHGYGQVAKERVARAREQVAEVVRAQPDDVIFTSGATESNNLAILGLAPSGEKANRRHIVSTQIEHKAVLEPLAILTDRGFEVTLVPPTRGGRIEPSAIADAVRPDTLLVSTMAVNNETGVIQPIPEIAEVLAPHDAYLHVDAAQAFGKIIEPLRNSRIDMLSVSGHKVFAPKGIGALVARRRGYRRVPLQPLMFGGGQERGLRPGTLPVALIAGLGLAAELALKENDARARHALALKHQALNALSELGIQANGDEEHTVPHTLNFSVPGVDAEAAIVALKEVVAISNGSACTSQKYEPSHVLVAADLPKKQIDGALRFSWSHLTGEVPWDVVAQRLAQLVT

SEQ ID NO: 14261 - protein, 494 aa, Mycobacterium abscessus
MASPANYDVSALTREDEGYHKGLKNRQVQMIGIGGAIGTGLFMGAGGRLHSAGPGLFVVYAICGLFVFFMLRALGELVLHRPSSGSFVSYAREFLGEKAAYVAGWMCFVNWASTSIVDVTAVALYMHYWGAFKAVPQWVIALIALIIVLTMNMISVKLFGEMEFWAALIKVVALVAFLIFGIVFLAGRFTVDGSTTGLSVIADNGGLFPNGLLAMVLITSGVVFAYASVELVGTAAGETENPEKVMPKAINAVVFRIAIFYVGSLVLLALLLPYTTYKAGESPFVTFFARVGVPHAGDVMNFVVLTAALSSLNAGLYSTGRILRSMSMNGSAPSFLSRMSSGGVPYPGILLTGSFTVLGVFMNMVIPARAFETALDVAALGILASWATIVICQLRLYQWSRHGILKRGKFQMPGAPYTGYATVVFLIAVLLLMCYENYWNLVAIGIFTPLLIIGWYLQRDRVMRLAQERVGYTGAYPVIAETPMMDDPPNLGDK

SEQ ID NO: 14262 - protein, 328 aa, Mycobacterium abscessus
MSTDWTDNRKNLMLFSGRAHPELAEQVAKELDVQVTAQTARDFANGEIFVRFEESVRGCDAFVLQSHPAPLNTWLMEQLIMIDALKRGSAKRITAILPFYPYARQDKKHRGREPISARLVADLYKTAGADRIVTVDLHTDQIQGFFDGPVDHMRAQSLLCGYIAEHYVSNGEDVVVVSPDSGRVRVAEKWADSLGGVPLAFIHKTRDPRVPNQVKANRVVGDVTGKTCVITDDMIDTGGTIAGAVGLLHEAGAKDVVIAATHGVLSDPAAERLANCGAREVLVTNTLPIGEEKRFPQLTVLSIAPLLASTIREVFENGSVTGLFDGNA

SEQ ID NO: 14263 - protein, 293 aa, Mycobacterium abscessus
MTNIAFIGLGHMGLPMAVNLTKAGHTVAAFDLSEQARDAATQAGVPLAESGAAAASTADVVITMLPKGAHVLAAYEDLLPAARPGTLFIDSSTVDVADARAAHEAATAAGHRFADAPVSGGVPGATAATLTFMVGADDAVFVAAEPILDAMGKRVVHCGGPGVGQAAKICNNMILGVSMIAISEAFVLGEKLGLSHQALFDVAANASGQCWALTSNCPVPGPVPTSPANRDYAPGFAVALMAKDLGLAANAVRANGVDAQLGLAAAHIYDDFNSTGGSGLDFSAIFSRIQGAS

SEQ ID NO: 14264 - protein, 405 aa, Mycobacterium abscessus
MPEAVIVSTARSPIGRAGKGSLVSMRPDDLAAQMVRAALDKVPALDPKDVDDLMLGCGQPGGEAGFNIGRAVAVQLGYDFLPGTTVNRYCSSSLQTTRMAFHAIKAGEGHAFISAGVETVSRFPKGTSDGWPDSHNPLYADAEARTATAAQGATEWHDPRNDGLTPDVYIAMGQTAENVALHTGISREDQDHWGVRSQNRAEKAIADGFFEREITPVTLADGTVVAKDDGPRAGTTYEAISQLKPVFRPNGTITAGNACPLNDGAAALVVMSDVRAKELGLTPLARIVSTGVSGLSPEIMGLGPIEAVKRALANAGKSIGDIDLFEINEAFAVQVLGSARALGIDEDKLNVSGGAIALGHPFGMTGARITATLLNNLTTYDKTFGVETMCVGGGQGMAMVIERLA

SEQ ID NO: 14265 - protein, 288 aa, Mycobacterium abscessus
MTQQAMKLGYIGLGNMGAPMARRLVDWPGGLTVFDLRAEAVAPLVEEGAVGASDVADIADADLISVTVLDDAQVRQVVGQVAPKAKPGTIIAIHSTISDTTAVELAQAWRPRDIHVIDAPVSGGAPGAHKGELATMVGADGETFARVKEAFSKWASLVIHAGAPGAGTRMKLARNLLHFVAFTAAGEAQRLAESCGLDITDLGKVVRHTDAITGGPGAIMLRDTTEPVTPDSFWLPIFTHVRGLGEKDLSLALALGEEQSVDLPLATLAREQLAASLGVPHEEGASNG

SEQ ID NO: 14266 - protein, 598 aa, Mycobacterium abscessus
MTSTDIPTPDTGDSSAPPADDTVTFADLHIAPEVLRAVSDVGYETPSAIQAATIPPLLAGSDVVGLAQTGTGKTAAFAIPILSKIDLTSKDTQALVLAPTRELALQVAEAFGRYGAHMPKLNVLPIYGGQSYVVQLAGLKRGAQVVVGTPGRVIDHLERGTLDLSHLDYLVLDEADEMLTMGFAEDVERILADTPEYKQVALFSATMPTTIRRLTKKYLHDPVEIKIDAKTSTAENITQRFIQVAGPRKMDALTRILEVETFEAMIVFVRTKQATEEVADKLKARGFAAAAINGDINQSQRERTINALKAGTIDILVATDVAARGLDVERISHVLNYDIPHDTESYVHRIGRTGRAGRSGTAVLFVSPRERHLLKAIEKTTGAKLAEEPLPSVEDVNAQRVTKFRDAITAALAAPEVELFRRLVEDYERDNNVPVADIAAALAVLSRDGEQFLLQPDPPREPRHERGERPDRGPRGERPRTPGLATYRIAVGKRHKVMPGAIVGAIANEGGLHRSDFGHITIRPDHSLVELPAKLSPKTLKALENTRISGVLIDLRPAGGPDGARPDRKYTERRRADHKHSDHKRSEAKRPKRAPKKP

SEQ ID NO: 14267 - protein, 395 aa, Mycobacterium abscessus
MAATNRSVIVAGARTPVGRFQGSLKDFSGAQLGGIAIAGALAKAGVAPSAVDYVIMGQVLTAGAGQMPARQAAVAGGIGMDVPALTINKVCLSGVDAIALADQLIRAGEFEVVVAGGQESMTNAPHLLPKSRAGFKYGDVTLIDHMAFDGLHDAFTDQAMGLLTEQRNASDKFTREEQDEFAARSHQNAARGWKDGAFADEVVPVRIPQRKGDPIEFAEDEGIRADTTAASLAGLRPAFSKDGTITAGSSSPISDGACAVVVMSKERAEREGLEWLAEIGAHGVVAGPDSSLQLQPANAIRKACEREGISPEQLDLVEINEAFALVGLASIKDLGIDPEKVNVNGGAIAIGHPIGMSGARITLHLAQELKRRGGGIGVAALCGGGGQGDALIVRV

SEQ ID NO: 14268 - protein, 363 aa, Mycobacterium abscessus
MTFLTKATRRILTPDSSLGRLLTAALTPHAVDRYLELVDPMITWEEARARVIRVQRRTTRSVTLTLRTTHQFKGFHAGQFVQLGVVIDGVRHVRCFSPSCADDAREIIELTIARRPDGLVSNYLYKHAAVGDVYSITPAAGTFVLPAPRPIRTLLIAAGSGITPVLSMARTLVGNGYPGQLAVLYYAPTAADNAYAGELAALGEVPSVTVRVEYTRDGGQHFSAEQLQAVAPWHADAQTFLCGPPSLHEAVSALYAERGLSDRLHTEEFTLATAGNTGEAGGVLRFATSGITAENDGRPILEQAEAAGLQPEFGCRMGICFACTAVKTSGCTRNLRTGDENDDPDQHIQLCITAPVGDVSINL

SEQ ID NO: 14269 - protein, 482 aa, Mycobacterium abscessus
MPRFVDRVVIHAKAGTGGHGCASVHREKFKPLGGPDGGNGGRGGSVILEVDPQVHTLLDFHFHPHLQAPNGTQGMGGHRNGANGDDLILKVPDGTVVLDDDGRILADLVGAGARFDAAAGGRGGLGNAALASRARKAPGFALLGEAGAEVDLTLELKTVADVGLVGFPSAGKSSLVSVLSAAKPKIADYPFTTLVPNLGVVTTGENSFVMADVPGLIPGAAEGRGLGLEFLRHIERCAVLVHVVDCATLEPGRDPVSDIDALENELARYQPTLQDDSVLGDLADRPRAVVLNKVDVPEADELADFVTEEVSQRGWPVFKVSTLTRDGLRPLTFALWEMIVAARAARPEPVKTRPVIRPIPVDESGFTVSADPQNPGGFVVRGVRPERWIRQTNFENDEAVGYLGDRLARLGVEDELLKLGAEPGCAVTIGDMTFDWEPQTPAGVDVTMSGRGTDARIDKTDRVGAAERRQARRVRRGQVEPE

SEQ ID NO: 14270 - protein, 560 aa, Mycobacterium abscessus
MTTSETRPARPKQQRSEGQWALGELEPLNSNEQVKKDDHPLNVRERIETIYSKQGFDSIDKADLRGRFRWWGLYTQRKQGYDGTWTGDDNTDMLEDDHFMLRVRCDGGALTTQALRTIGELSTQYARDTADISDRQNVQYHWIRVEDMPEIWRRLDEVGLYTTQACGDCPRVILGSPLAGESLDEVLDPTWAIDEITRRYIGNKEYANLPRKFKTAISGLQDVVHEINDVAFVGVVHPEHGPGLDIWVGGGLSTNPMLAQRLGAWVPLDEVPDVWEGVVGIFRDYGYRRLRSKARLKFLVKDWGVAKFREILETEYLKRPLIDGPAPVPPTHPIDHVGVQRLKNGLNAIGISAIAGRVSGTILSAIADLAEKAGSNRVALTPHQKLIILDVSDDELPALEAGLNALGLPSRPSHWRKNLLACTGIEYCKLSFTETRVRAQSLVPELEKRLDDLNAQIDTPVTINMNGCPNSCARSQTADIGFKGQMVDDGNGNSVEGFQVHLGGSLGLDSGFGRKLRQHKVTSTELGDYIDRVVRNFVAQRTDGERFAQWAVRAEEADLR

SEQ ID NO: 14271 - protein, 304 aa, Mycobacterium abscessus
MSSPEFRSGFVCFVGRPNTGKSTLTNALVGQKVAITSNRPQTTRHTIRGIVHRENFQIVLVDTPGLHRPRTLLGQRLNDLVRDTYSEVDVIGLCIPADEGIGPGDKWIYEQIKLVAPRTTLIAIVTKIDKVSKERVAEQLLSVSQLVGKEVDIVPVSAVSGAQVEVLTEVLASKLQPGPAFYPDGELTDEPEEVLMAELIREAALEGVRDELPHSLAVVIDECSEREGRPEGSELIDVHAILYVERDSQKGIVIGKGGARLREVGTNARTQIEKLLGTKVFLDLRVKVAKNWQRDPKQLGKLGF

SEQ ID NO: 14272 - protein, 646 aa, Mycobacterium abscessus
MCGLVAWLGPPGSSLESHSPAVDAAMVHMRHRGPDEPGVWHEGNVLFGFNRLSIIDIAHSHQPLRWGPPDAPGRYVLVFNGEIYNYLELRATLAAEHGAVFSTEGDGEAILAAYHFWGPDALHRLRGMFAFAIWDTVERELFCARDPFGIKPLFMATGPGGTALGSEKKCLLDLVEQLGIGTELDLRALQHYTTLQYVPEPESLHTEIRRLESGSYARIAPGQEPRITRYFPARFEVAPFTRATRQSRYDEITEVLSDSVAKHMRADVTVGSFLSGGIDSTAIAALAIRHNPKLITFTTGFERQGYSEVDVAVESAQAIGARHIVKVVSQEEFVSALPEIVWYLDDPVADPSLVPLFFVAREARKHVKVVLSGEGADELFGGYTIYREPLSLKPFEYLPDALRRGAARLSAAIPDGMRGKSLLHRGSMTLEQRYYGNARSFDDEQLRAVLPHYRPEWGHQDVTASLYERCAGWDPVARMQYLDLFTWLRGDILVKADKMTMANSLELRVPFLDPEVFKVASRLPYREKINGQPTKRTTKYALRKALEPIVPAHVLHRTKLGFPVPIRHWFVDGLLHDWAREMLSTTQAGHLIDVPAVGRMLTEHAAGASDHSRRLWTVLIFMLWHAIFVEQSVRPQIQEPHYPVQL

SEQ ID NO: 14273 - protein, 564 aa, Mycobacterium abscessus
MVDWLVSELRRHAVDFVFGVDGANIEDLYDAVHYAPGMQAVVAKHEFSAGTMADGYARVTSRMSVVATTSGGGAVNLVPALAESYASAVPVLAIVGQPPRSLEGNGAFQDGSGRAGSMDLRAVFRPVSGYCARVEHSGEIAEALSGALAAIRDGLPAVLLIPKDVQQARLAVEPQLREPLPRLGTVPVQLADFAGHLIKTPGRILVVAGPEVARQDAREELADLVDRLDALVAVSPDAKDTVKSENPRLLGVIGVMGHPAVEQVMRHGVTCVCVGTTMPVMTRGAVDFSKIPVLSIGSAAPHVASRHLQTHDLVSTLAGLAAALPARPETSDSETLYAPAHLEPPAHDGDGVRYHDVMHVLDRAIPAGADIFVDAGNTGAAAVHYLGARQHGRYVVALGMGGMGYAFGAGIGCAFARPGRTVVIAGDGAFFMHGMEIHTAIEHRLPVTFVIVNNNAHAMCVTREQLYYGGSYSFNRFAPSHIASGLGAMFPGLMCHSADTVADLEAAMQQVMTHHGPSVVEVICSTDEIPPFAPFLSPEIAKERTHDRHDCKNGQSWPQSLARA

SEQ ID NO: 14274 - protein, 404 aa, Mycobacterium abscessus
MPVEHSDRVILAYSGGLDTSVAISWIGKETGREVVAVAIDLGQGGEDMEVVRQRALDCGAVEAVVVDARDEFAEEYCLPTIQSNALYMDRYPLVSAISRPLIVKHLVAAAREHGGGIVAHGCTGKGNDQVRFEVGFASLAPDLEVLAPVRDYAWTREKAIAFAAENEIPINVTKKSPFSIDQNVWGRAVETGFLEDLWNAPTKDVYDYTEDPTLNWGAPDELIVTFDKGVPTAIDGHPVSVLEAIVELNRRAGAQGVGRLDVVEDRLVGIKSREIYEAPGAMVLITAHEELEHVTLERELGRYKRRTDQKWAELVYDGLWYSPLKRSLEAFVADTQQHVSGDIRLVLHGGNIAVNGRRSPESLYDFNLATYDEGDSFDQSSAKGFVHIHGLSSKISAQRDLSGK

SEQ ID NO: 14275 - protein, 389 aa, Mycobacterium abscessus
MNGRAPRRAVLTGAAGIAATAGLFGATGLVRAAMFDGTNSTGQLRIGYLPITDAAPLLYAHSAGLYPAGAVSAAKPVLFRSWAALAEAFMARQIDVVHLLMPMAIQLRQVLGHGVRVLGWNHTNGSALTVAPDIEHLEDLAGTAVAIPFWWSIHNIVLQELLRAHGLRPVIRGTASRVRRTVELVVMSPSDMVPALANRSIGGYVVADPFNAIAQIKKIGRIHTFLGDVWRDHACCALVTREDVIERRADAVQGVTDAVVAAQLRVDTDRKSAATTLGGGKYLPQSVLAVQTALTYPNPPYPLKHPDWYPQRLGYQPFPYRSFTQRLVESMHDTVVDGDRAFLDRLDPARVHDDLVDDTFVRRAIAAHGGPEAFGITPQFARIEQVQVL

SEQ ID NO: 14276 - protein, 1762 aa, Mycobacterium abscessus
MSSEGVGDGAGVNLDLSLRFFSELTGVSDLRHGQFGVGNFFLPNDPASHAEAEQVIEQALRAQGFTILLSRDVPVNNDAIRPAAIKYQLPIRQWVFRSDSERKTHEALMAIESVAYTRPELLGLYPLSLSTRTQVLKGRLNSNEVVPYFSDLSDPRMEVHSMFFHTRFSTNTAPNATMAQPFRLMAHNGELNTDKKNRLSENAIARARNRAIIRPVGQSDSCRLDQTLQSRVLEDDLDLVTAVVAMMPPAWENDTTLSPRVTAMLEYFSLYEEKNDGPAALIFGDGNIIGARLDRLGLRPLRTVETAEYLGVMSEAGQIYFEPDSVLERGRIEAGGMRYYDHSEGRSYNTVEALEMLAARHDYPAMLAQARVNIADLPHVPPAGQGSPARYDGDLDRHQRYVAYSLNQESFKFLMDPMLATGQEKISAMGYGAAINALSNQEGGVAKYFSQRFAQVTNPPLDSIREADGMTLRVALGAKPNSGAQPAPQIVVPSPILTHLDMLKIREQGRTPVRRFGMRYRVDLTDAVSNAERIVRAIDDLCDAVEEFARETGGIAVISDRHVSSERAAMPLIIVISAINQRLIEEGLRLRVSLIAESGQLCSSHHVAAVLGFGASAVYPLAVQMRAEEKYGPDVDDAVNAFKHFAKAAEKSLMKTMGRVGLCTVESYIGGEFFEPNYLDTSDPVLRKYFPNVVSPVAGVGFSTLAAAVADWHARALAVTGEKDVPLLGLFKERAEGAGHSYGTTAVRGFVDMTEESISFGDEARPENPDMADPTYLRLLPLHQLEGAFGLDDEAYRNNSFDELPTRAIDSFDITPGYRNFVRAMNSERTRRPAALRDVLALPADVNFVRTADEFRREMGQFARLGNNDFQVRGLSCQQTDDVFVLRLAHSPERLAALASSLRTRFGREITHHEIVGDELRITATGQAADYLAQIRTAPESIPLSSVQPASEITPTLTSGAMSHGALVAPAHEAVAHGTNLVGGLSNCGEGGEHISRYGTIRGSRIKQFASGRFGVWAGYLADPMLQELEIKIGQGAKPGEGGQLPAPKVTVQIAAARGGTPGVELVSPPPHHDTYSIEDLAQLIHDCKAARVRVIVKLVSSEGIGTIAVGVAKAGADVINVAGNTGGTGAAAVTSLKYAGRSAEIGVAEVHQALCANGIRQKVVLRCSGAHQTASDVVKSALLGADSFEFGTTALMMLKCVMAKNCNIKCPAGLTTNAEVFEGDPRALAQYLLNIAHEVREILAALGMRTLREARGRSDLLHLLDHPSSIGTLDLRRMLAVAEEFVVENPVYMEKDYSVDDAFAAQFDARGAVLKPVTLTNQNKSVGGQLAIDIERSLNYQNIEGPAVATDERGRRYLLPESIAITTTGSAGQSYGVFCNDGMVLTHTGTCNDGVGKSACGGTITVRSPGGGSSEPGGNVLIGNFALFGASGGRLFVQGQAGDRFAVRNSGATAVVEGTGEFLCEYMTNGAVLNIGDFGKGVANGMSGGFLYQYDPHGQLPSKVSHDSVLVLPITDAPFHEAAAHILLQWHVAATGSTKGQALLDDWQSARDHMVYTMSRALLQYQDSDAILQGKTRKELLDELTAALAGYQVHKFKLSYRDRRDVVGGTVPAYGDTDTEGMYALLNTYTVLNMAQQLALSRMPNVTDVTDPRIGKAVRNLVLTEDFFLIQKLQKYAREAIDGYSDEDLAVLIADKRLTDYKDALSQRNVLSMDSPGTYGWILHQSAKNIDKIGRLPSFEELFAHRALPAVALSGPSLQTT

SEQ ID NO: 14277 - protein, 232 aa, Mycobacterium abscessus
MHSAVEETPVFRGMSTPAVAAATARLTTEHFQPDEVIFRPGDPGDRMYLVTQGKVALSRRSGDGAERLATLVGPTEMFGELSIFDPEPRRSEARALTAVAARGMDRDTMRWWIAHHSDAAEQLLRVLARQVRKATRKLADIPHADITARVAAQLLDLAQRFGTIEGDSVYVEHGLSQLELADLVGTSRESMCRVLHEFEKRGLIQVHGTSLTIYDCEVLSVRNHAASGVIEK

SEQ ID NO: 14278 - protein, 488 aa, Mycobacterium abscessus
MDHTQTPFLDAVDRYHRDNRYGFTPPGHRQGRGVDARVTGIMGMDPFRCDLLASGGLDDRKSSGHYLAQAEELMADAVGASSAFFSTCGSSLSVKAAMMAVAGGCEGGLLVGRDSHKSIIAGLIFSGVQPRWITPRWDAQRHISHPPSPRQVEEAWQQHPDAAGALIVSPSPYGTCADIGAIAQVCHRRGKPLIVDEAWGAHLPFHEELPTWAMDAGADVCVVSVHKMGAGFEQGSVFHLQGDRVDPARLSACADLLMTTSPNVMVYAAMDGWRRQMVEHGHELLSHALDLAEQVRGEIADIADVQVMESELLGAEASHDLDRLQVLVDISQTGTSGYQAADWLRQHKQLDLGLSDHRRFLATMSIADRDLTVERLLGSLSAWRAAAEDFPRPRPLYLPPPQQLQLESVMLPRDAFFGPTDTVAIGDAAGHIAAEQVTPYPPGIPVVVPGERLTSPVLEYLRSGVKAGMMVPDPADSSLETIRVTAER

SEQ ID NO: 14279 - protein, 419 aa, Mycobacterium abscessus
MSSQQPGALRRELGTFDAVMIGLGSMIGAGIFAALAPAARSAGSALLIGLCVAAVIAYCNATSSARLAAVYPASGGTYVYGRERLGDFWGYLAGWGFVVGKTASCAAMALTIGFYAWPGHAHAVAVASVVALTAINYVGVQKSAWLTRVIVAIVLSVLAAIVATAAGSGSVDIAALDLTGTSWRGVLQAAGLLFFAFAGYARIATLGEEVRDPARTIPRAIPIALGIALVVYVVVALAVLITLGPSRLASSAAPLLDAVTAAGAGWMEPVVRIGAVVAATGSLLALILGVSRTTFAMARDRHLPHTLATVHPKYGVPYRAEILVGLVVSVLAATADLRGAIGFSSFAVLVYYAVANASAWTLTPSQGRPARIIPAVGLVGCVIVSLALPLSSVAAGTGVLAVGVIVYALRRVSGPGRRE

SEQ ID NO: 14280 - protein, 254 aa, Mycobacterium abscessus
MTTLEIKDLHVSISPKEGESIEILKGVNLTVNSGETHAVMGPNGSGKSTLSYAIAGHPKYEVTSGSITLDGQDVLELSVDERARAGLFLAMQYPVEVPGVSMSNFLRTAATAVRGEAPKLRHWVKEVKEAMGELEIDSTFAERSVNEGFSGGEKKRHEILQLGLLKPKIAVLDETDSGLDVDALRIVSEGVNRYAEREHGGILLITHYTRILRYIQPQFVHVFVGGRIVESGGPELADELEENGYVRFTQAVGA

SEQ ID NO: 14281 - protein, 371 aa, Mycobacterium abscessus
MRVGIPTEIKNNEYRVATTPAGVAELTRRGHEVIIQSGAGDGSSISDVDFKAAGAQVINGAEQVWAEADLLLKVKEPIEPEYALMRRGQTLFTYLHLAASLPCTQALLKSETTSIAYETVQTSDGALPLLAPMSEVAGRLAAQVGAYHLMTPVGGRGLVMGGVPGVGPADVVVIGGGVAGYNAARIAAGMGAHVTVFDVNLGKLRELDGEFGGTIRTRYSSTMELEGAVKRADLVIGAVLIPGAKAPKLISNSLVSQMKPGSVLVDIAIDQGGCFADSRPTTHDEPTYTVHDSVFYCVANMPGAVPRTSTFALTNATMPYVLALADKGWRQACRDDAALAQGLSTHEGALLNTHVAHDLGLAFTDPAEVLG

SEQ ID NO: 14282 - protein, 413 aa, Mycobacterium abscessus
MDGGRNSPSNNGKEVVKVLSAESLGVIRETLPAVAGAIDEITPLFYSKMFAAHPELLRDLFNRGNQAAGEQPKALAASIAAFAGMVLEGNGAQYDSVLDRIAHKHASLGIVAEQYPIVYEHLFAAIAEVLGGAVTADVAKAWSEFYWLMADELIAREKALYDAAGVAPGDVWLQAIVVRRQLESADVAGFELRGVSGKLPNFVPGQYISVQVTLPDGARQIRQYSLSRGSTAGDWRIAVKRLNVGDTPAGEVSNFIYDNVFEGQQLRVSVPMGEFTLDDSADPLVLVSAGIGCTPIMGMLQELVATQSPREVVVLHADQSAAAHAYRHELADLVGRLPAGRLHTWYERAHVEHPADGIGRMSLDRLPIDLSSTVFVCGPRPFMSAINEDLVSLGIPQEQINHELFGPLASAVA

SEQ ID NO: 14283 - protein, 523 aa, Mycobacterium abscessus
MLIADKLAPSTVEALGDGVEVRWVDGPDRPALLAAVPEADALLVRSATTVDAEVLAAGTKLKIVARAGVGLDNVDVKAATARGVLVVNAPTSNIHSAAEHAVTLLLATARQIPAADASLKAHTWKRSSFNGTEIFGKTVGVVGLGRIGQLFAQRLAAFGTHIVAYDPYVSAARAAQLGIELLTLDELLGRADFISVHLPKTPETAGLIGKEALAKTKPGVIIVNAARGGLIDEAALADAIRSGHVRGAGLDVFSTEPCTDSPLFELDQVVVTPHLGASTSEAQDRAGTDVAASVQLALAGEFVPDAVNVGGGVVSEEVAPWLEVVRKLGVLIGAVSEQLPTSLSVDVRGELASEDVAVLKLSALRGLFSSVIEDQVTFVNAPSIAEERGVSAEITTATESPNHRSVVDVRAVYADGSVINVAGTLSGPQLVQKIVQINGRNFDLRAEGVNLVINYADVPGALGKIGTVLGGAEVNIQAAQLSQDASGAAATIILRIDRTAPDAVLDEIRAAVGATTLELVDLS

SEQ ID NO: 14284 - protein, 614 aa, Mycobacterium abscessus
MSAPAKPKPASASGRAPGTAPEPNTVAPQRVTGAQSVVRSLEELGVEVIFGIPGGAVLPVYDPLYDSTKVRHVLVRHEQGAGHAASGYAHANGKVGVMMATSGPGATNLVTPLADAQMDSIPVVAITGQVGRGLIGTDAFQEADISGITMPITKHNFLVSNAEDIPKVIAEAFYIAQSGRPGAVLVDIPKDILQAQTTFSWPPQIYLPGYKPVTKPHGKQVREAVRLIAAAKRPVLYVGGGVIRADASPELKELAELTGIPVVTTLMARGAFPDSHELHMGMPGMHGTVGAVAALQRSDLLITLGARFDDRVTGQLDSFAPEAKVIHADIDPAEIGKNRHADVPIVGDVKNVIIELIEAIRADRAAGTVADPLSEWWEYLSDVRKTYPLGYDAQHDGSLGPEFVIETLGKIAGPDAVYVAGVGQHQMWAAQFIKYENPRTWLNSGGLGTMGFAVPAAMGAKMARPEAEVWAIDGDGCFQMTNQELATCAIEGVPIKVALINNGNLGMVRQWQTLFYEERYSQTDLATHSRRIPDFVKLAEALGCVGLRCEREEDVAKVIEEARAINDRPVVIDFIVGADAQVWPMVAAGTSNDEIQAARGIRPLFDDDELVADE

SEQ ID NO: 14285 - protein, 396 aa, Mycobacterium abscessus
MSRSVYLDHAATTPMRPDAIEAMAATMAQTGNAASLHGAGRDARRRVEESRESIAAALGARPSEVIFTAGGTESDNLAVKGIYWARRGADARRRRIIASAVEHHAVLDAVQWLADHEGAAVTWLPVDQAGTVTPGALRAALAEHDDVALITVMWANNEVGTINPIYELSSIAAEFDVPMHSDAIGAVGQLDVDFALSGLSAISVAAHKFGGPMGVGALLLRREIACVPLLHGGGHERDIRSGTPDTAAIVAMSTALVAAVAERCESAAAMAGLRDSLIDQVLTQIEGATLNGAPGSGRLPGNAHFTFAGCEGDSLLMLLDANGIECSTGSACTAGVARPSHVLIEMGIDPEVARGSLRFTFGHTSVPSDVDRALEALHAAVPRARAAALASAGGRS

SEQ ID NO: 14286 - protein, 397 aa, Mycobacterium abscessus
MRDAVIIDAVRTPVGKGKPGGSLSGVHPVDLHAHAIRELVERAGIDPALIDDVISGAVGQVGEQSSNTARWAALAAGLPETVPAVTVDRQCGSSQQAIHFAAQGVIAGAYDVVIASGIESMSRVPMGSQSLGKDFFGSEVARRYPEGLVPQGISAELIAAKWNLSREQLDTFAAESHRRAAQAWSEGRFARDVVPIKAPDVNGDLVEVSTDESVRPSTTVEVLAGLKPAFRNELWQQRFPGLDWKVTAGNSSPINDGASAVLITSSETAHRLGLTPRARVHSVAVVGDDPLYMLTGIIPATAKVLDRAGLSLADIDAFEVNEAFASVVLAWQAETGADLSKVNVNGGATAIGHPLGASGGRLMTTLVSVLEQGGGRYGLQTMCEAGGLANATILERL

SEQ ID NO: 14287 - protein, 490 aa, Mycobacterium abscessus
MSHIEHTFAQLGVRKEIARALREAGIEHPFAIQELTLPLALAGSDLIGQARTGMGKTYAFGVPLLHRIATGVEDRPLNGTPRALVVVPTRELCIQVYEDLTKASKYLSAGDRDFTVVSIYGGRPYEPQIEALRAGADVVVGTPGRLLDLAQQGHLQLGGLAMLVLDEADEMLDLGFLPDIERILALAPSADAGRQSMLFSATMPDPIITLARTFMNRPTHIRAEDPQASSVHDSTEQFVYRAHALDKIELVSRILQADGRGATMIFTRTKRTAQKVSDELAERGFAVGAVHGDLGQIAREKALTSFRSGQINVLVATDVAARGIDIDDVTHVINYQCPEDDKTYVHRIGRTGRAGRTGIAVTLVDWDDIARWQLIDKALGLGVPEPDETYSTSPHLFTELNIPADVTGSIGEKFSGGPKRREPRGERAEGEKPKRTRTRRRTRAGQPTDESAAEAPAPEAATADGDQQAPARRRRRRRRPNATAATTASA

SEQ ID NO: 14288 - protein, 390 aa, Mycobacterium abscessus
MKLASWLDASAPGAPKSRHAAVNILRGLASRITTPLLPDDYLSLANPLWSARELRGRVVSVRKETSDSATLEIKPGWGFHFDYHPGQYVGIGVLIDGRWRWRSYSLTSAPAMSGSREERRALHAGGSARTITITVKAMPEGFLSTHLVNGLEPGTIVRLAAPQGNFVLDDPAPPAILFLTAGSGITPIMSMLRTLVRRSAAAGLPLPDVVHLHSAPTAGDVMFAGELAAFSEAHPSYHYRLRTTKTQGRLDFSSLAAEVPDWARRQTWACGPEGMLDDAQRTWADAGLAELLHLERFAVSRAAPHGQGGLVTFARSGKQRAADAATSLMEAGEEAGVQMPFGCRMGICQTCVVSLVQGHARDLRTGAEYEPGTRIQTCVSAASGDCVLDV

SEQ ID NO: 14289 - protein, 225 aa, Mycobacterium abscessus
MRQRILVVDDDASLAEMLTIVLRGEGFETAVVSDGTQALTAVRELRPDLVLLDLMLPGMNGIDVCRVLRSDSGVPIVMLTAKTDTVDVVLGLESGADDYIMKPFKPKELVARIRARLRRNDDEPAELLNIAGIDIDVPAHKVTREGEQISLTPLEFDLLVALARKPRQVFTRDVLLEQVWGYRHPADTRLVNVHVQRLRAKVEKDPENPTVVLTVRGVGYKAGPP

SEQ ID NO: 14290 - protein, 491 aa, Mycobacterium abscessus
MPGSGLWRTKSVEQSIADTDEPETKLRRDLTWWDLTVFGVSVVIGAGIFTVTASTAANVTGPAISLSFIMAAIGCGLAAMCYAEFASTIPVAGSAYTFSYATFGEFAAWILGWDLILEFSVGAATVAKGWSSYLSTVFGLSSGAVHLGAVKIDWGALLIVSVLTVLLAVGTKLSSRVSLVITTIKVLVVLLVIIVGAFFIKTANYTPFIPPAEAGSSSRQGLDQSLFSFVAGGSGSQYGWFGVLAGASIVFFAFIGFDVVATTAEETRNPQKDVPRGIIASLVIVTVLYVAVTVVLSGMVKYSDLRVADSHPNLSTAFHLNGVDWAAKVIAVGALAGLTTVVMVLMLGQIRVIFAMCRDGLLPRELARTGSHGTPIRITLIVGFLVAVAASLTPIEGLEEIVNVGTLFAFVLVSAGVIVLRRSRPDLPRSFRTPGVPWLPIVAIVACGWLMLNLAVRTWLFALSWMVIGVIVYFAYSRKHSVLGLRVDVEQ

SEQ ID NO: 14291 - protein, 491 aa, Mycobacterium abscessus
MAPSSPSLAQQLLRRRPTSGAPTAHGAGGHLKQSMGTFQLTMIGVGATVGTGIFFILAESVPKAGPAVMASFLVAGLAAGLAALCYAELASAVPVSGSSFSYAYTTLGELAAMVVAACLLLEYGVSAAAVAVGWSQYLDKLLVNLFGWHLPHAISAAPWDSADPAAPHPWLNLPAVLLIIMCAILLIRGTSESALVNTVMVLLKLAVLSVFAIIAFTAFHAGNFSDFAPFGVSGIGAAAGTIFFTYVGLDTVSTAGEEVKDPQRTMPRALIAALLIVTAFYLVVALAALGAQPWKEFEGQSAGLALILDKVTGSTSASTFLAAGAVISIFSITLVSMYGQTRILFAIGRDGLLPSVFAQVNPRTLTPVNNTIIVAVVVGFMAAFVPLDSLANMVSIGTLTAFIVVSIGVIILRVREPELPRAFRVPGYPVTPVLSVIACGYILFSLPWITWIAFGAWVAIVLVFYLVWGRHHSALNDLPSDPAELSEKEPV

SEQ ID NO: 14292 - protein, 355 aa, Mycobacterium abscessus
MTDSVLPDTPRVTGNPHVHSLEVVEIIRETGDAVSLVFEVPDALVDAFRYRPGQFLTLKIPSEQTGSVARCYSLSSSPHLDDDLVVTVKRTDGGYASNWLCDNVGVGDHITVLTPSGVFVPRSLDSDFLLIAAGSGITPMLSIAKSVLLGGAGTVYLFYANRDAQSVIFGAEIDDIMVEFPDRLRVVHWLEAERGLPTRDAMSELFAAYTRYSTYLCGPAPFMEEARAALSAVGMPANHIHLEHYQSLSGDPFADIVIPQGGADAAQATVELDGTRVTVEWPRNTPLLDVLLARGIDAPYSCREGACSACACTVRRGEVRMLRNDTLVDADLAMGLTLACQAVPVTDSVDIAFDQ

SEQ ID NO: 14293 - protein, 503 aa, Mycobacterium abscessus
MATQSDERSPVKPVTGTSDFVVVANRLPIDLVKLPDGSTTWKRSPGGLVTAMEPLLRKRRGAWVGWPGVPDADVEPVSEDDMVLYSVRLSTQEVAEYYEGFSNATLWPLYHDVIVKPEYHREWWQAYVDVNRKFAEATAAVAAEGATVWVQDYQLQLVPKMLRMLRPDLTIGFFLHIPFPPVELFMQMPWRTEIVDGLLGADLIGFHLAGGAQNFMYLARRLVGASTSRASIGVRSRFGEIRVGFRTVKVGAFPISIDSTQLDSVSRSRQIRQRAKEIRAELGGPRKILLGVDRLDYTKGIDIRLHAYEELLAEGRASREDTVFVQLATPSRERVDSYKKMRGDVEQQVGHINGEFGEVGHPVVHYLHRPVPREDLIAFFVAADVMLVTPLRDGMNLVAKEYVACRSDLGGSLVLSEFTGAAAELRQAYLVNPHDIDGVKDGIESALNQTPEEGRRRMRALRRQVLAHDVDRWARAFLEALSTPATGDSIAPEQPAVLGGEPL

SEQ ID NO: 14294 - protein, 327 aa, Mycobacterium abscessus
MTRYAMQGTARRFGALAFVAALLAGCSTPENSTPLPQLTVPRPTPAEMTEQEPNRAVLDKIDTSCDPTASLRPTSDRAANDEAVAAIRKRGRLVVGLDIGSNLFSFRDPITGELTGFDVDIAGEVSRDIFGTPERVEYRILSSADRVAALKNSTVDIVVKTMTITCARRKEVNFSSVYLMNYQRILTSRDSGITNAQDLSGRRVCAARGTTSLNRLSQITPPPVIMSVVTWADCLVALQQRQVDAVSTDDSILAGLMSQDPYLHIIGPNMSDEPYGIGIKLENTDLVRYVNRTLERIRRDGTWNALYRKWLSVLGPAPAPPSAKYRD

SEQ ID NO: 14295 - protein, 372 aa, Mycobacterium abscessus
MSAGGSVLVLNCGSSSVKYQLIEPESGRVIAHGLVERIGEEEIGNHEEALRLVFDSIDTGDVVVVGHRVVHGGQKFHEPTVLDDAVVAQIAELSSLAPLHNPAGVQGIEVARRLLPDVPQVAVFDTAFFFGLPPAAAIYALDRAVAERYGIRRYGFHGTSHQYVSQQAAAFLGRGYADINQIVLHLGNGASASAILRGRAVETSMGLTPLEGLVMGTRTGDIDAGIVFHLARHGMSIDEIDTVFNRRSGMLGLCGANDFREVHRLIDAGDAAAQLAYNVYVHRLRKYIGAYIATLGGADVISFTAGAGENDALLRADALAGLEVFGIEIDAARNQVRSGEARRISTDSSRVTVLVVPTNEELAIARAAVEAI

SEQ ID NO: 14296 - protein, 693 aa, Mycobacterium abscessus
MTQPKASSIYIASPEGDTGKSTVALGVMHRLAASVARVGVFRPIARSGESVDYILELLLEQSTADIAYEDCLGVSYHDVHQDPDAAIAQIVDRYHAVAERCDAVVIVGSDYTDVASPSELGTNARIAVNLGAPVLLTIKGFDRTPDEVAALAEVCLGELKAQRAHTAAIVANRCNPGQLDEVRQALARFDKPAWVLPEVPLLVSPSVEELMKAVKGSLVSGDEALLSREATSFMVAGMTAEHCLERLKEGQAVIFPADRSDVLLAVASAHVAEGFPSLSAIILNGGLKLHPRIADLVDGIGLRLPIIETDSGTFETASAAAHARGRVTVASARKIDTALALMDRYVDGADLVAQLAIPIPSVTTPQMFEYQLLDRARDNRKRIVLPEGDDDRILKAAGRLLQRQVADLTILGEEAEIRSRAAELGVDISNALVVSPKTSDLAEKFADQYFELRKHKGMTPDRAREIMRNVSYFGTMLVYNDIVDGMVSGAAHTTAHTIRPAFEVIRTTSGVSTVSSIFLMCLADRVLAYGDCAIVPDPTSEQLADIAISSARTAAQFGIDPRVAMLSYSTGSSGSGADVEKVRIATELVRSRQPELLVEGPIQYDAAVEPSVAATKMPDSPVAGRATVLIFPDLNTGNNTYKAVQRSAGAVAIGPVLQGLRKPINDLSRGALVEDIVNTVAITAIQAQERKQS

SEQ ID NO: 14297 - protein, 848 aa, Mycobacterium abscessus
MDSFNPTTKTQAALTAALQAATTAGNPEIRPAHLLVALLGQTDGIAAPLLQAVGVDPVSVRNEAQAIADRLPQVSNASANPQLSRDSIAAVTAAQHLATELNDDYVSTEHLLVGLATGDSDIAKLLVNHGATPQALRDAFVQVRGSGRVTSPEPEATFQALEKYSTDLTARAREGKLDPVIGRDTEIRRVVQVLSRRTKNNPVLIGEPGVGKTAIVEGLAQRIVAGDVPESLRGKTVISLDLGSMVAGAKYRGEFEERLKAVLDEIKNSAGQLITFIDELHTIVGAGATGESAMDAGNMIKPMLARGELRLVGATTLDEYRKYIEKDAALERRFQQVLVGEPSVEDTIGILRGIKERYEIHHGVRITDSALVAAATLSDRYITSRFLPDKAIDLVDEAASRLRMEIDSRPVEIDEVERVVRRLEIEEMALSKEEDEASKQRLEKLRVELADKKERLAELTARWQNEKSSIDAVRDLKEQLETLKGESDRAERDGDLGKAAELRYGRIPELEKQLEQALPGLDHDGNVMLKEEVSPDDVADVVSAWTGIPTGRLMEGETAKLLRMEDELGKRVVGQKKAVEAVSDAVRRARAGVADPNRPTGSFLFLGPTGVGKTELAKALADFLFDDEHAMVRIDMSEYGEKHSVARLVGAPPGYVGYDAGGQLTEAVRRRPYTVVLFDEVEKAHPDVFDVLLQVLDEGRLTDGQGRTVDFRNTILILTSNLGAGGSEEQVMAAVRAKFKPEFINRLDDVLIFDGLNPEELVQIVDIQLGQLQKRLAQRRLTLEVSAPAKKWLAARGFDPIYGARPLRRLVQQSIGDQLAKQLLAGEVHDGDVVPVNVSADGESLILG

SEQ ID NO: 14298 - protein, 620 aa, Mycobacterium abscessus
MARAVGIDLGTTNSVVAVLEGGDPVVVANSEGSRTTPSVVAFARNGEVLVGQPAKNQAVTNVDRTIRSVKRHMGTDWTVEIDGKNYTPQEISARTLQKLKRDAEAYLGEDITDAVITVPAYFNDAQRQATKEAGQIAGLNVLRIVNEPTAAALAYGLDKGEKEQTILVFDLGGGTFDVSLLEIGDGVVEVRATSGDNHLGGDDWDERIVTWLVDKFKASAGIDLTKDKMAMQRLREAAEKAKIELSSSQSTSINLPYITVDADKNPLFLDEQLTRAEFQKITQDLLDRTRKPFQSVIKDAGVSVSDIDHVVLVGGSTRMPAVTDLVKELTGGKEPNKGVNPDEVVAVGAALQAGVLKGEVKDVLLLDVTPLSLGIETKGGVMTKLIERNTTIPTKRSETFTTADDNQPSVQIQVYQGEREIASHNKLLGSFELTGIPPAPRGVPQIEVTFDIDANGIVHVTAKDKGTGKENTIKIQEGSGLSKEEIDRMIKDAEAHADEDKKRREEADVRNQAESLVYQTEKFVKEQREPAEGSEKVVSDETLSKVDEAISEAKKALEGTDIGAIKAAMEKLGEQSQALGQAIYEAAAAKAQADGAEGGAGSADSDVVDAEVVDEEKDSK

SEQ ID NO: 14299 - protein, 427 aa, Mycobacterium abscessus
MSTDNLPIDVPPRVPGLSPRQHQRVFAQSTKLQDVLYEIRGPVHAHAARLEAEGHRILKLNIGNPAPFGFEAPDVIMRDIIQALPYAQGYSDSKGILPARRAVVTRYELVDGFPYLDVDDVFLGNGVSELITMTTQALLDNGDQVLIPAPDYPLWTAATSLAGGTAVHYLCDETNGWMPDIEDLESKITERTKALVIINPNNPTGAVYSREILTKMVELARKHQLLLLADEIYDKILYDDAEHISVASLAPDLLCFTFNGLSKAYRVAGYRSAWLAITGPKDHAASLLEGVNLLANMRLCPNVPAQHAIQVALGGHQSIEDLVLPGGRLLEQRDVAWTKLNEIPGVSCVKPQGALYAFPRLDPEVHHIHDDDQLVLDLLLNEKILLTQGTGFNWPEPDHLRIVTLPWARDLAVAIERLGNFLASYRQ

SEQ ID NO: 14300 - protein, 320 aa, Mycobacterium abscessus
MSLSGENHRVRVLAHFPSGPRVLEQLAPHADWLDVRFCAEDDDNTFYAELPGADVLWHVLRPLSADDVAKGERLRLIHKFGAGVNTIALDAAVEHGVAVANMPGANAPSVAEGALLLMLAALRQLPRLDRDIRSGNGWPTDQSLGESVRDIGSCTIGLVGYGNIAKSLEKILLAMGATVLHTSTRDDGTAGWRGLNDLLTSSDIVSLHLPLTEASTGMLDSAALNRMKPGSVLVNTSRGAVVDEAALVNALQQGPLGAAGLDVFAQEPVSPENPLLALPNVVLTPHVTWFTADTMTRYLHHAIDNCRRIHEGMPLADRVR

SEQ ID NO: 14301 - protein, 208 aa, Mycobacterium abscessus
MTDSNGHIAVASLPVLDEAGRATLFTHARTANSFADTPIAREKLLEAWELARWAPTSVNTQPLRILFVDKGEARDRLIPHMFDPNKAKTSTAPAVAILATDTRFHDQIPTVFPLMPEMAELFEANSELRSSTGIFNAALQSAYFIMAIRAVGLAAGPMGGFDADGVDREFFPDNDWSTVLVVNIGHPGENPWFGRLPRLDPADVVRWA

SEQ ID NO: 14302 - protein, 590 aa, Mycobacterium abscessus
MPSAPGLFESYDAIKARRDVIAGLTVAAISLPQAMAYALIAGVDPKYGVYSAIVVTAIASIFGSSSHLINGPTSAISLLVFSSLAFLDPENRTGLFEALFLLGVLVGTIQILIAVFKLGDLTRYISESVVIGFMASAALLLAIGQLANAIGVRDKGDGHMQVLQRAWLTLFHGDAVNYRALFLSVTAVALAVLLRRLVQRYELPQIDMLLVLIVTAVIAYAYGWTVPDGTGHTDVKISGKIPASLPEFHIPEVQVSTLGELSHGALAIAFIGLIEALSIAKAIAHHTGQQIDYNRQILAEGLANLAGGFFQSLPGSGSLSRSAINYQSGAATRFSGIVSAATVTIALLLFAPLLRYIPQAALAGLLLVTAVRLVDFHRLVYAIKASRYDAGLVIITALVGVAVNLDTAVLVGVVLSILLFVPRAAKLKAAELVVTDEGVIRERTPQDRPTGAGAPVIYDLEGELFFGAAPELDRYLESLHTRIRDEHLKVVILRLKRVRHPDVVCIERLEHFIREQQQLGVTVLLAGVRPDSLALLENVGFTHWLPPEQVFPEEEKEFSATLRAVRYAQSRLEEEPPNPAANPEKLYYLV

SEQ ID NO: 14303 - protein, 303 aa, Mycobacterium abscessus
MATYGWIGLGNMGGPMAANLVAAGHTVRGFDLSGDALAAAETTGVTVVEEIAEVLAGAEVVFTMLPKGEHVRSVFEGPYGIWENASPSTLLVDSSTVDIETSRYCHAESARRGFRFVDAPVSGGISGARAATLCFMLGGELENVGAATDYIKPMAGRVIHAGDGGAGVAAKICNNMMLFIDMMANSEGSQLAERLGLDPQVFWEICSVSSARSWAQQTWYPVPGIIESAAANRNFDATFTVDLAHKDARLALAAGEATGVNLPAATLVTEQFQQLIDEGLGGKDCSLIVKYATPDGSPRGYTP

SEQ ID NO: 14304 - protein, 362 aa, Mycobacterium abscessus
MTDQPVTIGVVRESGEDERRVALVPKAIAGLIGKGVNIVIESGAGERALLPDELYTEAGATVGDAWSADVVVKVAPPTAAEVARLRQGQTLIGFLAPRNAENSIGALRSAGVQAFAVEAIPRISRAQVMDALSSQANVAGYKSVLVAASESTRFFPMLTTAAGTVKPALVLVLGVGVAGLQALATAKRLGARTTGYDVRPEVADQVRSVGAQWLDLGIDAAGEGGYARELTDEERQKQQQALEDAIKGFDVVITTALVPGRPAPRLVTAAAVQGMKPGSVVVDLAGETGGNCELTEPGQTVVKHGVTIASPLNLPATMPEHASELYAKNITSVLELLIKDGALAPDFDDEIVAGSCVTREVS

SEQ ID NO: 14305 - protein, 396 aa, Mycobacterium abscessus
MSAPSQVLNPPTQVAPTEIYLDYAATAPLHPRAAQAVLNGHQLVGNPSSRHGAGRDAADALAAARKTVARLLGADAEEVVLTSGGSEANTLALWGTFAAVGFRGHLVTSSIEHPAVLANAHALRDLGVQVTLVDPAPSGHICSADVAQALRPDTTLVSVMHANNETGAIQPVWEIADIARQSGVAFHTDAVHTAGKLDLTVVGATMMSVSAHKFGGPRGIGALLVRSGHRLLPVTRGGPQENRLRAGTENVPGALGMAAAADVCLRTVEREYRLGMRKRREQLIDGLRAVGGVHLNVTEPVLEETVSVRFDGVRADTLADHLDMHGIYVSTGSACHAGEDTVSHVLRAMCLTEDQARGTVRFSLGPGVSPADVDTVVAVTVQAVHRLRATAGGMIR

SEQ ID NO: 14306 - protein, 311 aa, Mycobacterium abscessus
MTAATTLRIENKPHLSGQAVGLVGAGRMGTGIGLCLLRQGAKLRVIANKDRSGTNELIDHGATESRSLAELADGCAVVVLSLPSSAQVENVCGQDGGLFGALSQGAVVLDTTTAWPQSTIALAQQAGALGIRFVDAPVTRSPEHARQGALNSMLGCTGDFRGLIDVVSAYSATITRVGPVGSAHQMKIVYNAMTMGISAVVAEACQLAASMDVDLHTLRSIVSMGSTNSGIFQKITEYLLEEDTTVLSISLENAAKDIRLAVDAAAENKLSLRSLAAASETYQEACRAGLADKTLPNLATHSQKATRPELG

SEQ ID NO: 14307 - protein, 361 aa, Mycobacterium abscessus
MFDWFNLGFIYYPVSGIMWVWYKLFAYLLGPKNFFAWALSVMFLVFTLRAILYKPFVRQIRTTRQMQELQPQIKALQKKYKNDRQRMALEMQKLQREHGFNPILGCLPMLAQIPVFLGLFHVLRSFNRTTGGFGQVHMTVEANRATGNYFFSANDVANFLDANLFGAPLGATMIQTTGLDAFTEFNRLAVAGVSIPLMIIAGVATYFNSRASIARQSPEAQANPQTQIMNRLALYVFPLGVVVGGPFLPIAIILYWVSNNIWTFGQQHYVFNRIAKEEEEKKQADLERRAANAPKPGAKPTRGKSQPAEQADDSDASPEVVESTGTDEDSGGPASPNSTNGSGTTSRTPKPGARPDRRRKR

SEQ ID NO: 14308 - protein, 632 aa, Geobacillus stearothermophilus
MKPQASEEIRTMVKPKPILKWAGGKQQMLDVLLPQVPKQYNRYIEPFFGGGALFFALTPKDAIIADSNPELINLYRVVADNVEELISILKEMKNDESFYYEIRGLDPDLLSPVERAARTIYLNRTCYNGLYRVNRKGQFNVPYGKYKNPKICDEENLRAASNALQDVLIVEGDYKDVLREHARPDDFIFLDPPYLPVGKYSDFKRYTKEQFYEEDHIELAQEVDRLHELGCYVILTNSNHPLVHELYGKYAISVHKTRRNINSDASKRTGEDVMVKVEPKQRIFIVPEPVKLPSQMNKYPPTRFMGSKQNLLEHIWSVASYFQFDSVLDLFSGSGVVSYMFKTQGKQVFSNDYMAFSHYFTKAMVENSFVTLTDQDIELLFDKSTPRDNFVSETFKDLYFNDEDNEFIDTIRANLDRLKNEYKRAIAISALVRACLKKRPRGIFTYTGYRYDDGRRDLTLTLQQQFLEAVTQVNGAVFDNGKMSKSRYGDAMDCRQKADLVYIDPPYYSPLSDNDYVRRYHFVEGIARNWKGVEMQWHTKTKKFKSYPTPFSSIKGAHDAFDLLFKRHQNSILIVSYSSNSLPTKDEMLALMAKYKKRVEVVSIDHRYSFGNQGHKVGDNNNQVQEYLFVGF

SEQ ID NO: 14309 - protein, 385 aa, Arabidopsis lyrata subsp. petraea
MSFLVAVCNSPVFSPSSSLYCSKPLNISPAHETLTLSLSHLNPPVSSLSPSSAASPTSPFCLRLPKPQAKLGFGSDSGPGGVLKRKRPMRLDIPVAPVGIAAPISETAVNAQTPREESREVERDSDGYSVYCKRGKRAAMEDRFSAITNIQGEPKKAIFGVYDGHGGPIAAEFAAKNLCNNILGEIVDGRNESKIEEAVKRGYLATDSEFLKEKDVKGGSCCVTALISDGNLVVANAGDCRAVLSVGGYAEALTSDHRPSRDDERNRIESSGGYVDTFHSVWRIQGSLAVSRGIGDAHLKQWIISEPETKILRINTQHEFLILASDGLWDKVSNQEAVDIARPFCIGTDQKRKPLLACKKLVDLSVSRGSLDDISVMLVPLCRFF

SEQ ID NO: 14310 - protein, 870 aa, Zostera marina
MMSRSYTNLLDLASGNFPVISGGGRDGRSGGMRRMPRVMTVPSNIAELEDEQASSVASDVQSSIIQDRLIIVGNQLPVVAKRRSDNAGWDFSWDDESLLLQLKDGLPDDMEVLYVGCLRVIVDPEEQDDVSQTLLEKFKCVPAFLTEEILEKYYHGFCKKLLWPLFHYMLPLTKDHGGRFDRSLWEAYVAVNKIFSQKVVEIISPEDDYVWIHDYHLMVLPTLLRRRFIRLRMGFFLHSPFPSSEIYRTLPVREEILNSLLCSDLIGFHTFDYARHFLSCCSRMMGLEYQSKRGYISLDYFGRTVGIKIMPASIHLGQLESMLKTVYKESKIEELERQFQGKTVILGVDDMDIFKGINLKLLAFEQMLKLRPNWQGRAVLVQIANPARGRGKGLESVEVEIRDICERINQQFGRVGYKPVVYINRSVSLKERIAYYTIAECVVVSAVRDGMNLIPYEYTVCKQGIAEPESDSLFADPKKSMLVVSEFIGCSPSLSGAIKINPWNSEATAEAMSDAISMPDGEKQLRHGKHYRYVRTHGVSYWSKSFMQDMERTCKDHFKRRCWGIGFGFGFRVVALDPNFKKLNVDSIVFSYERAKSRAILLDYDGTMINPLSINKTPSTEVISILNALSKDKKNVVFMVSGRGRESLGSWFSSCEKLGIAAEHGFFMRWGRDDEWTTWDKNKDFGWMLMADPVMKLYTEATDGSYIEAKESALVWHHRDADQTFGTSQAKEMLDHLENVLANEPVIAKRGQFIVEVKPQGVSKGLVADNILSTMAKRNCPADFVLCIGDDRSDEDMFENFGSKNLVSFNAHIYSCTVGQKPSKATYYLDDTNDVLEMLRALADASEEDDDDEEEIEDDYVDDESEEGSS

SEQ ID NO: 14311 - protein, 870 aa, Zostera marina
MMSRSYTNLLDLASGNFPVISGGGRDGRSGGMRRMPRVMTVPSNIAELEDEQASSVASDVQSSIIQDRLIIVGNQLPVVAKRRSDNAGRDFSWDDESLLLQLKDGLPDDMEVLYVGCLRVIVDPEEQDDVSQTLLEKFKCVPAFLTEEILEKYYHGFCKKLLWPLFHYMLPLTKDHGGRFDRSLWEAYVAVNKIFSQKVVEIISPEDDYVWIHDYHLMVLPTLLRRRFIRLRMGFFLHSPFPSSEIYRTLPVREEILNSLLCSDLIGFHTFDYARHFLSCCSRMMGLEYQSKRGYISLDYFGRTVGIKIMPASIHLGQLESMLKTVYKESKIEELERQFQGKTVILGVDDMDIFKGINLKLLAFEQMLKLRPNWQGRAVLVQIANPARGRGKGLESVEVEIRDICERINQQFGRVGYKPVVYINRSVSLKERIAYYTIAECVVVSAVRDGMNLIPYEYTVCKQGIAEPESDSLFADPKKSMLVVSEFIGCSPSLSGAIKINPWNSEATAEAMSDAISMPDGEKQLRHGKHYRYVRTHGVSYWSKSFMQDMERTCKDHFKRRCWGIGFGFGFRVVALDPNFKKLNVDSIVFSYERAKSRAILLDYDGTMINPLSINKTPSTEVISILNALSKDKKNVVFMVSGRGRESLGSWFSSCEKLGIAAEHGFFMRWGRDDEWTTWGKNKDFGWMLMADPVMKLYTEATDGSYIEAKESALVWHHRDADQTFGTSQAKEMLDHLENVLANEPVIAKRGQFIVEVKPQGVSKGLVADNILSTMAKRNCPADFVLCIGDDRSDEDMFENFGSKNLVSSNAHIYSCTVGQKPSKATYYLDDTNDVLEMLRALADASEEDDDDEEEIEDDYVDDESEEGSS

SEQ ID NO: 14312 - protein, 204 aa, Mesorhizobium septentrionale
TQIKDYAEFPTLEQLPLWGFDGSSTQQAEGHSSDCVLKPVAVFPDPARTNGVLVMCEVMMPDGVTPHSSNKRATILDDEGAWFGFEQEYFFYKDGRPLGFPESGYPAPQGPYYTGVGYSNVGSVARQIVEEHLDQCLAAGINHEGINAEVAKGQWEFQIFGKGSKKAADQMWMARYLMQRLTEKYGIDIEYHCKPLGDTDWNGS

SEQ ID NO: 14313 - protein, 204 aa, Rhizobium galegae
TQIKEFDTFPTLEQLPLWGFDGSSTMQAEGRSSDCVLKPVAIYPDPARTNGVLVMCEVMMPDGVTPHASNARATILDDEDAWFGFEQEYFFYQNGRPLGFPEQGYPAPQGPYYTGVGYSNVGDVAREIVEEHLDLCLAAGINHEGINAEVAKGQWEFQIFGKGSKKAADQIWMARYLLQRLTEKYGIDIEYHCKPLGDTDWNGS

SEQ ID NO: 14314 - protein, 197 aa, Rhizobium mongolense
AFPALEQLPLWGFDGSSTMQAEGRSSDCVLKPVAVYPDPARTNGALVMCEVMMPDGVTPHPSNSRATILDDEDAWFGFEQEYFFYENGRPLGFPEQGYPAPQGPYYTGVGYKNVGSVAREIVEEHLDLCLAAGINHEGINAEVAKGQWEFQIFGKGSKRAADQIWMARYLLLRLCEKYGIDIEFHCKPLGDTDWNGS

SEQ ID NO: 14315 - protein, 204 aa, Rhizobium mongolense
TQIKEFDAFPALEQLPLWGFDGSSTMQAEGRSSDCVLKPVAVYPDPARTNGALVMCEVMMPDGVTPHPSNSRATILDDEDAWFGFEQEYFFYENGRPLGFPEQGYPAPQGPYYTGVGYKNVGSVAREIVEEHLDLCLAAGINHEGINAEVAKGQWEFQIFGKGSKRAADQIWMARYLLLRLCEKYGIDIEFHCKPLGDTDWNGS

SEQ ID NO: 14316 - protein, 197 aa, Rhizobium gallicum
AFPALEQLPLWGFDGSSTMQAEGRSSDCVLKPVAVYPDPARSNGALVMCEVMMPDGVTPHPSNSRATILDDEDAWFGFEQEYFFYENGRPLGFPEQGYPAPQGPYYTGVGYKNVGSVAREIVEEHLDLCLAAGINHEGINAEVAKGQWEFQIFGKGSKRAADQIWMARYLLLRLCEKYGIDIEFHCKPLGDTDWNGS

SEQ ID NO: 14317 - protein, 204 aa, Rhizobium gallicum
TQIKEFDAFPALEQLPLWGFDGSSTMQAEGRSSDCVLKPVAVYPDPARSNGALVMCEVMMPDGVTPHPSNSRATILDDEDAWFGFEQEYFFYENGRPLGFPEQGYPAPQGPYYTGVGYKNVGSVAREIVEEHLDLCLAAGINHEGINAEVAKGQWEFQIFGKGSKRAADQIWMARYLLLRLCEKYGIDIEFHCKPLGDTDWNGS

SEQ ID NO: 14318 - protein, 198 aa, Rhizobium leguminosarum
AIYPTLEQLPLWGFDGSSTQQAEGRSSDCVLKPVAIYPDPARTNGALVMCEVMMPDGVTPHASNARATILDDEDAWFGFEQEYFFYQNGRPLGFPEQGYPAPQGPYYTGVGYSNVGDVAREIVEEHLDLCLAAGINHEGINAEVAKGQWEFQIFGKGSKKAADQIWMARYLLQRLTEKYGIDIEYHCKPLGDTDWNGS

SEQ ID NO: 14319 - protein, 204 aa, Mesorhizobium temperatum
TQIKEYAEFPTLDQLPLWGFDGSSTMQAEGHSSDCVLKPVAIYPDPARTNGVLVMCEVMMPDGVTPHASNKRATILDDEGAWFGFEQEYFFYKDGRPLGFPESGYPAPQGPYYTGVGYSNVGSVARQIVEEHLDLCLAAGINHEGINAEVAKGQWEFQIFGKGSKKAADQMWMARYLMQRLTEKYGIDIEYHCKPLGDTDWNGS

SEQ ID NO: 14320 - protein, 202 aa, Mesorhizobium amorphae
IKDYAEFPTLEQLPLWGFDGSSTQQAEGHSSDCVLKPVAVFPDPARTNGVLVMCEVMMPDGVTPHSSNKRATILDDEGAWFGFEQEYFFYKDGRPLGFPESGYPAPQGPYYTGVGYSNVGSVARQIVEEHLDQCLAAGINHEGINAEVAKGQWEFQIFGKGSKKAADQMWMARYLMQRLTEKYGIDIEYHCKPLGDTDWNGS

SEQ ID NO: 14321 - protein, 204 aa, Sinorhizobium meliloti
TQIKEFDAFPTLEQLPLWGFDGSSTQQAEGRSSDCVLKPVAVYPDPVRTNGALVMCEVMMPDGKTPHPSNTRATVLDDESAWFGFEQEYFFYKNGRPLGFPEQGYPAPQGPYYTGVGYKNVGDIARQIVEEHLDICLAAGINHEGINAEVAKGQWEFQVFGKGSKKAADEVWLARYLLLRLTEKYGIDVEFHCKPLGDTDWNGS

SEQ ID NO: 14322 - protein, 197 aa, Sinorhizobium fredii
AFPALEQLPLWGFDGSSTNQAEGRSSDCVLKPVAVYPDPVRTNGVLVMCEVMMPDGKTPHPSNSRATILDDEGAWFGFEQEYFFYKNGRPLGFPEQGYPAPQGPYYTGVGYSNVGDVARKIVEEHLDICLAAGINHEGINAEVAKGQWEFQVFGKGSKRAADEVWMARYLLQRLTEKYGIDVEYHCKPLGDTDWNGS

SEQ ID NO: 14323 - protein, 196 aa, Bradyrhizobium japonicum
FPTLEQLPLWGFDGSSTQQAEGHSSDCVLKPVAVFPDAARTNGVLVMCEVMMPDGKTPHSTNKRATILDDAGAWFGFEQEYFFYKDGRPLGFPASGYPAPQGPYYTGVGFSNVGDVARKIVEEHLDLCLAAGINHEGINAEVAKGQWEFQIFGKGSKKAADEMWMARYLMLRLTEKYGIDIEFHCKPLGDTDWNGS

SEQ ID NO: 14324 - protein, 206 aa, Bradyrhizobium elkanii
TQIKEFDTFPTLEQLPLWGFDGSSTMQAEGHSSDCVLKPVAVYPDAARENGALVMCEVMMPDGKTPHPSNKRATILDDEGAWFGFEQEYFFYKDGRPLGFPSDGYPAPQGPYYTGVGYSNVGSVARKIVEEHLNLCLAAGINHEGINAEVAKGQWEFQIFGKGSKTAADQMWMARYLMLRLTESYGIDIEFHCKPLGDTDWNGSGM

SEQ ID NO: 14325 - protein, 206 aa, Bradyrhizobium japonicum
TQIKEFASFPTLEQLPLWGFDGSSTQQAEGHSSDCVLKPVAVFPDAARTNGVLVMCEVMMPDGKTPHASNKRATILDDAGAWFGFEQEYFFYKDGRPLGFPTAGYPAPQGPYYTGVGYSNVGDVARKIVEEHLDLCLAAGINHEGINAEVAKGQWEFQIFGKGSKTAADQMWMARYLMLRLTEKYGIDIEFHCKPLGDTDWNGSGM

SEQ ID NO: 14326 - protein, 204 aa, Rhizobium tropici
TQIKEFDAFPTLEQLPLWGFDGSSTMQAEGRSSDCVLKPVAIYPDPARTNGALVMCEVMMPDGVTPHESNSRATILDDEDAWFGFEQEYFFYKDGRPLGFPESGYPAPQGPYYTGVGYKNVGDVAREIVEEHLDLCLEAGINHEGINAEVAKGQWEFQIFGKGSKKAADQIWMARYLLLRLCEKYGIDIEFHCKPLGDTDWNGS

SEQ ID NO: 14327 - protein, 218 aa, uncultured marine cyanobacterium
APMPISMTLGLGTAPFSVKLASIENINGQAITVANRHKGKVNGPADMKGFVFGVPFPYSMHNLLLRYYLAKGGVDPDKDVQIRPVPPPDSIAQLVAGDIDAYLMPDPFNQRAVYEDAGFIHLLTKELWPGHPCCAFAAGEPWIKEHPETFRALNKSIIDAAAYVSTPSNRKEVAKAISGRGFLNQPTEVVGAVLTGKFDDGLGKKQNVPDRIDFKPYP

SEQ ID NO: 14328 - protein, 218 aa, uncultured marine cyanobacterium
APMPISMTLGLGTAPFSVKLASIENINGQAITVANRHKGKVNGPADMKGFVFGVPFPYSMHNLLLRYYLAKGGVDPDKDVQIRPVPPPDSIAQLVAGDIDAYLMPDPFNQRAVYEDAGFIHLLTKELWPGHPCCAFAAGEPWIKEHPETFRALNKSIIDAAAYVSTPSNRKEVAKAISGRGFLNQPTEVVEAVLTGKFDDGLGKKQNVPDRIDFKPYP

SEQ ID NO: 14329 - protein, 218 aa, uncultured marine cyanobacterium
APMPISMTLGLGTSPFSVKLASIENINGQAITVANRHKDKVKSASDMKGFVFGVPFPYSMHNLLLRYYLAKGGVDPDKDVQIRPVPPPDSVAQMVAGDIDAYLMPDPFNQRAVFEGVGFIHLLTKDLWVGHPCCAFAAGEPWINKHPNTFKAINKSIIEAANYATNPANRSEIAKYISGRAFLNQPTKVVEAVLTGKFDDGLGNKRNVPDRIDFKPYP

SEQ ID NO: 14330 - protein, 218 aa, uncultured marine cyanobacterium
APMPISMTLGLGTAPFSVKLASIENINGQAITVANRHKGKVNGPADMKGFVFGVPFPYSMHNLLLRYYLAKGGVDPDKDVQIRPVPPPDSIAQLVAGDIDAYLMPDPFNQRAVYEDAGFIRLLTKELWPGHPCCAFAAGEPWIKEHPETFRALNKSIIDAAAYVSTPSNRKEVAKAISGRGFLNQPTEVVEAVLTGKFDDGLGKKQNVPDRIDFKPYP

SEQ ID NO: 14331 - protein, 218 aa, uncultured marine cyanobacterium
APMPISMTLGLGTAPFSVKLASIENINGQAITVANRHKGKVNGPADMKGFVFGVPFPYSMHNLLLRYYLAKGGVDPDKDVQIRPVPPPDSIAQLVAGDIDAYLMPDPFNQRAVYEDAGFIHLLTKELWPGHPCCAFAAGEPWIKEHPETFRALNKSIIDAAAYVSTPSNRKEAAKAISGRGFLNQPTEVVEAVLTGKFDDGLGKKQDVPDRIDFKPYP

SEQ ID NO: 14332 - protein, 218 aa, uncultured marine cyanobacterium
APMPISMTLGLGTAPFSVKLASIENINGQAITVANRHKGKVNGPADMKGFVFGVPFPYSMHNLLLRYYLAKGGVDPDKDVQIRPVPPPDSIAQLVAGDIDAYLMPDPFNQRAVYEDAGFIHLLTKELWPGHPCCAFAAGEPWIKEHPETFRALNKSIIDAAAYVSTPSNRKEVAKAISGRGFLNQPTEVVEAVLTGKFDDGLGNKQNVPDRIDFKPYP

SEQ ID NO: 14333 - protein, 218 aa, uncultured marine cyanobacterium
APMPISMTLGLGTAPFSVKLASIENINGQAITVANRHKGKVNGPADMKGFVFGVPFPYSMHNLLLRYYLAKGGVDPDKDVQIRPVPPPDSIAQLVAGDIDAYLMPDPFNQRAVYEDAGFIHLLTKELWPGHPCCAFAAGEPWIKEHPETFRALNKSIIDAAAYVSTPSNREEVAKAISGRGFLNQPTEVVEAVLTGKFDDGLGNKQNVPDRIDFKPYP

SEQ ID NO: 14334 - protein, 218 aa, uncultured marine cyanobacterium
APMPISMTLGLGTAPFSVKLASIENINGQAITVANRHKGKVNGPADMKGFVFGVPFPYSMHNLLLRYYLAKGGVDPDKDVQIRPVPPPDSIAQLVAGDIDAYLMPDPFNQRAVYEDAGFIHLLTKELWPGHPCCAFAAGEPWIKEHPETFRALNKSIIDAAAYVSTPSNRKEVAKAVSGRGFLNQPTEVVEAVLTGKFDDGLGKKQNVPDRIDFKPYP

SEQ ID NO: 14335 - protein, 218 aa, uncultured marine cyanobacterium
APMPTSMTLGLGTAPFSVKLASIENINGQAITVANRHKGKVNGPADMKGFVFGVPFPYSMHNLLLRYYLAKGGVDPDKDVQIRPVPPPDSIAQLVAGDIDAYLMPDPFNQRAVYEDAGFIHLLTKELWPGHPCCAFAAGEPWIKEHSETFRALNKSIIDAAAYVSTPSNRKEVAKAISGRGFLNQPTEVVEAVLTGKFDDGLGNKQNVPDRIDFKPYP

SEQ ID NO: 14336 - protein, 218 aa, uncultured marine cyanobacterium
APMPISMTLGLGTAPFSVKLASIENINGQAITVANRHKGKVNGPADMKGFIFGVPFPYSMHNLLLRYYLAKGGVDPDKDVQIRPVPPPDSIAQLVAGDIDAYLMPDPFNQRAVYEDAGFIHLLTKELWPGHPCCAFAAGEPWIKEHPETFRALNKSIIDAAAYVSTPSNRKEVAKAISGRGFLNQPTEVVEAVLTGKFEDGLGNKKNVPDRIDFKPYP

SEQ ID NO: 14337 - protein, 218 aa, uncultured marine cyanobacterium
  misc_feature (190)..(190): Xaa can be any naturally occurring amino acid
  unsure (1)..(218): unsure at all Xaa locations
APMPISMTLGLGTAPFSVKLASIENINGQAITVANRHKGKVNGPADMKGFVFGVPFPYSMHNLLLRYYLAKGGVDPDKDVQIRPVPPPDSIAQLVAGDIDAYLMPDPFNQRAVYEDAGFIHLLTKELWPGHPCCAFAAGEPWIKEHPETFRALNKSIIDAAAYVSTPSNRKEVAKAISGRGFLNQPTEVXEAVLTGKFDDGLGKKQNVPDRIDFKPYP

SEQ ID NO: 14338 - protein, 218 aa, uncultured marine cyanobacterium
APMPISMTLGLGTAPFSVKLASIENINGQAITVANRHKGKVNGPADMKGFVFGVPFPYSMHNLLLRYYLAKGGVDPDKDVQIRPVPPPDSIAQLVAGDIDAYLMPDPFNQGAVYEDAGFIHLLTKELWPGHPCCAFAAGEPWIKEHPETFRALNKSIIDAAAYVSTPSNRKEVAKAISGRGFLNQPTEVVEAVLTGKFDDGLGKKQNVPDRIDFKPYP

SEQ ID NO: 14339 - protein, 218 aa, uncultured marine cyanobacterium
APMPISMTLGLGTAPFSVKLASIENINGQAITVANRHKGKVNGPADMKGFVFGVPFPYSMHNLLLRYYLAKGGVDPDKDVQIRPVPPPDSIAQLVAGDIDAYLMPDPFNQRAVYEDAGFIHLLTKELWPGHPCCAFAAGEPWIKEHPETFRALNKSIIDAAAYVSTPSNRKEVAKAISGSGFLNQPTEVVEAVLTGKFDDGLGKKQNVPDRIDFKPYP

SEQ ID NO: 14340 - protein, 218 aa, uncultured marine cyanobacterium
APMPISMTLGLGTAPFSVKLASIENINGQAITVANRHKGKVDGPADMKGFVFGVPFPYSMHNLLLRYYLAKGGVDPDKDVQIRPVPPPDSIAQLVASDIDAYLMPDPFNQRAVYEDAGFIHLLTKELWPGHPCCAFAAGEPWIKEHPETFRALNKSIIDAAAYVSTPSNRKEAAKAISGRGFLNQPTEVVEAVLTGKFDDGLGKKQDVPDRIDFKPYP

SEQ ID NO: 14341 - protein, 218 aa, uncultured marine cyanobacterium
APMPISMTLGLGTAPFSVKLASIENINGQAITVANRHKGKVNGPADMKGFVFGVPFPYSMHNLLLRYYLAKGGVDPDKDVQIRPVPPPDSIAQLVAGDIDAYLMPDPFNQRAVYEDAGFIHLLTKELWPGHPCCAFAAGEPWIKEHPETFRALNKSIIDAAAYVSTPSNRKEAAKAIPGRGFLNQPTEVVEAVLTGKFDDGLGKKQDVPDRIDFKPYP

SEQ ID NO: 14342 - protein, 218 aa, uncultured marine cyanobacterium
APMPISMTLGLGTAPFSVKLASIENINGQAITVANRHKGKVNGPADMKGFVFGVPFPYSMHNLLLRYYLAKGGVDPDKDVQIRPVPPPDSIAQLVAGDIDAYLMPDPFNQRAVYEDAGFIHLLTKELWPGHPCCAFAAGEPWIKEHPETFRALNKSIIDAAAYVSTPANRKEVAKAISGRGFLNQPTEVVEAVLTGKFEDGLGKKQNVPDRIDFKPYP

SEQ ID NO: 14343 - protein, 218 aa, uncultured marine cyanobacterium
APMPISMTLGLGTAPFSVKLASIENINGQAITVANRHKGKVNGPADMKGFVFGVPFPYSMHNLLLRYYLAKGGVDPDKDVQIRPVPPPDSIAQLVAGDIDAYLIPDPFNQRAVYEDAGFIHLLTKELWPGHPCCAFAAGEPWIKEHPETFRALNKSIIDAAAYVSTPSNRKEVAKAISGRGFLNQPTEVVEAVLTGKFEDGLGNKKNVPDRIDFKPYP

SEQ ID NO: 14344 - protein, 218 aa, uncultured marine cyanobacterium
APMPISMTLGLGTAPFSVKLASIENINGQAITVANRHKGKVNGPADMKGFIFGVPFPYSMHNLLLRYYLAKGGVDPDKDVQIRPVPPPDSIAQLVAGDIDAYLMPDPFNQRAVYEDAGFIHLLTKELWPGHPCCAFAAGEPWIKEHPETFRALNKSIIDAAAYVSTPSNRKEVAKAISGRGFLNQPTEVVEAVLTGKFDDGLGNKQNVPDRIDFKPYP

SEQ ID NO: 14345 - protein, 218 aa, uncultured marine cyanobacterium
APTPISMTLGLGTSPFSVKLASIENINGQAITVANRHKGKVNGPADMKGFVFGVPFPYSMHNLLLRYYLAKGGVDPDKDVQIRPVPPPDSIAQLVAGDIDAYLMPDPFNQRAVYEDAGFIHLLTKELWPGHPCCAFAAGEPWIKEHPETFRALNKSIIDAAAYVSTPSNRKEVAKAISGRGFLNQPTEVVEAVLTGKFDDGLGKKQNVPDRIDFKPYP

SEQ ID NO: 14346 - protein, 218 aa, uncultured marine cyanobacterium
APMPISMTLGLGTAPFSVKLASIENINGQAITVANRHKGKVNGPADMKGFVFGVPFPYSMHNLLLRYYLAKGGVDPDKDVQIRPVPPPDSIAQLVAGDIDAYLMPDPFNQRAVYEDAGFIHLLTKELWPGHPCCAFAAGEPWIKEHPETFRALNKSIIDAAAYVSTPANRKEVAKAISGRGFLNQPTEVVEAVLTGKFDDGLGKKQNVPDRIDFKPYP

SEQ ID NO: 14347 - protein, 168 aa, uncultured marine cyanobacterium
VFGVPFPYSMHNLLLRYYLAKGGVDPDKDVQIRPVPPPDSIAQLVAGDIDAYLMPDPFNQRAVYEDAGFIHLLTKELWPGHPCCAFAAGEPWIKEHPETFRALNKSIIDAAAYVSTPSNRKEVAKAISGRGFLNQPTEVVEAVLTGKFDDGLGKKQNVPDRIDFKPYP

SEQ ID NO: 14348 - protein, 168 aa, uncultured marine cyanobacterium
VFGVPFPYSMHNLLLRYYLAKGGVDPDKDVQIRPVPPPDSIAQLVAGDIDAYLMPDPFNQRAVYEDAGFIHLLTKELWPGHPCCAFAAGEPWIKEHPETFRALNKSIIDAAAYVSTPANRKEVAKAISGRGFLNQPTEVVEAVLTGKFEDGLGKTQNVPDRIDFKPYP

SEQ ID NO: 14349 - protein, 163 aa, uncultured marine cyanobacterium
VFGVPFPYSMHNLLLRYYLAKGGVDPDKDVQIRPVPPPDSIAQLVAGDIDAYLMPDPFNQRAVYEDAGFIHLLTKELWPGHPCCAFAAGEPWIKEHPETFRALNKSIIDAAAYVSTPSNRKEVAKAISGRGFLNQPTEVVEAVLTGKFDDGLGKKQNVPDRID

SEQ ID NO: 14350 - protein, 453 aa, Persea americana
MDNKGGILMQRFELGRLLGQGTFAKVYHARNLKSNQSVAIKVIDKERVLKVGMIDQIKREISTMRLASHPNVVQLYEVMATKTKIYFVLEYVKGGELFNKVAKGKLKEDVARKYFQQLVSAVDFCHSRGVYHRDLKPENLLVDENENLKVTDFGLSALAESKRQDGLLHTTCGTPAYVAPEVISRKGYDGAKADIWSCGVILFVLLAGYLPFHDSNLMELYRKVGKAEYKCPNWFPPEVRRLLARILDQNPNTRISIAKIKDNSWFKRGFEAKFAKGETKSKELAPLDTDAAFASSDTGVAARKPELVKPQNLNAFDIISLSAGFDLSGLFEDTNCRKEARFASKQPASTIISKLEDIAKRLRLKVKKKDEGILKLEGSKEGRKGVLSIDAEIFVVNPSFHLVEVKKSSGDTLEYQKLWNQDMRPALTDIVWAWQGDQQQQQESLVGSQGQSL

SEQ ID NO: 14351 - protein, 453 aa, Persea americana
MDNKGGILMQRFELGRLLGQGTFAKVYHARNLKSSQSVAIKVIDKEKVLKVGMIDQIKREIATMRLASHPNVVQLYEVMATKTKIYFVLEYVKGGELFNKVAKGKLKEDVARKYFQQLVSAVDFCHSRGVYHRDLKPENLLVDENENLKVTDFGLSALAESKRQDGLLHTTCGTPAYVAPEVISRKGYDGAKADIWSCGVILFVLLAGYLPFHDSNLMELYRKVGKAEYKCPNWFPPEVRRLLARILDPNPNTRISIAKIKDNSWFKRGFEAKFAKGETKSKELALLDTDAAFASSDTGVAARKPELVKPQHLNAFDIISLSAGFDLSGLFEDTNCRKEARFASKQPASTIISKLEDIAKRLRLKVKKKDEGILKLEGSKEGRKGVLSIDAEIFVVNPSFHLVEVKKSSGDTLEYQKLWNQDMRPALTDIVWAWQGDQQQQQESLVCSQGQSL

SEQ ID NO: 14352 - protein, 453 aa, Persea americana
MDNKGGILMQRFELGRLLGQGTFAKVYHARNLKSNQSVAIKVIDKEKVLKVGMIDQIKREISTMRLASHPNVVQLYEVMATKTKIYFVLEYVKGGELFNKVAKGKLKEDVARKYFQQLVSAVDFCHSRGVYHRDLKPENLLVDENENLKVTDFGLSALAESKRQDGLLHTTCGTPAYVAPEVISRKGYDGAKADIWSCGVILFVLLAGYLPFHDSNLMELYRKVGKAEYKCPNWFPPEVRRLLARILDQNPNTRISIAKIKDNSWFKRGFEAKFAKGETKSKELAPLDTDAAFASSDTGVAARKPELVKPQNLNAFDIISLSAGFDLSGLFEDTNCRKEARFASKQPASTIISKLEDIAKRLRLKVKKKDEGILKLEGSKEGRKGVLSIDAEIFVVNPSFHLVEVKKSSGDTLEYQKLWNQDMRPALTDIVWAWQGDQQQQQESLVGSQGQSL

SEQ ID NO: 14353 - protein, 66 aa, Bacillus caldolyticus
MQRGKVKWFNNEKGYGFIEVEGGSDVFVHFTAIQGEGFKTLEEGQAVSFEIVQGNRGPQAANVVKL

SEQ ID NO: 14354 - protein, 67 aa, Bacillus caldolyticus
MQRGKVKWFNNEKGYGFIEVEGGSDVFVHFTAIQGEGFKTLEEGQEVSFEIVQGNRGPQAANVTKEA

SEQ ID NO: 14355 - protein, 66 aa, Bacillus caldolyticus
MQRGKVKWFNNEKGYGFIEVEGGSDVFVHFTAIQGEGFKTLEEGQEVSFEIVQGNRGPQAANVVKE

SEQ ID NO: 14356 - protein, 66 aa, Bacillus caldolyticus
MQEGKVKWFNNEKGYGFIEVEGGSDVFVHFTAIQGEGFKTLEEGQAVSFEIVQGNRGPQAANVVKE

SEQ ID NO: 14357 - protein, 66 aa, Bacillus caldolyticus
MQEGKVKWFNNEKGYGFIEVEGGSDVFVHFTAIQGEGFKTLEEGQEVSFEIVQGNRGPQAANVVKL

SEQ ID NO: 14358 - protein, 1479 aa, Azospirillum brasilense
CGVGFIAAIDGKPRRSVVEKGIEALKAVWHRGAVDADGKTGDGAGIHVAVPQKFFKDHVKVIGHRAPDNKLAVGQVFLPRISLDAQEACRCIVETEILAFGYYIYGWRQVPINVDIIGEKANATRPEIEQIIVGNNKGVSDEQFELDLYIIRRRIEKAVKGEQINDFYICSLSARSIIYKGMFLAEQLTTFYPDLLDERFESDFAIYHQRYSTNTFPTWPLAQPFRMLAHNGEINTVKGNVNWMKAHETRMEHPAFGTHMQDLKPVIGVGLSDSGSLDTVFEVMVRAGRTAPMVKMMLVPQALTSSQTTPDNHKALIQYCNSVMEPWDGPAALAMTDGRWVVGGMDRNGLRPMRYTITTDGLIIGGSETGMVKIDETQVIEKGRLGPGEMIAVDLQSGKLYRDRELKDHLATLKPWDKWVQNTTHLDELVKTASLKGEPSDMDKAELRRRQQAFGLTMEDMELILHPMVEDGKEAIGSMGDDSPIAVLSDKYRGLHHFFRQNFSQVTNPPIDSLRERRVMSLKTRLGNLGNILDEDETQTRLLQLESPVLTTAEFRAMRDYMGDTAAEIDATFPVDGGPEALRDALRRIRQETEDAVRGGATHVILTDEAMGPARAAIPAILATGAVHTHLIRSNLRTFTSLNVRTAEGLDTHYFAVLIGVGATTVNAYLAQEAIAERHRRGLFGSMPLEKGMANYKKAIDDGLLKIMSKMGISVISSYRGGGNFEAIGLSRALVAEHFPAMVSRISGIGLNGIQKKVLEQHATAYNEEVVALPVGGFYRFRKSGDRHGWEGGVIHTLQQAVTNDSYTTFKKYSEQVNKRPPMQLRDLLELRSTKAPVPVDEVESITAIRKRFITPGMSMGALSPEAHGTLNVAMNRIGAKSDSGEGGEDPARFRPDKNGDNWNSAIKQVASGRFGVTAEYLNQCRELEIKVAQGAKPGEGGQLPGFKVTEMIARLRHSTPGVMLISPPPHHDIYSIEDLAQLIYDLKQINPDAKVTVKLVSRSGIGTIAAGVAKANADIILISGNSGGTGASPQTSIKFAGLPWEMGLSEVHQVLTLNRLRHRVRLRTDGGLKTGRDIVIAAMLGAEEFGIGTASLIAMGCIMVRQCHSNTCPVGVCVQDDKLRQKFVGTPEKVVNLFTFLAEEVREILAGLGFRSLNEVIGRTDLLHQVSRGAEHLDDLDLNPRLAQVDPGENARYCTLQGRNEVPDTLDARIVADARPLFEEGEKMQLAYNARNTQRAIGTRLSSMVTRKFGMFGLQPGHITIRLRGTAGQSLGAFAVQGIKLEVMGDANDYVGKGLSGGTIVVRPTTSSPLETNKNTIIGNTVLYGATAGKLFAAGQAGERFAVRNSGATVVVEGCGSNGCEYMTGGTAVILGRVGDNFAAGMTGGMAYVYDLDDSLPLYINDESVIFQRIEVGHYESQLKHLIEEHVTETQSRFAAEILNDWAREVTKFWQVVPKEMLNRLEVPVHLPKAISAE

SEQ ID NO: 14359 - protein, 377 aa, Mycobacterium tuberculosis
MRVGIPTETKNNEFRVAITPAGVAELTRRGHEVLIQAGAGEGSAITDADFKAAGAQLVGTADQVWADADLLLKVKEPIAAEYGRLRHGQILFTFLHLAASRACTDALLDSGTTSIAYETVQTADGALPLLAPMSEVAGRLAAQVGAYHLMRTQGGRGVLMGGVPGVEPADVVVIGAGTAGYNAARIANGMGATVTVLDINIDKLRQLDAEFCGRIHTRYSSAYELEGAVKRADLVIGAVLVPGAKAPKLVSNSLVAHMKPGAVLVDIAINQGGCFEGSRPTTYDHPTFAVHDTLFYCVANMPASVPKTSTYALTNATMPYVLELADHGWRAACRSNPALAKGLSTHEGALLSERVATDLGVPFTEPASVLAHHHHHH

SEQ ID NO: 14360 - protein, 377 aa, Mycobacterium tuberculosis
MRVGIPTETKNNEFRVAITPAGVAELTRRGHEVLIQAGAGEGSAITDADFKAAGAQLVGTADQVWADADLLLKVKEPIAAEYGRLRHGQILFTFLHLAASRACTDALLDSGTTSIAYETVQTADGALPLLAPMSEVAGRLAAQVGAYHLMRTQGGRGVLMGGVPGVEPADVVVIGAGTAGYNAARIANGMGATVTVLDINIDKLRQLDAEFCGRIHTRYSSAYELEGAVKRADLVIGAVLVPGAKAPKLVSNSLVAHMKPGAVLVDIAIDQGGCFEGSRPTTYDHPTFAVHDTLFYCVANMPASVPKTSTYALTNATMPYVLELADHGWRAACRSNPALAKGLSTHEGALLSERVATDLGVPFTEPASVLAHHHHHH

SEQ ID NO: 14361 - protein, 199 aa, Festuca arundinacea
DDGQEVAVKVRSATSTQGTREFDNELNLLSAIQHENLVPLLGYCNEYDQQILVYPFMSNGPLLDRLYGEPAKRKILDWPTRLSIALGAARGLAYLHTFPGRSVIHRDVKSSNILLDHSMCAKVADFGFSKYAPQEGDSYVSLEVRGTAGYLDPEYYKTQQLSEKSDVFSFGVVLLEIVSGREPLNIKRPRVEWSLVEWA

SEQ ID NO: 14362 - protein, 555 aa, Coprinopsis cinerea okayama7#130
MSNPAHLDRAIDIVGKAIEADNKANYEEAYKLYQNALDYFMLAMKYEKNAKLKDLIKSKVVEYLNRAETLKSHLSAEKKGKAAVGANGTSGAAGPSGKGKEDDDIDAETKKLRAGLSGAILSERPNVKWDDVAGLEVAKAALKEAVILPIKFPHLFTGKRTPWKGILLYGPPGTGKSYLAKAVATEAKSTFFSVSSSDLVSKWQGDSERLVKQLFELAREQKPAIIFVDEIDSLTGTRNESESEGSRRIKTEFLVQMNGVGNDDTGILVLGATNIPWQLDNAIKRRFEKRIYIPLPGIEARRRMFEIHIGNTPTELIPKDYRTLAEKTEGYSGSDIAIVVRDALMQPVRKVISATHFKEVQDPETGAVKWTPCSPGDPHAVEKSWNDIGSDELLEPPLKLNDFLKSLDNTRPTVTQADIKKHEDWTKESVCFFLRTSPRHSSLTALPDELLLDILIHLDTTVIRNHGTPALNDPIASQLREFTIISLIQTCQSLRRFFLPYLWQRIQMFPCPFPDNDATFSSASERQWEERATTSLIKRLDMILDGDPDLTKCVQ

SEQ ID NO: 14363 - protein, 1277 aa, Coprinopsis cinerea okayama7#130
MVRQQSSAAGVLALLQEPDPIFKQHALKALIPLVSQFWAEISEHIASIEALYESNELPKPARDAAALLASKVYYFLGEYEEALSFALGAGGAFQSEAKAYGSEEYVETIVLRTEEAAGSKEKIDPRLQAIIEGIFDRCISEGEFKQASLTTVSLKTESRRLDIISKIYSQTNDVSLLIYAMEGVLSTTASLSYRHQVLRFLFPLFPQPKTGDQSPHVHAVTRLLISLSDPELTIPFLSSLVSKEPLLAYQFGFDLVEGGSQDFLENLRGALPEGDEKTKAIYDKLRQILTGKESVKLYLEFLKRNNHTDPLILKNSKDALEARSSIYHTALTLQNAFMNAGTTSDVFLRENLEWLGHATNWAKFSATAGLGVIHKGFFEQGKVILGPYLPQAGGESNVPGAAYSEGGALYALGLINAGCGSDITTDLREALKSAQGEVVQHGAALGLGVAGMGSKSLEAFEDLKTVLFTDSAVAGEASGYAMGLVMLGTAAEDAVQEMLQYARETQHEKIIRGLAMGTAFIYYGRQEEADDIIKTLLAEKDPILRYGGVYTLALAYAGTADNDAVRQLLHIAVSDASDDVRRAAVTSLAFLLFKNPTQVPRVVQLLSESYNPHVRCGATLALGIACAGTGLQDAIEILEPMTKDSVDFVRQGAFIALGMILVEQSEASSPSFVSTRNKYSKVIADKHEDPMARFGAALGQGFIDAGGRNVTISLQSHAGSSNTSAIVGMALFCQFWYWYPLAHCACLAFSPTGIIGLNGDLKAPVFEFVSNSKPSLFAYPAPTTPPKKETVTKVTTAVLSTTAKVKAREKKKAAAEGEGMDLDKPEGEGDVEMKPAEGEEGKAKEGEEGKATPPKKKSEPSTETKPNLSRVTPAQLPFISFPADGRYQPVRSVSTRPATKAPSSAAALSAEKRTGGAGILLLIDRRPEEEAEFISLEPTPIPEPEAPAAAPAQQAPGGQPRGRHIALDEGEEAAPPPSFEDRVIIDVFRDTLHDEDALVKRLEPYEIICAMRERTKFSKTLLDRLPNLKLIATTGPYNRGIDAAYAKEKGIFVSGTGGAGNATLEHIWALLLATVRWLAVEDQNVKSGNPQWQSTLPLGLTGRTLGLIGVGRLGAQTARIAKAFDLKVIGWSPNLTPERAEAAGVEYVSTKEELLRRSDIVSLHLVLSESTRHILKKEDLALLKPTAFLINTSRGPLVDEGALVEALEKKTFAGAGLDVFDVEPLPLDHPLRRLKNVTLSPHTGYLTDTMFGVFYGETVENIVGFLDGKPLRPLGIV

SEQ ID NO: 14364 - protein, 757 aa, Coprinopsis cinerea okayama7#130
MLQEDRQFYLEHLNNPNFDLRANRPSSIRSFGLDPKRKVHTGYESDFDTESQFDRYSSTQAESAIDFDDESPYPEVRAAVSSVDDPLMPYNTFRVWTLGLFLMIVGIFFNQIFAMRYPSVYLTGIVVQLVALPLGKGMERILPKTVFNFFGYKWSMNPGPFSVKEHVCITVMGNIATGGVYITEVALCQRMFYGQQVSYAFQILIAIGSQIWGYSLGGIMRQFVVWPSSMIWPGALVNSALFNTLHKNYGQRDKSHMSRERFFVLAMVGSAVWFFVPGYLFTALTMFNWVCWIAPDNVTVNALFGVNTGLGMSMLTFDWSMIAFIGSPLVTPWWSEMNTAAGFIIMYWIICPILYFTNTWDSAYLPISSYYSFDNTGNVYQVKEVLTDGVFDQAKYSAYSPVFMSTALALLYGIAFAAFPSVFVHTFLWFRKDIVRRFRTTLKDERDIHSRLMQYYPETPAWWYLTIGLISFVFLVIAIEINPNSQLPIWGLFLALALAVCLAIPLCMLQAITNQTVPTQVMAELIIGYILPGRPIANMLFKSLMFVGSNQAIIFAGDLKLGHYMKIPPRMMFSIQVFSATVSCFFVTGMQNWMLSNIPDVCTPTQKDGFRCPGSTTFFTASVIWGGVSPVRLFSPGQWYSGLLWFFLVGAILPIPFYFLARRFPLSIWRYINIPIFFASLGAMPPASGINYISWALTGFIFNYVIRRFHFRWWMRYNYILSAALDAGLGIGMIIVFFTLQMPKGGVQLNWWGNEYV

SEQ ID NO: 14365 - protein, 459 aa, Coprinopsis cinerea okayama7#130
MSIPISIIQSVATSVSPASSSLHDHFRRRAIDPDPAEPRILHPLENEGLRLLILENISQEAVAAFRSQGYHVDHHTKAFTEDELVEKIGSYHGIGIRSKTKITARVLQAAKKLLVIGCFCIGTNQVDLEAAAQAGIPVFNSPFSNSRSVAELVMSELVVLSRQLFERAYEIRTGLWNKQSKNCYEIRGKTLGIVGYGHIGSQLSVLAEAFGMRVLFHDVLNIMPLGQAQQVESLDALLAQSDFVTLHVPESPDTINMISRGQLSKMKKGAYLINNARGKVVDIPALIEFLESKHIAGAAIDVFPNEPGANGDPFDDQLNSWASKLRNLPNVVLTPHIGGSTEEAQRMIGIEVSTYVSRYLGTGSTIGAVNFPEVDLRAITKDQQNQIRICHVHRNQPGVLKQVNDALSPYNVEKQYSDSKGEIAYVMADISNVSTTDDWAALKERINNTDANILTRFLA

SEQ ID NO: 14366 - protein, 312 aa, Coprinopsis cinerea okayama7#130
MADAKKGKTPQEFAVDFLMGGVSAAVAKTSAAPIERIKLLVQNQDEMASRCRLATPYKGVTDAFTRTYREEGLVSLWRGNTANVIRYFPTQALNFAFKDYFKSLFGFKKSEGYWKWFAGNVASGGAAGAASLLFVYSLDYARTRLANDAKSAKSGGARQFNGLVDVYRKTLASDGIRGLYRGFVPSVVGIIVYRGLYFGVYDSLKPVVLVGALQGSFLASFALGWGVTIGAGLASYPLDTIRRRMMMTSGSTTHYKSMFDAGSQIIAKEGVRSLFKGAGANILRGVAGAGVLSLYDKLQQVMFGKVYSGGSG

SEQ ID NO: 14367 - protein, 320 aa, Coprinopsis cinerea okayama7#130
MLTGSGIKIFAAHGLRPLPRLLHDGTSTSLLLRQSQKSLTFVFSIGLPLGKAEVTRSPIGETTVKIHESVREDDVYIINTGCGAVNTSLMELCIMIHACKIASAKRITAVIPLFPYARQDKKDKSRAPITAKLVANMIQKSGCDHVILYAEPSIILYIRTHFDIKDVVIVSPDAGGAKRATSIADRLGVDFALFHKERKKANEVSRMVLVGHVTGKIAILVDDMADTCGTLCLAASHLSEAGATKVFAFVTHGILSGKALKTVEESTLEKLIVTNTLPQQHNQALCKKIEVIDVGKVLGEVIRRSHYGESVSKLFNEVPY

SEQ ID NO: 14368 - protein, 908 aa, Coprinopsis cinerea okayama7#130
MSSNFDFTDKAQQTIADSIQLAKDYSNAQVTPAHIAFVLVNEGMGEAMPGAPTASASSQQGLFTSVIQRAGGDPIAIRRGIQKLIVRLPQQSPPPDETSFSGTALKVLREAQSLQKTMHDSYIAQDHLLLALLKDSSIEGILKENNLTPASLKTAIEQARGNRRVESKSAEQGFDALQKYAVDLTALAEEGKLDPVIGRDNEIRRAIRILCRRTKNNPVLIGEPGVGKTAIAEGLAQRIVKRDVPASLIARLYSLDMGALMAGAKYKGEYEERIKSVLNEVEKASEEGGPGVILFIDELHLIMAGRGAEGGGMDAGNLFKPLLARGKLRCIGATTLSEYRKYIETDPALERRFAQVIVNEPSVPETISILRGIREKYEVHHGVRILDGALISAATLAHRYLTQRRLPDSAIDLVDEACANARVQRETQPEEIDKLQRRKLEIEVEIHALEREKDAASKERLKVAKKNISEIEDQLKPLKAHYEAEKQRGDEINQVRRKIDELKAKIEDAERRYDLATASDLRYYAIPDLQARLEKLEQQKAAEAAEGTGADVVTPDSIADIVARWTNIPVTRLVTTEKEKLLRMEKILSESVIGQQDAVKSVANAIRLSRSGLSNPNRPIASFLMAGPSGTGKTLMAKTLATILFDSPDAMIRIDASEYSEKHSISRLIGSPPGYVGYDQGGQLTEYVRRKPYSIILIDEIEKACREFVTIFLQVLDDGRLTDGQGRVVDMKNTVIIMTSNLGAAYLHDMPEGPVLPETRSLVMGAITAHFPPEFINRIDDIIVFRALSHKDILKIVDLRLKEVEDRLEDRKIKLDLDADSKQYLMSMGYSTQFGARPLNRAIQSELLNPLSVHLLAGRVLPNETVKVRFDGPHNRLQVIPNHEGEMKEEWMDVDTDLDDGIEIEEMD

SEQ ID NO: 14369 - protein, 491 aa, Coprinopsis cinerea okayama7#130
MDRFTRLPAFSYSHNVFYHTSSYDRGDLSFIMLCGALVFFMVPGLVSMIWAVCAANGVVIFQWFFWGYSLSYSTTATNGFIGNLSNIGLRNVGAQLSPGSPLVPDILYSFFQMEFACVTAAILMGGLAERGRVLPGMVFLFVWMTLVYCPLACWVWSGNGWAFKWGVLDFAGGGPVEIGSGVGGLAFSWVLGRRTERQLLNFRPHNVSLVGLGTAMLWFGWLGFNGGSAFGANLRAVFAIWNTMIAGAMAGLVWCALDYRYERHWSMVGLCSGTIAGLVAATPSSGFLYPWASIITGILSGTICNFATKVKYLVRIDDALDLFAEHAVGGIVGLFINAFFASGKIIAYDDVNTEVPGGFLDHNWAQLYKQLAYVAATCAYTFIVTALIAKAIDMIPGLQLRTSPEGEIVGLDETEIGEFASDYIEIRREVTDSFQTGSVDKFKLVANGDRHGQNDLALEGHRNATVQFEAQEKEKQEVASHTGSSSTTGQQ

SEQ ID NO: 14370 - protein, 259 aa, Coprinopsis cinerea okayama7#130
MANVLSPPSLSHSGSLPFSRAPTPSIAQLQVGFVGLGNIGYAMAKNLAVHGPENIRGLPPVMVWNRTASKAQSLVDQVGQNKAAVASSVEQIALECDVIIVNLANDDVVRVIYRQFCETLKQNPPAKHKIFVETSTIYPSLAGELDVMLSAFPHTHLITCPVLGTPGVAEKSQLLLIMSGEYRSKKAVAHILVPSVGRKVVDLGGDLEKALTYKLMANSMILGSIEVIAEALTFAEKSGIGSDRVFDLVKDYFPAPRQV

SEQ ID NO: 14371 - protein, 373 aa, Coprinopsis cinerea okayama7#130
MGNMKTVTLFLSLISSTFTLVGAQAQEPTTWFEKYGPQLDLSYTGPLSFAHLPYRLCLQENATFDVAILGMPFDTAVSYRPGARFGPSAIRSGSRRQSDVLAYSLSWGFNPYTQGYSILDCGDVPVNSFDNTLALDQMEVAYSTLLRRPIAREDTLAGPLKGKDGLVHPRVVSLGGDHTIVLPILRSLYKVYGPITVIHFDAHLDTWPTLQLSGIDTEQSRITHGSFFYVAHEEGLLANNSIHGGIRTPLSGPEDLANDSVVGFQVITSDDIDSLGIPEIVRKMRARVGDSPVVDIDVIDPGMAPATGTPEAGGWTTREFKRILRGLKGLNFIGADLVEVSPAYDQAEITGIAAASVVHDLLSLLVTSNGASK

SEQ ID NO: 14372 - protein, 103 aa, Coprinopsis cinerea okayama7#130
MASISELVDSTIEKNRVVIFSKSYCPYCRKAKNLFAEKFPQVEPKVLELDELDNGSAIQDYLQQKTGQRTVPNVFVESQHIGGSDDTKAALESGKLAKLLTAA

SEQ ID NO: 14373 - protein, 687 aa, Coprinopsis cinerea okayama7#130
MFPPSKLGEYTVIADIAEGTFGKVKMAIHTVTGHKVAMKYISKAVIQREKTKTRVRREFEYLRTLRHPHIIKLYEVISTPTDIIFVLEYAGGELFNYIVANGRMSEAQARRFFQQIISGIEYSHRLKIVHRDLKPENVLLDDDLNVKIADFGLSNEISDGDFLTTSCGSPNYAAPEVIRGGVYAGPEIDVWSSGVILYVMLCGRLPFEDDDVQMLFHKISQGQFHCPSYLSKDAQSLINSMLVVDPVKRATITDIINHPFFKVDLPRYLTPLPPPPGPVLGMLTTLVAPPKQLDYEIIDGLGRIEEDVVEQLAARMIGVSKDDIWECLRRDDGAQGNAVKVAYMLLRDKNRLGKDLAVFAEAERDAQLAAQDPLTGLLSPTALSPAATEIDSNPFEAELNAEYEEEEEYLSEDELDSFIAAPPATDPTFAVLNSSLPEQLPEQHHLTSYVSAKRSARSGEKKQHRTKWHFGIRSRSPPMEVMLEIYRTLKTLGMEWKEKKNLGGLGGLKARRQHHHHQYHHHERGRASIERAREYDGDGGVDLKAAAGIYCVETRCRVQDVVVLMNLQLYMVDSINYLVDFHHKKTYKASTEPGAGKFDMAHFEIPSDSCSESERSVKEKEGCFGIGGREDEVVSPFVFMDVACRLILELAGGGELVEGRGRGVVTEEVGCGGSRREKETGLRGDAM

SEQ ID NO: 14374 - protein, 1292 aa, Coprinopsis cinerea okayama7#130
MSQPFSYNPPPTSSGRPTTSTGPRPGTSNPFRQLVEQQQQQGQTGAGEGGYLDGSSQPPPTYNSRNPYSNYGYDASERPPPSSYGTRPPQSSYGFGRGGGGRGYPEDDYEEEESDDENVFAFLPPTTADLEEEKRRNEEEENRRREQERIAAAQGQQQGDGGVQLHLGLLGAAGLHQHYQQQQQPQASTSMMKPITDEDRARDWEEEERRRIREEHSFAFSVDTQPGLGGTAEPSPTHSTGRRKQYPPTADSEDYGGPSYDRSQFTFAYAPPVTPPSTDSNGPSRAGLGTSDQDGFKMTRLDRDGRRSVDESSRRKSGEPERKNSDGRLQDEEKYREDDSVTVASSGLASPKGKENEDLEANRTGVAKEVKEEEGRPEPGVFGRHWQHFQPNPARYNSNSGPYKMHREYYYNQAYPQYAKSRAGSSGMDNSTKAGGSSRRRRRRRHPPGTADTNATGMSTATSEYLASSEYTDMPGSTKDRPGTGFDSLGYLKETSQSELDEYDEDDYDEYDGESREGSIKMQFDFDDIEDEDSPYPEVRASVSNIDDPDMPAMTIRMWFIGLVLCTASSALNVFLNFRYPAPAVTPLVLLLLAYPIGKFLAFTLPITTYRIPLPYIPSRLVPSNLPNALSRVLAPLTFQHAIEFSLNPGPWNIKEHVLVYIMANVAINSPYALNAIVVLEVFYEFPTGYWFSIVLVLATQMTGFGLAGMCRRFLVWPASMVWPQNLVACTLLNTLHAEDEDDGIGMLGGPTLEDDPNTEGGRRRKRGMSRYKFFIWTTLGGFLFYFLPGYLFQALSFFSFVCWAAPNNVVVNQLFGVSSGLGMSMLTFDWSQITWIGSPLMVPWWAEVHVFVGFVLFYWILTPILYYTNSWQSAYFPISASSPYDRFGNRYDIARVLKHDDTFDLEAYEAYSPLFLPATFAVTYLLAFCLSTCVIVHTVLYHGHTLLSGFRKIRPENDDIHAKLMRNYPEVPDWWYLCSFGLFFALAIIAVEIWDTSVPIWALILSLILPIVYIMPSGFIYAMTGQAYNLNILAQIIPGTLLPGQPLANMVFKAYSLQTLSAGINFTQDLKLGHYVKVPPRATFLVQMIATTLAAFIQVGVKHWIFSNVKDICDKNQPSKLVCPHSQVFYTASAIWGLIGPTRQFGPGSLYHPHLFATIVGVFLPIPFWLWRRRYPDSWVKWVSTPVILIGVSWIPPATGINYSSWFLVGFIFQYLIRKRNFAWWSKFNYVLSSALDSGTVIAVIFIFFTLQFPKDGIEVNWWGNNVFTGTADWRGESLLEVPEGGIPWKS

SEQ ID NO: 14375 - protein, 771 aa, Coprinopsis cinerea okayama7#130
MEFDFDAIEDEDSPYPEVRASVSNIDDPDMPAMTIRMWVVGLVLCMASSAVNVFFNFRSPAPSIVPLVLLLLSYPIGKFLAFTLPITTYRIPLPYIPSRFLPASMPNVLSRILRPLTFPHAIEFSLNPGPWNIKEHVLVYIMANVAVGSPYALNAIVVLEVFYEFKTGYWFSLVLVLATQLTGFGLAGMCRRFLVWPASMVWPQNLVACTLLNTLHAEDEDDGIGMLGGPTLEDDPNTEGGRRRKRGMSRYKFFIWTTLGAFVFFFLPGYLFQALSIFSFVCWAAPNNVVVNQLFGVQSGLGMSMLTFDWSQITWIGSPLMVPWWAEVHVFVGFVLFYWILTPILYYTNSWQLAYFPISDTSPYDRFGNRYNIGRVLKHDDTFDLEAYEAYSPLFLPATYAVTYLLAFCLSTCVIVHTVLYHGHTLLNGFKKIRVENDDIHAKLMRNYPEVPDWWYLCAFGFFFALAIVAVEVWDTSVPVWALLLSVILPVIYILPSGFIYAMTGQGINLNILAQIIPGTLLPGQPLANMVFKAYSVQTLSEATNFVQDLKLGHYVKVPPRATFLVQMIATTLAGFIQVGVKHWIFTNVKDICDKNQPSKLTCPHNHVFFTASAIWGLIGPTRQFGPGSIYHPHLYAIVIGVFLPLPFWLWRRRYPDSWVKWVSTPVVLNGVSWIPPATGINYSSWFLVGFMFQYLVRKRNFAWWSKFNYVLSSALDSGTVIAVIVIFFTLQFPKDGFFLNWWGNVVHTKTADFNQEPLLKIPEGGIPWKN

SEQ ID NO: 14376 - protein, 370 aa, Coprinopsis cinerea okayama7#130
MDVDDSDSDISIDNDIEGPRKKNKGKGKATDKGKSAKKKTKTNETLAYTWEASYTRSWDTVQEDEAGSLQTSVEELMARGRRRRLLAPAAPIRRTIIRHLIIILDLSQSMMDRDMRPTRFDLTLQYTREFIAEWFDQNPLGQIGIVGMRAGLGERIGELSGNPQEVLRAIADRHKLEPTGEPSLQNAIEMARSNMNHLPTHSSREILILFGSLTTCDPGNIHDTLETCIKNKIRISVVALAAEMKICRELCDKTGDYIPKEGQFGVAMNEGHYKDLLFELVPPPAQKAAPRPAGPGSAPQPPSTNPAADLMMMGFPTRLPESSQPTLCVCHSELKSQGFLCPRCQSKVCDVPTDCDVCGLMIVHRSPKFM

SEQ ID NO: 14377 - protein, 548 aa, Coprinopsis cinerea okayama7#130
MPPKVLICSTIVWAHNEVKQLLGNIADIVYVDSPNRAAFLAEFKPGGKYAGTVGIYRENESAKKLGVFDKELIDGLPSSVRWIAHNGAGYDPVDVHACIAKGIYLSNTPGAVDDATATTALYLLISTLRQYSAAERSLRALKWKPAGLNRISHDVTGRTLGILGLGGIGLRLAELVQSFPMRVVYHSRRRNANAPSYCEYFENVEEMLAQTDVLSIHVPLREDTVGLVGEKWIRALKPGSIIINTARGKVIDEEALIRALEDGHLQAAGLDVYPNEPEVNPRLLEFPQVTLLPHMGTENQDSQKKMEVRALTNLRDFLTTGAGKDLVIEYKQKGLIPATKVNSKLHVASSQLQSQSKILSNLPVKSEDPLQELQRLRQLLQQHDVEHTKKMQDMKRLLQEEIETGSVEILKEVRGELRSIIEDEVKAEVDAQIREHIPVPLSQQAEETKEQLRIVNASLQNSRSRIANAGLGVSNLFDSLAVVLTPQGTRSKWWPADLGSLFAYDLESARLLVKDFGLVDSDQLHVNFQRFLAHIGTDAEQFLPSVKD

SEQ ID NO: 14378 - protein, 318 aa, Coprinopsis cinerea okayama7#130
MDTTIDDQLYLNQYLYQQQDTQNQQQIDDEPLYVNAKQYFRILKRRVARSRLEEVHRLSRQRKPYLHESRHKHAMRRPRGPGGRFLTAEEIAAQKAAGTSNNGEASGSKDAEGEEQEDGEKTMEQTPERDEQQQQQQQQVQQPPPPPPPPPPSLPDLPELPEPHIIDAEPPRLDHISHHERDNSFYAPMISSSSFRPSISIPQQIMPSHHTHGGHHHGHPRHLPTQHHQNSQPKPTNHMHNFAHLPKSLPVNLTSPYGSMPQMHHVPHPHAHARHHHSNLAFHHPLYNDPINPPGSSNPDMQRRTEEMIQFGAPGSSN

SEQ ID NO: 14379 - protein, 667 aa, Coprinopsis cinerea okayama7#130
MFAAARSSLRSSVSRTGHYAALPRTMIARNMNSKVNGPVVGIDLGTTNSCVAVMEGQSSRVIENAEGARTTPSVVAFTKHGERLVGLPAKRQAVVNAANTVFAFKRLVGRQYSDKEVQDDAKHWPFQIVKKSDGHPAIEVDNGGKRQTFTPEELSSMVLVKMKETAEQYLNKKVNHAVVTVPAYFNDAQRQATKDAGQIAGLDVLRVINEPTAAALAYGLDRADNSVIAVYDLGGGTFDISILEMQKGVFEVKSTNGDTHLGGEDFDVVLVEHILAEFQKESGLDLKGDRMAIQRVREAAEKAKIELSSTQQTEINLPFITADASGPKHINLKLNRSQFEALVDPLVKRTFDPCKKALSDAGVKASEVNEVILVGGMTRMPKVVDTVKSIFGREPSKGVNPDEAVAIGASIQGGVLAGNVTDILLLDVTPLSLGIETLGGIMTKLINRNTTIPTKKSQVFSTAADGQTAIEVKIYQGERELVRDNKLLGNFNLVGIPPAPKGVPQIEITFDIDADGIVNVSAKDKATNKDQSMTIASSSGLSDKDIERMVAESEQYAEADKARRALIEEGNKADSVCHDTEKAMNDFKDQLDAAEKEKVSKLLVELRELATKGQAGDPSVTPEQIKEKISETQQASLGLFQKVYEKRAAESSSSSSSESENKEEKKD

SEQ ID NO: 14380 - protein, 200 aa, Coprinopsis cinerea okayama7#130
MAAGATRKSRRGLILGAILFVFVFIFYVPWELPASLVKGSKVDEIYGLLYLVTSTEDNGRALNEPEHLDVTQQLDWDIYAAGNPNVKWRKEAARIDKVHPIVVFSKTYCPYSRRAKQLLQSYNIHPPPKVVEVDTRDDGHFIKALLTRLTKHSTFPNVIIQGKSIGGSDNLQTLHVKGELKGLIEATGAKVRKPKAPPAM

SEQ ID NO: 14381 - protein, 549 aa, Coprinopsis cinerea okayama7#130
MPRARTTSKPESRLTRQGTQNSEKTDASDKSDKKRSRSPATRTSKRARVEPATTAATKAKTTTKAAAAQKAASKSAEKPVAKPAPKAAAPRAPKAPKPDLISPPTLPAPTRPSPLVWVWGATDSGQLGLGENYNSEVPKPRRHPWAEQQISEGTFGSEPGAGILSVTSGGLHTYLLDEKGRIWSAGTNDEGALGRETKKEPTENEAHLRAQEFVLIQTLADEGFRAVQLATGDNFGAALNDQGDLKVWGTFRDDEGKSNFSSDVGKQLAPTSITIHGLYTPKSSSDKIASIAGGENHLVALTTQGEVYSWGIGGSGQLGRRVLSRHKNEALAPKRVVLGSRSRKAVLIGAGLRSTFAVDQAGEVWGWGLNSVGQLGIGERGEIVLQPTKLEVLSPSNLPSSVEGEQDRVVQIRGGEFHTVFRTAQGKVYACGACNDYQLGLPEDHEVFEGKGTRGAECITEPVLVPLPDAVKDDPVVWISAGPRYSMAVTQDGALLSWGVGEQSELGLGDETEAVTPQIVVRRTGSWSAMQVSCGGQHVVGLFKKRESS

SEQ ID NO: 14382 - protein, 944 aa, Coprinopsis cinerea okayama7#130
MADPPRTPFSFHSTKTVRDPKSIGLWTVGRTIGKGASGRVRIARHAKTGQYAAIKIISKSTLPPMMSQVSLNRLADVTEHVQLSVEREIVVMKLINHPNIMKLYDVWETSTDLYLVLEYVQGGELFDYLCSKGRLPVHEALLYFQQIISAVDYCHRFNIAHRDLKPENILLDENSNIKIADFGMAAWQSNPDAETLRTSCGSPHYAAPEIINGQPYNGAAADIWSCGIILHALLVGKLPFDDDDCPALLEKILRAKFTMPTDIPASAQNLLGRMLEKDVKKRITMAEIMEHPFFLSQDPPKVDYALPDLESIAQPVPSVSALDPDIFANLRTLWHGTSDAVLIDSLINNERNWQKGIYHLLVDYRSRNPQVYDEDEQAVAKLHKERKRRRQQRKPVQNDGDADDIPPRAAPPTPRSASRHNRLGIDLSFDELLPHAKSSSSSLSERNETSRPTHLQPPPMSTQRSSDSTTSEGTSVSSTTATTTTATSSSLLTPFSPLWETLDLPKLTVPNTQDREMQTFFNHIVTHLNVLQAKTASSEISTWGASSSLGSAASGGGSESGTIKSGRSGLSASSAAVPNARMTSARKTGVDHEDGFFRPSRHSSPRLDSSLIAPIQQKGKGKEKASLHLPEEGDEDDEDSLGEVEGRQQLGASTVEALRYTETQPLSVRSHSRRALYPVTPSRTTNKENEDVPLDAYRSNLTRQALANHAKRNLSTPKAITIVEPQPVSQRKHIRQGSRKPPQTPLSALSPLDNRGVGGLSSSSAYAHGYTSPPPHPSSTATPKRTWIDTVFKPKAPNYTLYSRRGVQETRNECRRLLMDLDLLVSIEENERMGVLKCRSIEIQDPFRVHNVPKAIRFRVEGQRAPYNLVQSGITMSLSFYHEKGSFEAFQDIYHSLRARWDMDKVESVAEGDEDEMEGMTKLASGLSALSTRAIGGRPASQAY

SEQ ID NO: 14383 - protein, 1109 aa, Coprinopsis cinerea okayama7#130
MGQSLSTSLPGQQAIPGTYDFSNESQSVFSDLRNVNIQGGTFNHAGRDLNVIINNYHSSASTADARLAKLRSRLAPNVNFRTIHSDVRKRRTAGTGMWLLESRLYREWKKSKGGIIWWMAIPGAGKTVMASAIVDDLLPLENDPERTCVLFVYSRYNEPLAITDILKALVKQCIERNTDLAAIVESFYDQYTLEETEPSVDELVILLQTLECHFDRVYYVIDGVDEALVDVQFDLIQVINKLQGNIILTSRPLDELSEDLKHAVFCKITAHDRDIGLLMEEKLQRYKALRRILDKNNCREEVLKSIAEKAQGMFLHAALQLDAIQDCTTLASIRATLSQFPAGLHGMYSASMERIELQTPQLRDLAKQVLLWLVFSRGPLSIDDLRYALAADPETHAYIPERMSDEATIVSVCCGLVEVQETSNTVRLIHFTAKDALVPLLLRDYPTPHLTISKVLIQRLLSSGIVDSEFTVVEELHDAWKQHLLLRYAQENLGSHIRECPLFEVSDAVVDFLSHCTAYPVEISPGGFDILAPPHVATYYNLKGYLKGVSSSDQGLDLRTRCLGRTMLHIAAWVGDEQTAEEVLTASHVDVNAADSQGWTALMLASRNGHVRVAARLLRAPGIRVDVARPHGWTAATMASLNGRSAIIEELLQVPGIDFNAPGPEGWTALMLAVAGGDERTVENILQFPGIDVNAVNDDGVTALMYALSLGRNALATRILKVPGLDVNAAAKNGYSTLTLASECGSDEIVSALLQFPGIQVNSADEHGWTALLSASIKGHDGAVDALLKVPGIDVNAVNSDGQTALMVASYQGHVRIVERLLQHPGIQVEMADHLGRTALMWASMQGHAVIADRLLQVPGIKVNATTNDGWTALMFASDQGHDTVVTKLLQSPGILANATEKEGWTALMFASSNGHDTVVDKLLRVPGILANTSTQDGRTALMLASSDGHDGIVDRLLRIPGVDVNAVDEDGWTALMFASDPNGGHASIARRLLRFPGIDPHLRDGHNSTALTLASEGDHREIVSLLLECDGIDVNAADRDGDTSLIMGSREGHEGIVELLLGCKGIDLDLRNKEGLTALSEAQRNGHGAIVERLIRFQESSRMGGPDV

SEQ ID NO: 14384 - protein, 425 aa, Coprinopsis cinerea okayama7#130
MTDKGRVLLAYSGGLDTSCILAWLIEQGYEVYAFMADVGQEEDFEAARDKALKVGAKKFFLKDLKREFVTELIYPAVQANAIYENVYLLGTSLARPVIARGMIEVADQEGCDFVSHGCTGKGNDQVRFELAFYGLKPDIKVIAPWRLPEFYNRFAGRQALLAYAAEKNIPVVQTAAKPWSTDENLFHISYEAGILEDPNITPPTDMWKLTTDPENAPETPERITIEFKQGLPARVVVLAEQKEYTDAVEIFLALNALGRKHGIGRIDIVENRFIGVKSRGCYESPGATILRVAHIDLEGLTLDRNVRALRDQFTTVALSRILYNGHFFTPEREFITSSIPTSQRTVNGLVRLKLYKGNVIVEGRESDEGLYDSQQSSMDELGGFEPTDTTGFIEIESIRIKKWAQANIRKGQGGVLPQDVYGSRA

SEQ ID NO: 14385 - protein, 653 aa, Coprinopsis cinerea okayama7#130
MTNGPVNGNTGIESQFSALGLGKSAYVPPHLRNQQRAASSPSPTPSNGRNGWSDRTGTPPPRGGFGGGFSDRGGRGGSFGSRDSRWAGPNRGSDYGGGRGDSRGDSGPQASFGYGVWRDGKHVVGGRNARLEKELFGTPDDPSKQHTGINFEKYDDIPVEATGAGVPEPVNSFTSPPLDPVLLENIGFAMYTTPTPVQKYSIPIVAGGRDLMACAQTGSGKTGGFLFPILSASFTEGPRPPPETAAPTYGRARKAYPTALILAPTRELVSQIHEEARKFAYRSWVRPAVVYGGADINQQLRQIERGCDLLSATPGRLVDLIERGRISLANVKYLVLDEADRMLDMGFEPQIRRIVQGEDMPGVNDRQTLMFSATFPRDIQMLARDFLKDYIFLSVGRVGSTSENITQKIEYVEDGDKRSVLLDILASQSKEDMGLTLVFVETKRMADMLSDFLIGNNMPATSIHGDRTQREREMALQTFRTGRTPIMVATAVAARGLDIPNVTHVVNYDLPSDIDDYVHRIGRTGRAGNVGVSTAFFNRGNKNIVRDLVELLREANQEIPSWLETVAHEAAFGSGGYRGGRGGRGRGGGRGGGNRDYRSNYSSGGGGGGGGYGGGGYGGYGGGGYGGGGYGGGPRGGYGGSSYGGGGGGNGWW

SEQ ID NO: 14386 - protein, 155 aa, Coprinopsis cinerea okayama7#130
MFRTSLTSSLRLLRRNAAPSTFAKGQLTAYRYITQEARAQIQKAIEEKPVVLFMKGTPDAPQCGFSRAVVQILDMYEVPPEKMQTYNVLADAELRSSIKEFSEWPTIPQVYVDGEFIGGCDILLGMHQSGELETLLESKNVIPKVEEPASTPSSS

SEQ ID NO: 14387 - protein, 850 aa, Coprinopsis cinerea okayama7#130
MDSRFTQYEMNPSFLPPAPPPHARFLHPNSSGSTLHVGGGGSSPNATMNGNATGMGNGNPTGSGPSGSSSERNRTSAVYYAQQQVGASIVDGRKKAAEECKRMVHRISAQCRRQNRKFRDLEFDIENDKNRCLHNLTETNIFIPPDARRVTELFDKPITFFSGHGGPGAAEIVQGAVEDCYFVSALSAMTCMPELVENVCVARDEEVGVYGFIFYRDCYWVPVVIDDLLFTRVPKYEQLTSGEKELYHFEKSRYNSTARRSGESLYFAKSAGKKKTDVSDSVKPDCDNVDGGHGGSGGGGGDTWVPLIEKAYAKVHGDYASVMFGRTCDALEDMTGGVSSLILSKDILDIDKFWNEELVKANKDRLFGCWFKALDGSRNTLKNATVDGLVGNLSHSVIKAVECRGKRFVVLRDPWGEAAWGGPWSDGSKEWTPEWLEILPELGHDFSGSGQFVMEYKDFLSVWQEIQRTFVFDEDWVMSSQWLYLPDRPSMAPWAYGDLSFSFSLPAASRTIIVLSKVDSRYFKDLHGHSLWNLDFVLVREGQTEPMAESTYSFFYTRSVSLEIDLEPGNYVVHARLDSASIRDKDYFRTGLNSGWDRRKVARILMERAKSWSIASNYKHDDTYLVQTLSELLVDDAANSDKATLDTLNTHAREIKTGENITVTTTTTTQTVVSKHGDCSRPSPASPYEVPPYGNGVAYTPYEARSCPQPSRKHASGNKLSGMQQGMNYKHAEPGWVPVDGSQAESSPPNSPHAETYYFPSNPPAPSGPVSYPVPPPPPGPPPPPPPLQVPTFVAPLHLGRAHSPIPPRSQSPTGFPEDDNGLVVGLKVYTHKVAPTSITGRLRAKKDRR

SEQ ID NO: 14388 - protein, 720 aa, Coprinopsis cinerea okayama7#130
MAESETVTTTKKSETTTVETKTTPPKVLTYVQKEAGLLVTKELEKAIEECKAKVERIARDCRARNRKFRDIEFDLENDKDECLYGLFIEERYEPADVHRVTQIFDNPRFLENGKAGSNDIVQGQLQDCWFLSALATVSTCPGLIEKLCVARDEKVGVYGFIFFRDNSWVTVVIDDMLYTRVPKYEELRREEQELYHYDKEIYNKSARKGGKSLYFAKSGETGETWVPLIEKAYAKLHGNFSHIVGGLESDAMEDLTGGVSTVLQSKDILDPDRFWKDELLRANKDRVFGCSFNSLAGTRNGYPSTKLTVQGLIGDHAYSVLRAVEVEDKRFVIVRNPWGKSEWTGRWSDGSKEWTSKWLDLMPQIGHKFGDDGQFVMEYSDWLDCFAQIDRTILFDSSWVMSSQWLQVPVPPLPAAWSFGDVSFTFSLSGPTQAVIVLSQIDTRYFRDIAGRARWSLDFVLVKEGEKEPIAEVTHSEFHLRSVNMEIHLEEGNYIVYVRLDRTIKSVENPATVDEWNLRKLSRIITARAQSQSVASNFKKEENAKYLPTDLQTLIERDFAEFEKKRKEDAEKAKTTSESSTKEETGEDGTITTTTTVVTTETKTVVVKSAKPKAAEDKDSKEGDDAASGALSTSDDAKPELAAAPTATASSSSTDSTSTSSTTTTPPEKGKVNVPYSDNDTVCVGLRVYTSKDVPVVVVGRLKGDAATAATTTTTTVTTA

SEQ ID NO: 14389 - protein, 494 aa, Coprinopsis cinerea okayama7#130
MVEVTYDDSGSLNTLDAEGTPVVYSPGDIAFILVCAALVWIMIPGLGFFYSGLLRRKNALSMIWLSMITLGVVSFQWFFWGYSLTFSDTASSFIGDLRYFGLKGVLELPSPGSSRLPAIVFAFYQLMFAAITPTIAIGAFAERARLGPSLIFIFAFSTLVYDPVACWTWNPSGWSFVLGGLDFAGGTPVHIVSGTAALAISVYLGKRRGYGSEALAYKPHNTTYVVLGTVFLWFGWFGFNGGSALSANLRAAQACIVTNLAASVSGITWMLWDYRIERKWSAVGFCSGAIAGLVAITPGSGFVGAPAAVLFGFSAGTLCNFATQLKFLAGYDDALDIFASHAVGGIVGNLLTGIFAQKSVAGFDGMTEIPGGWLDRNWVQLGYQVADSVAGLGYAFVMTTVILWIMHYIPGLRFRVDEEAEIVGIDQHELGEFAYDYVGFEREIGTPYTSAIDMEKRAVMVETNGSAFNGTSNASGVGGGHASPAPQFHVVHAS

SEQ ID NO: 14390 - protein, 623 aa, Coprinopsis cinerea okayama7#130
MPLPSSGTRNLKEPLSALLVGITATCLALGAYATLRNGKPLKARVKLTATIRATLERTSSYTSKSGGATSTLKSAATKGGSDDDISGEIGLLLGGNLEAAIQECKERVERISRECRAENRKFRYSQRDEEVGVYGFIFCKHGIWTPVIVDDLLYSQMPIYENLRTREQQICRQDKDAYNAMARKGGEGLFFAKSGYDGETWVPLIEKAFAKLHGTYEALSGGQTAQALEDLTGGVNESWKIMDILDTDRFWEEELSKAGVDRFFDVSLARLTKNASQTYNTENLVFRHAYSVLRARQVCGRRFVVIRNPWGKTIAKWNGRWGDGSKEWTELGREEREEILRVMEYKLGDYGTLMMEYSDFLTCWHYIQRVIVFDSSWRASQIWIEVPPKPDGFPWQFGEVMYYFTLSKPSPVHIVLSQIDWRAFEDISGRVWFLLDFYVCKRGEKDWRGVSALTFLWERSVSCYLETLEEGEYVVYPRVQRYFGFKKMCYFKEALQEKKWDERKLARALTRRAQCFALAENADHNSIAPYLPTAQDAPRPPNAIPPPPPPPPPPTTTDPKKKPPIPTHVTLYELCKDPEDRQKLVLGLRVYAKEGCLESIRGWIPSPGMGAYEPEGGWPVAAV

SEQ ID NO: 14391 - protein, 604 aa, Neurospora crassa
MSMYPHRPIAGAPIQNMGRLNELLDGIRMEFESQARQYETCQHDLATQLQELQVIREKVFQMEQHQMNVKQKYEDEIALLRRQLEARGGAPGNMNPPPQHPGQQQPPAIGLGSNVFSAIMAGQGGQALVPPPPPPQQQEQPAHMPAPPGLQGPPPPPPPPSQQPPFQQQYQGPQGPGNFPPQPPQSTASPGPAGKRGIGRPPAGGPATPQINTPIPYNGGPAQSPQVPTHPTPDHTRMAQHHQPPPPPPSQTNALSELDPDRLPNHIKKMKDDWWVIFNAAVPRVLDVELVHTLQHESVVCCVRFSMDGKYVATGCNRSAQIYDVETGEKLCILQDENIDLTGDLYIRSVCFSPDGKYLATGAEDKLIRVWDIQSRTIRNTFHGHEQDIYSLDFSRDGRTIASGSGDRTVRLWDIETGQNTSVLSIEDGVTTVAISPDKQFVAAGSLDKSVRVWDMRGYLAERLEGPDGHKDSVYSVAFSPDGRNLVSGSLDKTIKMWELSAPRGIPSSAPPKGGRCIKTFEGHRDFVLSVALTPDSQWVLSGSKDRGVQFWDPRTGHTQLMLQGHKNSVISVAPSPVTGSNGVGYFATGSGDMRARIWSYSRI

SEQ ID NO: 14392 - protein, 408 aa, Coprinopsis cinerea okayama7#130
MSTQASTSAAKSRLLQKNDDDVVIVSAVRSAITKGRKGGFKDTKPELLLSHVLRAAYSKVSLDPKLIEDISVGNVLPPGGGATAARMAALHAGIPIETSINTVNRQCSSGLTAITQIANEIKAGQIDIGIGAGVESMTNGYGAGAMGEYSNEVLSNPDAEDCLLPMGITSENVAADYGITRAVQDEFAAISFQRAAKAQKEGKFKEEIVPITAKWVDPKTEQEREIVVDHDDGVRDGVTKESLSKLKPAFKKDGTTHAGNASQVSDGAAAVLLARRSVAKRLGLPILGKFVTSSVVGVPPRVMGIGPAFAIPRVLQVAGITPDDVDFYEINEAFASQAVMSVQHLKIPYEKVNINGGAIAIGHPLGCTGARQVATGLSVAKQTGGRVFVTSMCIGSGMGMAAVFVSEH

SEQ ID NO: 14393 - protein, 779 aa, Coprinopsis cinerea okayama7#130
MDNGTRGGHAYKPPVNPSKIIPVVFPPASAIMAKRKSTNKKRKAQKRLNQVELVRKQVGLLVTKELQDAIDACRDEVARIAKDCRERNVKFRDTEFDLENDGSRCVYGLVYDEETNNGTWYTQRISEIFDRPKFFNEKGAAESSAIVQGGLGDCYFLAALATVCCLPGLIEKICVARDEEVGVYGFIFFQDDGWAKVIVDDFVFTTQPPSFDSLGEEGKEAFLGDRELFHNVHKNTGRHLVYARSGSEGETWVPLIEKAYAKLYGNFKHLDGGWTTEAIEDLSGGVSTTFKTKDILDRDRFWNEEVLKVNHDRLLSASFSGTVTQGLIPNHAYSVLRAIEWKGKRFLVLRNPWGQYEWTGRWSDGSKEWTSEWLGALKELKHVFGNDGQFVMECKSSVLLKGLYRGYLCSGLLDDDFLQRFQRIGRTFLFDDSWVLVSEWMKVDIENIPEVASYGSLSYRITVPEKTKALVSLSKLNTRGFKTVPLGPYIWFQFAIVKEGEKTPLRTTTLSGDSRITVELDLEAGTYFVYVKMEHHSVLPDFNNFPTKTVTSVLSAKVKSLSLVKNWDTGLKHKFTPKSLEEVIEDGLAQSAEGNDDDSVAGTDGTQIDDVPTGSGEGVETKADIAAGEAVALSHGNGNIAHNIGPSPKLQELEGAHWILVAIVLGAISHFFDWAAWSCLLLFKGNTTAGQPLEVAANTEHGPETPVLTAEQGTVYLQSQTFQQDLPVEYAGEVAIDEEETWQDLYRDAKDSVFIGLRVYTQTKEPCSIVGTVKSEVDD

SEQ ID NO: 14394 - protein, 749 aa, Coprinopsis cinerea okayama7#130
MAKKSQQKKKKGRGRQKQVDLVRRQVGLLVTKELEVEINACREEVEKIAKDCKNRNAKFRDPDFDLTRDWERCIYGMKETLRLKPSVRRVTEIFDKPKFFNDKGAAESSAIHQGCIGDCYFLAGLGTVCCIPGLIEKICVARDEEVGVYGFIFFQDDGWCRVIVDDLLPIQNPRHFDSLDDGERQLFVEDRDLFHHVQKNRGSRLTYAKSGSDGETWVPLIEKAYAKLYGSYEHLDRGWTTEAIEDLSGGVSTTFYTQDILDRDRFWKEEMSKANTDRLLSASFFGDETQGLISEHAYSILKAIEWNGKRFVLVRNPWGDSEWGGPWSDGSKEWEPQWLGALKELDHVFGDDGKFVMEYDDFLKYFEQVGRTFLFDESWVLVSEWMKVDVENVPALPSYGNLSYKVTILEPTKAIICLSKLNTRGFKTAPLGPPLVCQFAIVKAGERKPLRVSSPSGDSRVTLELDLEAATYMIYVKTEHESTIDHPTAGPCNPIKTQTVAKLLASKVKSLSLVKNWDTGLRSKFVPKTLEEVIEEDLVETSVEDEDPGGGEDPALPLSQDVPETKPLAEEDECIPKEVDSDGESAATQVTPAVQDTPASETGPKPPVDHESPPAPIVPSVELKGLHWTVIMSLLTTVLRAVDYIALTCLYLFGASSEPIKDDAEEAGQESNPQLEIEELTPGRELDQPATVDHHFEELCSPTYPPPSMPKNWVDLYHDAGNSVFLGLRVYTQTKEPCTIVGRVRSSSE

SEQ ID NO: 14395 - protein, 633 aa, Coprinopsis cinerea okayama7#130
MMDEISKSDTTIAVKPVQDIEMTSAPGLHFSPALEKALEECRQKVEAIAKDCRGKNVKFRDMEFDLQGDERRCWNAFWGTAARAPTDVLRVTEIFDKPVFFNAAELGKPKSEDIIQGALGDCWFLSALATIASVPGLIEEICVARDEEVGVYGFVFHRDGLWKPVIIDDLLFTNIPKYEELKEVEKELYHHDKDLYTKLARKGKKILTYAKSGAQDETWVPLIEKAYAKFYCNYDHLNGGWTGEAIEDLTGGIAKVIEVKDILNIDQFWTEELLNANRDRVFACAFHQLDSSRNGVGNARVQGLVGSHAYSVLRAVECKGRRFLVVRNPWGDSEWTGPWADGSKEWDSELVKILPELGHQFGDDGQFVMEYCDFLRCFEIIERTLLLDSSWKLASKWLQVPLPPAGVPPSFGDISFELTIPTSSKTIMVLSKLNQRFFRSANDWVSYTMDFAVVKVGQSTPLGTSTAILRGNRSISLELDLEPGTYRVYARLDTWEYILGQNIPLNRSLDDYVPGRDLARFISNKIEATQIAPNAYTSAVAKFRALTLEEVIARDNKKDNASALRKFINKMRSHNRSRRSAFPEVAHSHDGTFESDLREVLVDGNKPIVGLKVYTKSTTAATVKARLNDDQYF

SEQ ID NO: 14396 - protein, 999 aa, Coprinopsis cinerea okayama7#130
MQNSQDSPPRAPPIQYNAPLGTRWAKEKAAAGGSAAFDLPSDPKSIGPWILGECIGKGASGRVKIARHQRTRQLAAVKILPIAPLVNSRASLATQQAKSEKQRLGIDREITMMKLMNHPNIMRIYDVYEGEKELFLVLEYVEGGELFDFLVNRGRLPPSEALLYFRQIIYGLNYAHTFSIIHRDLKPENILIASLDPPVVKIADWGMAAFAPPMLQLETSCGSPHYASPEIVNGEKYFGTATDIWSCGVILYALLTGRLPFDDKNVRTLLSKVKSGKYDIPSWMDPMAKDLLTKMLVVDVHKRITIPDILVHPWFVKGPTSTSQHTMDITLAQPPLPPSPSTLARPIASPDLIDPELFASLRIIWGRHADPDGAAIQQDLCSPAGQGLHAKAFYFLLDRYREESLRNRSDDAADRIQTPRSETECQSDKLYLGWDLDQTRARRSLEAVVNTSSPADKAVSPYRSTTPANEPFTADDPRSNELSMPGTPIPTTRHPNLLGEDRSFLKELQRRASAVPFHASVHPGRVPPPSLMDVDSSAVTLRQSMVERSDLRENVDRPGAVRTDVSVIPSDNHIHHRQSTRRRASLDAEKENAMAVDDGPFGVTTNREVGRDVVNTPETTHSIPSAKTKKEKERKSRPPPIELPPIHQRRTLVGSSFHTPSPGLHGGTGTAHTGSTSNRIMASPVVGEFKGWFSNLFNWKSHSAHPPASVFYSPEDIPKTREMTLRFFQSLAFGISRVILDLNADSSEIYHCRLDQSVVDLATNTTLKPVRLRVEFSLVVPASPGPTTGGGTGAMTSSAGTTPTPTPTTATSEFWTFTTGQLQQHAQQPLDPSSNTFLSAGTAGFGARATRNSLAALGRTASNAIGHHHQSHHHHHHLHHHPTVNTTSATTTTTAPTSGGQGATVNANATALLSTHWEMPLGCACVIVMTFEKGSGSAFRAVKQRLQDMFSDSQVVGSGVGAGVGVGAGGGVGAGGGAISPTCFSPVLTAAGGGDRMVM

SEQ ID NO: 14397 - protein, 1321 aa, Coprinopsis cinerea okayama7#130
MSKSGPPSTADEKSTAVNDQHTKEQKEQQASTTPSVNEKNEKGSNKDVAAESTVPQTAPVSFFKLFRFSTKLELLMNFVALIAAAAAGAAQPLMSLLFGNLTQDFVNFATVVGEAQAGNTTAAALVPEAAASFRRVAALDASYLCYIGLGMFVCTYVYMYVWVYTGEVGTKRLREKYLEAVLRQDIAYFDNVGAGEVATRIQTDTHLVQQATSEKVALTVSFVAAFVTGFVLAYARSWRLALAMSSILPCMAIAGGVMNKFISAYKQLSLQYIADGGSLAEEVIGTVRTAQAFGTQRILSGLYDNHVNKALTVDLKAASWHGSGLAFFFFVIYSSYGLAFHFGTKLINQGHATAGSVVNVFLAILIGSISLTLLAPEIQALTHGCGAAAKLYETIDRVPDIDSYDEGGLKPETVTGEITIENVTFAYPSRPTVQVVKNLSLTFRAGKTAALVGASGSGKSTSISLIERFYDPNEGVVKLDGIDLKDLNLRWLRSQIGLVSQEPTLFATTIRGNVAHGLIGTKWENASEEEKFKLIKDACIKANADGFISKLPNGYDTMVGERGFLLSGGQKQRVAIARAIVSDPRILLLDEATSALDTQSEGIVQDALDKASAGRTTITIAHRLSTIKDADIIYVMGDGVVLEQGTHNELLSANGAYAHLVQAQKLREANDSQAVSGDDQEDGSDAAGYEKMAREEIPLGRSNTGRSLASEIVEQRQKERESKEKKGDLNLPYLFKRMALLVPEQYTRYFLGAIFACLTGMVYPAFGIVYAKGMEGFSVLDPDERMKQGNRNALWFFIIAIISTICVGLQNYLFASAASSLTARLRSLSFKAILRQDIEFFDKDENSTGTLTANLSENPQKVYGLAGITLGAIVQSFATVIAGSVVGLAFIWKLALVAIACMPFLLSTGYIRLHVVVLKDQANKKAHEESAQLACEAAGSIRTVASLTRERDCLRLYSESLEIPLKKSNKTAIWSNGLYALSQALVFFVIALVFWYGSRLVSTFEASTFQFFIGLMSTTFGAVQAGNVFSFVPDISTAKGAGSDIIKLLDSIPEVDAESEAGKKLSHEKLQGHLKLEDIHFRYPTRPGVRVLRGLSLEVQPGTYVALVGASGSGKSTVIQMIERFYDPLSGEIYMDGEKINELNVQDYRRHIALVSQEPTLYAGTIRFNILLGAIKPAEEVTREELEAACRDANILDFIKSLPSGFDTEVGGKGSQLSGGQKQRIAIARALLRNPKVLLLDEATSALDSHSEKVVQAALDQAAKGRTTIAIAHRLSTIQNADKIYFIKEGRVSEAGTHDQLIAQRGDYYEYVQLQALSKTE

SEQ ID NO: 14398 - protein, 375 aa, Coprinopsis cinerea okayama7#130
MSVQKKEILVAVVGVGLVGGELIGQLLSIPANRSPFKLVSLTSSKTTLYASPENPISAEQLTTWKSQLAASSDKADLNELTSRLKAWLTGDRQVVVVDNTSNDDVAGRYPEWLAAGFSVATPNKKAFSGDKALFDQIVKASQQTGAKWLNESTVGAGLPVINTLKEMVASGDKVKKIEGVFSGTMSYIFNEFSTGKTDGPAFSSVVAVAREKGYTEPHPADDLNGYDVARKLTIVSRIISAFSSEPTNLPELDSFLSVKTQSLIPSALEGIPTGDEFIARLPEFDSEFAKLREEAAKEGKVLRFVGVVDVENGQVKAGLEKYPTTHPFATSLGGSDNIIMYHTERYSPRPLIVQGAGAGAAVTAMGVLGDLLKLA

SEQ ID NO: 14399 - protein, 701 aa, Coprinopsis cinerea okayama7#130
MAMASSAATKVRLQGSSQKVTASLARSKSTAASPAAWATSSSCTSSMVEAKQRVREHARYISQTTSANATAAPSVRPNPAPGFQQAPPATLPPKQHREAPLANPNPALDHSFVGLTGGQIFHEMMLRHGVKHIFGYPGGAILPVFDAIYKSPHFDFVLPRHEQGAGHMAEGYARVSGLPGVVLVTSGPGATNVITPMQDALSDGIPLIVFSGQVATAAIGSDAFQEADVVGISRSCTKWNVMVKDINELPRRINEAFKIATSGRPGPVLVDLPKDVTASILKTPLPYKATTPGVNLGLPNSFLQSSDPPVDHALVERAADLINRAQRPVIYAGNGVLSSPMGPKFLAELSEKGNIPVTTTLQGLGAFDETNARSLHMLGMHGSAYANLAMQHADVIIALGARFDDRVTGKLDTFAPAAKAAAREGRGGIIHFEIQPKNVNKVVEAQIPVLGDVVANLAALVSHIKKAPREEWFADIQKWKKDYPFTYVPSKKGERMKPQEVVEELEKQTKDRKDDVIVSTGVGQHQMWAAQFFRWRQPRSMVTSGGLGTMGFGLPAAIGAKVAAPNKVVVDIDGDASFSMTAMELATAAQYGIGVKVLILNNEFQGMVLQWQDLFYEKRYSHTRMINPDFVLLAKAMGVHGIKCNSAEELPAKMKEFLEYDNSKPVVLECFVEKDEHVFPMVPAGKALHEQLLHPMLTNKD

SEQ ID NO: 14400 - protein, 681 aa, Coprinopsis cinerea okayama7#130
MTAPLSMLKSIAVSPTAWKTSSPMVEAKQRVREHARNISRTTAASATAAHSVDCMGRHPNVAAAIQQPPPPPSKDQCEAPLSNVNLALDHTFVGLTGGQIFHEMMLRHGVKHIFGYPGGTILPVFDAIYNSPHFGFVLPRHEQGAGHMAEGYARVSGLPGVVLVTSGPGATNVITPMQDALSDGVPLIVFSGQVATAAIGSDAFQEADVVGISRSCTKWNVMVKDINELPRRINEAFKIATSGRPGPVLVDLPKDVTASILKTPLPYKATTPGVNLGLPNSFLQSSDPPVDHALVERAADLINRAQRPVIYAGNGVLSSPMGPKFLAELSEKGNIPVTTTLQGLGAFDETNARSLHMLGMHGSAYANLAMQHADVIIALGARFDDRVTGKLDTFAPAAKAAAREGRGGIIHFEIQPKNVNKVVEAQIPVLGDVVANLAALVSHIKKAPREEWFADIQKWKKNYPFTYVPSKKGERMKPQEVVEELEKQTKDRKDDVIVSTGVGQHQMWAAQFFRWRQPRSMVTSGGLGTMGFGLPAAIGAKVAAPNKIVVDIDGDASFSMTAMELATAAQYGIGVKVLILNNDFQGMVLQWQDLFYEKRYSHSRMINPDFVLFGQSMGVHGIRCNSLEDLPAKMKEFLEYDNSKPVVMECFVEKDEHVFPMVPAGRALHEQLLHPTLHTKD

SEQ ID NO: 14401 - protein, 427 aa, Coprinopsis cinerea okayama7#130
MDVPSSYQEDNHLTPRPDMLGFKLEAPRREGSATTPVDPRVLDAMLPYLTDQYGNPHSRTHAYGWEAEQGVDEARKHMADIIGADMKDIIFTSGATESNNLAIKGVARFHKEKKKHIITTQTEHKCVLDSCRNLGEEGFDITYLPVQRNGVISLEELENAIRPDTSLVSIMAVNNETGVIQPLKEIGAIVRKYRGVYFHTDAAQAVGKIPLDVNEMNIDLMSISGHKMYGPKGVGAAYIRRRPRVRLEPIFSGGGQERGLRSGTLPASLVIGLGEAARIAKLEMERDHARVKELSDRLLNSIYSRVEHVVRNGDVNGYPGCVNLSFSYVEGESLLMALKEIALSSGSACTSASLEPSYVLRALGAAEDMAHSSLRFGIGRFTTEAEIDFVVEKIVATVERLRDMSPLWEMVQEGIDINSIDWSQSQH

SEQ ID NO: 14402 - protein, 1084 aa, Coprinopsis cinerea okayama7#130
MEKHVLKAFNGYWRLTSFNPKLKSTFGRSGPSIIERHTQQLLSVACRGFNISARRANATSSQPSTSGAPGTPYSSLTVGIPRESFPNERRVALTPQNAALLLKKGFKEVLVERNAGAEAKFLDEQYAQAGAKLVSREEVFGSSDILLKVRPPLAGQEVESIKEGSTLVSFLYPAQNKSLVETLASRRYVTNVPLLRPIQLTIIQMDMIPRISRAQVFDALRWGPPAPRIPPGKVLVIGAGVAGLSAIATARRLGAIVRGFDTRSAAREQVESLGAEFIEVDIKEEGDGAGGYAKVMSKEFIEAEMALFREQCKEVDIIITTALIPGKPAPKLITKDMLALMKQGSVVVDLAAEAGGNCEATRPGELVVQDGVTVIGYTDLPSRLPTQSSTLYSNNIVKFLLSIGNDKRFNIDLEDEVVRGSLVVHQGQILPPVVRSLPPPPVAPATTPKEAAEAVKAITPWQKASREVAVVTGGMGSVIALGKATGSAFMDNFFTFGLAGLVGYRVVWGVAPALHSPLMSVTNAISGLVGVAGMFIMGGGYLPHTLPQALGAAAVLLAAVNVAGGFILTKRMLDMFKRPTDPPEYSWLYGIPAVVFTGGFLAAASTGMAGLVQAGYLTSSILCIGSLSGLGSQLTARQGNALGVLGVSSGVLASLGAVGFSPEVIAQFGGVAAIGGILGTIIGRRVTATELPQTVALLHSIVGLSAVLTSIGSVIQDPSHLTTLHAVTAYLGVVIGGITFTGSIVAFLKLAARMSSRPIKLPGKHATNIALLGANAATMAGFLASIPTSTPKIAASFLGVSTLLSFLKGYTSTAAIGGADMRLSYSFHMEWRLIPLISGFALVAEGFMLDNPLLVSVGSLIGVSGSILSYIMCVAMNRSLTNVLFGGISSANTMETQKIEGTITQTNVDDVVDALANSDSVILVVGYGMAVAKAQYAISEITSMLRAKGIQVRFAIHPVAGRMPGQCNVLLAEAAVPYDNPFLAVVLEMEEINDDFKDTDLTLVIGANDTVNPIALEPGSPIAGMPVLHAWKSKQVVVMKRGLASGYADVPNPMFYMPGTKMLFGDAKDSCEAIKRGLEARLKN

SEQ ID NO: 14403 - protein, 789 aa, Coprinopsis cinerea okayama7#130
MKFYIDNLPIIFPYDRIYPEQYAYMCDLKRTLDATGHCVLEMPSGTGKTVSLLSLIVSYQQFFPTRRKLVYCSRTVPEIEKALTELKRLMKYRIDYAETEEEKEKERNFMGLGLTSRKNLCINPDVAREKKGTVVDARCRDLTNTAVCEKNRENPGSVPVCDWHENLGKMEPGTLIPQGIWTLEGVLEYARQKVICPYFAVRRMMGFADIVIYSYHYLLDPKVAEQVSKDISKDAIVVFDEAHNIDNVCIESLSIDLTRPMLDSAARSVTKLSEKIDEIKTTDAAKLQNEYAKLVEGLQEAEESDTDGIMGNPVLPDDLLHEAIPGNIRKAEHFVAFLKRFVEYLKTRMRVTHVVAETPLSFLQHLKDITYIERRPLRFCAERLQSLVRTLELNRLDEYSSLQKVASFATLVATYEKGFLLILEPYETDTSTVANPIFHLTCLDPSLAIKPVFERFSSVVITSGTISPLDMYPKMLQFTPVVQETYPMTLTRNAFLPLVITRGSDQVAISSRFEVRNDPAVVRNFGSILVEYSKIVPDGVVAFFPSYLYMESIVAAWNDMGILNEVWKHKLIFVETPDANETSIALENYRRACDNGRGAVLLSVARGKVSEGIDFDHNYGRAVIMFGVPYQYTESRILKARLEYLRDAYRIRESEFLGFDAMRTAAQCVGRVLRGKTDWGLMIFADKRFARSDKRSKLPRWINQCITETASNLSTDMALTLSKLFMRTISQNPNENQTGVSLWTLEDVEKAQAKQKALELEAQQRTVDDDDEYGDGGLSDSALMEMDLN

SEQ ID NO: 14404 - protein, 575 aa, Coprinopsis cinerea okayama7#130
MCGIFAAHGLEKPSQDRARCIALAKRLRHRGPDWSGCYVGQQSVLVHERLAIVGVESGAQPLVSEDGKQILAVNGEIYNHVALREHVGRDIKFKTNSDCEVVLPLYKKYGTELCGMLDGMFSFVLLDESVTPSRIIAARDPIGITTLYQGWSSQRPGAVFFASELKALVDDCDEIISFPPGHVYDSADKTTTRYYKPSWWNGDLDGPEATIPTTKADLTLIRETLEAAVRKRLMSEVPYGVLLSGGLDSSLIAAVAARETEKVAKAQYELRQRKLQEASSGPPSPSGSGLVTEEATLAAWPQLHSFSIGLENSPDLLAARKAAHFLGTVHHEYVFTVQEGLDALPEVIYHLETYDVTTVRASTPMYLLSRKIKAMGVKMVLSGEGSDEIFGGYLYFHAAPDARSTMAWGLEARVPFLDKAFLDVAMNVDPKEKMFSKGSTQEVDEDGCPRMEKYILRKAFDCSPDGKPYLPRSILWRQKEQFSDGVGYSWIDGMKQHAEDTITDEQFAKGAERWPEDTPATKEAYLIRQIFDDLFPSPAAAKTAVRWIPRGDWGCSSDPSGRSVSIHNAAYSVDD

SEQ ID NO: 14405 - protein, 334 aa, Coprinopsis cinerea okayama7#130
MRPTLRCLQGLAYHARRAESTSFIGLGRMGYEMANNLFSKKYAASKDAHFVVCDAIPDTAQAFRNTFVQKYPGAHITVVNDPEQAALASGTIITMLPSSPQVQEVYSKIIPALSSLPKELARHTLCIDSTTLDVDVARQVASEVNSQGAKMVDAPVSGGVTGAAAGTLSFLVGGPEESFKLAQPILTHMGQRIIHCGQSGAGLGAKICNNLVLGVEQIVIAEAMLLGQKLGLDPAVLASVINSSTGSCWSCSVNNPVPSALPGKAPPCERDYEGGFATALMLKDMRLATDIAEKNQSALPLGVAARELYQKAIEEKPELAKKDFSSVFKFLEQS

SEQ ID NO: 14406 - protein, 734 aa, Coprinopsis cinerea okayama7#130
MASAFKRWSKRVVKHPEETVPIISSTAWAQGLFDHPTNKFGAYVLSLFPIVQWLPRYNFGWLSGDLIAGITVGMVVIPQGMSYAQFFATSKDVSIGPVAVMSILVSQIINHVESQHPGVWTGPDIAAVLAVITGFITLGMGLLRIGWLVEFIPAPAVSGFMTGSAFTIATTQIPGLMGITGFSIGRGLTDATSTRDPAYQVIINTLKNLGGTKLDAAWGITGLVSLYAIRYFCIWGTKRYPARARWFFFMSVMRNAFVIIVLTLASFLYNRKRLDPETGKYPIRILLTVPSGFKHVRPPPISTSLLSALGPKIPVATIILLLEHIAIAKSFGRLNGYKINPAQELIAIGVTNTVGSVFGAYPATGSFSRSALKSKCGVRTPAAGVVTAVVVIVALYGLTDAFFWIPMAGLSAVIIHAVADLMASPDQVYSYWRISPLEFLIWAAAVLITVFSSIENGIYTSVVASLVLLLVRLAHPRDSFLGKVTIHQGENGKGESRDVYLPLTKNGITNPHVKVTPPAEGVIIYRFEESYLYPNSSIPNSALVDEVKTKYRRGQDMTNVKPSDRPWNDYGKRRSGAEDQALNLQKPVLHAIVLDFSSVSHIDTTSVQALIDARREIEKWADHPVEFHFAPILSPWIHRALVAGGFGIGNSHSSIPFDLAAVVPYRDGTSFDEVTKGPPSDIESGGDTKEPASPKESESVLEPVVPTNTPFFHIDLASAVKAAESGVERVHDKN

SEQ ID NO: 14407 - protein, 1104 aa, Coprinopsis cinerea okayama7#130
MAIHDTKARPAHPRRTIPKFGPYLLLQTLGEGEFGKVKLGLHCQWGEEVAVKLIRRGNVDSSVRMSKVEREIEVLRTLKHPNIVRLYDVIETDKYIGIILEYASGGELFDHILAHRHLRERDAAKLFSQLISGVWYIHQKKIVHRDLKLENLLLDRHRNVIITDFGFANRFEHRSDDLMQTSCGSPCYAAPELVISEGLYVGSAVDIWSCGVILYAMLAGYLPFDDDPANPDGDNINLLYRYIVNTPLSFPDFVSAEARDLLSLMLVPDPTRRANLDTVMRHPWLSAYHGTPRTDGVPNAFGKSVADLEKAAMEQHQQKRIAYQKQMKANAVLNNTSAPSPRSHSHRPEPTSAAPTSGRSRSVQPEFIYDSSVDQSISAPVPSANANATPKHNGTTPKAFDSPAALGLADDDPFAPPPGTKVNSGVATATSPSKQRPSEDSARTPAAGLSPTDNKTPSKGHRSSTSGGGRDIRHTIQVEYDEPKSAKRSDDKRRDRSGSQGQPSQASAQPNGVLPNVQNGQPATRERRPSHGGATKPLPPQPVAPSAYKPPPTPATPKGSSHQQPSATPVKAASGGDVPTVNVSSPPQTPSFHQLSHPKDKDKDASSQNSASSKRGHKKGKSSIDKIGLGKIFGSGNSAPAPPVPPLNGSEHNLQSPSAPSSRVPSESQGSASSLQAPQEPAPPKDGKKSRRNTLTVMVEPFIGTIRNRKGRPPTTPATAEPVPTAQTSVNATHPPVPSSATVPALPTAPHDADLTHPDIPVEDGPGLSASSNKAKKVMQWFRTKSKGRESVGIGLGGEAEHHDSLSTPITEQKYKKGFSASSSTVNQTSTPASAMSPQVVVTQAQQATTPKTPKVSAPGHPQRAASSATETPSFVARFRNSVTVGGGSHSHSSKHSNQPGGQLRIHQGAVDQTTITTRPPPEVMAKVKAVLEGMGVEIQLESEYKYRCIRHKKKKGATSAAGTAPNGAPANLAAVQVTGSAASNGVDRRGLPLPSPSAFSATGGMLRGLLMRRQSSQVSSSSQPSLAFDDETSVVVSEPLLMSDITYGDPSQDAGDEVRFSVELTRIDRLNDTYSLDIRRLKGNLRSYKYLYDTIRQRADLQR

SEQ ID NO: 14408 - protein, 160 aa, Coprinopsis cinerea okayama7#130
MSDDEQHQHDFQQAGAGASLTYPMQCSALRKNGHVVIKGRPCKIVDMSTSKTGKHGHAKVHLVAIDIFTGKKLEDISPSTHNMDVPNVSRTEYQLVNIDDGFLNLMTNDGTPKDDVRVPEGDIGKEIQDAFDEGKDLLVTIVSAMGEEQAISWKEAPKGS

SEQ ID NO: 14409 - protein, 629 aa, Coprinopsis cinerea okayama7#130
MAPVRSRSTSRNVLSSLSVFFFAFLALLFVTTPAHAEEAHPEYGTVIGIDLGTTYSCVGVTRGGVVEIIANDQGHRITPSWVSFTDEERLVGDSAKNAFHSNPENTVFDAKRLIGRKLQDDEVQRDVKHWPFKVREKEGKPVISVKHKGETRDFTPEEISAMILGKMKETAEAYLGNKVTHAVVTVPAYFNDAQRQATKDAGTIAGLQVLRIINEPTAAAIAYGLNKKGGESQIIVYDLGGGTFDVSLLSIDDGVFEVLATAGDTHLGGEDFDNRIIEYLTKQYKKKTGTDVSRNLRALGKLKREVEKAKRTLSSQQSVRIEIESFEDGNDFSETLTRAKFEELNMDLFRKTLKPVEQVLKDANVKKEDVDEIVLGGILSGAEGTSEVVLVDVCPLTLGIETTGGVMTKLIPRNTVIPTRKSQIFSTAADNQPTVLIQVFEGERTLTKDNNLLGKFELSGIPPAPRGVPQIEVTFEIDANGIMKVSAADKGTGKSESITITNEKGRLSQEEIDRMVADAEKFAAEDEAQRKRIEALNALSSFVYGLKSQLGDKEGMGGKLADDDKKTVTEIIKDTTDWIDEHGQSASTEDLEEKLAEVQGLINPITSKLYSQGSSDSDDDNLGRDHDEL

SEQ ID NO: 14410 - protein, 451 aa, Coprinopsis cinerea okayama7#130
MAAMSSTDSSPSALKLSTQDLYRLLEPITVPSHSPRARFTNWGLSFTCKPLAVFEPENDYQCELILELARREGKVLRAVGVGHSPSDLACTNGFMLRATKMNHILEVNVEKRYVIAQAGITLNDLHRELAKNNLAMSNVGSISEQTLAGVITTGTHGSGIEYKVLSDSVLALTLLVADGSRVTCSRNENADLFIATLCGLGSTGVILSIQFEVEPAYRLKEEQESVPFDEFVSNMDTLVHSAEHARFWWFPTSDTVRCSYSNRTSEPRNPAGSWLWHSFLGHHVVQLLLFVARFFTFLNPLIANFACWLACLRELRAWLEQEHADPHGIRPHFPIEIRVSASDDIWLSPSNDITLFSSLKCDPLRPYGFNVPYRRLFEGYEAIVAKYEGRPHWAKAHKLRPDTLRKMYPRFDDFVRIIESVDPQGIFRNDYVQRHIMGRPIDTRVYKQRRD

SEQ ID NO: 14411 - protein, 580 aa, Coprinopsis cinerea okayama7#130
MMKNMTLKEALLPQPPSFMKKRNYELKDTLGEGTFGKVIRATWHVPVDQVDIAEHGAAAQLDSQPTTPRGSRPATPVTTSHVDSGIRKEVALKVIPKKKVKGNEDSVWGEMEVLKGLDHPNIVKFYEWFESRSKYYLSFELAVGGELFQRILQRGKFTEKDAVAVVRSILSGVNYLHEHDIVHRDLKPENILYRTKKLDSDIVIADFGIAKHLHSPDEQLHSLAGSLGYVAPEVLSKDGHGKAVDIWATGIITYVLLCGYSPFRSNDAKTLLKETTEGKVEFHERYWKNVSEEAKAFIKSLLNPNPAERPTAARALADPWLTTHAPSTAHDLSNGLRDNFNPRARWKSAIASARALNRFGSFAAAAAAAAKERELSSSDSHISAETSSEGWRTPTREESEDENEGWRNSDTLPSSSSMKSAPSENRLGDSLRRAGGELSKAPPAADDGHSSINVRVFAPEPEGQPPASTSNATATPPPPVGSSEPLKIPKSNSRSSSRSNSPSRGSSWRDIFAPKLKEYIYTEEPEGNPENRRSVDMRIPGSFDMYGPHASNSANGTTSNGQQPQQQSWIDMLRRLHLQQ

SEQ ID NO: 14412 - protein, 775 aa, Coprinopsis cinerea okayama7#130
MSDITLKEEGNVLDINLRDIEKTLENESPADTHSFTTTLSGRRSDDYSVFDPNYDSDLDNLEDDSPYPEVRSAVANTDDPDMPASTLRAWIMGVLWAIIIPGMNQFFYFRYPSVLIGGLVAQLLIFPVGRAWVRLLPCVKIFGYELNPGPFTIKEHVLVTIMATVGAQSAYATDIIAVQKVFYGQEWSFAYKWLLVMSTQLIGFSIGGIARRFLVTPPSMIWPNTLVSCALFNTLHSQQYAGIGQHDGISRERYFLYVFVGAALWCLLPGYLFKALSVFTWVCWAAPDNVKINQIFGYHSGLGFSLLTFDWSQIAYIGSPLATPWWAEANVMIGFFIFYWILTPILYYTNVWHSEFLPISSIHAFDNTGKRYNHTRIIDQNATLDVEAYENYSPLYLSTTFVMSYGLSFLSITSTITHALIYFWKPIRLQMRRSMREQPDVHARLMSQYPQVPDWYYACIFVWPTGMTIWALVIALLIALFYVIPIGMIQAITNRQVGLNVITELIVGFMLPGRPNAMMIFKTYGYVTMSQAMQFTADFKLGHYMKVPPRPMFWCQIIATVIAGTVQLGVQAWMFNNIPDICTSGQKDSFVCASTNVFGTASVIWGLIGPAEHFGKGQIYHVLTYFFLIGAACPVLLWLVTKRYPRSILNYLNFPLIFTGVGQIPPATAVNYVPWAIVGFIFQYVIRRKHFSYWTKYNYVLSAALDAGTAIGLILIYFCLQYPMGGNIGKNTIQTWWGNRVYKETLDWKSAPLRQLSQGDTFGRPLNSVTRLFGL

SEQ ID NO: 14413 - protein, 1083 aa, Coprinopsis cinerea okayama7#130
MGQFVSTPGAVGRHGGKIPGAYDFEKEDRRVFEHARHINIQGGVFNNNRYHVHINSHTSTVSPERRRMYISYQISRIVRPDYFKVELVKELGRWLASSVNFRTIHNDVRKRRTAGTGRWLLDTRLYREWKKSRGGVIWWMGIPGAGKTVLASTIIDDLLPLEEDYERTCVLFVYSRYTEPLSVTDIIKSLIKQCIERNHDLAGVVAPTYSKHKLEGTEPSVDELVRLLRTLESYFDRVYYVIDGVDEAHLDVRFDLIQVINKLKGNIMLTSRPLDDLGGDLSHAVFCTLTAQDSDIELHMEEKLGRFKQLGRVLDQNDCRKEILEQIIEKAEGMFLHAALQLESIQHCRTLQSVKTKLAEFPIGIQGVYAASLQRIQDQDPESRELAMQILFWLAFARGPLSMQDLRYALATDPETGAFSPERMPDEASVLSVCCGLVEHHTSNIVRLIHYTAKDALVPLLLEDYPQPHILITQVLIQRLVSGGLLQADLKELEELHDALEEQPLLQYAHEQIGAHIGECHSDSELTALVKDFLLRCNRFPVDVLDSLDLLDPPHVAAHYGLWPYFEFLADNGWNLNSKTKYLEQTPLHLAALSGDEMAVQHLLQLNIDPNIITKQGHSALFCATASGHQGVALQLLQIPGIEVNAASSPQGLTVLMLAAAQGHADIVSLLLLIPGIEVNAASSPEGMTALISAAVHGHVDVVSLLLQFPGIEVNAVNVHNGVTALMLAAMEGHADIVSLLLQFPGIEVNAADSPHGATALIAAVNKGHTDIVSLLLQFPGIEVNAASSRETEGVTALILAASKGHADIVSLLLQFPGIEVNTASSPHGITALMAAAVQGYVDVVSQLLQFPGIEVNAVTVDDGVTALMLAASEGSVDVVSLLLQFPGIEVNAVSSVEYGVTALMVAAMEGHADVISRLLHFPGIDVSSAGSTLGATALLWAAKNGHVDAVSRLLHHPGIDPHHRCNHHLTALALASRFGHYDVVRLLLECDGTDVNSADRDGNSPLILASDEGNQLVVELLLQSQGIDLDLKNNKGQTALSAAQEKGHEEIVAKLIEFQRKSGFGREPGAAADEAGVQTVEE

SEQ ID NO: 14414 - protein, 1529 aa, Coprinopsis cinerea okayama7#130
MGQFFETIPPWLIPWIESQKIFWVATAPLDKEGHVNVSPKGCFGRTLGVVLEGDDPLAVEGSDNEGGGGNRGQGEEDWSKLEGVSGGKFVGETSAKRHSRAVWYEDLTGSGVETIAHLRENGRITLMLTAFEGPPRVCRLFGVGKVFEFGTPEYDRLLPPQKRQPGSRAVIWIDVHRVGTSCGYSIPFFEFKAPRVRLHKFALKKEQEDVDYARACTNGNAGEDGAPGGGPDTINPNADAGATTTNGTEIGMTDKGLLAYWKTRNATSHDGLPGLDVAFTVHPGRMGDWQNDGTLEGAKWGGLVDDESVKRDVKGDDGDDFENESRSMFENARNVNIHGGVFHQGDVHVQINNYTSTNSPESRLALVAKLSRWLASSVNFRTIHSDVRKRRTAGTGRWLLDTRLYREWKKSRSGVIWWMGKPGAGKTVLASTIIDDLLPLEDDSERTCVLFVYSRYTEPLAVTDIVKSLIKQCIERNHDLARVVEPVYEKHQLEGTEPSIDELVDLLQMLESYFNRVYYVIDGVDEAHLDVRFDLIEVINKLQGNIMLTSRPLDELGADLECAVFCELTAQDSDIQLHMEEKLQRYKQLGRVLDQSDCREEILHDIIEKAEGMFLHASLQLDAIQHCHSYESIRQKLAAFPTGITGMYAASLRRIQDQDPESRELATRILLWLTFARGPLIMRDLRYALATDPETGEFHPERMPPEESILSVCCGLVEHHTSNIVRLIHYTAQDALIPLLLEDHPQPHIPITKALIQRVLSSGILQAGFQELGQLHDAWEDEPLLRYAQEELGAHIEECSAEITTVVDDFLLRCSGFPMDIGGLFDVCQPPHVAAHYGLGSYFKSLADNGCNLDAQTQFLDHTALHLVAESGNEQAVEQLIQLNVDPNVAGIGGWTPLMRAVYDGHRAVVFQILQIPGLEVDAADSQGRTALMWAARQGHHDIISRFFQIPGINVHTADYSGSTALMLAAEQGSVDVASQLLQVPGIEVNAANDQGWTALMVAAYHGHANVVSQLAQIPGTEVNATDNEGWTALMLAVFYGHGDVVSRLLQVPAIEVNAADHTGGTALMKGAHKGHVDAVFQLLEMPGIDFNASDNQGWTALMLAVFHARDDIVSRLLKIPDIEVNAVDHAGATALMKGALQGHGDVVSQLLLIPGIEVNATSKQGWTALMSAAHGGHADVVSQLAQIPGIEVDAVDIDGCTALMLAAQQGRGDVVSRLAELSDINTANNQGWTALMWAVDRGRDDVVSRLLQIPGIAANASNKQGWTALMLAAYRGHNDVVSRLAQMPGVEINAANNEGWTALMVAARVGHNDAVSRLLQIPGIDVNATESKGGSALSIAALEGHSNVVAQLLQFPGIEVNATDNNGWTALLLAAHPGHDDVVFRLLQIPGIAVNARDSNGWTALMWSAYMGHVDVLSRLLLHPDIDPDARNHHHWTPLTLASQRGHHDIVRLLLECDGVDVNAADSIGNTSLIMASWSGHRLVVELLIQSPGIDLNLKNKRRLSALKAAQQMGHEEIVAKLIEFQQK

SEQ ID NO: 14415 - protein, 1285 aa, Coprinopsis cinerea okayama7#130
MPSYHGHRYSESVNQNRKAQLANAYNELGKELASSKIRVVGNYTLGKVIGEGAYGKVRLGTHRLTSTRVAIKQIPKAMSATLTREIHHHRQLHHPHITQMYEVIATESHIWIVTELCCGGELFDYLVEKGRLSEEETKIIFGQLCLAVAYLHETGIVHRDLKLENVLLDERCRVKLGDFGFTREYERGSLMETFCGTTGYAAPEMLQGKKYQGPEVDVWSLGVILYCLLTGTLPFDDDNEDVMRQMIIKGEFEDPAWLSLESRDLIKNILVKDPMKRFTIPQILAHPWFTTKDLTYEPESPLSVDTSLLTIPQPDEENPDELTIDTNFINGASTSPPRTPDNDPDGDPFNSTPNSITHRASSSTLRREDDAVESKSLKLRPISWSNSSGSKIPPPSKIRTPARTKRRSVSSVLSLSVDNAKSGEGDAEPTPLTPLPPPTSHSLDFASLLTTPTPIIFSTPLERELLNSLSALGMDTAQIVHSVLSDACDSAGAIWWMLKKKAEKRALEEPTDVVSPTTATEPHGRTNGAESELKSSRKVRKVQAGVQTESLVPSPTYLSKPAPQLAFVPPTPTFAKPSTPPRAVSPTRSPMLSPSSSTTHELPRSHPSTPGSSMKESKGRKNRSGSVSIMQRATTALEAAGLVRKKSTEGVREQREKSKDKDNDNEKRNTSGEESRSSHSHDPRGSKLTKSPPLKAQRDYNVPATPPPSETHDSTQIGSPWVLADAKNGAGPSHAPLRGEMPHSHSAPNLDTATIKAPTQHRNKANILTSLRLWFNEDRKGKRKDSTDSNPRVPSTPQQTYTRTAGGGGTAKRRGSNASAKVMRNSTGHRAKRPSMSSRRSSSVNSRRSSITSMQIPVLDSPQQLSNIRAMGSHTPNSERGDHSSRPSSIHSISSRQKPRHRKSPSASSSGSLHLRTASPMQKYHRRAGSGSSTRVIRQSLARPPHARSNSATSSLYSPPSSRPTSFYEQSETETGNVIGNTSSSSSAPRNSSPYRSRKYSDSDSIGGSRPPTSFLASKRSNPFSSPALGGGTLSKSSWKKSWGIEPPGWQNRTTHLPVEVLVISSSNEPATLRDVFSGRHSFSTTTGAGDDSDWVDEDDDIPAFAGGLGQMGASISSSSSSSAPINPEPIVTLSPAPRHRNTKRNGGGKQSMVVVVSTASNQTWTVTTTAIAIATKPLNCALLPHNLHSNLSINSTMSEPYDPYLPRAGSSSGNPGSTGGGAGNAKTAAIQAQIDDTVGIMRENITKVAERGERLDSLQDKTDNLAVSAQGFRRGANRVRKNMW

SEQ ID NO: 14416 - protein, 1488 aa, Coprinopsis cinerea okayama7#130
MGQLLSTSVTSGQGGWTMPGTYDFENEDHSMFKHARHVNIDGGIFITGDVIVQIDEYKSSNSLEKRRELVAQLRHWLADNVNFRAIHTDVRRRRTSGTGQWLLESRLYREWKKSKGGVIWWMGMPGAGKTVMASTIIDDLLPLENDSERTCVLFVYSRYTEPLAVTDILKALIKQCIERNHDLAALVKPVYDKHKLEETEPSADELVELLRKLESYFGRVYYVIDGVDEAHLDVRFDLIQVINNLQGNIMLTSRPLDDLGKDLNYAVFCKLAAQNDDLKLHMEEKLRRHKHLHRVLSLNNSQEEVLHQIIEKAEGMFLHASLQLDAIQHCRSLECVKKKLAEFPTGLHGVYAATMQRIEEQDPESRDLAKWVLLWLTYARGPLSMQDLRYALATRDTGAYEHERMPDEASVISVCCGLVEEHWASNTIRLIRKLLLSTVQTHLLTNILVPDYTAIDAIAPLLLKDFPHPHVPIAKTLFQRITSTATVPTYAILMPFKWDEQPLLFYAHKHLGVHVHQCPQSEITDAIDHFLSSFTHIPFRWGWNRDLDWLGPPHVAAYYGFWPHFQALRERGWDLNLKTTKKRNTPLHFAAILGERRGVEALLQCCVDINVKCADGWTPLMHGAGNGHKDVVELLLVPGVAVNTIGAGGTALELASLKGHEGVVDRLLQFPGILVDATGSGYERIAHDPGSVGDIYVKYRAEASRILAARAGLKANFPQAPKVDTEESQGQTALMAASSRGHVGVVNRLLQVPGISDYASCALLLALDGGHEGAVGRLLQVPGIDVNCTTRDGITALTIASIIGNERNVEMLLQCQGINVNARSPDGSTALMLASRFGREGVVSRLLQVPGVDVNAAQSEGWTALMLASYHGHEDIVSRLLRVPTIEVNSTKNDELGLPKPESKPKINRYRYPARFAPKLNGWTPLILASERGHEGVVSAILQHPRVKVNATRKDGWTALMVASDSGHSGIVSRLLQAPGVDFNARNTEDGSTALMLALQNNRCGVVIDRLLQVPELDVNAARNDGWTALMIASKRGHWNVVVKLLQVPGIDVNAVSKAAGITALDLACIEDRTDIVCALLEFPGIAVNAPDHGGWTALMLASLHGHDHTVAKLLQFPGIDVNAVQQDGWTALMAASINGHEGVVTALLRAPGIQVDIACTGGWTALMMASNSGYTGVVDRLLQIPGINVGAANSAGLNALMAASINGFESVVSRLLEDPGLDVNAAKNDGFTALMLASNNGHEKTVARLIQVPGIQVNNAEGGWGPLMLAASHGHADIVARLLNFPGIQVHPSHLNGCQWSALMLASVNGHEDTVARLLQFPGMQVNATNDGWTALMLASWHGHEGIVARLLQDPAIEVNMACQSGQTALMLAARNGHIGALKQLLLHPKLDPHLRDRHNFTALHWAAESGHHDTVRELVECDGVDVNAVDDDGETALIMASRGGHTLVVEALLKVNGLDVDAKANNGFTAAAWLSWNRTGLGGKWW

SEQ ID NO: 14417 - protein, 595 aa, Coprinopsis cinerea okayama7#130
MDPKYEKDSKEVESSSVSSQPQARRVEFYDPSKESKWTRIGLTLESFKRAPGTTGGQVVNGANNVEDLEKIMADAPMLQQKMKPRHLQMIAVGGSIGTGLFVGSGAALYDGGPAALLICWLLIGIMLINVTQALGEMAILYPVSGGFYTLAIRFLDPSFAFAMGWNYVFQWAVVLPLEITVAARTIQYWPETLKVPLAVWITIFWAVIVIFAVFGTIGFAEEEFWSSCLKLLVVVVFVIIGIVCICGGGPSDGEYSSYVGGKHWSDPGGFANGFKGVCAVFVTAAFSFAGTELVGLAASETPNPRKTMPTAVKGTFWRITVIYITSLTIIGLLIPYNEERLVTGEGAAASPFVIALDNAKIPGFNHLVNVTICISVLSIGLSCVYAGSRTLTALAETGYAPKIFTYVDKSSRPLWSLIAILVWAPLAYINVRDVGDAVFRWLLALSGLSTLFTWMAICLCHIRFRRAWKVQGHSTDELPYRALGGVYGSWFGVILVILVLIAQFYVALFPLNYDPDRTPGDVAEGFFASYLALPVMIMFYIIGYAWKRTLPQRAHEINLDSGRKSWLTAEEMNAWRAERRAAPLHIRIFRALFTH

SEQ ID NO: 14418 - protein, 421 aa, Coprinopsis cinerea okayama7#130
MTTASINSVTRQIAALEISNKKQGGGISSSSSSSSSFRPGHTKQPSGTNVAKLLTKFSAPNPYTNSSKPTASSSLRNLNQNQASGTSSSSSSSSSSQQSSKSSSRSQTTQPLDIGSYDGGLETENEKRGEKVYGEAAQDLALDSSVNGKNPTREWTLHDFEMGRPLGKGKFGRVYMVRTKCEPRYILALKTLYKSEIVQSRVEKQIRREIEIQQNLRHPNVLRLYGYFHDEKRIFLMLEFAGKGELYKQLSKYGHFSERRSARYIYQMADALIYLHSKHVIHRDIKPENLLLGINGELKIGDFGWSVHAPGNRRMTLCGTLDYLPPEMVEGKEHSERVDYWALGVLTYEFLVGAPPFEDKNSVNNTYRRIARVDLKFPSYLSPEVKDLIAKLLQHDPSKRLALTEVIRHPWLIKHRAIPTS

SEQ ID NO: 14419 - protein, 607 aa, Coprinopsis cinerea okayama7#130
MPGTGSNIESLQAEISRLRMEMQALHTKQGADTVRIGDYLLTRLAQLGVRHMFGVPGDFNLGFLDLVEDHRLMEWVGNCNELNAAYAADGYARAKSTIGVVLTTFGVGELSATNGIAGAFSEMVPVLHIVGVPSTTQQKKRPLLHHTLGDGRFDAFSKAAGQFTCYQTMINDPNTAASEIDRALSECITKNRPVYLMLPTDMVSFEITSNRLHTPLTRRETLNESQVEEFVLDLIELRVKEAEADVAVLVDACVMRYGIRKEVMEFLKETGFPVFAAPMGKTAVDENWKRYGGIYVGSVTPPEVKEQVEKAKLILSIGSLQTDFNSGNFTYNIPTRRLIELHSSYTQVQYAVFPNIGFKELLPKLKDRLQQFYPIANKIPVTPFANRLPQEATQSITQAYFWPRMGHFFKSGDIIVTETGTANFGIMDVPLPPKSHLLSQIFWGSIGWSVGAALGAAVAAREMKSAGRVILFVGDGSLQLTVQELSPMIRLGLKPIIFVLNNHGYVIERMIHGKHRKYNDIADWKWSQLLDVLGDRQTETASHTLTNKQDLDRLLNEDSFMNPDKITLIEVLMDRLDAPRILKLQTELSSKQNIYAPAKLGTVNSPV

SEQ ID NO: 14420 - protein, 652 aa, Coprinopsis cinerea okayama7#130
MSNDDNAKAGRRGWMGMISRPTSANSTRPVAMARTGSSSSTQNGALSKLGLGTRSNQSSVVNLATPKEGEELDISNPSSKASTPAPEAPAAVSSSRPSLSRPSSIIRNLSFDSPPNSVPGTPKRRLSNNMLTSPSQDLDNQASQIIINALERTSSQQTHKSNADSQRNLFGKSLSNMLSLSRTNTKEDDRGRSLFSTRRSSGKSASQAPPEKQAASRSQSRARSSSPFSLRKWRSRGNDSSPPPQPVPLGHSDVEYSEAESTVQSRSAFMDGEDTDNVDDDTSDGDSDDDSLSDEDFFDPVTERNTEQNAIIAPIAAEPLPEVEDPDPVGEGVNVVVPLEPYFPTTLNSTGARGKRNPRRRKTMRTHEPLPLNTSRPVFQRDRCTITITQGDPEAKLTELDRKRRRYVVASDLSDESRYAVEWGIGTVLRDGDEMLLVNVMENEAKVDPEVPNAADRSTKLRNQQERQGMAYILARQVTGLLQRTRLNVTIACQAWHAKNARHMLLDIVDHVEPTMLIVGSRGLSHLNGILLGSTSHYLIEKCSVPVMVARRRLKRPPKKAAHLSTSRRRVKLAEAGIDRIAGKVEEDVHAMRDELQKEEKRRDGGPGSVDRMPDFSSAAEFNGNDDDDDAAEGDNEDDEEPPTIEVRGPKQ

SEQ ID NO: 14421 - protein, 1320 aa, Coprinopsis cinerea okayama7#130
MSRPSSADDSEKTRKGSKGWFTKKESTPPQTPELKEKPDDDAADSKTEVKPAEPEIPPITFFQLFRFSTKFEIFIDIIGLIASAAAGAAQPLMSLLFGNLTQEFVIFGNVALEAQQGNQTAIAGLPAAAESFKRAAANNASYLVYIGIGMFVCTYTYMYIWVYTGEVNARRIREKYLQAILRQDIAFFDNVGAGEVATRIQTDTHLVQQGISEKVALVVNFLGAFFCGFILAYARSWRLALAMSAMLPCIAIAGGVMNKFVSKYMQLSLKHVANGGTMAEEVISTIRTAQAFGTQKILSDLYNVHVDQSLNVDMKAAVWHGGGLAVFFFVIYSGYALAFWFGTKLIIAGHADAAKVINVIFAILIGSFSLAMLAPEMQAITHGIGAAAKLYHTIDRVPDIDSANPGGLKPESVKGEITLENVNFSYPSRPSVQVTKDLTLTFKAGKTAALVGASGSGKSTIVSLVERFYDPTSGVVKLDGIDLKDLNLKWLRSQIGLVSQEPTLFATTIKENVAHGLINTPHEHKSDEEKMALIKEACIKANADGFISKLPNGYDTMVGERGFLLSGGQKQRIAIARAIVSDPSILLLDEATSALDTQSEGIVQDALDKAAAGRTTITIAHRLSTIKDADVIYVMGDGRVLESGTHNELLALDGAYARLVQAQKLRESSGPSEDAPEGSEPDGDETDMEKAAREEMPLGRRNTGRSIASEIMEKRNQERAEKEKKDDHGLFYLFKRMGLLVRDQWKKYCFASLSAIIVGMVYPAYGIVFAKGIEGFSLTNDDDIMRAGERNGLWFFIIAIISTIAICGSNYLFSACAAALTARLRSLSFKAILRQDIEYFDKDENSTGSLTAKLSDNPQKVNGLAGVTLGAIVQAISTLITGAVLGLVFSWKIALVGIACIPVLVSPGYIRLRVVVLKDQANKKAHEESAQLACEAAGSIRTVAALTREDDCLRLYSESLEKPLRKSNRTSIWSQGLYSISQCTVFFVIALVFWFGSRQVASGQASTFQFFVGLMATTFGAMQAGNVFSFVPDVSSAKGAGSDIIKLLDSIPDIDAESEAGKKVNPENVKGHLRFENVHFRYPTRPGVRVLRDFSFEVQPGTYIALVGASGSGKSTVIQLIERFYDPLAGEIYLDGEKITDLNVQEYRKQIALVSQEPTLYAGTVRFNILLGAIKPESEVTQEEIEQACRDANILDFIKSLPQGFDTEVGGKGSQLSGGQKQRIAIARALLRNPKVLLLDEATSALDSNSEKVVQAALDQASRGRTTIAIAHRLSTIQNADCIYFVKEGRVSESGTHDQLIAKRGDYYEYVQLQALSTND

SEQ ID NO: 14422 - protein, 759 aa, Coprinopsis cinerea okayama7#130
MKSSLTSLKYSTSNQDRLSDVVESSDYEHKQQGLPEPNPYAPPASDTEPEDEPLEPSAIPLRSSLNPRQRKELNINAQAASLAQSGSNRPRRSASLSDALYPHDDYQLQVAAPPTHGHSRPGTSLGLNAESGPRRVYPEERERQELEAHKKLRREHEDDRQSPSPTHGHPQHQRLVANGHRRRDSDTLRGLAPPNSAGTVGSPTVMDMPNGRPSPTGHRFPHGRSSPAATVRGRQSPQTVKGRVSPPATKGRVSPANAGNRLGVSRDAGKHRRSPTAPEPPTTSGQIGGHEQPPGSKTWGGSEREDEFDPASSGEKDREKERERQLEAQRERRERREQQQQQQPPPQPPPQQLQPYAQVPQAIAQPAAPAPQPPIPAPNQLNRHIVVNKKAYARIDIIGKGGSSRVFRVLNHANELYAIKRVSLDKTDAETMSGYMNEIALLKRLEGNSRIIRLIDSEVKPGPGGSKGHLLLVMECGEIDLAKLLQEQMKEPLNMVWVSYYWQQMLQAVHVIHEEKIVHSDLKPANFVLVKGQLKLIDFGIANAIANDTTNIQRDHQIGTVNYMSPEAIELPDGMRRLKVGRPSDVWSLGIILYQMVYGHPPFQHLSVYQKMKAIPDLSHVIEYPEYTVPSIPAKTSSNGTVEPPKRLEHLKRRVRADVIRGIKSCLCRNPKERATIPELLEQPWLGLTGNEPEPVRPRIEDMLGEKETLINPYYMAQLMQYCVKLAREDKPMDAETLQKDAERLVLELKSVQRQAQGS

SEQ ID NO: 14423 - protein, 463 aa, Coprinopsis cinerea okayama7#130
MSSDQPRRDLILAANAGSSSLKITLFTTLDPEVAKERGRSVEFVLNCSISSIMSPPVKAVFKSRSSFDDKANKKEQDPGLGQEGDGRDKVKDHETAFQWFLGCLKEVASIDKERIGWVCHRVVHGGDYHDPVVITEESYHDIEHLSDLAPLHNGAALSVIQACIKALPNAKSIAYFDTTFHRPIPPHIASYAIKQEVAEKRGLKKYGFHGLSYSYILRAVAKHLGKPPEELNLIALHLGSGASACAIKNGESLDTSMGLTPLSGLPGATRSGAIDPSLIFHYTNRAGRITHDPKSAAHVGVSLAEEILNKDSGWKAMTGTTDFATISSKAELSNPDPTISSRNPNRLAFDLFVDAILNCIGSYHLKLEGQVDALVFAGGIGERSVELREVVGRRVRCLGYQRLDGERNGSADGSVEVVQVSEEGSEISLGVEGEQRKKRILFEMANDCASDTSRWEKQHSSTG

SEQ ID NO: 14424 - protein, 1199 aa, Coprinopsis cinerea okayama7#130
MGLILNGSAAASPICIAYYCSGHGYGHATRVSAFARTILSLSTERRPIAVHIVSSAPEHVFADSIGQGARYRHAEIDPVIVQPLAYQVDRRKSLAVLKSFLGKKQALLERETRWLHEVGVTVVLSDAAFLGCLAAKVAQIPSILVTNFSFDSVYSYLATSIVDSPDTNLHPDGFESLLDDEPIPLDHLEPLVKEMHSGYRCADLLVLLPGSIPIPSFFGYPSLPASTWVDCETKRFYPDIVNALVRKMENSDITPIPFPTSGYTIPRKVIPAPLLVRDPSPDWCTFEGRSRILTQIGIPAERQGFDTKVLVVSFGGQHFHQPSRSGSRADSRSSSREKLPGVVHSKEPGPSFPATTQQSQPSPPSLTPSNPPRLATESHIWVPGAPPAYKGVGLSPVTTPGSPPTRLVSVETAYFDSMNAVISDYEPRLLPDESWIAVVCGVSKEKWLMQGEDLPDRFYVAPKDIYMPDLTSIADVLLGKLGYGTVSECVDACTPCVYVSRPLFVEEHGLRLLLEREGVGVELARSSYEAGDWASAISEAFSRGKPMKERKQIRDCCDRANQTLRLAKDVIDWATDCSRNARVLRKHLVSKDARSKYDGKPKSIAGSELDVPQHGSDNGTSHPDSRRSSVGADDGKRMNREETDPFPIPYNAPGADVTHDIYKWHADQRRQAGRARAVSFHAPEPTPHPAFEHIHEPGGFRRNYLKLRANEQGAEEPPMLDNFIDFLTLFGHFAGEDLEEDEEEKDSDEEAAEAEAELQAAEAAGLGESTPLLRGASASRTRSRSRRRRGASVGPQGGTATVTQAVLMLLKSFIGTGVLFLGKAFFNGGILFSSITFVFIAGISLYSFLLLLDAKNAVPGSFGDIGGILYGPRMRYLILGSIVISQMGFVAAYTIFVAENLQAFVLGITDCLKLVPVQYFILAQLLIFVPLALIRDIAKLSTTALIADVFIFGGLAYIFGSEFKIIAERGIADVKLFNPRDFPLFIGTAVFSFEGIGLVIPISDSMREPHKFPMALTGVMAFLVVLFGGSGVLAYLTFGSEIQTVVLVNLDLRSRMVQTVQFFYAIAILLSVPLQLFPAVRILENGIFTRSGKADPQVKWHKNLFRFGMVVLCSLISWAGAADLDKFVAFVGSFACVPLCYVYPAMLHYKAVARTRRQKLADIAMIVFGLIAAAYTTIQTLKLMIAPSPPAAPVGTCEL

SEQ ID NO: 14425 - protein, 515 aa, Coprinopsis cinerea okayama7#130
MASNSTGDLIIVSNRLPVTINKDANGEYHFKMSSGGLVSALSGFKKSLNFTWIGWPGFFIPVKDREIVDRRLKEEYSCQAVYLDDDVADRHYNGFSNSILWPLFHYHPGEMNFDEENWLAYRQANLQFAEAVRPHVKPGTMVWVQDYHLMLLPMLLRNLIDGESASFASEEFSKITQGISAEANLAPTRIPDVKIGFFLHTPFPSSEIYRILPVRREILLGVLYCDLIGFHTYDYARHFLSSCTRILNLPTMPNGVEFGGRLAHVGTFPIGIEPSSFIDNLKKQSVQDRITQLEQRFRGVKVIVGVDRLDYIKGVPQKLHALELFLTQHPEWIGKVVLVQLAVPSRQDVEEYQNLRSTVNELVGRINGRFGTVEFMPIHFMHKSLTFDELCALYAVSDVCLVSSTRDGMNLVSYEYIACQQARQGAMILSEFAGAAQSLNGSIVVNPWDSQQVADAIHEAVTMDAATRAENHRKLFKYVNKYSASFWGSSFIREMSKITPYNPPAEVNGKSEEAS

SEQ ID NO: 14426 - protein, 571 aa, Coprinopsis cinerea okayama7#130
MSSTDEKRDYSDEKGVVSTVSSDSLPSYEDAAVTTGAPTEKVSPLGYHVDAISVIFLNISKMIGTGVFTTPGSILKGVGSVGLSFIFWVIGYFFAGAQLAVYLEYVAYFPHRSGADVAYLEKAYPRPRFLLPTVFAVQSVLLSFSSSNAIVFARYVLVSAGVTETTWNLRGLAVGVYTVIVLIGIASTKWSLRISNAIGVVKVVTLLFIAITGFVVLGGHTSVADPKANFRNAFEGTSSNGNGLATSLVKVNFAYSGFENAFNVVNEVKNPIKTMKRYAPISLTAVFVLYMFANVAYFAAVPKEEIRESKELTASLFFRAVFGNTSSVRALGALVAVSSFGNMLAVVIGSSRIIRECARQGVIPYPQFWASTRPFNTPLGPYLIKWLLTVIVILAPPPGDAFNFIVNLQSYPANVFSFLLTLGLWFVRKRRAAIGAPRGEFVAWNAILVFTMAVNVYLLALPWVPPEGGIYAGDVSFFYATYCIVGLAILGVSGAVYALVIIILPKYGNYTIRQLLERLPDGAQTNRLVKVPNDQLAEWDATHDEHGDVIDPKTGKPIYQEGQASQPPASY

SEQ ID NO: 14427 - protein, 353 aa, Coprinopsis cinerea okayama7#130
MANTKYALDGQSFHRFSETHSFTKPNDVRALKLMDRAARELMDLFPDIVLAFGESDEYSFLLKKSTTLFNRRQAKILSTLVSAFTGFYMFYWGEYFGGKSNGGEGKGGEEEGKEEGEEEVKMQYPASFDGRIVVYPSEKEVKDYFRWRQADTHINNLYNTVFWALVKSGKTTTEAHAVLKGTYSKDKHEILFTQFGINYNNIDARFRKGSILVREVVPEEEEIEHNQNDSTPGPSSSTPSHGPDQPSSSQSTDPPPPSQDPSLQPPTSTSTNAPTDATSTSNTPTPASTSTSTSTNTTTSMNTNTPSSTSPSTHPKSKKRPKKPKQPKTRVVLLHCDLIRDEFWDSRPGLLVD

SEQ ID NO: 14428 - protein, 310 aa, Coprinopsis cinerea okayama7#130
MFDPTARPAPSLTANQVDQLADAINLSEESRGCVKRLIEFVEKDGEANAKAYNRVLQSKPTSKLAAVLVLLYEERGRLRVLLTTRSKSLRTHAGQTALPGGRVDLEDRDWVDTALREAKEEVSLPSPTECGHVHILGVLHPFLSLHRLLVVPVVALLTDTSVLKNLRASEKEVACIFSHPLEAILDPAISAEERLVDVGSEDWPYETEFYNTSDSVVTMLGDTSYRMHRFRTSASPIKGLTSDILIHVAEVAYGKSTVYERYASDQIRSFVGIVDAVRAFEEKLAASAEVNGTSVAASSIPVGYTQNYAQ

SEQ ID NO: 14429 - protein, 241 aa, Coprinopsis cinerea okayama7#130
MATQNLYDVQSPEHFQQLLSADLNRVSVLNFWAPFADPCKQMNEIFKELAGKYPAALFLQIQAEDQADITDSFEIEAVPTFLLLRGHTLLKRISGADAPTLTQSVQKHATSPAYSPLSKTDQQPAKATDSSAPAQPEETQEQLEERCKKLMNQSKVVLFMKGDPQTPRCGFSRKIVALLQEQNVQFTTFDILTDEAVRQGLKTINNWPTYPQLIINGELVGGLDIVKEMVETGELAEVLAA

SEQ ID NO: 14430 - protein, 434 aa, Coprinopsis cinerea okayama7#130
MDRIMTRKGCYKVGDGGGSRPLRPSDHLAVTQDLDFCRGTSPYVLSQSNEVVIVSASRTPVGSFNGALKSFTAPQLGSIALKHALESKNIDPALVEEVYFGNVVQAGVGQSPARQVALGAGLRTSSDATTINKVCASGMKSIMLAAQSIKLGERSVVAAGGMESMSNAPFLLPRQNPAFGKFTTRDSLENDGLWDVYNNFAMGNCGEHAAEKHGLTRQSLDEHAIESYKRAARAWKEGAFDAEVVPVTVKGKKGDTIVREDEEFTRVIFDKVPSLRSAFKNGGVITAANSSPLSDGASALILMSADKAKELGLAPLAKVVSWADAGTEPIDFPEAPTVALPKALEKANLTVNDISLFELNEAFSVVVRIAEKVCNIDPAKINVNGGAVALGHAIGNSGSRIIVSLVHALKSGQYGAAAICNGGGAASALVVQKL

SEQ ID NO: 14431 - protein, 354 aa, Coprinopsis cinerea okayama7#130
MAYQYRNDLLAPFLALPQGDKVQAEYVWVDGDGGLRSKTTTVSKKVTDIGQLRIWDFDGSSTNQAPGNDSDVYLRPAAIFKDPFRGGDNILVLAETYNNDGTPNRTNFRHHAAKVMEQAKDEEPWFGLEQEYTLFDVDGTPFGWPKGGFPGPQGPYYCGAGTGKVFARDLIEAHYRACLYAGINISGINAEVMPSQWEFQVGPCEGISMGDHLWMARYLLVRIAEQWGVKVSFHPKPLQGDWNGAGCHTNFSTKSMREEGGIKAIEAAIERLGKRHDEHIAVYGDDNDMRLTGRHETGHIGVFSSGVANRGASIRIPRHVAAQGHGYLEDRRPASNIDPYRVTSIIVETVCLNN

SEQ ID NO: 14432 - protein, 395 aa, Coprinopsis cinerea okayama7#130
MKLVNRWFDKNGAVSNACLHNSALVLIGGHVTLRPEDNEDMWHLYNLISEGDAVRATALRRVQNVSSTGSTESHRVRTTLTIQVSRVEFSPASSGQDGSENSAGGSVPNASLHISGPVISENQYVRMGAFHTLDIEPNRDVRIEKSEGWDSVARARVEEAIVPGRGAEVAAVVCGEGTAAFCLLSQHMTVVTHRIAVSIPRKAATSGTSQHEKGLGKFYSTLYDSFIRHVPYANPDLKAIIIASPGWVRDAVADHLNAEASKRGDKPLQRALKEKLVKVHVTSPHVHSLVEVLKNPTVAAQLKEAKFSREGITLDKSSDPATRKKYVEVVEAVQAKGGEVVIFSSMHESGQQLNQLTGIAAILTFPLDIEVVEAEEREEAEARKKRELEQDGGDA

SEQ ID NO: 14433 - protein, 406 aa, Coprinopsis cinerea okayama7#130
MRDRLKSAPSQPDPSKIPFRRTYSSNSIKVGRVEVGPSSFLKVKMLGKGDVGRVYLVREKKTNKLYAMKVLSKKEMIERKKIKRALTEQEILATANHPFIVTLYHSFQSEGYLYFCMEYCMGGEFFRALQTRPGKCLPEDGSRFYAAEVVAALEYLHLMGFIYRDLKPENILLHQSGHIMLSDFDLAKQSAEYGGLPSMVHSEQNGVPLVDTMSCTANFRTNSFVGTEAIPEYIAPEVIAAQGHTAAVDWWTLGILIYEMIYATTPFKGQERNETFNNIRHQPVTFRDSPKISSAGKDCMTRLLDKNERTRLGSRSGASEVKQHKWFSKINWGLLRNTRPPIVPSSSNGLDAAHFRHMRESTSLHLDLEDQSKAQPSADLLADDGQPADVLFKAFNSITLHHDGDT

SEQ ID NO: 14434 - protein, 441 aa, Coprinopsis cinerea okayama7#130
MSNSQGFRQLQVAIVGGGIGGLSAGIALRRAGHLVSIFERRGFDVEVGASISCAANGSVHLEEWGIDIKEMSPVSLMKLTMREWETGEIQGVYDLSNYENEWGRVYYMLHRQDMHKVLLRVATAEEGAGTPCKIFNDSQCESVDSERRIVRFQNGKTVQADLIIGADGIRSVIREQIGVKPDIKSSPQTCYRCNVLTKDIKKLGLVSHSYEPAIQFWGGSEGRNGRSKYYKIVMAPCANGEVVSFYCFMPTELTNHREEGFTFKECPVSDILQGRYSDLDPECLALLKNSRDRMPWRLYVHQPYTHWYTKQTCILGDAAHPMMPHQSQGACMAIEDAAALGIIFSSKYPEFTRDVEAGLRLYQAIRKPRATMVQAASAKATENVAERIGFTSIDIADEMLRPQAGGLTVKEMNEYKMHDHVAAEVAKLRKNMEFPQEMAHL

SEQ ID NO: 14435 - protein, 508 aa, Coprinopsis cinerea okayama7#130
MASPTVLCRPFTAFHNDSPIIVDDNAHTTEADQLIFGPLDLDDNLHLANSNNISLQWDPYSVHDIDTKSPFAFDAAAVMPMSAYEYGPPEVSPTGSYYDSGTNFYSSEPVKNSPSLEDNLYLANWINDPELSAPSPSSPISIPSPSDMHTSTAASSFSAFGDHTQFSANDPVFSPSSFAALHPLPSSVSPPSSFEDPQPIRQRVNSLNPADMSLSKPSWASHLWDTSANSLRSPSIIRPRRSESVVSNGEDRDATIRRKKRSPPVEDYGSSAEKSSEPPSKSLLKPPKLAPSAWQLYFTDWIQKQQRLGTRKLNVAQAAKEAGQEYASLSPEEKEPYKRRSQAAKEAREREHEAYMRTLTPDDIKRENAFRAAQRKAGKSRKGNIKDPNAPKKPLSAYFMFLQRIRADPKLVKEIFGDETETTKQSVLAAAKWRSMTDAERQPFLAQAEQEKMEYEAARRLYEEGTTGYGTNINFSILQSPAFPTIKLESSESESESLVQDDSEKPSV

SEQ ID NO: 14436 - protein, 828 aa, Coprinopsis cinerea okayama7#130
MSKPVDPNIELFKSIGLSQAKAAEAAKSPKSATILKEIIEGNAKIAAGVEEKQAGLIASLSVSLAKADLGAPERDYVINKILNGDLKTVDQVNAAVKYLQANPSPVNDAEFDKECGVGFSITPEQIFEHVKSYLASNTVTGWANLGAVITGVKANPDLRWAAPVEIKNAVEKAFLETFGPKQAAQPKAKEPKKDTKPKAQSSEAATPAQSRKTVFEEGFLGNLHKPGGNPQIHPHLREAHLAATGGNVWTRFPPEPNGYLHIGHSKAIFVNFGYAAHHNGKCYLRYDDTNPEKEEARYFESILEMVRWLGYEPWKITYSSDYFDQLYELAVELIKRDKAYICHCTQEEIKVDRGEKRGQPRPCIHRDRPIEESLTEFEGMKNGKYKPKEAFLRMKQDLTDGNPQMWDLTAYRVLETPHHRTGSKWRIYPTYDFTHCLVDSFENISHSLCTTEFIASRQSYDWLCDVLEVYKPRQSEYGRLNLEGTIMSKRKILTLVEEGYVNGWDDPRLYTLIALRRRGIPPGAIISFVSTLGVSTAPSNIEIARFEQSVRQYLENSVPRLLMVLKPLKVTLENVPDDYVTFVEKPLHPKIPELGTATIPFSKVLYIDADDFRLEDSKDYFRLAPGKTVGLFQAPYPITCTSYKTDPETGAVTELICKLENEGQLKKPKAFIQWVAEHAPSGSPVRIDETRIFHRLFKSDKPGSDFKNDIAPDSLEVVRTAMIEVGFLPLAKKMLDDARKEAKQRTEKANKESAPAADDDTPHATAEQLVGNECVRFQGLRVAYFALDKDARLECLNTAPEVKAERKQGDYIVLNRIVSLKEDSGKSS

SEQ ID NO: 14437 - protein, 696 aa, Coprinopsis cinerea okayama7#130
MSSSRPTPYQGKSLPDSSAASTASESIMAIDTVRERKKDSRGEREDEERTALIDAGGSNTPEVSADYGSIAPSGRFAIPGRAPRRKYALARRARYYIPSLAWIPQYNWSLLGGDILAGLTVGCILIPQSISYASSLAKLSPVTGLISASIPGIIYAFLGTSRQLNVAPEAALSLLLGQAIQEIRHEIGDPPEGGIDVVGLAVSSVINFQVGLICFLLGFFRLGFIDVVLSRALLRGFISAVAVVILVEQLIPMFGLTQLMRVVGPHTTLQKIAFIWDNVWEHSNQLTMVISFGALGSLVLFRMFKNQFQKTWWIYRLPEVLIVVVLSTYISGKVRWDKGGVDILGAVSVSTGDHFFQFPLANGNFKFVRATTSTAVLIAVAGFLDSIVAAKQNAARFGHSISPNRELVALGASNLVASFVPGTLSAFGSITRSRINGDVGGRTQMASIVCSLVVLFATFFLLPWLYYLPKCVLGAVITLVVYSLFAETPHDVMYYWKMGAWVDLAIMTMTFTACIVWNLEAGIVISMVLSLLLVVHRSSKTRMTILGRIPGTDRWKPLKDTPEAEEAVSGVLIVRIRESLDFANTSQLKERLRRLELYGPHKHHPSERPTRQEASVLIFHMADVDSVDASAAQILYELTEEYMKRDVQIFMTHVKAKPYQTFVKAGIVDMVGLDAFRETVADAVSIVERSAAPSRV

SEQ ID NO: 14438 - protein, 477 aa, Coprinopsis cinerea okayama7#130
MRPLTIDSLNPAILKVEYAVRGELAIKAEKYRVQLQDKDNHGLPFDRVISSNIGNPQQKGLDQPPITFNRQVAALMEYPALAELAPNAFPKDVIARAKELYAEIGSIGAYSHSQGVPFIRKSVAQFIQERDGYPADPNHIFLTAGASAGVSLLINMLISSPTSGILIPIPQYPLYTATLAQHHGVPIPYYLDESQGWGTSVDSIEAALEKAHKNNVVPKALVIINPGNPTGALLDEATQIKLVHLCEKYSLVLLADEVYQSNLHKPDQHPFTSFKKVVRKLDSHVPLVSFHSISKGVTGECGRRGGYFECVNISEPIIALMYKMVSVGLCPPLAGQIGVDCMIRPPKPGDESYELWKKETDTIHEALRTRTSIMAERLNALPGVSCVDSPGALYLYPQITLSKKAQEAARAAGKEPDAFYALELLDATGICVVPGSGFGQKENEWHYRLTCLCPGVDEYVGKLEKFHLSFIEKWGLE

SEQ ID NO: 14439 - protein, 575 aa, Coprinopsis cinerea okayama7#130
MLCGINSSLGHSGGAVCWRLVRANLFVTSSLPRFNSTVAGTSAKKGTRAEEDEEAFRRRRKTEWKRRQGGQTFLDHVIVTVRAGKGGDGCAAFHREKFKPYGPPSGGNGGRGADVYILPTPHLTTLSSVPKKIRAENGTHGQGAWQNGKSAPPYVLRVPLGTIVREIPLGDPRRAKDEWEAEEESLEGLGPDERKIRMREKRWLHYPGAADSNVDRESFLEAEAAHYKLERERRIMRRKRALEEPIYLDLDKEVKAERPVDAPLGTKQRDPLGYLVASGGQGGAGNTHFLTTDNRSPKYATRGQEGERITLELELKLLADVGLVGMPNAGKSTLLRALTGGRAKTEVANYPFTTLNPVVGIVRVAEDGTWEGSISGPGVHDETIIEEQQEAERMFSGEYAFARTRNEKATDDEYLDKIGRGHHFDVYESFRFTISDNPGLISRASENHGLGHSFLRAMERSPALVYVIDLSAPDPWNELIVLRDELEKYEAGMSTKARMVIANKADLLAEGGDEEAVRAAKEKLKRLEEFVKTQMVLPDGRNLEVVPTSAKYSQNLDKIVALMKQYVMDAREQQP

SEQ ID NO: 14440 - protein, 1327 aa, Coprinopsis cinerea okayama7#130
MQAETKDECSTAPTTVVQGIAPTSIIGHGNTVTGGTIVAGNYAPHVMNVYSHAPNTSRTRDELISDITSWFDLKSNSRAIHNDVRKKRIPATGDWFIHSKEYQDWKRTKGAVLCGTGIPGAGKTVLMSRVVDDLLPLEGTVDKKICVLFIYNRYNESLSLSDILKGFILQIIQRHHHLVDLVEPLYRRGRLEKTHPSDDDLLHLLLMLEGHFCQIYYVVDGVDEVDRKHQFDLIQVLNQLQGNLIFASRPLEDLRTELKDAQYITLLAQDEDLQLLIDERLRRYKGLCRVLEKHRYREEAVRRISEKAAGMFLHAALQIEALRSCLSLAAVQAKLDEFPAGIEGMYTASISRIENQDPELVKIAKMVLFWLVFSRRSLSLRDLQAALGVNVETYSVEESLMPDDQSIIDLCCGLVDLDTESNVVRLVHFTAKDTLKPLLLKEFPQPHLFISKVLAQRMVDNNLPHCTITEREEFETFIKQEPLLEYSHEEWGSHVSECRDSPEAVDAAMAFLRQCTSFPRIVLGSFDHFQPLHVAAAYGLPMYLDHAIATDGDPNYLTRGHATWSDSSSQEEAQPESIRINGTTKRGWTALILASGLGRIEFVKQILQIPNVDVNMGGEDGETALQLASAFGHDEVVKELLQVHEINVNAVDNTKATALLRASFSGAHEVVKQLLQTLGIDLNAADDRGRTALMEASSMGHDRVILQLLQSQGIDLGLVDRIGCNALMLASYFGHETVVTQLLEGHVLDVNTASNRGATALMLASMKGHDGVVRQLLGVHGIDVGAASATGWTALMSASSNGHDGVVNQLLEVHGIDVNAANDEGCTALMLAWLEGRDAVVKQLLDVPGIDVNAKNSQGSTALMIASEKGHVGQLLARGVDVNTANNDGWTALMLASRMGHDGAVSQLLKVHNIGVDSANNNGWTALMVASKNGHYGVVKQLLQVRGIDVNVVTNDGWTALMVASRYGQVRVVKQLLEVRGIDVNAVNNQGMTALMLALLKGHDRVVQQLLEVHGIDVNVVGPEGWTALIQASSEGHDEVVRQLRAHRVDVGAVTTAGWTALMTASHNGHGGVVGRLLEFHGIDVNAKNYRGWTALMLASEKGHGGVVSQLLQVHNIGVDSASNNGWTALMVASKNGHYGVVKQLLQVRGIDVNVVTNDGGTALIVASRYGQGRVVKQLLEVRGIDVNAANNDGWTALLVASSHGQGRVVGQLLQAHGVDVNVPNKHNSTALTLASEFGHEDIVQQLLINGADPNAADNDGDTSLIMASREGYEGIVTQLLECPGIDLDAVNNAGKSALSEAQEKGHSKIVELLTSFVQKWSTVVNP

SEQ ID NO: 14441 - protein, 211 aa, Coprinopsis cinerea okayama7#130
MSAPKVEQGEQIPDPHGTVVELLKAGEVIPDVIPEFRPSLFFSIIFPGFSTSATEITMGTTYERDRTLKEPEIEVVATVPELLSGSLEGNQTYTIVMTDPDAPSKQDPKFGEWRHWVTTGVKLPKAGSGVTFAAKTKPASTPYEPPAPPPGSGPHRYVVLMFQEPEGFTIPPDAVECKADLDSRPKWNAMKFAEKYGLKLVGANFFITQRD

SEQ ID NO: 14442 - protein, 100 aa, Coprinopsis cinerea okayama7#130
MSDEEQNNATQEVKTEDANAPINVKVVSASGEEVFFKIKRSTKLSKLQGAYASKVGKDVNSIRFLYDGSRIQEDDTPASLDMEDNDTIDVMVEQVGGARP

SEQ ID NO: 14443 - protein, 772 aa, Coprinopsis cinerea okayama7#130
MASKDDKDSSSIEKVEVIDKERNQPDIAELEALALPDFDDPNIDRDAAIQGVLEDDSPYPEVRSAVANTDDPDIPVSTIRSWTLGLIWAILISGLNQFFFFRYPSVTITGIVAQLLIFPMGRLWYKVVPNVKIFGKELNPGPFSIKEHVLSTIMAIVGAYSAYATDIIAVQRVLYNQNYNFSYQWMLVMSTQLIGFSIGGVARRFLVQPPSMIWPANLVTCALFNTLHAQTYAGMGNRGGLSRERFFLYALIGATCWYFMPGYLFGALSYFNWVCWIAPDNIKVNTMFGYFHGLGMSLVTFDWAQIAYIGSPLATPWWAEANIAVGFVFFFWILAPILYFTNAWDSQYMPISGRGSYDNMQKPYNVTLILNPDATFNQEAYEAYSPLFIPTTFAISYGLSFASITATLTHAFLYFRKQIWTQARRAIHEQPDVHARLMARYPQVPQWWYLIIFLTMFAFGIISIEVWETKFPVQWFILALVIAFFYVIPIGMIQAITNQQVGLNVITELIIGYGLPGRPVAMMMFKTWGYITMAQALTFTSDFKLGHYMKVPPRAMFFAQVIATMIAGTTQLGVQAWMFSNIPNMCTPDQRDGFICPATEVFGTASVIWGVIGPARQFSKGEVYYALVFFFLAGFVTPIIGYFLTRRFPNSWLRYVNFPVIYSGTGYMPPATASNYVPWAIVGFIFQYVIRRRHFSWWTKYNYVLSAALDAGVALAAVIIFFTLQYPKNGDIGVNTIQAWWGNTVPFNTADGRGLSLRNVAPGETFGPRTWK

SEQ ID NO: 14444 - protein, 584 aa, Coprinopsis cinerea okayama7#130
MSPGLSPLSDSLSAPPTPESFRQNPTDLSTKWLVQKFGGTSVGKFPIKIATDVVAKHLDGHKVAISPPSPRSVDGRSSGSSSPRRNGILGFTPLNGDSVKSALPEFHVTVDLIKDEHFKAARSSIRDPEILAELEKEIDSDCEWLRSFLCAAQVIDEISSRSKDSVIGLGEKLACKLMAAVLRDQVYMHVAVLFSILQISWIDSQGMEAEYVSLEDIVPSSHLTGDSDLSVGGISLEQPFYDELAKVIAQRIDQCGSRIPVVTALFVGFFGPVPGSLLAQIGRGYTDLCAALLAVGLNASELQIWKEVDGIFTADPRKVPSARLIPVISPDEAAELTYYGSEVVHPFVMEQAIRKKIPIRIKNVQNPSGGGTVIHPAPEDPVQDSQWTNGHTTNPSSERPPTHLPLGTNGYGFDDPRNRRLPTAVTIKENIVVINVHSNRKSVSHGFLAGIFGTLDRYGVVVDLISTSEVHVSMAIADGIGKRMADRFVVELKRFGEVSVEHDLAILSLVGKHMRSMVGVAAKMFSSLAERNVNIEMISQGASEINISCLIAARDAVKALNIIHQGCLKITPEEPMGRVGPWLF

SEQ ID NO: 14445 - protein, 322 aa, Coprinopsis cinerea okayama7#130
MDSAPPPPSKNLLRFHRRRKLRLNETQIPVLTEESKRCLRNLSSYRAPKPRLQFPRSRMAAVLVALFVGRKGDLYVLLSRRSASLRTYAGDTSLPGGKVDPGDVSLEDTARREAFEEIGLPRDRKKVPLLCVLEPFLAAELIVTPVVVLILDNTLEPILNTAEVASLFSHPLASFLSTTPPFPSEPESEEVPYHRSFDVEATGPFSSKQMFRVHEFLTGREAGGIKPVFGLTAAMLIRVATIGYGREPDFEVHPPGAPTMDERIAWALVHRKVFKDACEKEGIDLGLARRIAGVDKDGRPVKTARNLKAGEGKGRRKREYKL

SEQ ID NO: 14446 - protein, 216 aa, Coprinopsis cinerea okayama7#130
MGYAQPPPQAGGVYTQQPPGGYAQPPPTGIYAQPPPGGVYTQPPPTAPMNMGGGNRNVRGLPYDANGQREWSHGLLGCFGDIKTCCLASWCPCLAHARNRRRLHHLETTGQPDPDRDGLCGPDGWLYTCLEVACDMGWILQIGTRAAIRQRYNIRGSDGGDCMAAFCCQACDLVQGSRELELEEDSFGPQYAPAPPGAHGAHGAPQGPQGQVVQKV

SEQ ID NO: 14447 - protein, 148 aa, Coprinopsis cinerea okayama7#130
MVVQQGGGGNRNVKNLPLGPDGREWSNGLCSCCDEPGTCLLAWCCPCIVYSRVKHRYEHLATKGVPDPEHGGDVCTSDCLIHAAVTSCVGLGWLFQMMNREKIRSRYSIRGGGCGDCLTACCCTPCELVQESRELELEEQSFGQTYKA

SEQ ID NO: 14448 - protein, 463 aa, Coprinopsis cinerea okayama7#130
MVNLTYDASGEIVYYDNVTGETTVYNMGDMAFIMVCMALVWIMIPGVGFFYSGLLRRKNALSMIFTSLASIAVVGFQWFFWGFSLSFADDASPFIGTLKHFGLKGVLDAPSIGSARIPSLLFMLYQGAFAAITAALAVGAIAERGRLGPILVFIFIWTTIVYDPIACWTWNGNGWSFVLGGLDFAGGTPVHINSGTAALAISVYLGKRRGYGTERLAYKPHNTTYVVLGTVFLWFGWFGFNGGSALLALVTNIAAAVGGITWMLWDYRIEKKWSAVGFCSGAISGLVAITPASGYVGSPAAVLFGVMGGTICNFATQLKFLLGYDDALDIFATHGVGGIVGNLLTGIFAQASVAGFDGATEIPGGWLDKNWVQLGYQIADSVAGFGYSFVVTTLILWVMHYIPGLRLRCSEETEILGIDDAEMGEFAYDYVGLEQELGQTLNTTLRTSSRSSNEKVVPVAESQ

SEQ ID NO: 14449 - protein, 486 aa, Coprinopsis cinerea okayama7#130
MVNLTYDASGEIVYYDNVTGETTVYNMGDMAFIMVCMALVWIMIPGVGFFYSGLLRRKNALSMIFTSLASIAVVGFQVRATIIPLGTLWVWDDANSFAQWFFWGFSLSFADDAKHFGLKGVLDAPSIGSARIPSLLFMLYQGAFAAITAALAVGAIAERGRLGPILVFIFIWTTIVYDPIACWTWNGNGWSFVLGGLDFAGGTPVHINSGTAALAISVYLGKRRGYGTERLAYKPHNTTYVVLGTVFLWFGWFGFNGGSALSANLRAVQACIVTNIAAAVGGITWMLWDYRIEKKWSAVGFCSGAISGLVAITPASGYVGSPAAVLFGVMGGTICNFATQLKFLLGYDDALDIFATHGVGGIVGNLLTGIFAQASVAGFDGATEIPGGWLDKNWVQLGYQIADSVAGFGYSFVVTTLILWAMHYIPGLRLRCSEETEILGIDDAEMGEFAYDYVGLEQELGQTLNTTLRTSSRSSNEKVVPVAESQ

SEQ ID NO: 14450 - protein, 331 aa, Coprinopsis cinerea okayama7#130
MYHNNSIRILTGNSHPELAQAVAERLNVPLVPCTVKNFSNGEINVRITESVRDEDVFIIQSGCNDVNDHLMELLILVSACKTASARRITAVIPCYPYARQDKKDKSRAPITAKLVANMLTVAGCDHVITMDLHASQIQGFFDIPVDNLWSEPLMIGYIKRSIPGWQEAIVVSPDAGGAKRVTAIADKLGVEFALIHRKRAGKSLTAPERMELLVGDVEDKVVILVDDMIDTGRTLSLAVQTLHEKGAREIYALISHGLLSGSDLEALNELPINKLVVTNTIPQDKHRHILTKLVTVDVSPTIAESIRRTHNGESISLLFGEWAETIGVQTI

SEQ ID NO: 14451 - protein, 1265 aa, Coprinopsis cinerea okayama7#130
MPPQAFSAVDPGSERPRERDRDRERDRDRDRERDRESSSRQGDENTHRRRHRDEHSSSSRPSRSNRILGDYTLSKTLGAGSMGKVKLATHNITGEKLAVKILPRVYPNPPPPGSSGPSAESASRQASKDASKEIRTLREAALSMLLYHPYICGMREMIVHQHHYYMVFEYVNGGQMLDYIISHGRLRERVARKFARQIGSALEYCHLNNVVHRDLKIENILISQTGNIKIIDFGLSNLYNPVSHLSTFCGSLYFAAPELLNAKVYTGPEVDVWSFGVVLYVLVCGKVPFDDQSMPALHAKIKRGLVEYPVWLSAECKHLLSRMLVTNPAARATLNEVMNHPWMIRGFSGPPEIHMVHREPLRVDELDQQVIRGMKGFEFGTEQEIERKLVEILESESYQRAVQNWERKRGSRANLNGNGTFNNGRWGESFSNSSLAISFDSNKSDTPAPKKSRRFSGFEYYRKKLFSPVSSPPGSPMSRSPPNSQHTISTLSDREPGDPTRGFHPLISMYYLAREKMERDKVFGPGQFASSQLSLLDQMSPTAATQPTPHSGNLQQQQHAATNQPHYTAPNVATSRQSTLGARPDYSMPLPRLPPPEASHYSGTSYDNSIAPSPTTPVFSNQPRARDPGLPVPPSPTVASAPPARQHIEISEQQPPTATAPRRGNLPRAPPASTHRRSHSMSQRPSVLSRGWGTMFGSHTAEGVNEHGARIPEPPKTVGPEVTSFNEKELGAISDGERQEHGSGGGGVSPLSSGATLVRKFGSLLVGRGDESRRQQQQQHNQGTIKRGAILNALSPSPRPSAETRSPEEEKHPDNNGVNGSGAAGQGQGLESEEVVVEKPKPIATSVSQPVGSAHRRAATLLDPHGRASRHERRSSTSAAFGSSTVGTGGGGTIGRHRRPSTGYSTTSGRPLADRLFPQRREGDLVEKREDEEGDGELVDSAHPGFDTEEERDDGNATDRDFKPVFLKGLFSVATTSTKPPAAIKLDIRRVLDRMQVQYRETKTGFECIHLPSIDISSIDATSMRQPSHHQSASNDNGRTTPTFNRPSLVKKASKLSFGMKKGKDREPSADKDKEKEKDKTGTGDEAQSRQSTKLTAASGGSSSFFNVGNAEHGASIQDQLNQPPQSNGIASSIISNGDEMPSSASAHQQQGSTISSSSSPQPPRSNSPTATMTSNKAKVLPPIPRDFGASSPTPRARSPSPLPSGEVDREVFEHLGNNSLSVKFEITIVKVPWLPLHGIQFRRASGDGWQYQMLARRVLTELKL

SEQ ID NO: 14452 - protein, 620 aa, Coprinopsis cinerea okayama7#130
MEESPRGYTTGSLYSGDGTTTQPHTPHLGLTEAELYKRSIPDVPEDVDYYMEHLNDPNFDLKANRPGSISSTSYSMETKKKYPGWDQSDTESQFDRYSSTRAESRHSAVIEFDEESPYPEVRASVSSVDDPLMPVNTFRMWFLGLFFVFVITFFNQIFAMRYPSVYVTGIVVQLIALPCGKGLERILPKTVFNFFGYKWSLNPGPFSIKEHVCITVMANAVSWGIYITEVSLSQRVFYGVEVPYSFQILIALGSHIFGFSLAGFLRRFVVYPSSMIWPGALVNSALFNTLHKNYGVRDKGHMSRERFFLIATAASFVWYWVPGYLFTGLSMFSWICWIVPENVTVNALFGVNTGLGMSVLTFDWSMIAFVGSPLVTPWWSEMNTAVAFIVVFWIICPIIYFTNTWETSFFPISDYYSFDNTGGLYDATAILTDGVFDQAKYSAYSPVFMSSSLALAYGVAFAAFPAIFVHTFLWFRKDILRRFRSSLKDERDVHSRLMQYYPEVPGWWYAVVGVISFVFMVIALEVNPASQLPIWGLFLACGIGMILALPLAMLQAITNQSIPTQVMAELIIGYILPGRPMANMVFKGIMFSTGQQAVQFAGDLKLGHYMKIPPRLIPGC

SEQ ID NO: 14453 - protein, 1594 aa, Coprinopsis cinerea okayama7#130
MAVGSGHKIVVTRSLGPDVMPLLQREDMELVLWPEDRACDRDWLLSNVKGASALVVMVTDKIDAAVIEAAGPSLKVVSTMSVGYEHVDIGELVKRDIALGYTPDVLTEAVADVCIMLALMAGRNARHTMTLVNNGEWPGYSWSPFLFCGRQLSAANPSIQRTAGFIGFGRIAKATLARLVPFGFTTCLYTGRPGTGKSTSTEDAELASKLGLRSIKRVDLETVASESDIVFVLAPGGESTYHIIDDAFLRRMKKTSVLVNASRGTLVDSDALAKVLKEGGIYGAGLDVVEGEPNITLDHPLVKEPRCVILPHIGSATFETRNDMAKLAAENALAAVLGKPLPCALALKLIGGALTLTSNASFIVVPVEHTLFLAVMDVDQPSNAPSNPSKPPTPAPGNPTTSSPTPRSTESAVTGPAAAGAVADAGDTNPPPPVREERVTRSSSRKPSPTSEAPKEENVPPRNAPSPSAMAVDEPPPPRKGSPADAHGYPGSSDRPLNVTDALTYLDQVKVQFADQPDVYNQFLDIMKEFKNEQIDTPGVIKRVSQLFHGHPSLIQGFNTFLPAGYRIECMGDALETGVITVTTPTGTTIQTTQNSRMVWTTPDGVPLDGQAIEPAVQYVQKIKQSCDAETYRQFLDILSRYHHAPEAIDEAEVSRQISRLFKDAPELANDFRVFMPDRSQQILDGPASHQVSHLDSKGRRKLDAVADSLSANGAGLPQKRKRKVGDKEREREKEAVPLRSSAVIPPASKKLKHSQDANTVSYNPKHIIAQTSSPHPGPSQLLPQPAMSHTRTAMPDDSNFFDRVKRALDNNRDLYNEFLKLVNLFTQDYIDMARLVKESRNFLGDTELHRQFKEILGWDDRKQREYVMAEHVSASADWHKPTVMSVEEKPTRIHQAERQSSYRRVSPAEANVPCSGRDEMCRMVLNDEWVSHPAWSSEDTGFIPHKKNVYEEALHRSEEERHEYDFHIEAITRTIAMLEPINNKIAQMNPEDRGSFKLKPNLGGTWKAIHQRVIKKIYGGDAGLEVIQSMQDSPALAIPVVLQRLKQKEEEWKRAQREWNKVWREVDARNYAKSLDHQAITFKAADKKAITTKAFVSQIEAAREEQMASRASLIDPLFARTRPRHQLDFVLDDIPVLQDALKLTFSFLDRTQAQINFNERRRIESFLRSFIPLFFVLDPVAFNSAFVIAEGADSEGSEGDAASNIDDAEVSSNGTSSSRGGRGGNHRKGGGMVTGGNDLRKKLLKSEQAKSSRKTRAQDASPANSRPASPALLDEDYRIQASTSQSRRPSRRYIFFTNTTFYVLIRLIQLLVARLTLFKELSAQIAEDKSKSKPSAPVAPGLSAQATNTEYNSKEYHYVFLLETCERLFDNEIESHAFEDQMRAVFGIQNGYKIFTIDKVISALIKQVQVIFSDPKSQDLLEILKRERSLVAPTTQEQINTRRSAEKVLGPDENLFRLDWLADSKTITIQLIGKDDSSFDDSEVLTGRWQSYIDSYVSADATSGVSQSKMKSPFLRRNIPAAVKETQPNVASTDNLEIKVCVRTYRLFYVSKSEDFLWKYRSKEEMESCFDQLKARNEQRRRWIDESTQSSVQ

SEQ ID NO: 14454 - protein, 650 aa, Coprinopsis cinerea okayama7#130
MASPTSSTPSTPVSSSPDSFSPPRTPPNLHQNSIDPSTKWLVQKFGGTSVGKFPVKIATDVVASYLDNHKLAIVCSARSGSTKALGTTSLLLKAATEALKRQPRKASTSSSKSNGTTSPTSPGTGANTPIHSGYRGLFGRTYYYTSDGDGSQSPPTSPKPRSKSSRSSSPQRKNGLFGFTPINGDEAKKTNLPEFHATVDLIREEHFKAARTSIEDPEILAELEEEIEKDCEWLRSFLYAAKIIDEISPRSKDNIIGLGEKLACKLMAAILRDQGIDAEYVSLEDIVPESYVTDDSDSSSEGKILGQDFYDDLAKAIAERIEQCGRRVPVVTGFFGPVPGSLLAQIGRGYTDLCSALLAAGLGASELQIWKEVDGIFTADPRKVPTARLIPIISPDEAAELTYYGSEVVHPFVMEQAIRKKIPIRIKNVENPSGGGTVIHPDPDADSVHPTDPLQRGSSPVPEPASPSTLTTYTTTHMTSSQRSSSRASSVSSLSSFTTFAASSLTGGYGFDDPQNRRLPTAVTIKENIMVVNVHSNRKSVSHGFLAGIFGTLDRFGVVVDLISTSEVHVSMAIADGMGKRVVDKFVNELKRFGTVSVGRDMAILSLVGKQMRNMVGIAGKMFTTLADGNVNIEMISQGASEINISVFDD

SEQ ID NO: 14455 - protein, 953 aa, Coprinopsis cinerea okayama7#130
MAGGTIIGGDHITYNIHPSAERPDSTEDRDALISDITTWFDLKSNSRAIHNDVKKKRIAATGNWFINSKEYQEWKGKKGAVLCATGIPGAGKTVLMSRVVDDLQPLEEATDQRICVLFVYNRYNESLSIGDIVKGFILQILQRHKHLVDLVKPLYQRGRLERTNPSDEDLLNMLLKLEGHFDRIYYVVDGVDEVDRNYQFDLILALGQLQGNLIFASRPLEDLKTELKNAKYLTLLAQDEDLQLLIDDRLRRYKGLCRVLEDHEYREKVIRLIADKAAGMFLHAALQIEALRSCLSLAAVEAKLDQFPAGIEGMYAASLSRIENQDPELAQLAKQVLFWLVFARGSLSLRDLQAALGVNPETYSVEKSRMPDKDSIVDLCCGLVELDTESDVVRLVHFTARDALEPLLLKDFPQPHLFISKVLAQRMVDNNLPRCTIVEREAFDALIQREPLLDYAYRHWGTHVLECGDGPEAVDAATDFLRQCTSFPSDLPWKALDLVKPLHVAAYYGISIYLDRVFGSVVDPDSPTAQHPTSHGGSPQPVAQRMESIGINDTTVLCSTALIMASTRGHTNFVKQILQIHGINANARDRRGRTALAQASLLGHGEVVKQLLQVPGIDVNAADNDGWTALMLASENGHDGVVRQLLQVHGIDVNAAKNDGWTALMVASQNGHDGVVKQFLQVHGISVNAAKNNGATALMLASQYGHDGVVKQLLLVHGVDVNAADNDGWTALMAASAYGHDGVVKQLLQVPGIDVNAATNDGWTALMAASRHGHDGVVEQLLQVPGIDVNAADNDGWTALMLASAYGHDGVVEQLLQVPGMDVNAADNDGWTALMLASRHGHDGGVRQLLKCGVDTNAADNHGNTSLILASFGRHQGIVAQLLECPGIDFEAANKAGDTALSTAQTEGHMSIVELLTTFIRNRSISDSTATGKKRRLITSPSDLGTSTKRVRS

SEQ ID NO: 14456 - protein, 1319 aa, Coprinopsis cinerea okayama7#130
MTSVDEADEKTRPSEQPKASSKKWYSRSKASSVSEKKERIDDAEGTKDVEVKADPAVPPVTFTQLFRFSTKFELFLDLIGLIAAAAAGAAQPLMSLMFGNLTQDFINFGHAVSGSTGDADSAAAIAAAADSFRTNAAKNASYLVYIGLGMFVCTYLYMYIWVYTGEVNAKRVRERYLQAVLRQDIAFFDNVGPGEVATRIQTDTHLVQQGISEKVALAVNFIGAFVCGFILAYIRSWRLALAMSSILPCLLLTGGFMNHFVSKYMTLARTHIADGGTLAEEVISTVRTAQAFGTQTILSNLYNVHVDKALGYDMKNALWNGGGFALFFFPYYAVYSLAFHFGMKLINSNHATPGEIIAVIFAIIIGAFSLVMLPPELEAINNALGAAAKLYSTIDRVPDIDSANEGGLKPATVTGEITLEHIDFSYPSRPDVQVVKDLSLTFQAGKTAALVGASGSGKSTAISLIERFYDPTSGVVKLDGVDIKDLNLKWLRSQIGLVSQEPTLFATTIKENVAFGLINTPYEHVSEEEKFKLIKEACIKANADGFISKMPMGYDTMVGERGFLLSGGQKQRIAIARAIVSDPRILLLDEATSALDTQSEGIVQDALDKAAAGRTTITIAHRLSTIKDADVIHVMGEGRVLESGTHTELMALDGHYARLVQAQKLRSQEGTVIDEAQEESGPDEEADMDKAAREEVPLGRRNTQRSLASEIIEQRRSERGEQKDEAHGFVVIFKRLGLVVRDQWGKYLWGTLFAIVAGMVYPCFGLVFAMGIDSFALEDPAARRYEGDRAALWFFIIAIGSTIAIGGTNYLFSACAAILTGRLRQLTFKAVLRQDIEYFDRDENSTGSLTSRLSEHPQKISGLAGVTLSTIVQAISTLIGGSILGLAVSWKIALVGIACMPLIISAGYIRLRVVVLKDEVNKKAHADSARLACEAAGSIRTVAALTREDDCLRVYSKSLEEPLHKSNKTAVWSQGIYAFSQSVVLFVIALTFWFGSRLVAKFEITTYQFFVGLMATTFSNMEAGSVFSFVPDISSAKSAGSDIIKLFDSHPEVDAESDAGKKPDRSQVKGHIRFENVHFRYPTRPGVRVLRDFSFEVRPGTYVALVGASGSGKSTVIQLVERFYDPLAGEIYLDGEKISELNVQEYRKQLALVSQEPTLYAGTIRFNILLGAIKPHSEVTQEEIEAACRDANILDFIQSLPQGFDTEVGGKGSQLSGGQKQRIAIARALLRNPRVLLLDEATSALDSNSEKVVQAALDQAAKGRTTIAIAHRLSTIQNADCIYFVKEGRVSESGTHDQLIAKRGDYYEYVQLQALSSDH

SEQ ID NO: 14457 - protein, 793 aa, Coprinopsis cinerea okayama7#130
MAPNAKNKRQRRKAAAAKKRKQVQVEETAPKRPGLLVTKELDSAIEQCRAQVELISKECRAKNKKFRDHDFDLEYDQIRCLHGYTEFTETANAQDVQRVTQLFDKPLFFPPGGAVSSNSIRQGGLGDCWFLSALATVSTMPGLIEKVCVARDEEVGVYGFIFYGDNGWDSVIIDDMLFTNIPKYEELTQQAKLTYHEDKSRYNQIARRGFKGGAHLLYAGAGADGETWVPLIEKAYAKLNGNFAHLEGGYTCEGVEDLTGGVSTVFLIKDILDIDKFWKEELLMANKDRVLACSFQRLRAPEDDWWGQSPDVEGLYGNHAYSIMRAVETRGKRFVIVRNPWGTGEWKGAWSDGSKEWTPEWLQVLPELGHTFGDDGQFVMEYKDFLDSFADVERTFLFDDTWIMASSWMSVPVPTEPRAPSYGTLSYSVQVPEKTKAIFTLSRINERPFRSIKKTADVTMDFAVVKLGELVPLQRISEHDPFQSRSLSVEMELEPGVYIVYVRYDREKSSGENTMVYGDVDDDDSDEGNDPNTRTRVISRILTNKIRAQSIADNRVTKLKSQFMPKTLEDVIREDYEDFHNKSESDSDSDEEPSTPGDEDSEKEQSQEVKGKAEGTDEKAFNSQNGTSNGHSEAPPLTEVATVAKDAGSGLQWDILLKLLMIGCLNLLGILGLTVFNALGHTPEQQQTQPEVDEATTGESHGEEVAVYPSSNMEQGGDDDSEDEDGADDWRHLLRDDGKSVVLGLRVYTQTKEPVSIVGRVKKGEGKGEETDSKSESEGTLVNGDQVFIVPAV

SEQ ID NO: 14458 - protein, 154 aa, Sesbania rostrata
QKKTKNMGFTDKQEALVNTSYEAFKKNLPGHSVLFYSFILEKEPAAKGLFSFLKDSDGVPQNNPSLQAHAEKVFGLVHDAAAQLRATGVVVLADASLGSVHVQKGVTDPHFVVVKEALLKTLKEAAGATWSDEVSIAWEVAYDGLAAAIKKAMS

SEQ ID NO: 14459 - protein, 209 aa, Mesorhizobium amorphae
PSSRQTQIKDYAEFPTLEQLPLWGFDGSSTQQAEGHSSDCVLKPVAVFPDPARTNGVLVMCEVMMPDGVTPHSSNKRATILDDEGAWFGFEQEYFFYKDGRPLGFPESGYPAPQGPYYTGVGYSNVGSVARQIVEEHLDQCLAAGINHEGINAEVAKGQWEFQIFGKGSKKAADQMWMARYLMQRLTEKYGIDIEYHCKPLGDTDWNGS

SEQ ID NO: 14460 - protein, 197 aa, Bradyrhizobium yuanmingense
KTQIKEFASFPTLEQLPLWGFDGSSTQQAEGHSSDCVLKPVAVFPDGARTNGVLVMCEVMMPDGKTPHASNKRATILDDAGAWFGFEQEYFFYKDGRPLGFPTSGYPAPQGPYYTGVGFSNVGDVARKIVEEHLDLCLAAGINHEGINAEVAKGQWEFQIFGKGSKTAADQMWMARYLMLRLTEKYGIDIEFHCKPL

SEQ ID NO: 14461 - protein, 196 aa, Bradyrhizobium yuanmingense
TQIKEFASFPTLEQLPLWGFDGSSTQQAEGHSSDCVLKPVAVFPDGARTNGVLVMCEVMMPDGKTPHPSNKRATILDDSGAWFGFEQEYFFYKDGRPLGFPTAGYPAPQGPYYTGVGYSNVGDVARKIVEEHLDLCLAAGINHEGINAEVAKGQWEFQIFGKGSKTAADQMWMARYLMLRLTEKYGIDIEFHCKPL

SEQ ID NO: 14462 - protein, 196 aa, Bradyrhizobium elkanii
TQIKEFASFPTLEQLPLWGFDGSSTQQAEGHSSDCVLKPVACYPDAARENGVLVMCEVMMPDGKTPHVSNKRATVLDDEGAWFGFEQEYFFYKDGRPLGFPEEGYPAPQGPYYTGVGYKNVGSVARKIVEEHLNLCLAAGINHEGINAEVAKGQWEFQIFGKGSKTAADQMWMARYLMLRLTESYGIDIEFHCKPL

SEQ ID NO: 14463 - protein, 197 aa, Bradyrhizobium yuanmingense
KTQIKEFASFPTLEQLPLWGFDGSSTQQAEGHSSDCVLKPVAVFPDGARTNGVLVMCEVMMPDGKTPHPSNKRATILDDSGAWFGFEQEYFFYKDGRPLGFPTAGYPAPQGPYYTGVGYSNVGDVARKIVEEHLDLCLAAGINHEGINAEVAKGQWEFQIFGKGSKTAADQMWMARYLMLRLTEKYGIDIEFHCKPL

SEQ ID NO: 14464 - protein, 148 aa, Sesbania rostrata
GAFTESQEALVTSSYETFKQNASDLSVLFYTFILEKAPGAKNLFSFLKDSDGVPKDNPNLKAHAAKVFELVVDSAVQLRTKGAVVIADANLGPVHVQKGVTDAHFVVVKEALLKTVKEATGAKWSDELSNAWEVAYDELAAAIKKAMG

SEQ ID NO: 14465 - protein, 166 aa, Populus nigra
MPRDREPLSVGRVIGDVLDPSTRSISLRVDYNSREVNNGCELKPSHVVNQHRVDIGGEDLRTFYTLVMVDLLNILDVYMLVTDIPATTGANFRQEVVCYESPRPTAGIHRFVFVLFRQLGRETVYALGKCQNFNTRDFAELYNLGSPVAAVYFNCQRESGSGGRRP

SEQ ID NO: 14466 - protein, 465 aa, Synechococcus sp. PCC 7002
MNKISRRSFVFGMGATASALVYGACTAPTGKKIQGRLPHALAVEPLVRPESLEKPNLTVGFVPVNDCAPLAIAYRKGLFQKYGLNVQLSREASWANARDGLIFGRLDASPVVSGAVTNARIGAEGARAFPLVAAMTLHRHGNALTMNRQLWEAGIKPWPDYQGDLAKFGRDLRSFWQKSPLDDRAWGIPLSSSIYEYFARYLVAAIGLDPMRELRLVITPPPQMVSNMRIGAMQAYMVAEPWNTRAIAKNEGIGFTFIQGRDVWRGHPDRVLAVAESFIEQYPKTYRSLVKALIEACQYCGDPNHRQEVASIIAERAFTGANINYTRPAIVGDYDYGGFDAQQRLESSLDTTTFFELHPETSTVPHDHSTFLWQSQGIWLMTQAARWGQIETLPTDLEAIAKRAWRTDLYRDIAAEMGITSPSEDYKVEPATAFIDQKAFDPSDPVGYLNSFELRAKRPQIYPVS

SEQ ID NO: 14467 - protein, 280 aa, Synechococcus sp. PCC 7002
MDYVIPKELVDASIKAGETKARLSVKDLLIRGFYSGLALGVATTLAVTVAVQSGLPFLGALLFPWGFASIVLFGMELVTGNFALMTSAMLARRVRFGRVINNWLWVYLGNFLGCLFVALLMGFSLTNGGTADPSPVGEKIIEIALSKTVAVKEMGTNGFFLFIVRGIFCNFLVCLAVMMGMVSKSVPGKFMGCWFPIFAFVTLGLEHIVVNMFFILTGMVLGAPISGMDMVFWDFLPVTIGNIIGGGIFIGALLYSTHYTKSQGLPQMAMEESMKNPVLR

SEQ ID NO: 14468 - protein, 628 aa, Synechococcus sp. PCC 7002
MKPSWKTVVLWALPLLVIGFFVWQGAFSANPSNLVGNSANIRMSYGRFLEYLDAGRVTSVDLYEGGRTAIIEAVDPELDNRVQQIRVDLPGNSPELISKLRDAKVDFDSHPVSNNGAVWGILGNLIFPILLISALFFLFRRSSNMPGGPGQAMNFGKSKAKFMMEAQTGIMFDDVAGIEEAKEELQEVVTFLKQPEKFTAVGARIPKGVLLVGPPGTGKTLLAKAIAGEAGVPFFSISGSEFVEMFVGVGASRVRDLFKKAKENAPCLIFIDEIDAVGRQRGAGIGGGNDEREQTLNQLLTEMDGFEGNTGIIIIAATNRPDVLDSALMRPGRFDRQVTVDTPDIKGRLSILEVHARNKKLADEISLDVIARRTPGFSGADLANLLNEAAILTARRRKEAITMAEIDDAVDRVIAGMEGTPLVDSKSKRLIAYHEVGHAIVGTLLKDHDPVQKVTLIPRGQAQGLTWFTPNEEQGLTTKSQLMARIAGALGGRAAEEEIFGHDEVTTGAGGDLQQVSGMARQMVTRFGMSDLGPLSLESQQGEVFLGGGFMNRSEYSEVVASRIDEQIRVIAEEAHRLARKLVRDNREVIDRLVDLLIERETIDGEEFRQIVAEYTTVPEKEQFVPQL

SEQ ID NO: 14469 - protein, 258 aa, Synechococcus sp. PCC 7002
MQQGVPSIVVDNKATILVVDDEIAVRRILQTRLSMIGYDIITAADGDEALDIFWREDPDLVILDVMMPKRDGYYVCQEIRRESSTPIIMLTALGDVADRITGLRFGADDYLIKPFSPKELEVRIQCILRRTQKTLPPTEEAGILRTANLVIDTNRRKVTQNNKPLRLTHIEFNLLELLVNQAGQPLSRTDILTAIWGYVPRRHSDLRVVDVHVSRLRSKIEQDPRQPEFIITERGTGYLFRKLPVAIAANVSSSMAAS

SEQ ID NO: 14470 - protein, 389 aa, Synechococcus sp. PCC 7002
MKLAARVGQIKPSITLTISAKAKAMKADGIDVCSFSAGEPDFDTPDHIKTAVKAALDAGKTKYGPAPGEPALRQAIAKKLQTENNLPYNPENVIVTNGGKHALYGLMMALIEPGDEVIIPTPYWLSYPEMVILAGGTPIFVETTAATGYKITPDQLRQAITNKTKLFVFNSPSNPTGAVYSPAEVTAIAQVLVEKQVLVVADEIYEKILYGDAVHQSIGSVSDEIFPLTITCNGFAKAFSMTGWRLGYIAAPVELIKGMTTIQSHSTSNVCTFAQYGAIAALEGGLDCVQEMLTAFSKRREIMLGAIQDLPGLSCPSPDGAFYLFVDISAYGLDSLSFCKQLLAEQQVAAIPGVAFGNDRCIRLSYATDLSTIEKGMSRLGKFLQSLSR

SEQ ID NO: 14471 - protein, 313 aa, Synechococcus sp. PCC 7002
MTQDFDLNPTIPAAPADFRSGFVALIGRPNVGKSTLMNQLIGQKVAITSPVAQTTRNRLRGILSTDQAQIIFVDTPGIHKPHHELGKILVKNARSTVGAVDLVVFIVDGAVPLGKGDQFIADFLVKTEAKVILGVNKIDQRPDKRPEILASYQALATQNHWQLQEFSALAGDRLPELQDKLIQALDPGPYYYPPDLITDQPERFIMAELIREQILLHTRQEIPHSVAIAIEQVNEGEEITEVRAAINVERNSQKGIIIGKKGAMLKTIGTAARQQIQKLIAGKVYLELFVKVQPKWRQSRTRLAELGYRLEDN

SEQ ID NO: 14472 - protein, 109 aa, Synechococcus sp. PCC 7002
MSLTPETREKIDQLVNSSKIFVFMKGSKLMPQCGFSNNVVQIFNSLGVEYQTFDVLEDYDVRQGIKEYSNWPTIPQVYVNGEFVGGSDIMIELYNSKELHEMLEVALAS

SEQ ID NO: 14473 - protein, 390 aa, Synechococcus sp. PCC 7002
MKKPAATQTQTVPMQVLIAPAQVLKGNNALAQAGAAIARWGKRPFVVGGQQSLEKLADPLQTLAEQKKLDLASGSYSPDCSEASLQELNKKFKAHKADFVIGIGGGKALDTAKLLAHQQRCPIVTVPTSAATCAAWTALSNIYSDQGAFQYDVALEQCPNLLILDYELVRTAPQRTLIAGIGDAIAKWYEASVSSGHSPQTLTIAAVQEARILRDLLFQKSSQAIADVHSPEWQEVVDATVLLAGVIGGLGGANCRTVAAHAVHNGLTHLPAAHGILHGEKVAYGILVQLRLEEVCQKSQLAETARQQLLQFYRDIGLPKSLADLGLNTMTLAELRQVAEITCQPQSDIHRLPFTVNPDQLMAAMVSTEATRESTASEPQSAPEVTKAQA

SEQ ID NO: 14474 - protein, 487 aa, Synechococcus sp. PCC 7002
MTTSFQTIGLSDARVDLLENIGFEKPTEIQSKAIPAILEGRDVVGLSQTGTGKTAAYSLPFLEKIDLEQKTVQGLILTPTRELAVQVTQSLKEFAVDRRLWVLTVCGGQSMERQIRSLQKGVHIVVGTPGRVIDLLERGKLSFEELRWAVLDEADEMLSMGFIDDVKKILRQSPKTRQTVCFSATMPPAIRDLVENFLNDPINITIKQPQVTPDRIAQEVYMIPRGWSKTKALLPILEMANPESAIIFVRTKRTASELTNELVEAGQSADEYHGDLNQNQREKLVRRFKDGKIKMIVATDIAARGLDVENLSHVINFDLPDNTESYIHRIGRTGRAGKTGTAIALVEPSDRRLLRQIERRVKQSLKVSTIPSRTEVEAQRVTRLETQVREALAGERMASFLPIVKRLGDEYDPQAIAAAVLQMMYDNNSPEWLNEDWEVPEVNTKTGLPKPTKKGGRSGRRSNYKGSGGGYKGDRSRGRRSYSSNHS

SEQ ID NO: 14475 - protein, 651 aa, Synechococcus sp. PCC 7002
MGKVIGIDLGTTNSCVSVLEGGNPLVITNAEGARTTPSIVGFGKSDIRLVGQLAKRQSVTNAENTVYSIKRFIGRRWDDTEQERRRVPYKCVKGKDDTVDVAVRKQVFTPQEISAMVLQKLKADAEAFLGEEVFQAVITVPAYFTDAQRQATKDAGTIAGLEVLRIINEPTAAALAYGLDKQDQEQFILVFDLGGGTFDVSILQLGDGVFEVKATSGNNQLGGDDFDNAIVEWMVERFQQLEGIDLSSDKMALQRLREAAEKAKIELSSTITTSINLPFITADDTGPKHFEIDLSRSKFEELAKDYIEATLRPVEQALKDAELTVDNIDRIILVGGSTRIPAVQQAIQGFFHGKQIDRSVNPDEAIAIGAAIQAGVLNGEVKDVLLLDVTPISLGIETLGEVFTKIIDRNTTLPTNNSQVFSTATDGQTSVEIHVLQGERALAKDNKSLGKFLLTGIPPAPRGLPQIEVSFEIDVNGILQVSAQDRGTGKEQGIKITNTGGLDPAEIEAMRAEATKYAEQDRQRLQVVDLQNQADSLFYSLDATLRENSELLTNEVKTQLIQKRAVLEQSFTDRSFSTAEIRRLLEDFKTALLAIGSKLYDREGDTPIYRPISVTPVPTTADDDLIEFPTEAGVVIENGEGNITGDYETID

SEQ ID NO: 14476 - protein, 378 aa, Synechococcus sp. PCC 7002
MKRPIYLDNHATTPVDPQVLEAMLPYFTEQFGNPASAGHVYGWEAVAAVERSREMIASSIGAEPEEIVFTSGATEANNLAIKGVAEAYFDKGRHIVTVQTEHRAVLDPCAYLETLGFEVTHLPVQANGLLDLSLLEKALRQDTVLVSVMAANNEIGVLQPVAEIGTLCHDRGVLFHCDAAQAIAKIPLNVQTQNIDLLSLTAHKIYGPKGIGALYVRRKNPRVNLAPQLHGGGQERGRRSGTLYTPQIVGFGKAVEIGLAQMDEENAKIKLLRDRLWQQLQPLEGIYLNGDLDQRLLHNLNISIENIDGTALLLALRNTVALSAGSACSSGKPSHVLTALGRSPALCRASLRFGLGRFTTATDIDHVAYTLQHTLHSL

SEQ ID NO: 14477 - protein, 402 aa, Synechococcus sp. PCC 7002
MYGITSTANSTGNQSYANRLFIYEVVGLGGDGRNENSLVRKSGTTFITVPYARMNQEMQRITKLGGKIVSIRPAEDAAQIVSEGQSSAQASAQSPMASSTKIVHPKTTDTSVPVNIYRPKTPFLGKCIENYELVDEGGSGTVRHVTFDISEGDLRYLEGQSIGIIPPGEDKNGKPHKLRLYSIASTRHGDMEDNKTVSLCVRQLEYQDPESGETVYGVCSTYLCNLPVGTDDVKITGPVGKEMLLPDDEDATVVMLATGTGIAPFRAFLWRMFKEQHEDYKFKGKAWLIFGVPYTANILYKDDFEKMAAENPDNFRLTYAISREQKTADGGKVYVQSRVSEYADELFEMIQKPNTHVYMCGLKGMQPPIDETFTAEAEKRGLNWEEMRRSMKKEHRWHVEVY

SEQ ID NO: 14478 - protein, 545 aa, Synechococcus sp. PCC 7002
MTLISAQQALQGLGGSDSFGGRRSNLQSLCHVCGKYHGASDHWQFMQTMPQDPVEMVDDLVKMGIYKENQLRAAEGVNAYELRKTLFLKRIGRSDPKREKLILALCKQAGGMENAFAAAFGPQAGLFFADSIRSSQQTRREFLRNMAVGAALVSLASCGQDTTPPAADTPADAPVGNLEKTDLQIGFIPITCATPIIMSEPLGFYEKYGFNAKVVKMPSWGAVRDSAIAGELDAYHMLAPMPIAMTLGLGSEAFGVKLASIENINGQAITVAEKYKGQVNGPADFRGFTIGVPFPYSMHNLLLRYYLATGGIDPDVDVQIRPVPPPDSIAQLVAGDIDAYLMPDPFNQRAVYEGAGFIHMLTKEIWPGHPCCAFAASDQWIDANPNTFRALNKSIIEAAAYAQVPENRPEIARAISERAFLNQPVEVVEAVLTGKFDDGNGNSLDIPDRIGFDPYPWQSFANWISSQLVRWDLQGDGLAPTIIPETGYDTVGTDVFLTDLARELATELGQTPPTEIYREETLKFDTFDPADPAAYVQQQIDEYGV

SEQ ID NO: 14479 - protein, 387 aa, Synechococcus sp. PCC 7002
MQIYLDYSATTPPHPLVIQRVQAVCGQTWGNPSSLHGWGNRAATLLEMARMQVASLIGAANPDEIIFTAGGTEADNLAIFGITDQYREPQHLIISQVEHPAIAKAADFLATQGWQVTRLGVNRRGQVDPQDLEKAIQANTILISVIYGQSEVGTIQPIAELGAIAKKHHITFHTDAVQAVGRIPIDLRQLPVDLLSLSGHKIYGLQGAGALYVRDGIKLQPRLYGGGQEHNLRSGTQNLPGIVALGMAAELAEETMAQEIERLSRLRNFLLNRGSSSPHLQITGDRHARLPHHVSFALRQDSPLLGLTGKTLVRQMNLAGIGISAGSACHSGKLNPSTTLKAMGYSDQEALSGIRLTLGAQTQMEDIEWTAIALEQILQRQPTVLLA

SEQ ID NO: 14480 - protein, 242 aa, Synechococcus sp. PCC 7002
MENHKERILVVDDEASIRRILETRLSMIGYEVVTAADGEEALATFDEADPDLVVLDVMMPKLDGYGVCQELRKESDVPIIMLTALGDVADRITGLELGADDYVVKPFSPKELEARIRSVLRRVEKNGGTGIPSSGVIHVGSIRIDTNKRQVYKGDERIRLTGMEFSLLELLVSRSGEPFSRSEILQEVWGYTPERHVDTRVVDVHISRLRAKLEDDPSNPELILTARGTGYLFQRILEPGDE

SEQ ID NO: 14481 - protein, 381 aa, Synechococcus sp. PCC 7002
MKIAVARETVAGERRVALTPDQVSRLVKKGWEIHVEAGAGEASLLPDAAYEEAGAKVVGDRQSLWKEADLLVKVAVPTEEEVALLPEGSMVASLLNPLGQPEIIQKLADKKITALGMELIPRTSRAQSMDVLSSQAGVAGYKAVLLAAAALPKFFPMLTTAAGTIRPAKVFVIGAGVAGLQAIATARRLGAVVEAFDIRPAVKEEVQSLGAKFVEVQLEEETATAGGYAKEVSEDSKKKSQALISDHVATADVVITTAQVPGRRAPVLVTDDMIARMQTGSVLIDLAGEQGGNCEGCEAGREVQVHGATIIAPINLPSTVPVHASQMFAKNMATLLQLLIPEDAINLDFADDILDSVCVTHQGEIRNQRVKDALQQMAVTA

SEQ ID NO: 14482 - protein, 388 aa, Synechococcus sp. PCC 7002
MDFGIGFLSNNVMLPILDFFYGIVPSYGFAIIALTLVIRFAVYPLSAKSIRSMRRTKITQPLMQKRVKEIQERYKNDPAKQQAAMSEVYKEFGNPLAGCLPILLQMPILFALFATLRGSPFANINYTANLQILPSEKMEQVQPQAVDVKTQNVYFDSGIHYPITLSLPAGNKVGVGETTQFVLQSDSGKDFAALAAEYPDSNIKPSFEVTKGQERVEIQPDGSLVALAPGDVSIQVTVPGIAADKGFLFIEALGRIGVNGDDGIHWDILGMVLFFGVSLYINQTISGGAPSSNNNSGGDQQQQAQQTVNKITPLIFSGMFLFFPLPAGVLMYMTIANAFQTVQTFILTKEPLPENLQKLVDEQEKSEKGRDKLPFERKGSKKKEKTSG

SEQ ID NO: 14483 - protein, 576 aa, Synechococcus sp. PCC 7002
MIDQLWLLICAGLVLLMQAGFMCLESGLTRTKNNINVAVKNLSDFGLSVMLFWGIGYGLMFGLSQWGGIGGSNFFLGTTGNPEEAAFFLFQAMFCGTATTIISGAIAERLKFEAYIIIVILVSGFIYPVFGHWAWNEAGWLRQLGFLDFAGSTVVHSMGAWVSLGTLLLVGAREGRFTPTGTQKIQGSNLPFAVLGALLLWVGWLGFNGGSTFVFNDQVPQIITNTVLAGTAGMVTAMLLSQCYLKRSEVEEIINGSLAGLVAVTACCDLVSSPLAVVVGITAAGVARWVSSLLKRYKIDDAVDAIAVHGGAGLWGTLCVGLFGNVEARHSQLLVQLLGVAIALAWGTGLTWLILQLLQRWYPLRVSPEAEALGLNISEHGAKTDAYELFQVMDHQAATQDLTLRVPVEPFTEIGHIATRYNQVIDALEQNHRENAESLEELYTITAMAVAAIEHQNFDPDLFASFGDRPDELGILGRSLQQLLQTINQQTAALEQLQQQQQTTLKAVLGEIFQQRFGEPSLTYQGQLPDLPSALTMAEITHMAIATTSFGQFLTQVQATNIASGENQPVAADWND

SEQ ID NO: 14484 - protein, 297 aa, Synechococcus sp. PCC 7002
MSQFVLQDFIGSEVERSYAESPVVILPIPYEATTTYRKGCEWGPDALLEASHQLECYDDELRRETCFDVGIFTHGAIADTRQNPGLSAEEMLAVTSETTQNLLQDGKFVIALGGEHAITTGVVKGHLEFYQEPFTVVQIDAHADLRQSYEGSEHNHACIMRRVMDLGLPSLPVAIRSLCREEADLLAAKEIPVIWAWEMQNDPNWIETAIANIKTEKVFLTIDLDGIDPTLIAGVGTPEPGGMDWYSTLRFLRRLFREKQVIGCDIMELAPLDDSVVSEYTAAKLVYKLIGYWYENR

SEQ ID NO: 14485 - protein, 513 aa, Synechococcus sp. PCC 7002
MGVIDWAIVAIYGLIVIAIGVIASRKQTNTDEYFRGARQIPWWAIAFSIIATSFSAASLLGGPGEGYTNGFLYLQLQLGDLLGYGLVIALLLPFFVRLNLTTAYEYLEKRFDAKTRSLGSLCFLLFVIARLGGLLYAASLVVATVTDIPISIAILLVGLVSIVYTVAGGITAVVWTDVLQFAMIFVGIGAGIWTAVNGVPGGFGELWQVAAANDKLAVFNFSWDPGSIRSLPTALFAYGILAFAVAGTNQQSVQRYVSCADETSARKAILLGWFSGLVGVAATLLLGVLLFGFYNINGGLPTEVPADGILSHFIINQVPPGASGFLVAAIFAAAMSSIDSALHSLATCITVDFYDRYRQPKASEKQSLRIAQILIVIWGLVGIGAAFYVASTGKDLLEFLVSYTTMFLGPLLGIFLMGVLCPRVNGTGAFYGTVAAVILVIIGSNAEWLTFPGIWRSAITAPLGILLGYGISLLGQIPPRRSLQGLTLWSQTQGTKPLGRPGLEEDVSRYEDY

SEQ ID NO: 14486 - protein, 481 aa, Synechococcus sp. PCC 7002
MTPLFSRLLALAHDNHAAFYAPGHKGGQGIFSGLAQAWGKEIFRADLPELPGLDNLFAPEGVILEAQTLAAETFGADQTWFLVNGSTCGIIAAILATVGEGEKILLPRNVHQSAISGLILSGAMPVFVNPPYDPQWDLSYGLTPESVEQALQIHPDIKAVFVLSPTYQGVCPNLKEIAAITQRHNIPLIVDEAHGSHFKFHPNFPPPVLELGADLVIQSTHKTLGAMTQASMLHRQGARVDPQKINRALQLVESTSPSYLLLASLDAARAQMAAQGETLWSETLALAQRARQALTSIPGLKIFDPQPQAGIEYFDPTRLTVDVSGLGLTGYAADEILTETLDVIAELPLGRSLTFILTFGNTNQDIQRLIDAFQTLSQNNQAQQPLNKPNISTDQPKTCYGLPQLSPRQAFFATSRAITLEASLNQICAELICPYPPGIPAIMPGEKITAATLASLRQTLQLGGVITGASDPSLKTIRVID

SEQ ID NO: 14487 - protein, 443 aa, Synechococcus sp. PCC 7002
MKRRHLLKYGTFAAWGYGLTACNRLPDTVRLPGRSAKQANLESTPPILDLSAPEKQTLTLGYVPDLAIAPWLMALTQGFFEQYGLEVELYPQVDQQAVEQGLLESRFDAAITSFSTPLIYQLKSPRVDLVALMQIHRHGGVFCGCQQTWADNIRSGIDYANFAEFAAAYRDYVRALPEKTFGVDHDYSTTAYLYRYWWAALGFHPDRDLELVTFAPTELRHKLQAGLIQGYCSQEPWGQEAIATDSGFIQYLSGDIWQGHPGPVITTSAGWREENPNTAKALIAATLQGCQYCQDPTNAATIGPLLASNLDLDPAALTALFSGQYFYGGDGDRPIARRDSPIWFDQGRRITAPDQANYCWQSHGLWLLTQMVRWQHFELRQYPQNARELVAAAYPPEPYGAIAPGFGLRLPPESFKSEIHFIDQRAFLPNQVASYLNQFKIRT

SEQ ID NO: 14488 - protein, 525 aa, Synechococcus sp. PCC 7002
MAKVLVSDSIDQAGIDILSQVAQVDVKVGLPLEELISIIPEYDALMIRSGTKVTKEVIEAGKNLKIIGRAGVGVDNVDIPAATRQGIIVVNSPEGNTIAAAEHALAMMLSLSRHIPDANQSVKAKEWNRKKFIGAEVYKKTLGVVGLGKIGAHVASVGKALGMKLLAYDPFISEERAGQLGCRLVDLDYLFREADYITLHVPKTPETTHLIGEESIAKMKPTTRIVNCARGGVVDEAAVAKAIQEGRLGGAALDVFEEEPLGESELRALDNVVLTPHLGASTAEAQVNVAVDVAEQIRDVILGLPARSAVNIPGLNANVMEKLRPYLQLAETLGNMVGQLAGGRIEKLNVTLQGDLAEKEAKPLVVAALKGLLSPALRERVNYVNAEIEAKERGIRIIETRDESVRDYTGAIHLEATGADGEHSVNGALLSDGDIRITSINGFPINVPPTGYMLFTLHRDVPGIIGKIGSLLGSFNVNIASMQVGRKIVRGDAVMVLSLDDPLPEGVLSEITKVTGIRDAYTVKL

SEQ ID NO: 14489 - protein, 604 aa, Synechococcus sp. PCC 7002
MAMIVQKYGGTSVGSVERIQAVAKRVQQRAQAGNQIVVVVSAMGKTTDGLVKLAHEISTNPNRREMDMLLSTGEQVSISLLSMALQELGQPAISLTGAQVGIVTEAEHSRARILEIKTDRLQRHLQKGEVIVVAGFQGISKTEDLEITTLGRGGSDTSAVAIAAALKASCCEIYTDVPGILTTDPRIVPEAQLMAEVTSDEMLELASLGAKVLHPRAVEIAKNYGVPLVVRSSWTEDPGTWVTSAPVSDRPLINLEIAKAVDAVEFDTNQARIAMLHIPDRPGVAAKLFGEIATHNVDVDLIIQSIHDGNSNDIAFTVTENAATQAQAIAEAIAPTLCAGTDQDLSDVAVMSANDIAKITISGAGMIGRPGIAATMFQSLADAGINIEMISTSEVKVSCVIQQTDCDRAIATLCDVFDIASSPMNATPAALNPEDHPPVRGVALDLKQAQLAIRHVPDSPGMAAQIFSLLAHQNISVDMIIQSQRCRVLNGVKTRDIAFTVAQGDAEAARLALSSMAEQLNFGEIEVDPAIAKVSIVGSGMIGAPGVAARFFQALATAKINIQMITTSEIKISCVVPETQGQAALKLVHEAFALGGEAKVEVPA

SEQ ID NO: 14490 - protein, 354 aa, Synechococcus sp. PCC 7002
MQFIDHAEIEVIAGKGGDGIVAFRREKYVPAGGPAGGNGGWGGSVIFRAEENLQTLLDFRYARTFKAQDGERGGPNNCTGASGEDLIVDVPCGTVIYDRETDEEIGDLVFHGQIFCVAKGGKGGLGNKHFLSNKNRAPEYALPGLEGEIKQLRLELKLLAEVGIIGLPNAGKSTLISALSAARPKIGAYPFTTLIPNLGVVKRPTGDGTVFADIPGLIEGAHQGVGLGHEFLRHIERTKVLVHLVDLNAEDPIKNYETIQGELEAYGRGLPELPQIIALNKLDAGDHEFADFITEELRRLTDAKILTISAVSRTGLEQLLQEIWDVLDYLKEISRNEAPETSVMDLESLHIADE

SEQ ID NO: 14491 - protein, 287 aa, Synechococcus sp. PCC 7002
MTKKIAFLGMGVMGAPMSLSLQKKGYQVTVWNRSAASPHLARVAAAGLSVAPAIATAVQDADYIFSCVSDVPDVKSVLLGEEGVIHDAKPNALIIDFSTIGKPAAQEIAKTLKTKNFRFLDAPISGGDVGAENGTLTIMVGGDRPDFDEVKPCLEAMGKNIYYCGEIGSGQAVKMCNQVLCAIHMVALCEAIQLAQSQGLDPDLMIEVCQTGAAGSWAIANLGHKITARDFRPGFMVKHIIKDLRLVNESLSDLELPGVTLATQKFKDTAQLADALEQGTQAMFRSY

SEQ ID NO: 14492 - protein, 272 aa, Synechococcus sp. PCC 7002
MAMINSEQLKPPLKWAGGKRWLVPKLRLIWQDYQDYQLIEPFCGGLAIALGLVPQKAILNDVNFHLINFYQQLKKGLKSSILMANDADLYYQCRDRFNELIENNQSETQEAAILFYYLNRTGFNGLCRFNSQGKFNVPFGRYRSINYRDDFFAYKKLFQAWQFQWGDFEKIPVADHSFIYADPPYDVEFRQYAAGGFSWADQERLATWLAAQTAPTIASNQATPRILDLYQSLGFTVTTLSAPRRIACNGDRTPAKEMLAFRNLAAEDLLNT

SEQ ID NO: 14493 - protein, 226 aa, Synechococcus sp. PCC 7002
MPELPATQITDLATAFRQFHSGPFPPVVENYDRGKTIFFPGDPAERVYFLLKGAVRLSRVYEAGEEITVALLRENSVFGVLSLLTGQKSDRFYHAVAFTPVELLSAPIEQVQKALNEHPELAMLMLKGLSSRILQTEMMIETLAHRDMGSRLVSFLLILCRDFGVPTDEGIRIDLKLSHQAIAEAIGSTRVTVTRLLGELREQDMISIYKKKITVHDPVNLSQQFA

SEQ ID NO: 14494 - protein, 390 aa, Synechococcus sp. PCC 7002
MSEQPNFRPPSEAQAALEKESHLPLTGWQQEVDRGLEYGLEAAASIKDRSIPTFSRGELPHYAGINTFLKAPYLEDVRKVGEYDVAILGVPHDSGTTYRPGTRFGPQGIRRISALYTPYNFEMGIDLREQITLCDVGDVFTIPANNEKSFDQISKGVAHVFSSGAFPIILGGDHSIGFPTVRGVCRHLGDKKVGIIHFDRHVDTQETDLDERMHTCPWFHATNMANAPAKNLVQLGIGGWQVPRQGVKVCRERATNILTVTDITEMGIDAAAEFALERALDGTDCVYISFDIDCIDAGFVPGTGWPEPGGLLPREALALLGKIVRKAPVCGLEIVEVSPPYDISDITSLMATRVICDTMAHLVLSGQLPRKEKPAYIHPEANMAVDQAWT

SEQ ID NO: 14495 - protein, 236 aa, Synechococcus sp. PCC 7002
MAESPTNPVSDDTARTFLKALPFFQGLPEASLQKAISHLVTRPFPANQIILLEKDWGGSVYFIQTGWVKIRTYNLDGKEITLNILGAGELFGEMAALEEATRSTDVITLTATTISSIPAADFVELVNTEPLVGVRLAQLMAKRLRQVNRRLQVRETNSLARVADILVFLAESQGQATDQGEIRIPSLPHRELSSLSGLARETVTRVLTKLEKKGLIRRTPDAVFIPNLRALDDIIH

SEQ ID NO: 14496 - protein, 257 aa, Synechococcus sp. PCC 7002
MSEVILAIKNLTATVDGQPILKGVDLEIKAGEIHAIMGRNGSGKSTLSKIIAGHPEYEVTGGEIIYKGENLLEKEAEERALDGIFLAFQYPLEIPGVSNLDFLRVAYNAKLKHQGKEEIDAFDFEDLIEEKLEVVKMNPSFLERSLNEGFSGGEKKRNEILQMALLEPSLGILDEIDSGLDIDALRIVAEGVNQLATPDNAFLLITHYQRLLDYITPQFVHVMYDGRIVKSGGKELALELEATGYDFLDQELAAGVV

SEQ ID NO: 14497 - protein, 519 aa, Synechococcus sp. PCC 7002
MTDAATIQKIKLTKIEQAKQAKPGLAIKDELATLAQAGWEAMDQDDLIIRLKFLGLFHRPVTPGKFMLRLRTPHGILNSAQVRALAEIVQRYGEDGSADITTRQNIQLRGIRLEDTPEILTKLKQVGLTTVQSGHDNVRNITGSPVAGIDPEEYFDTRELAAQLQNMITNYGEGSLEFSDLPRKFNICLEGAPDNSSHVEINDIGFVPAFKDGQFGFNVLVGGYFSAQRQAEGISINVWVPPNEAVLAVSRGILALYTRHSAEEGLRGNRAKARVLWLVEAWGVNAFRARLEAEIGQSLEPAAPEHALTMDKRDHIGVYAQKQAGYHYVGLHVPAGRLTAEDMFEVARLAETYGNGEIRATVEENFIIPYVKSENVEALLQEPLLEKFSVNPSTLVRSFVSCTGNRYCNFALVETKEQGLALARELDAELDIPQRVRMHWTGCPNSCGQAQVGDIGFIGSKAKVDGAIVEAVNVLTGGTVGNQASLGAPVAQKVPCGDTLKATVKHILIEQFGATPKSE

SEQ ID NO: 14498 - protein, 197 aa, Synechococcus sp. PCC 7002
MAKPAVFLDRDGVLNIEAGYIHTLEDLNLIPGVAAAVRSLNDQGIFCCLVSNQSGPARDYYGIDHVEALHTRLRTLLNQEAAAHLDALYYCPYLSQSAGGTHPDFTQWGTWRKPNTGMLVTAAWEHDLDLRRSFMVGDKATDIDLAHNAGLRGILVQTGYGKQVLSGKYQHHTKPDYVAKDLQDGVNWVLQQLQKKP

SEQ ID NO: 14499 - protein, 366 aa, Synechococcus sp. PCC 7002
MVGYLVYLTISAATYGIFCLGLNLQWGFTGLINFGHVAFMTVGAYATVLLSSQGVPLLLSLAIGAGVAALLGLLIGLSTLRLREDYLAIVTIGVSELVRLVALNEEWLTRGAFGVQGYPLPLGSFRPNQVGKISLIFWLTIIAIFAAWQLWRGLRWRWKKLKKQEKSGLGVIVWGILGGGIITSLFINGCIALQNYNYKAGLMLLSVVALTLVYAGLEYLVQSPWGRVLKAIREDEEIPRALGKNVFWYKLQAFMLGGAIAGGAGSFYAWQLTNVYPANFDPLVTFNAWTIVVLGGAGTNPGTLIGALIFFAYDSLTRFVLPQLNLVDDARLGALRIMVIGLILMVLMVWRPQGILGNKDELTLGK

SEQ ID NO: 14500 - protein, 260 aa, Synechococcus sp. PCC 7002
MARGGVFGYGLAIAASFFFGSTSLTQATPLETIQARGILRVAVKENVRPLGFRDEAGNLQGLEIEIAHQLAAELLGDRQAVELIPLTNQERLDAVLTGEVDLVIAQLGLNASRQRLVNFSPYYYLDGIGFVTRDREIQSLNQISDQRIVVLEGSEAIAAVRAYFPGVTLVGVNSYQEALNYLENNETAFFAGDHSVLTGWVQEYPEYQLLPAWLTGNPLAIAFPKGRQHQSLSQALQKTVTDWQNSNWLTERINHWGLPQ

SEQ ID NO: 14501 - protein, 532 aa, Synechococcus sp. PCC 7002
MPKQHLKLMPKSTFQQRGWAREDMRSPHTTDNSVVLRFARQLSRHFSPAWLACIPLAAIITVVWGTAAMAQSDAVDAAGQVQIILDTIFLLIASVLVIFMNAGFGMLEAGFCRQKNAVNILSKNLIVFAVATIAYWAVGYAFMYGDGNTFIGLKGFFFNGSSIPYSGDGSEWYIEEVIDGETVQILQFVPESVSFLFQVAFAATAATIVSGAVAERIKFDAFLIFSFLLVAISYPITGHWQWDGEWLSALPFLGVDEEGAALFGFHDFAGSTIVHSVGGWAALVGAAVVGPRLGKYRDGQVHAIPGHNMSIATLGCLILWIGWFGFNPGSQLAADAAVPYIAITTNLSAAAGGITATATSWIKDGKPDLSMIINGILAGLVGITAGCDGVSFFSAVIIGAIAGVLVVFSVAFFDAIKIDDPVGATSVHLVCGIWGTLAVGLFKMDGGLFTGGGIQQLIAQIVGILSIGGFTVAFSFIVWYALSAVLGGIRVEKDEELRGLDIGEHGMEAYSGFVKESDVIFRGTATGSETEG

SEQ ID NO: 14502 - protein, 1549 aa, Synechococcus sp. PCC 7002
MDRDIMNHQGTFSQNNHQETTNYYTGPRWLVEERDACGVGFLAYKDGRKTHKLIEQTLTALGCMEHRGGCTADRESGDGAGVMTALPHELFAEWFQAEGITQPAPETYGVGMVFLPQAEAECAAAKALVEDVLTRRQFKILGWRDVPVAPETLGIQARENQPQMKQVFVVSEQGLTGDELDKALYIARSEIGKHLTDVFYVCTLSCRTIVYKGMVQSEVLGKFYKDLTNPLYKSEFAVYHRRFSTNTMPKWPLAHPMRLLGHNGEINTLIGNINWMKARENILEIPGWNKDDIEALHPIVNTDNSDSFNLDSAMELLVRAGRSPMEAAMILVPEAYQNQPSLKAHPEITDFYDYYAGMQEPWDGPALLVFSDGKTVGATLDRNGLRPARYCITKDGYILVSSEAGVVDVLDEDIVEKGRLGPGQMVAVDFQTQELLKNWEIKQRVAESQPYGTWLRENRQVLESQDFVGDRQQGETDLLRLQTAFGYTAEDVEMIINAMAEMGKEPTFCMGDDIPLAVLSDKPRLLYDYFKQRFAQVTNPPIDPLRESLVMSLNMYLGERGNLLDCGTEDAKVLKLNSPVLNEAELQRVRDSQLGATTLATTYAIANGPDGLRGALEKLCAAAEAAVRAGNKIIILSDRADGTVDQDHSFIPPLLAVGAVHHHLISVGLRLSASIVVDTAQCWSTHHFACLVGYGASAVCPYLALEAVRHWWYIPRVQKQMAAEQIPAMTIEKAQDNYRHAIEAGLLKILSKMGISLLQSYHGAQIFEAIGLGMEVINVAFKGTTSRVGGMTLADLSQEGIAFHSRAFPELSGSKLANYGFVNYRKGGEYHMNSPEMTKALHKAVAAYNDDQQEAFDHYGNYQDYLENRPATALRDLLDFESDRPAIDLSEVESVESIVKRFCTGGMSLGSLSREAHETLAIAMNRLGAKSNSGEGGEDPVRFKILDDVNASGDSPTLPHLHGLRNGDTANSAIKQIASGRFGVTPEYLMSGRQLEIKMAQGAKPGEGGQLPGKKVSEYIAMLRNSKPGVTLISPPPHHDIYSIEDLAQLIYDLHQINPAAKVSVKLVAEIGIGTIAAGVAKANADVIMVSGHDGGTGASPLSSIKHAGCPWELGVTEVHKTLMDNQLRDRVILRADGGLKTGWDVIMAALMGAEEYGFGSIAMIAEGCIMARVCHTNQCPVGVATQQQRLRDRFKGIPEHVVNFFYFIAEEIRAILAKLGYRSLNEIIGRADLLKPRENVKLTKTSGLVLDCLTNLPDVRDNRDWLNHGDVHSNGPVLDDEILANAAVQQAIREQGSLSQEIKIINTDRSVGARVSGFIAKQYGNEGFEGELKFNFKGSAGQSFGAFNLLGMTMHLEGEANDYVGKGMNGGEIIIVPPTQSQYAAADNVIIGNTCLYGATGGTLYANGRAGERFAVRNSKGKAVVEGTGDHCCEYMTGGVIVVLGDVGRNVGAGMTGGLTYILDEHNTLPEKMNTEIVNIQRVGTTAGEKQLKDLITAHAEKTGSPKAKAILANWANYLPQFWQVFPPSEADSPEANVNAAAKQLTSV

SEQ ID NO: 14503 - protein, 642 aa, Synechococcus sp. PCC 7002
MGKVVGIDLGTTNSCVSVMEGGKPTVIANAEGFRTTPSVVAYAKNGDLLVGQIAKRQAVMNPGNTFYSVKRFIGRKHSEVSNESTEVAYKVERDSTGNVKIDCPAKEKKFAPEEISAQVLRKLIEDASKYLGEPVTQAVITVPAYFNDSQRQATKDAGKIAGVEVLRIINEPTAASLAYGLDKKSNETILVFDLGGGTFDVSILEVGDGVFEVLATSGDTHLGGDDFDKKIVDFLAEEFQRTEGIDLRKDKQALQRLTEAAEKAKIELSNVTQADINLPFITATQDGPKHLDMSLTRAKFEELCADLIDRCRIPVENAIRDAKLDKSAIDEIVLVGGSTRIPAVQDVVERVLGKKPNQTVNPDEVVAIGAAIQGGVLAGEVKDILLLDVTPLSLGVETLGGVMTKIIPRNTTIPTKKSEVFSTAVDGQTNVEIHVLQGEREMSKDNKSLGTFRLDGIPPAPRGVPQIEVTFDIDANGILNVMAKDKGTGKEQSISITGASTLPDDEVERMVSEAEANAAADKERREKIDRKNQADSLVYQAEKQLEELGDKVPADDKSKADQMIKDLKEAVAQENDEKISTLMPELQQLLYTIGSNIYQQAGGDPSAAGFDPNAAAGGAAPGGSGGNDGGDDVIDAEFSETK

SEQ ID NO: 14504 - protein, 226 aa, Synechococcus sp. PCC 7002
MANPDLCDPIPAMSDFPNPQGTTLLLIDDDPNLILLVRDYLEFRGYDMLTAANGVEGLQILEETTPDLIICDVMMPEMDGYTFIQNVRQNSQISWIPVIFLSAKGQTCDRIEGLNQGADVYLVKPFEPEELVAQVESSLNQARRILSHSGATTSSMAFQVPSHVELTPTETKVVSFVAQGLSNREIAEKLNVSQRTIESHVSNMLNKTSLNNRTELARWAMDSRLV

SEQ ID NO: 14505 - protein, 191 aa, Synechococcus sp. PCC 7002
MAQIKLMHAKLHHLRVTQAELDYVGSITIDQALIEKVGILPLEEVNIWNVENGNRLTTYVLPGERDSGVVCLNGAAAHLCSPGDRLIVAAYELRDRRDVLAQGHTAKVILADEQNRCQTFFEQRLNPQGAIGENLSVTTPSSVNQTQPNHLHFSKTTSVKYTTLTQTYKTYSSSLLQKTVLTTDRRALLPW

SEQ ID NO: 14506 - protein, 210 aa, Synechococcus sp. PCC 7002
MIYLDSAIATEATEAMAWGWVKGITTNPTLLAKSDAPPEVTLKTLAAITPGELYYQLVSEDCEGMIREAHRAREIIGNQLVLKIPATFNGFQALSKLAPEISCSVTAIYQPTQALIAAEGGAKYAIAYVNRATNLQGDGGSLLRAMKALLQGSKTTILAASLKSAAEVTHAIIAGADHITVPFALLKTLTTHPLSAETQAEFNPLGCGLR

SEQ ID NO: 14507 - protein, 921 aa, Synechococcus sp. PCC 7002
MLDAASLKAIALEARHCFLLEDAPDFVELFHQSMGLLQAELQQPAGHDQAKLYQDLVRAAHSIKGGAGIAELSTLHNLAHQMEDLLEAIAAGRIKEEQTALDLISLAMEEVQHCLDLAARDDDHPGDSPGAAQMAIALQEFLGQAQTPAPEAIAPAGNAPSKFVATALKVDLEACVQRLEKLLTHDPTPRSAARQLKTLEEECRLLGDALGVPWLKAIATLIQTALDSAAIDSVTLSQGAIAEIRRLTQAYLTNPDEAKISESFQALLSVPEPPKLEIPETDPSPDPVPATPVNATPKPAPKQTSSLQIRMPIQQLNRMGNAVGELFIGYEKLTRHQDQLLRASRNLKKRTQQLNPIRDEVTALYDKLAVATAGSGQNGGSQKPSLELATATHTEFDTLHFDQYTQAHSQLQQFQELMVQVQEIQEDLELMRWEFQESLEGVRQQLEYLNQDLTQSRLMPFGNLARRFRQSLETLSKRYPQMAQLAIEGEQVLVDQAILEQLRTPLTHLIRNAFDHGIEPPQERRQAQKTETGTIRLSAQLRGNMVEILVQDDGRGIDLNRVQQKAIAKGLCAPNHQPTEAEILEYLFAPGFSTRDTVSDLSGRGLGLDIVRLELAQLKGTITASSERHQGTQFTIRIPLSFNILPLLLCRCQQQAIAFPSVTVQAVLSLVNKDNLEYPEFLDWQGTPLKLHALDQLLPYPQSNLLLPPEQRPAPTIGLIVRQGKKSLAIAVDEILGERELVLKSLDNTVAYPPYVAGCTVLGSGEVIPVLLPDAFDQLLASPEQPQASSPAPEQPKRQPTILVIDDSVAVRRTLNKLLNQVGYQVQQCRDGKEAWNLLNRSKQTFDLAICDLEMPGYDGFTLLQMVRGQSRWDHLPFVMLTSRDNDLHRQKAQDLGANDYFTKPFHPVRFLKAIAQYVEA

SEQ ID NO: 14508 - protein, 775 aa, Synechococcus sp. PCC 7002
MTTTTTPKTWKEVLGDRIPPQMAEEIDTFENQMALRCQDKLDEKVFAELRLRRGAYGQRYDNGFRNDGVKAKAIPFPKTELTKGPDTKWQAPGMQRIKIPYGGMTAEQMDVLADICEEYSDNILHITTRQDIQLHFISLDNVPDMHRRLAAVGITVREACGNSVRNVTACPLAGVCHDEVFDVTGHAQELTDFFLGHRDIQDFGRKLKIAFSGCEDHPCGLTSMHDLGFIAKTKEIDGEIVKGFKVYVGGGLGSVPFLAKLFEDFVPLEEIFPLSQAIFRVFARLGEKKNRNKARIKFLVQKLGLEEFKRLVTEERALLEADPGWTAWVERLTAYEEKGKPAPVAADQTFDHGEEFTKWKTTNLYPQRQTGFYTVAVSLPLGDATSPQFRGLADIVRKYTNDTVRTTVEQNILIRWVHEADLPALYADLKAINLHSGGAHSIIDITACPGTDTCKLGIGSSRGLAGELRRRMALKGWQYDQAVKDIRVKISGCFNSCSQHMVAEIGFYGSSRQVQRRRVPHFNLVLGGEWANNASTYGKSMGVLPSKRIPDVVEFLIDTFMQERLENEKFTEFFNRIGRKEMKERLQPFTEVPSYEEDPSFYSDWADTREFTLGDIGVGECAGEVVTLTDFSMADAESLHFDATVLLDNPQNGDVQLAADKAIAAMVSAAQALLKFQNIDISDDPEVVSAEFRKYFYDTELFFDPFAKGKFAQFFFSALKHKDKAASLEQSQRLVEESRLFIEAAHACNGRMIEAGITSPVSFKQWLLKQGFGIN

SEQ ID NO: 14509 - protein, 330 aa, Synechococcus sp. PCC 7002
MSHSATLALQSVLQTPTDSNRLRIFSGSANLPLANEVARYLGMDLGPMIRKQFADGEMYIQVQESIRGCDVYLIQPSCRPVNDHLMELLIMIDACRRASARQITAVIPYYGYARADRKTAGRESITAKLVANLITQAGAGRVLAMDLHSAQIQGYFDIPCDHVYGSPVIIDYLKSKNLEDIVVVSPDVGGVARARAFAKKLDDAPLAIIDKRRQAHNVAEVMNVIGEVKGKTAILVDDMIDTAGTLQEGARLLKKEGAKEVYACATHPVFSGPAVERLSSGLFEEVIVTNTIPVPADKQFEELTVLTVANLLGETIWRIHEESSVSSMFR

SEQ ID NO: 14510 - protein, 484 aa, Synechococcus sp. PCC 7002
MTFSFDSWFRGLSPRLSYPFRRQGRLLLLACMLPLLWQGVAIAQGSLGEIPPAVQVTLDTLWVVFAAMLVFFMNAGFAMLESGFCRAKNTVNILAKNLIVFALSSLAFWAIGFALMFGDGNAVLGWNGFFLTGADNSPLTGSAYSGIFSSLSWAGIPLYTKFFFQLAFAGTAATIVSGAVAERIKFASFVIFSLFLVGFSYGITGHWVWGGGWLATLGFYDFAGSTVVHSVGGWAALMGVILLGPRLEKFAGDRINAIPGHNMSTATLGGLILWLGWFGFNPGSTMAADPDAISHIIVTTNMAAAAGAIAATITSWIQFGKPDLSMIINGVLAGLVGITAACAYVNVPSAIVIGAIAGVIVVFSVLTFEGLRFDDPVGALSVHLVCGIWGTLAVGLFSVGGDIYPWYAADAGPSAGLLFGGGVAQLLSQFIGVVVVGMFTAGFSFAIWLVLELSMGLRVSKEEELEGLDIGEHGMEAYHRFFRE

SEQ ID NO: 14511 - protein, 545 aa, Synechococcus sp. PCC 7002
MNTAELLIRCLENEGVEYIFGLPGEENLHILEALKESPIRFITVRHEQGAAFMADVYGRLTGKAGVCLSTLGPGATNLMTGVADANLDGAPLIAITGQVGTDRMHIESHQYLDLVAMFAPVTKWNKQIVRPNTTPEVVRRAFKIAQQEKPGAVHIDLPENIAAMPVEGQPLQRDGREKIYASSRSLNRAAEAIAHAKSPLILVGNGIIRADAAEALTDFATQLNIPVVNTFMGKGAIPYTHPLSLWTVGLQQRDFVTCAFEQSDLVIAVGYDLIEYSPKRWNPEGTTPIIHIGEVAAEIDSSYIPLTEVVGDIGDALNEIRKRTDREGKTAPKFLNVRAEIREDYERHGTDASFPVKPQKIIYDLRQVMAPEDIVISDVGAHKMWMARHYHCDRPNTCLISNGFAAMGIAIPGAVAAKLVYPEKNVVAVTGDGGFMMNCQELETALRIGANFVTLIFNDGGYGLIGWKQINQFGAPAFVEFGNPDFVQFAESMGLKGYRITAAADLVPTLKEALAQDVPAVIDCPVDYSENVKFSQKSGDLICRM

SEQ ID NO: 14512 - protein, 362 aa, Synechococcus sp. PCC 7002
MKIGVPKEIKDQEFRVGLSPSSVQVLASAGHHILIETGAGLGSGFTDAEYQQAGAEIVSTAAIAWEQDMVVKVKEPLPSEYGSLRPGQILFTYLHLAADRQLTENLMRSGVTAIAYETVTDGKGHLPLLAPMSVIAGRLAVQFGARYLEKQQGGRGVLLGGVPGVGPGRVMILGGGTVGTEAAKMAVGLGAQVQILDINVDRLSDLEALFGSRVELLYSTPTQIQRWLPLADLVIGAVLLPGKRAPILVSRAAVKQMKRGSVIIDVAVDQGGCIETLRPTSHSAPTYLEEGVVHFGVPNMPGAVPWTATQALNNSTLPYVLQLANQGLGAIKQNPAIAQGLNIAERRLVHPSVREVFPDLAD

SEQ ID NO: 14513 - protein, 591 aa, Synechococcus sp. PCC 7002
MVSTTSPAATETAVRSEVRSGAYILIDSLKRHGVEYIFGYPGGAILPIYDALHPVEERGEIKHILVRHEQGASHAADGYARATGKVGVCFGTSGPGATNLVTGIATAHMDSIPMVVITGQVTRAAIGTDAFQETDIFGITLPVVKHSYVVRDPKDMARIVAEAFYIASTGRPGPVLVDVPKDVGLELCEYIPVEPGDVDIPGYKPRTEGDTSKIGEAVRLISESRKPLLYVGGGAITSGAHAEIKELAEQFQIPVTTTLMGLGAFDEHNPLSVGMLGMHGSAYANFAVSECDLLIAVGARFDDRVTGKLDEFASEAKVIHIDIDPAEVGKNRLPEVAIVGDVRHVLIEMLQQLGGKGLPLGNKPTEEWLNKIQGWKEKHPLVAPRFADSISPQSVIVELDRQAPHAYYTTDVGQHQMWAAQFLKNGPRRWISSAGLGTMGFGLPAALGAKVAIADEEVICISGDASFQMCLQELATLAQYQIKVKTVILNNGWQGMVRQWQQNFYGQRYSSSNMEAGMPNFELLAQAFGVKGMVVDHPDDLSGAIAEMLAHDGPVLLDVRVKKDENCYPMVIPGKSNAHMMGLQESSGKAE

SEQ ID NO: 14514 - protein, 399 aa, Synechococcus sp. PCC 7002
MGRAEKVVLAYSGGVDTSVCIPYLMHEWGVKEVITLAADLGQGEELGPIKQKALNSGAVVSLVEDGREEFITDYAFPAIKANALYENRYPLATALARPLIAKMLVRAAEKYGADAVAHGCTAKGNDQVRFDLGILAQNPEIKVLAPAREWGMSREEAITYGEQYGLTFPVKKSSPFSIDKNLLGRSIEAGPLEDPMCEPPEEVFEMVKAISDTPDEPEYLEIGFEKGVPVMVNGEALGPVALISKLNEIVGNHGIGRIDMIENRVVGIKSREIYESPAMCVLVDAHRDLESLTLTADVTQYKRGMEQTYSELIYRGLWFSPLKQAVDAFIEQTQERVTGVVRLKLHKGTARIVGRRSEKSIYTPDLATYGADDKFNHESAEGFIYIWGLPTRVWAQANK

SEQ ID NO: 14515 - protein, 288 aa, Synechococcus sp. PCC 7002
MRISVFGMGLMGTPIALKLAQENFLVTAYNRTADKLNPLEEQGLTVTTNPQTAIANSDYLILTLSDAAAIQTVLLENADTFFTGKTIIQMGTIAPEESKAIAEEVQRRQGQYLEAPVLGSIPEAKKGTLLVMVGGEETLFQACLPIFKTLGQDPKYIGAVGQAAALKLALNQLIAGLTASFSLSLGLIQREKVDLDKFMGILRDSALYAPTFDKKLPRMGDRTFANPNFPTKHLLKDTRLFLAAAKTVGLETTGLEGIREIIEQAIALNLAEADYSAIYQVINPGPTP

SEQ ID NO: 14516 - protein, 500 aa, Synechococcus sp. PCC 7002
MKSSLVILYHREPYDEVRENGKTFYRDKTSPNGIMPTLKSFFANAEQSTWVAWKQISGKQQENFQAKMAFPGQENSVVHRIPLSADQVKNFYHITSKEAFWPILHSFPWQFTYDSSDWENFKQINEMFAEAACEDADDDALFWVHDYNLWLTPYFIRQKKPNAKIAFFHHTPFPSVDIFNILPWREAIVDSLLCCDLCGFHLPRYVQNFVAVARSLRKVEITRQVPVDEHAFTAVGTALAEPEITTQLKYKDHLVNLDAFPVGTNPTQIRAQVEKASTQERIRKIREELGSNKLILSAGRVDYVKGTKEMLVCYERLLERRPELQTKVNLVVAAAKAASGMRVYKNAQSEIERLVGRINGRFAKLNWTPILLFTSALSYEELLGFFGAADIAWITPLRDGLNLVAKEYVVAHGCDDGVLILSEFAGSAVELPDAILTNPYAAKRMDESIDQALAMPVEEQQRRMKSMYQAIQRYDVQQWANHMFREAKATAVLGKEPTPV

SEQ ID NO: 14517 - protein, 356 aa, Zea mays
MACLTDLVNLNLSDTTEKIIAEYIWIGGSGMDLRSKARTLPGPVTDPSKLPKWNYDGSSTGQAPGEDSEVILYPQAIFKDPFRRGNNILVMCDCYTPAGEPIPTNKRYSAAKIFSSPEVAAEEPWYGIEQEYTLLQKDTNWPLGWPIGGFPGPQGPYYCGIGAEKSFGRDIVDAHYKACLYAGINISGINGEVMPGQWEFQVGPTVGISSGDQVWVARYILERITEIAGVVVTFDPKPIPGDWNGAGAHTNYSTESMRKEGGYEVIKAAIEKLKLRHKEHIAAYGEGNERRLTGRHETADINTFSWGVANRGASVRVGRETEQNGKGYFEDRRPASNMDPYVVTSMIAETTIIWKP

SEQ ID NO: 14518 - protein, 369 aa, Spinacia oleracea
MTTAVTAAVSFPSTKTTSLSARSSSVISPDKISYKKVPLYYRNVSATGKMGPIRAQIASDVEAPPPAPAKVEKHSKKMEEGITVNKFKPKTPYVGRCLLNTKITGDDAPGETWHMVFSHEGEIPYREGQSVGVIPDGEDKNGKPHKLRLYSIASSALGDFGDAKSVSLCVKRLIYTNDAGETIKGVCSNFLCDLKPGAEVKLTGPVGKEMLMPKDPNATIIMLGTGTGIAPFRSFLWKMFFEKHDDYKFNGLAWLFLGVPTSSSLLYKEEFEKMKEKAPDNFRLDFAVSREQTNEKGEKMYIQTRMAQYAVELWEMLKKDNTYVYMCGLKGMEKGIDDIMVSLAAAEGIDWIEYKRQLKKAEQWNVEVY

SEQ ID NO: 14519 - protein, 170 aa, Cucumis melo
FLLPSPTAAASPPELAQPRPGFGSFDMNVVMVLSVLLCALICSLGLNAILKCALRCSTLLATVSGGRGGGALVVHPKGVRRNVLKKFPTVEYSKEGNKLRGIDGECVICLLEFEAGDRVRVLPKCYHGFHVHCIDKWLSSHTSCPKCRNCLTDTCHKIAAGCGQETPVTT

SEQ ID NO: 14520 - protein, 566 aa, Descurainia sophia
DQPRKGADILVEALERQGVENVFAYPGGASMEIHQALTRSSSIRNVLPRHEQGGVFAAEGYARSSGKPGICIATSGPGATNLVSGLADALLDSVPLVAITGQVPRRMIGTDAFQETPIVEVTRSITKHNYLVMDVEDIPRIVEEAFFLATSGRPGPVLVDVPKDIQQQLAIPNWDQPMRLPGYLSRMPKPPEDSHLEQIVRLISESKKPVLYVGGGCLNSSDELRRFVELTGIPVASTLMGLGSYPCDDELSLHMLGMHGTVYANYSVEHSDLLLAFGVRFDDRVTGKLEAFASRAKIVHIDIDSAEIGKNKTPHVSVCGDVKLALQGMNKVLEKRAEELKLDFGVWRNELNEQKQKFPLSFKTFGEAIPPQYAIQVLDELTDGKAIISTGVGQHQMWAAQFYKYKKPRQWLSSGGLGAMGFGLPAAIGASVANPDAIVVDIDGDGSFIMNVQELATIRVENLPVKILLLNNQHLGMVMQWEDRFYKANRAHTFLGDPAQENEIFPNMLLFAAACGIPAARVTKKEHLRDAIQKMLDTPGPYLLDVICPHQEHVLPMIPSGGTFSD

SEQ ID NO: 14521 - protein, 566 aa, Descurainia sophia
DQPRKGADILVEALERQGVENVFAYPGGASMEIHQALTRSSSIRNVLPRHEQGGVFAAEGYARSSGKPGICIATSGPGATNLVSGLADALLDSVPLVAITGQVTRRMIGTDAFQETPIVEVTRSITKHNYLVMDVEDIPRIVEEAFFLATSGRPGPVLVDVPKDIQQQLAIPNWDQPMRLPGYLSRMPKPPEDSHLEQIVRLISESKKPVLYVGGGCLNSSDELRRFVELTGIPVASTLMGLGSYPCDDELSLHMLGMHGTVYANYSVEHSDLLLAFGVRFDDRVTGKLEAFASRAKIVHIDIDSAEIGKNKTPHVSVCGDVKLALQGMNKVLEKRAEELKLDFGVWRNELNEQKQKFPLSFKTFGEAIPPQYAIQVLDELTDGKAIISTGVGQHQMWAAQFYKYKKPRQWLSSGGLGAMGFGLPAAIGASVANPDAIVVDIDGDGSFIMNVQELATIRVENLPVKILLLNNQHLGMVMQWEDRFYKANRAHTFLGDPAQENEIFPNMLLFAAACGIPAARVTKKEHLRDAIQKMLDTPGPYLLDVICPHQEHVLPMIPSGGTFSD

SEQ ID NO: 14522 - protein, 566 aa, Descurainia sophia
DQPRKGADILVEALERQGVENVFAYPGGASMEIHQALTRSSSIRNVLPRHEQGGVFAAEGYARSSGKPGICIATSGPGATNLVSGLADALLDSVPLVAITGQVLRRMIGTDAFQETPIVEVTRSITKHNYLVMDVEDIPRIVEEAFFLATSGRPGPVLVDVPKDIQQQLAIPNWDQPMRLPGYLSRMPKPPEDSHLEQIVRLISESKKPVLYVGGGCLNSSDELRRFVELTGIPVASTLMGLGSYPCDDELSLHMLGMHGTVYANYSVEHSDLLLAFGVRFDDRVTGKLEAFASRAKIVHIDIDSAEIGKNKTPHVSVCGDVKLALQGMNKVLEKRAEELKLDFGVWRNELNEQKQKFPLSFKTFGEAIPPQYAIQVLDELTDGKAIISTGVGQHQMWAAQFYKYKKPRQWLSSGGLGAMGFGLPAAIGASVANPDAIVVDIDGDGSFIMNVQELATIRVENLPVKILLLNNQHLGMVMQWEDRFYKANRAHTFLGDPAQENEIFPNMLLFAAACGIPAARVTKKEHLRDAIQKMLDTPGPYLLDVICPHQEHVLPMIPSGGTFSD

SEQ ID NO: 14523 - protein, 677 aa, Nicotiana tabacum
LYCQGKYYPLGVTPTEAQIKDIVEWLLTYHGDSTGLSTDSLADAGYPGAASLGDAVCGMAVAYITSKDFLFWFRSHTAKEIKWGGAKHHPEDKDDGQRMHPRSSFKAFLEVVKSRSLPWENAEMDAIHSLQLILRDSFKDAEASNSKAVVHAQLGEMELQGIDELSSVAREMVRLIETATAPIFAVDVEGRINGWNAKVAELTDLSVEEAMGKSLVHDLVHKESQETAEKLLFNALRGEEDKNVEIKLRTFGPEQLKKAVFVVVNACSSKDYTNNIVGVCFVGQDVTGQKVVMDKFIHIQGDYKAIVHSPNPLIPPIFASDENTCCSEWNTAMEKLTGWSRGEIIGKMLVGEIFGSCCRLKGPDAMTKFMIVLHNAIGVQDTDKFPFSFFDRNGKYVQALLTANKRVNMEGQIIGAFCFIQIASPELQQALRVQRQQEKKCYSQMKELAYLCQEIKSPLNGIRFTNSLLEATDLTENQKQYLETSAACERQMSKIIRDVDLENIEDGSLTLEKEEFFLGSVIDAVVSQVMLLLRERSVQLIRDIPEEIKTLTVHGDQVRIQQVLADFLLNMVRYAPSPDGWVEIQLQPNMKQISDEVTVVHIEFRIVCPGEGLPPELVQDMFHSSRWVTKEGLGLSMCRKILKLMNGDIQYIRESERCYFLIILDLPMTRRGSKSLG

SEQ ID NO: 14524 - protein, 1648 aa, Arabidopsis thaliana
MAMQSLSPVPKLLSTTPSSVLSSDKNFFFVDFVGLYCKSKRTRRRLRGDSSSSSRSSSSLSRLSSVRAVIDLERVHGVSEKDLSSPSALRPQVRFFTDINFTNTQRAKFHPLWGSFKQVANLEDILSERGACGVGFIANLDNIPSHGVVKDALIALGCMEHRGGCGADNDSGDGSGLMSSIPWDFFNVWAKEQSLAPFDKLHTGVGMIFLPQDDTFMQEAKQVIENIFEKEGLQVLGWREVPVNVPIVGKNARETMPNIQQVFVKIAKEDSTDDIERELYICRKLIERAVATESWGTELYFCSLSNQTIVYKGMLRSEALGLFYLDLQNELYESPFAIYHRRYSTNTSPRWPLAQPMRFLGHNGEINTIQGNLNWMQSREASLKAAVWNGRENEIRPFGNPRGSDSANLDCAAEIMIRSGRTPEEALMILVPEAYKNHPTLSVKYPEVVDFYDYYKGQMEAWDGPALLLFSDGKTVGACLDRNGLRPARYWRTSDNFVYVASEVGVVPVDEAKVTMKGRLGPGMMIAVDLVNGQVYENTEVKKRISSFNPYGKWIKENSRFLKPVNFKSSTVMENEEILRSQQAFGYSSEDVQMVIESMASQGKEPTFCMGDDIPLAGLSQRPHMLYDYFKQRFAQVTNPAIDPLRKVWFMSLEVNIGKRGNILELGPENASQVILSNPVLNEGALEELMKDQYLKPKVLSTYFDIRKGVEGSLQKALYYLCEAADDAVRSGSQLLVLSDRSDRLEPTRPSIPIMLAVGTVHQHLIQNGLRMSASIVADTAQCFSTHHFACLVGYGASAVCPYLALETCRQWRLSNKTVAFMRNGKIPTVTIEQAQKNYTKAVNAGLLKILSKMGISLLSSYCGAQIFEIYGLGQDVVDLAFTGSVSKISGLTFDELARETLSFWVKAFSEDTTKRLENFGFIQFRPGGEYHSNNPEMSKLLHKAVREKSETAYAVYQQHLSNRPVNVLRDLLEFKSDRAPIPVGKVEPAVAIVQRFCTGGMSLGAISRETHEAIAIAMNRIGGKSNSGEGGEDPIRWKPLTDVVDGYSPTLPHLKGLQNGDIATSAIKQVASGRFGVTPTFLVNADQLEIKVAQGAKPGEGGQLPGKKVSAYIARLRSSKPGVPLISPPPHHDIYSIEDLAQLIFDLHQINPNAKVSVKLVAEAGIGTVASGVAKGNADIIQISGHDGGTGASPISSIKHAGGPWELGLTETHQTLIANGLRERVILRVDGGLKSGVDVLMAAAMGADEYGFGSLAMIATGCVMARICHTNNCPVGVASQREELRARFPGVPGDLVNYFLYVAEEVRGILAQLGYNSLDDIIGRTELLRPRDISLVKTQHLDLSYLLSSVGTPSLSSTEIRKQEVHTNGPVLDDDILADPLVIDAIENEKVVEKTVKICNVDRAACGRVAGVIAKKYGDTGFAGQVNLTFLGSAGQSFGCFLIPGMNIRLIGESNDYVGKGMAGGEIVVTPVEKIGFVPEEATIVGNTCLYGATGGQDIARGKAGERFAVRNSLAEAVVEGTGDHCCEYMTGGCVVVLGKVGRNVAAGMTGGLAYLLDEDDTLLPKINREIVKIQRVTAPAGELQLKSLIEAHVEKTGSSKGATILNEWEKYLPLFWQLVPPSEEDTPEASAAYVRTSTGEVTFQSA

SEQ ID NO: 14525 - protein, 301 aa, Thermotoga sp. RQ2
MVSIKSGFVALAGKPNVGKSTFINVVMGRKVVIVSDKPQTTRNRINCIYTDKDSQIIFVDTPGIHKPLHRLGEYMVKAAVQALKGVDLILFMLDAADGFTKTDEHVAEIVNESGTKTIIAVNKIDVAGEEKAKAVGQLAKSMVENVVSVHYISALKGEGVFEVLEKIKEELPEGPQYYPEDMVTDRPLSFMAAEIIREKIFHLTRQEVPHSTAVVIEEIKDRPNGVLYIRANIYVERDSQKGILIGKNGSMIKKIGTLAREELEFLVGRKVYLDLNVKVKEKWREKDFIILQEIGLKDDIK

SEQ ID NO: 14526 - protein, 304 aa, Thermotoga sp. RQ2
MKLIESVPNFSEGRRKEVVEKIVAEAKKYDRVWVLDWSMDADHNRSVVTLVGEPENLINALFDMTKKAAELIDLRNHTGQHPRMGAADVIPLVPLYNTTMEECVEYSKILGRRIGEELGIPVYLYEKSATRPERQNLADIRRGEFEGFFEKIKDPLWKPDFGPDRVHPTAGVTAVGAREFLIAFNVNLGTRDVKIAEKIARAIRFSSGGLRYVKAIGVDLKGKGVVQVSINITDHKRTPLYRVFELIKMEAERYGVPVLGSEIVGLFPLESLLKTVSYYLRTDLNAKKVIESSLLEILVRESEK

SEQ ID NO: 14527 - protein, 246 aa, Thermotoga sp. RQ2
MKKLLVVLVLLVSIVIFSGVINEIKSRGYLLVGLSADFPPFEFVDESGNIVGFDVDLAKEIARRLGVELKIVDMTFDGLIPSLLTKKIDVIISGMTITEERKKVVAFSDPYFDAGQVIVVRKDSDFRPKTYEDLVGKTVAVQIGTTGDIEVSKYEGIKVVRFDKFTDAFLELKRGRADAVVLDSATARAFVAKNPDLVISSGVLSSEQYGIAVRKEDTDLLEFINSVLRELKKSPYDVLIEKWFSE

SEQ ID NO: 14528 - protein, 581 aa, Thermotoga sp. RQ2
MKMKGSKMLFEALLKEGVDTIFGIPGGAIINVYDELCNYEDKINFYLFRHEQGATHAADGYARVTGKPGVVIVTSGPGATNTVTGIATAYMDSIPIVVITGQVPTSFIGTDAFQEVDVTGITMPITKHNHLVTSIEELPYAIKEMFYVATTGRPGPVLLDFPKDIQTAEGEFNYPDTVEIPGYKPTVKGHPKQIKKAIELLKESKRPVVIVGGGANLSGAMDLVNQFIDKFKVPAVSTLMGRGVNPSDEKLYYEGIGMHGTYYGNYAVANADLIIALGVRFSDRILGNPRTFAKNARIVHVDIDPAEIGKNVRVDVPIVGDLKSVLEEFLKYEIETDFSDWIEELQEIKKKYPLTYKRDGKLIKPQYVVEKVNEVFPDDTVVVADVGQNQMWVAQFYKFKHQRSFLCSGGLGTMGYALPAGIGAKIGAPDKEVVVFAGDGGFQMNIQELMTIKRYNLPVKIIVMDNKALGMVRQWQQLFFNCRYSATILSDNPDFAKIAEAVGIKAMRIEKPDQVDEAIEKLAKSKEPMLIHAVVDPAENVLPMVPPGGDVGTPLIEAPYDETFVERVLKVIEESRRGDER

SEQ ID NO: 14529 - protein, 720 aa, Thermotoga sp. RQ2
MRVGIAGLGTVGGSIYRILKERGNEIEKRIGEKFIISKVINRSPQKYELLGVPKEEIAFDFDDLILNSDVIVEAIGGTDVAVDLVRRALELGRIVVTPNKNLISEYGNEFSEYIKKRKLFFEASVGGGIPIISLLQDYLIFQKVTRIRGIMNGTTNYILTEMSKGRHFEEVLKEAQELGYAEADPTNDIEGYDVAYKVSVLAGVVTGRFPGINSVQFEGITRIDPEYLKEIVRSGKKLKLIGELDFSTNRYEVRLREVTPEDPFFNVDGVDNAIEVSTDLAGDFLLKGRGAGGYPTASAVIADLFRVAKYKVLGGAEKFSVVVMKFGGAAISDVEKLEKVAEKIIKRKKSGVKPVVVLSAMGDTTDHLIELAKTIDENPDPRELDLLLSTGEIQSVALMSIALRKRGYKAISFTGNQLKIITDKRYGSARIIDINTDIISRYLKQDFIPVVAGFQGITETGDITTLGRGGSDLTAIALAYSLGADLCELYKDVDGVYTADPRIVKNARVIKELSWEEMIELSRHGAQVLQARAAEFARKYGVKVLIKNAHKETRGTLIWEGTKVENPIVRAVTFEDGMAKVVLKDVPDKPGVAARIMRTLSQMGVNIDMIIQGMKSGEYNTVAFIVPESQLGKLDIDLLKTRSEAKEIIIEKGLAKVSIVGVNLTSTPEISATLFETLANEGINIDMISASSSRISVIIDGKYVEDAVKAIHSRFELDRE

SEQ ID NO: 14530 - protein, 218 aa, Thermotoga sp. RQ2
MKIFLDTANLEEIKKGVEWGIVDGVTTNPTLISKEGAEFKQRVKEICDLVKGPVSAEVVSLDYEGMVREARELAQISEYVVIKIPMTPDGIKAVKTLSAEGIKTNVTLVFSPAQAILAAKAGATYVSPFVGRMDDLSNDGMRMLGEIVEIYNNYGFETEIIAASIRHPMHVVEAALMGVDIVTIPFAVLERLFKHPMTDLGIERFMEDWKKYLENLKK

SEQ ID NO: 14531 - protein, 597 aa, Thermotoga sp. RQ2
MPEIRRRPHGPILEKPALKNPTATLRRLLGYLRPHTFTLIMVFVFVTVSSILGVLSPYLIGKTIDVVFVPRKFDLLPRYMLILGTIYALTSLLFWLQGKIMLTLSQDVVFRLRKELFEKLQRVPVGFFDRTPHGDIISRVINDVDNINNVLGNSIIQFFSGIVTLAGAVIMMFRVNVILSLVTLSIVPLTVLITQIVSSRTRKYFYENQRVLGQLNGIIEEDISGLTVIKLFTREEKEMEKFDRVNESLRKVGTKAQIFSGVLPPLMNMVNNLGFALISGFGGWLALKDIITVGTIATFIGYSRQFTRPLNELSNQFNMIQMALASAERIFEILDLEEEKDDPDAVELREVRGEIEFRNVWFSYDKKKPVLKDITFHIKPGQKVALVGPTGSGKTTIVNLLMRFYDVDRGQILVDGIDIRKIKRSSLRSSVGIVLQDTILFSTTVKENLKYGNPDATDEEIKEAAKLTHSDHFIKHLPEGYETVLTDNGEDLSQGQRQLLAITRAFLANPKILILDEATSNVDTKTEKSIQAAMWKLMEGKTSIIIAHRLNTIKNADLIIVLRDGEIVEMGKHDELIQKRGFYYELFTSQYGLVVER

SEQ ID NO: 14532 - protein, 403 aa, Thermotoga sp. RQ2
MRVLVINSGSSSIKYQLIEMDGEKVLCKGIAERIGIEGSRLVHRVNDEKYVIERELPDHEEALKLILNTLVDEKLGVIKDLKEIDAVGHRVVHGGERFKESVLVDEEVLKAIEEVSPLAPLHNPANLMGIKAAMKLLPGVPNVVVFDTAFHQTIPQKAYLYAIPYEYYEKHRIRRYGFHGTSHRYVSKRAAEILGKKLEELKIITCHIGNGASVAAVKYGKCVDTSMGFTPLEGLVMGTRSGDLDPAIPFFIMEKEGISPQEMYDILNKKSGVYGLSKGFSSDMRDIEEAALKGDEWCKLILDIYHYRIAKYIGAYAAAMNGVDAIVFTAGVGENSPITREDVCSYLEFLGVKLDKQKNEETIRGKEGIISTLDSRVKVLVVPTNEELMIARDTKEIVEKIGR

SEQ ID NO: 14533 - protein, 435 aa, Thermotoga sp. RQ2
MNIERADFVDRVKIFVKAGDGGNGCVSFRREKYVPKGGPDGGDGGDGGFVFLRANPSVSTLIEFVNKRKFVAENGKHGMGKKMKGRNGKDLFIDVPVGTVVKDAVTGEIIADLNEPGKIVCVARGGKGGRGNAHFATSTKQAPLIAERGEKGESRWLELELKILADVGLVGYPNVGKSSLISRISNARPKIANYPFTTLIPNLGVVKYDDFSFVVADIPGLIEGASEGVGLGNVFLRHVERCYLIAHVIDVSGYEREDPVRDYFVIREEMKKYSPFLLEKPEIVVANKIDLIGKEELEKILKRLRDATNREVIPVSALTGEGIDLLVSKLASIVREMKVEKSERKEEKFVKPSPVWRRLPEKFHLEVVKEDEGYWVVEGENLRVWIERFDLNQRDARLMLLQVLEKNGLNNKLKEAGVKEGDVVRIGDFEFEYRE

SEQ ID NO: 14534 - protein, 409 aa, Thermotoga sp. RQ2
MKEKVVLAYSGGLDTSVILKWLCEKGFDVIAYVANVGQKDDFDAIKEKALKTGASKVYVEDLRREFVTDYIFTALLGNAMYEGRYLLGTAIARPLIAKRQVEIAEKEGAQYVAHGATGKGNDQVRFELTYAALNPNLKVISPWKDPEFLAKFKGRTDLINYAMEKGIPIKVSKKRPYSEDENLMHISHEAGKLEDPAYIPDEDVFTWTVSPKDAPDEETLLEIHFENGIPVKVVNLKDGTEKTDPLELFEYLNEVGAKNGVGRLDMVENRFIGIKSRGVYETPGATILWTAHRDLEGITMDKEVMHLRDMLAPKFAELIYNGFWFSPEMEFLLAAFRKAQENVTGKVTVSIYKGNVMPVARYSPYSLYNPELSSMDVEGGFNATDSKGFINIHALRLKVHQLVKKGYQK

SEQ ID NO: 14535 - protein, 375 aa, Thermotoga sp. RQ2
MFRILTINPGSTSTKLSIFEDERMVKMQNFSHSPDELGRFQRILDQLEFREKIVRQFVEETGYSLSSFSAFVSRGGLLDPIPGGVYLVDDLMIETLKSAKNGEHASNLGVIIAHRFSAETGVPAYVVDPVVVDEMEDVARVSGHPNYQRKSIFHALNQKAVAKEVARMVNKRYEEMNLVVAHMGGGISIAAHRKGRVIDVNNALDGDGPFTPERSGTLPLTQLVDLCFSGKFTYEEMKKRIVGNGGLVAYLGTSDAREVVRRIKQGDEWAKRVYRAMAYQIAKWIGKMAAVLKGEVDFIVLTGGLAHEKEFLVPWITERVSFIAPVLVFPGSNEEKALALSALRVLRGEEKPKNYSEESRRWRERYDSYLDGILR

SEQ ID NO: 14536 - protein, 357 aa, Thermotoga sp. RQ2
MYRILVINPGSSSTKVAVFEDEKKIAEKNIFHSVEELKKFKRSTDQEPLRRKAVEDFIDEVGYRIEDFSAIAARGGVLEPVPGGTYVVDEYMVDYLINRSPVDHVSNLAAVISYKLGKPYGIPCFVVDPVSVDEMCDEARFSGIPEIERKSYSHALNIKAVLRKVSREMGRTPEEVKIVVAHLGSGISVCACKNGKIIDVNNANDEGPFSIERTGELPVGDVVKTAYSSKHSAAKLKEEFTKKGGLLAYLGTKDLRKALDSMETSRKAKLVVEAMAYQIAKEIGGMCAVLGDKPDAIVITGGMAHENRFVRMITDYIEKFGKVEVIPGELEMEALALGVLRVLRGEEKAKDYRSVIE

SEQ ID NO: 14537 - protein, 384 aa, Thermotoga sp. RQ2
MKVYFDNNATTRVDDRVLEEMIVFYREKYGNPNSAHGMGIEANLHMEKAREKVARILGVSPSEIFFTSCATESINWILKTVAETFEKRKRTIITSPIEHKAVLETVKYLSMKGFKVKYVPVDSRGIVKLEELEKLVDEDTFLVSIMAANNEVGTVQPIEDVVRIVKKKNKETLVHVDAVQTIGKIPFSLEKLEVDYASFSAHKFHGPKGVGITYVRKGVPIRPLIHGGGQERGLRSGTQNVPGIVGTARAMEIAVEELSEAAKHMEKLRSKLVSGLMNLGAHIITPLEVSLPNTLSVSFPNIRGSTLQNLLSGYGIYVSTSSACTSKDERLSHVLDAMGVDRRIAQGAIRISLCKYNTEEEVDYFLKKIEEILSFLDLTGNNRR

SEQ ID NO: 14538 - protein, 315 aa, Thermotoga sp. RQ2
MSFSNEMKVFSGNANRPLAEKIANYLNLQLGDCEVGRFADGEINVRINETVRGHDIFLIQPTSPPVNENLMELLIMIDAFKRASANTIAVVIPYYGYARQDRKAKGRDPISAKLVANLITVAGATRVLTVDLHAEQIQGFFDIPVDNLWSYPVFAEELLKRENIVPEETVVVSPDVGGVRRARRMAERLKTSLAILDKRRPSDNVAEVVNIIGEVKDKVVIMFDDIIDTAHSIVKGAEALKKAGAKKIIACATHGVFSDRALERIENSPIDTVYITDTIYHENLPEKVKVISVANLIGEAIMRIRKHLSVSTLFR

SEQ ID NO: 14539 - protein, 243 aa, Thermotoga sp. RQ2
MLELIDVWYEVEGKAILKGINARFEKQRVYSILGTNGAGKSTLAYLIMGLEGYRPTRGKILLDGEDITDLSVTERAKRGITLMWQEPARFTGIKIRDYLTLGGRRKVSKEELERVLELVGLNSALYLERNVDEKLSGGERKRVELASILLMKPRYTILDEPDSGIDIMSLEMIEKVLSELVNAGGSVILVTHREEIALESDYAFLICHGSILKEGNPSEIVQFYKNSCDRCDHPNEPSGEMIV

SEQ ID NO: 14540 - protein, 104 aa, Thermotoga sp. RQ2
MYAIVETAGRQYRVEEGKILYTERQKDYSPGDEIVFDRVVFVRKDGEVLVGKPYVEGAKVVGKVLEHAKARKVKTVKYRPRKNSKVEKGHRQWYTAIKIEKIEL

SEQ ID NO: 14541 - protein, 401 aa, Thermotoga sp. RQ2
MNVVVQKYGGSSVATPERIKNVAQRIKKKVDEGYKVVVVVSAMGKTTDNLIKLAKEISPRPDSRELDMLLATGEQVSAALLSMALKDFGVKAKSLNAFQVKIKTTPHHTSARIVDIDDSVIRENLKDYDVLVVTGFQGVNEHGDLTTLGRGGSDTSAVALAAKLRVPCEIYSDVDGIYTCDPRVHPRAKKLAYITYDEALELTALGAKVLHSRSVEIAKKYGIPIYCASSFTEEEGTMVVERLPEWLEEPVVTGATISHGQIKVSISFLPKDVKYITAIFEEVGKRALNVDMISLVPSNGKVFLSFTILEDHKEDLDEALKEALRDVEGWKSTYEGGFAKLSIVGVGMRTSPGVAARFFEALERAGVTPELVTTSEIKISCLVPEEKAEKALKSVIEEFEL

SEQ ID NO: 14542 - protein, 306 aa, Thermotoga sp. RQ2
MARYRVHVNDPLDKEATQLLMNKEELEVTSEHLEKDELMKIIPEVDVLVVRSATKVTADIIEAGKNLKIIARAGIGLDNIDVQKAKEKGIKVLNTPGASAPSVAELAMGLMLACARHIARATISLKEGKWEKKALKGKELLGKTLGLIGFGNIGQEVAKRALAFGMKIIAYDPAKPETDLPVEYVDLDTLFKESDFISLHVPLTESTRHIINRESIAKMKDGVIIVNTARGGTIDEEALYEALVSGKVYAAGLDVFEVEPPTDEIRRKLLSLDNVVATPHIGASTDEAQNRVGIELVEKIFKELGI

SEQ ID NO: 14543 - protein, 246 aa, Thermotoga sp. RQ2
MLRIVDLHAKLRDEDKEILKGVNLEIEKGEVHVLMGPNGSGKSTLANVIMGNPRYIVTEGDIVFEGNSIKDLPPNERAKLGIMMTFQNPYEVEGVKLSQFLITAHRRIHGEDKNYLELRKELEETAEKLGLDKDFLERYLNVGFSGGEKKRSEILQSLFLRPKLLILDEIDSGLDVDALRLIANLIARLNEEGVTLLIITHYKRLLDHLKRIDKVHVYVDGRIVTSGGPELADEIEEKGYSLEGVR

SEQ ID NO: 14544 - protein, 615 aa, Thermotoga sp. RQ2
MRGVAFFFLILSVFVFSQHLRIALDEDYAPFSFYDESGNLAGISVDFWKLFSEKTGIEVELVPVKWQLAQQMVLEKKVDAIDQIFKTPEREEFLSFSKPVFEMRSCVFFRKDLPVKTFSDLSSYVVGALRGEGMVDVLLRKNPDVRFEFFDNYSSMMEALKKREISVFLGDDVVARYYLSKEGLLSDFLTLHLETNYLHVAVLKGNESILETVNSGLSLVSEDERNEIIRRYIPLVVVTPPWLMKVVFYGSVLFSTALGISLAFVYLLRRKVEEKTLQLKLKNEELKAQNEEIEALYQEVSANQEEIERLYSEIRELNDRFRHSIKELSKLVFIEDTSKFASELAEIIRDLIEAKNVKVVLDGQVTGEARGETFEISHSKESHGYVVIEGDLGEDEREVLQAFLNIVSAIHTYRELVRKEKKLHRDIVRTWVRALEYYDYYTKGHSEEVAYYAVEIGKMFNVDGEKLEKLYWAGLLHDIGKIYVPQVVLNKTSKLDEREFELIKIHPVKGYELVKEIEGFEDVAIWIRHHHERWDGKGYPDGLKGEEIPFEARVLCVADSYQAMRSDRPYKKGKTVEEAIQELLRNAGRQFDPVIVERFVEFLRKGGDLGTGHQG

SEQ ID NO: 14545 - protein, 358 aa, Thermotoga sp. RQ2
MKMEKKLSARTNFILTVVFLIFVALLLYLADRYMDSYKLRVVRLIAIYGIMAVSLNLINGITGIFSLGHAGFILIGAYTASLLTLSPEQKAMSFIIEPIVPWLANAHTDFFTATVAGGVLAAVFAFFIGWPVLRLSGDYLAIASLGFAEVIRIIALNAISITNGPLGLKGIPEYSNIWWCYGWLFVTVLFMASLVNSSYGRALKAIREDRIAAEAMGINVFKHQLLSFVIGAFFAGVSGSLYAHWLTTIDPRTTTLGPMLTFYVLIMIVLGGLGSISGSLIGAALFAILFEWLRDLEEPFTFFGIHVPGIKGMRILVISAIFILVMIFWQRGIMGREELTWNNLYRWLFARRKGGEEK

SEQ ID NO: 14546 - protein, 114 aa, Thermotoga sp. RQ2
MLNIYLKSKIHMATVTGKKLFYEGSIEIDEELMERAGISEGEMVLVVNVNNAERFVTYVIKGKRGSREINLNGAAARLAEEGDRVIIMAFTLSETPVKSKTIILNDKNEIVQEK

SEQ ID NO: 14547 - protein, 407 aa, Geobacillus stearothermophilus
MGIIVQKFGGTSVGSIERIQHVANRVIEEVQKGNDVVVVVSAMGKTTDELVNLAKQISNHPSKREMDMLLSTGEQVSIALLAMSLHEKGYKAVSLTGWQAGITTEEMHGNARIMNIDTTRIRRCLDEGAIVIVAGFQGVTETGEITTLGRGGSDTTAVALAAALKAEKCDIYTDVTGVFTTDPRYVKTARKIKEISYDEMLELANLGAGVLHPRAVEFAKNYEVPLEVRSSMENERGTMVKEEVSMEQHLIVRGIAFEDQVTRVTVVGIEKYLQSVATIFTALANRGINVDIIIQNATNSETASVSFSIRTEDLPETLQVLQALEGADVHYESGLAKVSIVGSGMISNPGVAARVFEVLADQGIEIKMVSISEIKISTVIDEKYMVSAVEELHEAFGLAEEAAAVRS

SEQ ID NO: 14548 - protein, 482 aa, Hordeum vulgare
MAATVAVDNLNPKVLKCEYAVRGEIVIHAQRLQEQLKTQPGSLPFDEILYCNIGNPQSLGQQPVTFFREVLALCDHPDLLQREEIKTLFSADSISRAKQILAMIPGRATGAYSHSQGIKGLRDAIASGIASRDGFPANADDIFLTDGASPGVHLMMQLLIRNEKDGILVPIPQYPLYSASIALHGGALVPYYLNESTGWGLETSDVKKQLEDARSRGINVRALVVINPGNPTGQVLAEENQYDIVKFCKNEGLVLLADEVYQENIYVDNKKFHSFKKIVRSLGYGEEDLPLVSYQSVSKGYYGECGKRGGYFEITGFSAPVREQIYKIASVNLCSNITGQILASLVMNPPKASDESYASYKAEKDGILASLARRAKALEHAFNKLEGITCNEAEGAMYVFPQICLPQKAIEAAKAANKAPDAFYALRLLESTGIVVVPGSGFGQVPGTWHFRCTILPQEDKIPAVISRFTVFHEAFMSEYRD

SEQ ID NO: 14549 - protein, 201 aa, Achromobacter xylosoxidans
ALRPDTVLVSVMMVNNEIGVIQDMAALGEICREKGIIFHVDAAQATGKVEIDLQKLKVDLMSFSAHKTYGPKGIGALYVRRKPRVRIEAQMHGGGHERGFRSGTLATHQIVGMGEAFRLAREEMGTENERVRMLRDRLLAGLSQIEEVYLNGNMDHRVPHNLNVSFNYVEGESLIMAIKELAVSSGSACTSASLEPSYVRR

SEQ ID NO: 14550 - protein, 602 aa, Daucus carota
MGICVSKPSPEPDLHNHHTSIPVNDTSLPPQDNSIPPKDIAIPAQDNNKPPGKKSPFLPFYSPSPAHFLFSKKSPAVGSPAAGSSNSTPKRLFPFPPPSPAKHIKAAWARRHGSVKPNEAAIPENNEVDGGAGLDKSFGFSKKFGSKFEVGEEVGRGHFGYTCRAKFKKGEFKGQDVAVKVIPKAKMTTAIAIEDVRREVKILRALTGHNNLVQFYDAFEDHTNVYVVMELCEGGELLDRILSRGGKYTEDDAKAVMIQILNVVAFCHLQGVVHRDLKPENFLFKSKDEDSQLKAIDFGLSDYVKPDERLNDIVGSAYYVAPEVLHRSYSTEADVWSIGVISYILLCGSRPFWARTESGIFRAVLKANLSFDEPPWPSVSSEAKDFVKRLLNKDPRKRMTAAQALCHSWIKNSNDIKFPLDILVFKLMKVYMRSSPLRKAALRALSKTLTVDELFYLKEQFVLLEPTKNGTISLENIKQALMRNSTDAMKDSRVLDLLVSLNALQYRRMDFEEFCAAALSVHQLEALDRWEQHARCAYDLFEKDGNRAIMIEELASELGLGPSIPVHAVLHDWIRHTDGKLSFLGYVKLLHGVSTRAIAKAQ

SEQ ID NO: 14551 - protein, 107 aa, Vicia faba
KGMFSFLKDSAGVVDSPKLQAHAEQVFGMVRDSAIQIRQTGDVFLKDGSLGAIHIQKGVVDPHFVVVKEALLKTIKEASGDKWSEELSIAWEVAYDGLATAIKKAMS

SEQ ID NO: 14552 - protein, 67 aa, Arthrobacter globiformis
MAQGTVKWFNAEKGFGFITPDDSDGDVFVHYSEIQTGGFKTLDENARVQFEIGQGAKGPQATGVTLV

SEQ ID NO: 14553 - protein, 545 aa, Azospirillum brasilense
MKLAEALLRALKDRGAQAMFGIPGDFALPFFKVAEETQILPLHTLSHEPAVGFAADAAARYSSTLGVAAVTYGAGAFNMVNAVAGAYAEKSPVVVISGAPGTTEGNAGLLLHHQGRTLDTQFQVFKEITVAQARLDDPAKAPAEIARVLGAARALSRPVYLEIPRNMVNAEVEPVGDDPAWPVDRDALAACADEVLAAMRSATSPVLMVCVEVRRYGLEAKVAELAQRLGVPVVTTFMGRGLLADAPTPPLGTYIGVAGDAEITRLVEESDGLFLLGAILSDTNFAVSQRKIDLRKTIHAFDRAVTLGYHTYADIPLAGLVDALLEGLPPSDRTTRGKEPHAYPTGLQADGEPIAPMDIARAVNDRVRAGQEPLLIAADMGDCLFTAMDMIDAGLMAPGYYAGMGFGVPAGIGAQCVSGGKRILTVVGDGAFQMTGWELGNCRRLGIDPIVILFNNASWEMLRTFQPESAFNDLDDWRFADMAAGMGGDGVRVRTRAELKAALDKAFATRGRFQLIEAMIPRGVLSDTLARFVQGQKRLHAAPRE

SEQ ID NO: 14554 - protein, 593 aa, Pisum sativum
METETETPNGSTPCPTSAPSAIPLRPSSCDGTMGRHLARRLVEIGVRDVFSVPGDFNLTLLDHLIAEPELNLVGCCNELNAGYAADGYGRAKGVGACVVTFTVGGLSILNAIAGAYSENLPVICIVGGPNSNDYGTNRILHHTIGLPDFSQELQCFQTITCFQAVVNNLDDAHELIDTAISTALKESKPVYISIGCNLPAIPHPTFARDPVPFFLAPRVSNQAGLEAAVEEAAAFLNKAVKPVIVGGPKLRVAKAQKAFMEFAEASGYPIAVMPSGKGLVPENHPHFIGTYWGAVSTSYCGEIVESADAYVFVGPIFNDYSSVGYSLLIKKEKSLIVQPNRVTIGNGLSLGWVFMADFLTALAKKVKTNTTAVENYRRIYVPPGIPLKREKDEPLRVNVLFKHIQALISGDTAVIAETGDSWFNCQKLRLPENCGYEFQMQYGSIGWSVGATLGYAQAATDKRVIACIGDGSFQVTAQDISTMIRCGQRSIIFLINNGGYTIEVEIHDGPYNVIKNWDYTGFVSAIHNGQGKCWTAKVRTEEDLTEAIATATGAEKDSLCFIEVFAHKDDTSKELLEWGSRVAAANSRPPNPQ

SEQ ID NO: 14555 - protein, 418 aa, Nicotiana tabacum
AADGYARARGVGACVVTFTVGGLSVLNAIAGAYSENLPLICIVGGPNSNDYGTNRILHHTIGLQDFSQEPRCFQTVTCYRAVVNNLEDAHELIDTAVSTALKESKPVYISIGCNLPGIPHPTFSREPVPFALSPRLSNMMGLEAAVEAAAEFLNKAVKPVLVGGPKMRVAKASDAFVELSDACGYAVAVMPSAKGLFPEHHSHFIGTYWGAVSTAFCAEIVESADAYLFAGPIFNDYSSVGYSLLLKKEKAIIVQPDRVTIGNGPAFGCVLMRDFLAALAKRLKHNPTAFENYHRIYVPEGHPLKCEPKEALRVNVLFQHIQNMLSGDSVVIAETGDSWFNCQKLKLPKGCGYEFQMQYGSIGWSVGATLGYAQAAPEKRVIACIGDGSFQVTAQDISTMLRCGQRTIIFLINNGGYT

SEQ ID NO: 14556 - protein, 614 aa, Nicotiana tabacum
MDGSVAKGTSCIQDSQSSSVIANTDATLGRHLARRLVEIGIQDVFSVPGDFNLTLLDHLIAEPRLKNIGCCNELNAGYAADGYARARGVGACVVTFTVGGLSVLNAIAGAYSENLPVICIVGGPNTNDYGTNRILHHTIGLPDFSQELRCFQTVTCYQAVVNNLDDAHEQIDRAISTALKESKPVYISISCNLPAIPHPTFSRDPIPFSLSPRLSNKRGLEAAVDAAVTFLSKAVKPVMIGGPKLRVAKACDAFVELADSSGYAMAVMLQPKGLVAEQHPHFIGTYWGAVGTSYCAEIVESADAYLFAGPIFNDYSSVGYSLLIKKEKSIIVQPDRVVIGNGPAFGCVLMKDFLSELAKKIKKNETAYENYRRIFVPEGTPLKSEPNEPLRVNVLFQHIQKMLSDETAVIAETGDSWFNCQKLKLPEGCGYVTNNSLSAWYPFYLQTLEEKSSCCRYEFQMQYGSIGWSVGATLGYAQSVPKKRVISCIGDGSFQVTAQDVSTMIRCEQKNIIFLINNGGYTIEVEIHDGPYNVIKNWNYTGLVDAIHNGEGNCWTMKVRTEEELTEAIATATGEKKDCLCFIEVIVHKDDTSKELLEWGSRVCSANGRPPNPQ

SEQ ID NO: 14557 - protein, 577 aa, Aspergillus parasiticus
MEGETLPLAQYLFKRLLQLGVDSIFGVPGDYNLTLLDHVVPSGLKWVGNCNELNAGYAADGYSRIKDIGAVVTTFGVGELSAINAIAGAYAEKAPVVHIVGTPMRASQESRALIHHTFNDGDYQRFDAIQEHVTVAQVSLSDHRTAPSEIDRILLQCLLHSRPVRIAIPVDMVPVLVPVAGLSSKIQIPPAVRQPQAEEAALNAVLKRIYSSKKPMILVDGETRSFGMLQRVNHFIQTIGWPTFTSGFGKGLVDETLPNVYGVCTLHQKAFVDSCDLVLVFGPHFSNTNSYNYFLKPADEKSVLFSPNSIQVNKDVFRDLPVGYFIEQLTQQLDISRIPTHKHDLVHPSLRTLPEVSPTDLVTQTGGFWKRFSPFLRTGDIILGETGTPGYGVNDFILPPQTRLFKPATWLSIGYMLPAALGASHAQRDLVASDQYHSLSNPRTILFIGDGSFQMTVQELSTIIHQKLNVIIFLINNDGYTIERCIHGRNQAYNDVAPWRYLKAAEFFGADQDGEYKASTWEVRTWADLDRVLNDSQLADGKGLRMVEVFMERLDAPDVLMGLLNNQVLRENAQSRL

SEQ ID NO: 14558 - protein, 322 aa, Hyphomicrobium methylovorum
MSKKKILITWPLPEAAMARARESYDVIAHGDDPKITIDEMIETAKSVDALLITLNEKCRKEVIDRIPENIKCISTYSIGFDHIDLDACKARGIKVGNAPHGVTVATAEIAMLLLLGSARRAGEGEKMIRTRSWPGWEPLELVGEKLDNKTLGIYGFGSIGQALAKRAQGFDMDIDYFDTHRASSSDEASYQATFHDSLDSLLSVSQFFSLNAPSTPETRYFFNKATIKSLPQGAIVVNTARGDLVDNELVVAALEAGRLAYAGFDVFAGEPNINEGYYDLPNTFLFPHIGSAATQAREDMAHQANDLIDALFGGADMSYALA

SEQ ID NO: 14559 - protein, 553 aa, Arabidopsis thaliana
MGWLTKILKGSSHKFSDGQCNGRYREDRNLEGPRYSAEGSDFDKEEIECAIALSLSEQEHVIPQDDKGKKIIEYKSETEEDDDDDEDEDEEYMRAQLEAAEEEERRVAQAQIEEEEKRRAEAQLEETEKLLAKARLEEEEMRRSKAQLEEDELLAKALQESMNVGSPPRYDPGNILQPYPFLIPSSHRICVGCQAEIGHGRFLSCMGGVWHPECFCCNACDKPIIDYEFSMSGNRPYHKLCYKEQHHPKCDVCHNFIPTNPAGLIEYRAHPFWMQKYCPSHERDGTPRCCSCERMEPKDTKYLILDDGRKLCLECLDSAIMDTHECQPLYLEIREFYEGLHMKVEQQIPMLLVERSALNEAMEGEKHGHHHLPETRGLCLSEEQTVTTVLRRPRIGAGYKLIDMITEPCRLIRRCEVTAILILYGLPRLLTGSILAHEMMHAWLRLNGYPNLRPEVEEGICQVLAHMWLESETYAGSTLVDIASSSSSAVVSASSKKGERSDFEEKLGEFFKHQIESDSSSAYGDGFRQGNQAVLKHGLRRTLDHIRLTGTFP

SEQ ID NO: 14560 - protein, 350 aa, Arabidopsis thaliana
MARSPCCEKNGLKKGPWTFEEDQKLVDYIQKHGYGNWRTLPKNAGLQRCGKSCRLRWTNYLRPDIKRGRFSFEEEETIIQLHSFLGNKWSAIAARLPGRTDNEIKNFWNTHIRKKLLRMGIDPVTHSPRLDLLDISSILASSLYNSSSHHMNMSRLMMDTNRRHHQQHPLVNPEILKLATSLFSQNQNQNLVVDHDSRTQEKQTVYSQTGVNQYQTNQYFENTITQELQSSMPPFPNEARQFNNMDHHFNGFGEQNLVSTSTTSVQDCYNPSFNDYSSSNFVLDPSYSDQSFNFANSVLNTPSSSPSPTTLNSSYINSSSCSTEDEIESYCSNLMKFDIPDFLDVNGFII

SEQ ID NO: 14561 - protein, 278 aa, Capsicum annuum
MVRAPCCEKMGLKKGPWTPEEDQILVSYIQANGHGNWRALPKLAGLLRCGKSCRLRWTNYLRPDIKRGNFTREEEDSIIQLHEMLGNRWSAIAARLPGRTDDEIKNVWHTHLKKRLKNYQAPENSKRHCKKNIDSKAPSTSQITLKSSHNFSNIKEGINGPDPNSPQLSSSEVSTVTADSESVMTMGVTNGGDQMDSYENFIPEIDESFWTDDLLSTADNSNFDMAISGGEELQGQFPFYDMKQESVELDVGAKLEDDMDFWYNVFIKSGDLLELPEF

SEQ ID NO: 14562 - protein, 354 aa, Chlamydomonas reinhardtii
MASLRKPSNHADRACSRRLRVATRVAGRRMCRPVAATKASTAVTTDMSKRTVPTKLEEGEMPLNTYSNKAPFKAKVRSVEKITGPKATGETCHIIIETEGKIPFWEGQSYGVIPPGTKINSKGKEVPTARLYSIASSRYGDDGDGQTASLCVRRAVYVDPETGKEDPAKKGLCSNFLCDATPGTEISMTGPTGKVLLLPADANAPLICVATGTGIAPFRSFWRRCFIENVPSYKFTGLFWLFMGVGNSDAKLYDEELQAIAKAYPGQFRLDYALSREQNNRKGGKMYIQDKVEEYADEIFDLLDNGAHMYFCGLKGMMPGIQDMLERVAKEKGLNYEEWVEGLKHKNQWHVEVY

SEQ ID NO: 14563 - protein, 679 aa, Serratia entomophila
MTTRETSSKPQQDRLNPVVFFTSAGLILAFSLMTIFFTDFSGRWITRTLNWVSTTFGWYYLLAATLYIVFVVFIAASRFGAIKLGPEQSKPEFSLMSWAAMLFAAGIGIDLMFFSVAEPVTQYMMPPEGDAQTLEAARQAMVWTLFHYGLTGWSMYALMGIALGYFSYRYNLPLTIRSALYPIFGKRINGPIGHSVDIAAVLGTIFGIATTLGIGVVQLNYGLKVLFQVPENLTVQGSLILLSVIMATISVTSGVNKGIRILSELNVLLALGLILFVLFFGDTEFLLNALVLNVGDYVNRFMGMTLNSFAFDRPVEWMNNWTLFFWAWWVAWSPFVGLFLARISRGRTIRQFVVGTLIIPFVFTLLWLSIFGNSALYQIIHGNAEFAQEVMQFPERGFYSLLAQYPGFTFSASVATITGLLFYVTSADSGSLVLGNFTSRLADINNDAPNWLRIFWSVAIGLLTIGMLMTDGVPALQKTTVIMGLPFSFVIFFVMAGLYKSLRVEDYRKASALNTSAPMPVSSHDVLNWKQRLSRVMNYPGTQYTQKMLDKVCRPAMQDVARELELRGAKVEFSEVPPAEDERLNHLELLVRLGEEQNFIYQIWPMRYSVPGFTYRARSGKSHYYRLETFLMEGTQGNDLMDYSKEQVIGDILDQYEKHLNFLHIHREAPGNTLTFPDM

SEQ ID NO: 14564 - protein, 510 aa, Haemophilus somnus 2336
MLIGVPRELLDNESRVAATPKTVQQILKLGFEVIVENNAGFNASFEDQAFVNAGAKIGSAQDIWNADIIFKVNAPTDAEIAQIKEGATLISFIWPAQNSELMAKLSSKKINVLAMDAVPRISRAQALDALSSMANISGYRAVIEAAHEFGSFFTGQITAAGKVPPAKVLVIGAGVAGLAAIGAANSLGAIVRAFDSRPEVKEQVKSMGADFLEIDFQEEGGSGDGYAKVMSEEFNRRAMALYAEQAKEVDIIITTAAIPGKPAPRLITKEMVDSMKPGSVIVDLAALTGGNCDYTQAGEIVVTENQVKVIGYTDFPSRLPTQSSQLYGTNLVNLLKLLCKEKDGNIHIDFEDVVLRGVTVIRDGEVTWPAPPIQVSAQTQQKITAPVVDKKEKTPINPKVKYGVMALAGAAFLWLGSVMPAAFLSHFTVFVLACVVGYYVVWNVSHALHTPLMAVTNAISGIIIVGALLQIAQGNFFISLLAFIAILVAAINIFGGFKVTQRMLAMFRKG

SEQ ID NO: 14565 - protein, 283 aa, Haemophilus somnus 2336
MKTESTTTVASPQEMAQIGENVGVYKATKNQCYSFLSAISAGAFIALAFVFYTTTQTDLGNAPWGLTKLVGGLVFSLGIIMAVVCGSELFTSSTMSLIARVNKRITTTQMLKNWLVVYLGNFVGSLIIVLLIWFAGQTMAANGQWGLTILKTAQHKIHHTWLEAFCLGILCNIMVCIAVWMSYAGKTLTDKAFIMILPIGLFVASGFEHSVANMFMIPMGIITSHASSTDFWQAINLNPLQFADLDIYHFIFKNLIPVTLGNIIGGGVCIALMQWFTNKPHRH

SEQ ID NO: 14566 - protein, 287 aa, Haemophilus somnus 2336
MSNKGTSSNLVKYRPFLKWAGGKFRLTEEINKLLPKNKTCLIEPFVGAGSVFLNTHFEHYILVDINPDLIHLFNIVKQDVEHYIAACKPIFFHDQANTANYYYHRRAEFNLSQNIFERAVLFLYLNRYGFNGLCRYNAKNEFNVPFGSYKTHYFPESELRYFAQKAQRAVFICADFQQAFSMINNDSVIYCDPPYAPLKQNSNFTSYSGNEFSLSHQQNLAQLAKDTALNHGVPVLISNHDTKFTREIYKDAKIKRLKVQRSISKSSHKRIKVNELIAVFNHKKSVP

SEQ ID NO: 14567 - protein, 601 aa, Haemophilus somnus 2336
MTETTITFNDLGLPEFILNAVSEMGFSTPSPIQQACIPHLLNGHDVLGMAQTGSGKTAAFSLPLLAKIDTNEKYPQMLVMAPTRELAIQVADACEQFVKFSKGVRIVTLYGGQRYDIQLRALKQGAQVVVGTPGRILDHIRRGTLDLSNLQSIVLDEADEMLRMGFIDDVETVMAELPEQHQTALFSATMPAPIKRITKRFMHNPQEVKIQSTQRTAPDITQSCWYVRGFRKNEALLRFLEVEDFDAAIIFTRTKTATLDVTELLEKHGFRAAALNGDMTQQLREQTLDRLRNGSLDILVATDVAARGLDVERISLVVNYDIPLDAESYVHRIGRTGRAGRAGRAILFVEPKERRLLGNIERLMKKAIEEVEMPNHLALQECRRKNFVAKITKQLEHHDLEQYRSLLEDLFTADQDQEDIAAAMLMLLQGKQKLILPEDPVFEKHSRRNDRRERGERRGKENPRSERHGYGIPQPMDLYRIEVGRCDGVEVRHIVGAIANEGDIQSRYIGHIKLYDTYSTIELPQGMPKELLQVFAKTRVLNKQMRMSFVSAVNSEEEFEAGSGGKRKGRYEREFRGGRKFNEKSNRSFSEQRKERRERKR

SEQ ID NO: 14568 - protein, 609 aa, Haemophilus somnus 2336
MVKNIVLWIVVAVVMMTAYQSFSGNSSNNAIDYTTFISDVENNQVSATKFNEVGEIFVTKKDGSKYTTVLPTPLEDRKLLDDLIKSKVKIDGALPEQRGFLSQILISWFPMILLIGVWFFFMRQMQGGGGKAMSFGKSRAKMLTKEQIKTTFADVAGCDEAKEEVGEIVDFLRDPSKFQKLGGKIPKGILMVGPPGTGKTLLAKAIAGEAQVPFFTISGSDFVEMFVGVGASRVRDMFEQAKKNAPCLIFIDEIDAVGRQRGAGLGGGHDEREQTLNQMLVEMDGFEGNEGVIVIAATNRPDVLDPALTRPGRFDRQVVVGLPDVRGREHILKVHMRKVPVADDVDAMTLARGTPGYSGADLANLVNEAALFAARTNKKLVTMLEFEKAKDKINMGPERRSMIMTDKVKESTAYHEAGHAIVGYLVPEHDPVHKVTIIPRGRALGVTFFLPEGDQVSISQKQLESKLSTLYAGRLAEELIYGEENISTGASNDIKVATNIARNMVTQWGFSDKLGPILYSEDEGEVFLGRSMAKAKHMSDETAHTIDEEVRSIVNRNYQRARQILIDNMDILHAMKDALVKYETIEEDQIRQLMNREPVVAPAGWTNNE

SEQ ID NO: 14569 - protein, 392 aa, Haemophilus somnus 2336
MKFIDEALIRIEAGDGGNGCVSFRREKFIPKGGPDGGDGGDGGDVYLIADENLNTLIDYRFEKSFAAERGENGRSSDCTGRRGKDITLRVPVGTRAIDNDTKEVLGDLTKHGTKMLVAKGGYHGLGNARFKSSVNRAPRQKTNGTPGEKRDLQLELMLLADVGMLGLPNAGKSTFIRAVSAAKPKVADYPFTTLVPSLGVTRVDTSRSFVIADIPGLIEGASEGAGLGVRFLKHLERCHVLIHLVDIAPIDESDPADNIAIIEGELFQYSEKLANKPRWLVFNKIDILSDEEATARAKNIMQRLGGEDDYYLISAATGKNVDVLCRDIMDFIEENPRQEQEKIDAQEVKFKWDDYHQEQLSEQVFTEDDQEEDDWDDWSEDDEEGVEIIYKP

SEQ ID NO: 14570 - protein, 565 aa, Haemophilus somnus 2336
MTMTTQQLISKLTDIVGNKFIITDPSKTESYRSGYRFGNGNAIAVVRPTNLVEYWNVLKACVEADVIIINQAANTGLTGGSTPSGNDYDRDIVIINTMYMNGIQLINNAEQAVCLPGSTLNELEILLKTHGREPHSVIGSSCIGASVIGGICNNSGGALVQRGPAYTEMALYAQLNEQGELELKNHLGIDLGNDPEEILENLQNQRYQRKDIQQHCGRGHDHSYCEHVRQIDENSPARFNADPSRHYETSGSAGKLAVFAVRLDTFPMEKHTAVFYIGTNQTDVLNDIRRHMLANFQQLPISGEYIHRDAFDIAAKYGKDTFWIIKKFGTHRLPKLFALKAKVDRIAKKVSFLPNDFSDKFMQILSKAMPEHLPKSLWQYRDQYEHHLIVKIGGTGVQEAQEYLKEYFSDNSKGNYFQCNAEETQAAMLHRFAVASAAIRYRAIHDKDVEDIVALDVALRRNDKEWFEKLPAEIENKIIHKLYYGHFMCHVFHQDYIIKKGHNCIELEHQMLDLLDQRGAEYPAEHNVGHLYQAKPELRKFYKALDPTNSFNPGIGQTSKKKYWQ

SEQ ID NO: 14571 - protein, 712 aa, Haemophilus somnus 2336
MSRTIILIPISTGVGLTSVSLGLIHALEQKGAKIGFMKPISQPSTDEDKLDRTTSIVRTSTTLETAEPFMLSVAENLIGQNQSDVLLEKIVENHQQLAKNNELIIVEGLVPTRKHGYANSINYEIAKALDAEIVLVAAPATETPAELKERIEAAASQFGGKNNPNLLGVIINKFNAPIDESGRTRPDLSEIFDAYQHKQNNLNEVYKLFEKSPIKVLACVPWNAELIATRAIDLVNHLGASILHEGDIKTRRIRSITFCARSLQNMVEHFKTGSLLVTSADRPDVLTASALAATNGIELGGILLTGGYKIDNQIKKLCQPVFENTGLPIFRIEGNTWQSALALQSFNLEVPVDDKERIENIKQYTSQQFKSSFIENLVAASTRPRRLSPPAFRFQLTELARAAKKRIVLPEGDEPRTVKAASLCAERGIAECILLANPDDVKRVADAQGVVLGKGITIIDPVSVRENYVDRLVELRKAKGMTETSAREQLEDTVVLGTMMLEANEVDGLVSGAIHTTANTIRPPMQIIKTAPGNSIVSSIFFMLLPDQVLVYGDCAVNPDPTAEQLAEIAIQSADSAKAFGIDPKVAMISYSTGTSGSGADVEKVKEATRIAQEKRPDLLIDGPLQYDAAVMEDVAKSKAPNSPVAGKATVFVFPDLNTGNTTYKAVQRSADLISIGPMLQGMRKPVNDLSRGALVDDIVYTIALTAIQATQ

SEQ ID NO: 14572 - protein, 398 aa, Haemophilus somnus 2336
MSQKLVLILNCGSSSLKFAILDPVSGAEKLSGLAEAFYLPDARIKWKLNGEKGNADLGAGAAHSEALNFIVSTILTEDLKNSIAAIGHRVVHGGEKYTKSVVITDEVIQGIKDAAEFAPLHNPAHLIGIEEAFKAFPHLKDNNVAVFDTAFHQTMPEEAFLYALPYSLYKEHGVRRYGMHGTSHYFVSREAAKRLNIAEDKINVITCHLGNGASVAAIRQGKCIDTSMGFTPLEGLVMGTRSGDLDPAIIFYMHNTLGMSVAQIEETLVKKSGLLGLTEVTSDCRYSEDNYEKESAAKRALDVFCYRLAKYIGSYMAIIGENLDAIVFTGGIGENAALVRQITLNHLKLFGYKIDDEKNSAARFGNEGVITADNTPIAIVIPTNEELVIAQDTARLSF

SEQ ID NO: 14573 - protein, 555 aa, Haemophilus somnus 2336
MSEITVEMENTEHKPTNFIRQIIDEDLASGKHHNVYTRFPPEPNGYLHIGHAKSICLNFGIAQDYQGKCNLRFDDTNPVKEDVEYVDSIKQDVKWLGFEWEGEPRYASDYFDQLYSYAIELIKKGLAYVDELSPEQIREYRGTLTSAGKNSPYRDRSIEENLALFEKMKKGEFAEGAASLRAKIDMASPFMVMRDPVLYRIKFASHHQTGDKWCIYPMYDFTHCISDAIERITHSLCTLEFQDNRRLYDWVLDNISIERPLPHQYEFSRLNLEYTLTSKRKLLKLVNDGIVDGWNDPRMPTISGLRRRGYTPASLREFCRRIGVTKQDNVVEYSALESCIRDDLNTNAPRAMAVLNPLKIVIENFDGKEILTAPNHPNREELGTRELPFTKEIYIDQADFREEANKQYKRLVLGKEVRLRNAYVIKAERVEKDAEGCVTTVYCTYDPETLGKNPEGRKVKGVIQWVSATDNLSAEFRLYDKLFTVANPGAVEDINEVLNPNSLIIKHGVVEQSLASAKAEQAYQFEREGYYCADSKDSNADNLVFNLTVSLKEGF

SEQ ID NO: 14574 - protein, 311 aa, Haemophilus somnus 2336
MNYLQIARNSLAAEQNALAKLSQNLNQQFNQVVELILNCEGRLVVGGIGKSGLIGKKMVATFASTGTPSFFLHPTEAFHGDLGMLKPIDIVMLISYSGESDDVNKLIPSLKNFGNKIIALTGNLNSTLAKHADYILDISVEREACPNNLAPTTSALVTLALGDALAVSLITARNFQPADFAKFHPGGSLGRRLLCRVKDQMQVRLPKVTENTNFTGCLTVMNEGRMGVALVMENENLKGIITDGDIRRALSANGTNTLNKIAKDLMTSNPKTINYNTYLSEAENFMKEKKIHSLVVVDDQNKVIGLVEFSS

SEQ ID NO: 14575 - protein, 504 aa, Haemophilus somnus 2336
MFSFDPTIITFIVYILGMLLIGALAYYYTNNLSDYILGGRRLGSFVTAMSAGASDMSAWLLMGLPGTIYLSGLIEGWIAIGLTIGAYFNWLFVAGRLRIYTEFNNNALTLPEYFHNRFGSRYNLLKFVSASIILVFFTIYCASGIVAGAKLFQNLFNIPYSTALWYGALATIAYTFIGGFLAVSWTDTIQATLMIFALILTPIMIILNLDGIDNFHFYLKQAESAAGKNLTDIFTGTTTIGLLSLASWGLGYFGQPHILARFMAAHTVKSLNNARRISITWMILCLVGAIGIGFFGIAYFTANPQLAGVVNKESEQIFIELSKLLFNPWIAGILLSAILAAVMSTLSAQLLISSSAVTEDFYKGFIRPKASDKELMWLGRLMVLAIATIAIWIAQDEKSQVLKLVEFAWAGFGSAFGPVVLFSLFWKRMTSSAAMAGMLTGTIIVFSWKTIVPTTSEFSKLYEMIPGFALASIVIIVVSLLSVKPEKSILETFEQAKNAYKASK

SEQ ID NO: 14576 - protein, 596 aa, Haemophilus somnus 2336
MYNATQFFYDRSMNMQDKDLSTLQTFKRLWPTIAPFKLGLIASAAALVFNALADAALIQMLKPVLDEGFGKVDNSLLRIMAIVVVLLIFVRGVTNFISTYCLAWVSGKVVMVMRRRLFRHLMYMPVTFFDQNSVGRLLSRIVYDSEQVANSSSGSLVTIVREGAYIIALLTVMFYTSWQLALVLFIIGPIIAIIIRIVSKKFRELGKNLQNSMGDLTSSVEQMLKGHKVVLAFGGQKIEEERFDQVSNNMRRRGMKVMVASAISDPVVQIIASFALAAVLFLATLPEIMTQNLSAGSFTVVFSSMLAMMRPLKSLTNVNAQFQRGMAACQTLFALLDLETEKDTGKHVVDTVKGEVRFENVTFSYSGKEHPALNNISFTIPQGKTVALVGRSGSGKSTIANLVTRFYDVEQGKITLDGVNIQDYTLANLREHCAVVSQQVHLFNDTIANNIAYAVTEKCTREQIIEAAEAAYAMEFIEKLENGLDTVIGENGASLSGGQRQRLAIARALLRDSPVLILDEATSALDTESERAIQAALETLQKDRTVLVIAHRLSTIEKADEILVIEQGEIKERGSHQELLALNGAYKQLHSTQFNH

SEQ ID NO: 14577 - protein, 108 aa, Haemophilus somnus 2336
METLDKIKKQISENPILIYMKGSPKFPSCGFSARAVEVLINCNVPFGYVDILQHPDIRAALPNYANWPTFPQLWVEGELIGGCDIMLEMFQQGELQPLLSEVAARYPQ

SEQ ID NO: 14578 - protein, 404 aa, Haemophilus somnus 2336
MKLPIYLDYAATCPVDERVVKKMMEFLSIDGNFGNPASRSHKFGWQAEEAVDVARNHIADLIGADSREIVFTSGATEADNLALKGVMRFYQTKGKHLITCKTEHKAILDTCRQLEREGFEVTYLDPKSDGLIDLEELKSVIRDDTVLVSIMHANNEIGVVQDIAKIGEICRERKVLFHTDATQSVGKLPINLSELKVDLLSMSSHKLYGPKGIGALYVCRKPRVRLEAIIHGGGHERGMRSGTLPVHQIVGMGEAYRIAKEEMATEMPRLTALRDRLYNGLKDIEETYVNGSMEQRLGNNLNISFNYVEGESLMMALRDIAVSSGSACTSASLEPSYVLRALGLNDELAHSSIRFTVGRYTTEEEIDYSIGLVKSAVKKLRDLSPLWDMFKEGIDLNSIEWTHH

SEQ ID NO: 14579 - protein, 302 aa, Haemophilus somnus 2336
MNQKLFSVAVIGLGAMGMGAAKSCIQAGLDTYGVDLNLQALEILKTAGAKQVSTSAIGFAKDLDAVLLLVVNANQVNNILFGEQGLAQHLKPKTAVMISSTISAQDAKEISQKLTKLDLIMLDAPVSGGAAKAAQGEMTVMASGSTEAFEKLKPVLDAVSGKVYNIGEEIGLGATVKIIHQLLAGVHIAAGAEAMALAAKAGIPLDLMYDVVTNAAGNSWMFENRMKHVVDGDYTPLSMVDIFVKDLGLVNDTAKSLHFPLHLASTAYSMFTEASNAGYGKEDDSAVIKIFSGLDLPKKGGH

SEQ ID NO: 14580 - protein, 410 aa, Haemophilus somnus 2336
MTTKVSLDKSKIKFLLLEGIHQNALEVLKAAGYTNIEYHRKALEPDELKIAIKDAHFIGIRSRTSLTEDILAEATKLIAIGCFCIGTNQVDLEAAKARGIPVFNAPFANTRSVAELVLGEILLLMRNIPQANADVHRGLWNKSMVGSYEVRGKRLGIIGYGHIGSQLSIIAEALGMNVYFYDIETKLPLGNAQQMNSLEELLSTCDVVSLHLPENSSTKNLMNAERIAQLKANCIFINAARGTVVDIDALTQALESKKIRGAAIDVFPKEPASIEEEFISPLRAFDNVILTPHIGGSTVEAQENIGVEVANKFVKYSDNGSTLSAVNFPEVSLPEHSNAKRLLHIHHNRPGILNKINQIFVEQNINIAAEYLQTEAKIGYVVIDVETEDTAQLLAKLKQIEGTIRARVLF

SEQ ID NO: 14581 - protein, 541 aa, Haemophilus somnus 2336
MDSKRSLLFMALLFISFLIYQQWQVDYNTPKPEVTEQAQVSEVNSTALTATSDIANDTQAKGRVITLENDVFRLKVNTLGGDVIGSELLNYDAELHSSAPFVLLQNNADKVYIAQSGLVGKNGIDSRAGRANYQVEGDVFKLAEGQQELKVPLIFEKDGVIYRKVFVLKPGSYALEVNFEITNQSPKPIELVPYAQLTHTLVESSGSMAMPTYTGGAYSSSETNYKKYSFEDMEKADLDIHTKAGWVALLQHYFVSAWIPNQDANNTLYTLTNTKKHLGSIGYRSAPIVIENGATETIHTQLWTGPKLQDQMADVANHLDLTVDYGWAWFIAKPLFKLLTLIQSLVQNWGLAIIGVTLVVKAVLYPLTKAQYTSMAKMRMLQPKLQEMRERFGEDRQRMSQEMMKLYKEEKVNPLGGCLPILLQMPIFIALYWTFMEAVELRHAPFFGWVQDLSAQDPYFILPILMGASMFLLQKMSPTPVADPMQQKVMTFMPLIFMVFFLFFPAGLVLYWLASNLITIAQQWLIYRGLEKKGLHTRVKK

SEQ ID NO: 14582 - protein, 444 aa, Haemophilus somnus 2336
MSNTILQHLPIGQKVGIAFSGGLDTSAALLWMRQKGAVPYAYTANLGQPDEEDYNAIPRKAMEYGAEKARLIDCRNQLAHEGIAAIQCGAFHISTGGVTYFNTTPLGRAVTGTMLVSAMKEDDVNIWGDGSTFKGNDIERFYRYGLLTNPSLRIYKPWLDNQFIDELGGRQEMSEFLIANGFDYKMSAEKAYSTDSNMLGATHEAKDLEYLNSGIRIVKPIMGVAFWRDDVTVKAEEVTVGFEDGVPVTLNGQSFSSAVELFLEANRIGGRHGLGMSDQIENRIIEAKSRGIYEAPGMALLHIAYERLVTAIHNEDTIEQYRINGLRLGRLLYQGRWFDPQALMLRETAQRWVARAVTGEVTLELRRGNDYSILNTVSPNMTYHPERLSMEKVENAPFDPSDRIGQLTMRNLDITDTRDKLGIYTHTGLLTVGKDSMLPQLDKK

SEQ ID NO: 14583 - protein, 816 aa, Haemophilus somnus 2336
MRVLKFGGTSLANPQRFLQAAALIEKAHLEEQAAGVLSAPAKITNHLVALSEKAALNQPTDGHFDEAIEIFYNIINGLYAENTHFDLVGTKALIESEFAQIKGLLENIRQAGKVEDAVKATIDCRGEKLSIAMMNAWFEAKGYTVTVINPVEKLLAYGSYLESSVDIAESTKRVDAKSIPAKNIVLMAGFTAGNDKGELVLLGRNGSDYSAACLAACLGASVCEIWTDVDGVYTCDPRLVPDARLLSSLSYREAMELSYFGAKVIHPRTIGPLVEPQIPCLIKNTGNPEGAGSIIDNRENISEGLQVKGITNLDNVAMFNVSGPGMQGMVGMAARVFSAMSKASVSVILITQSSSEYSISFCVPTKAIEKAKAALNAEFEQELVAKDLDPVEVIHDLSIISVVGDGMERSKGIAASFFSALASANISIVAIAQGSSERSISAVVPLNKAIEAVKATHQALFNNRKVVDMFLVGVGGVGGELIEQIKRQSEYLAKKDIEIRVCALANSNKMLLNENGLNLGNWREDLANATQPSDFDVLLSFIKLHHVVNPVFVDCTTAESVAGLYERALKEGFHVITPNKKANTRELDYYNQVRENARKNHRKFLYDTNVGAGLPVIDNLQNLLAAGDDVVSFNGILSGSLSFIFGKLEEGLSLSEATALAREKGFTEPDPRDDLSGQDVARKLLILAREIGLELELSDIEVEGVLPQGFSEGKSADEFMAMLPSLDEEFAERVAKAKSEGKVLRYVGQIEEGKCKVSIVAVDGDAPLYKVKNGENALAFYTRYYQPIPLLLRGYGAGNAVTAAGIFADILRTLKH

SEQ ID NO: 14584 - protein, 635 aa, Haemophilus somnus 2336
MGKIIGIDLGTTNSCVAVMDGDKPRVIENAEGERTTPSIIAYTNDNETLVGQPAKRQAVTNPKNTLFAIKRLIGRRFEDQEVQRDVAIMPFEITKADNGDAWVSVKGEKMAPPQISAEVLKKMKKTAEDFLGETVTEAVITVPAYFNDAQRQATKDAGRIAGLEVKRIINEPTAAALAYGLDKGKGNQTIAVYDLGGGTFDLSIIEIDEVGGEKTFEVLATNGDTHLGGEDFDNRVINYLVDEFKKEQGVDLRNDPLAMQRLKEAGEKAKIELSSAQQTDVNLPYITADATGPKHLNIKLTRAKLEALVEDLVARSMEPVKVALSDAGLSVSEINDVILVGGQTRMPLVQQKVAEFFGKEPRRDVNPDEAVAIGAAVQGGVLAGDVKDVLLLDVTPLSLGIETMGGVMTTLIEKNTTIPTKKSQVFSTAEDNQSAVTIHVLQGERKQASANKSLGQFNLEGINPAPRGMPQIEVTFDIDADGIIHVSAKDKGTGKEQKITIKASSGLSDEEIQQMVRDAEANAEADRKFEELVQARNQADHLVHSTRKQLAEVGEKLSAEDKAPIESAVNELETAAKGEDKTEIDAKVQALIQVSEKLLQASQQQAQADAGAQQSQSTKGGEDVVDAEFEEVKDK

SEQ ID NO: 14585 - protein, 184 aa, Haemophilus somnus 2336
MNKAIFLDRDGTLNIDHGYVHEIDKFQFIAGSIEALKQLKSMGFLLVLVTNQSGIARGYFSEEQFLQLTEWMDWSLADRGVDLDGIYYCPHHLEGIGEYKQDCDCRKPKNGMLLQAIKELNIDPARSFMVGDKKEDLLAGKSAGIKKNILVRSGKEITDDGLSLADYVLDTIADLPELIKKLKF

SEQ ID NO: 14586 - protein, 330 aa, Haemophilus somnus 2336
MKKSFILQQQEISFAKNTFTEKLIEHLGIIEVQGPILSQVGNGIQDNLSGTEKAVQVNVKQITDAKFEVVHSLAKWKRHTLARFNFAENEGLFVHMKALRPDEDSLDQTHSVYVDQWDWEKVIPTGRRNLAYLKETVRSIYQAILETEDAVHQKFGLSKFLPREITFIHSEELVQRYPELNDKQRENAICKEYGAVFLMGIGGVLSDGKPHDKRAPDYDDWTTPSEGEYLGLNGDILVWNPVLERAFEVSSMGIRVDETALRKQLALTGDEDRLQFDWHQDLVNGRLPLSIGGGIGQSRLAMLLLQKKHIGEVQSSVWPKVVTEQFENIL

SEQ ID NO: 14587 - protein, 402 aa, Haemophilus somnus 2336
MTFGTYETVALACLVLLLGYFLVKRVHFLSEYNIPEPVVGGFIVAIILSIVHHFWDMSFSFDTKLQTTMMLVFFSSIGLSANFARLAKGGKPLVIFLFAALGLIILQNTVGIGTSMLVGLDPAYGLIAGSVTLTGGHGTGAAWAETLSNRFGIQGALELAMACATFGLVFGGIIGGPVARFLLKRLHKAEVLEDENVDDIEEVFEKPVYRRKINTRSIIETITMMSVCLIVGQYLDVLTKGTALQLPTFVWCLFTGTVIRNALAHVVKFKVADEAIDVLGTVGLSLFLAIALMSLKLWELAGLALPILVVLVAQVVVMAAYSIFVTYRMMGRDYDAVVLSAGHCGFGLGATPTAVANMQAVTSHFGPSHKAFLIVPMVGAFFIDLLNSVALNIFLNIVDVLH

SEQ ID NO: 14588 - protein, 755 aa, Haemophilus somnus 2336
MDAQLRQAALDFHEFPKPGKIEVTPTKSLGTQRDLALAYSPGVAVPCLEIQADPASAYRYTSKGNLVAVISNGTAVLGLGNIGALAGKPVMEGKGVLFKKFAGVDVFDIEVDEQDPDKLVEIIAALEPTFGGINLEDIKAPECFYIEQKLRERLKIPVFHDDQHGTAIISAAAIINGLRIVNKKIEDVRLVTSGAGAASIACLNLLVSLGMKRENITVCDSKGVIYKGRDEKMDDTKKLYAIDDNGQRSLADAIPDSDIFLGCSAAGALTQEMVKTMGPNPLILALANPEPEILPPLAKAVRPDAIVCTGRSDYPNQVNNVLCFPFIFRGALDVSATTINEEMKLAAVYAIADLALAEQSEVVSSAYGESGVSFGPDYIIPKPFDPRLIVKIAPAVAKAAMDSGVATRPIEDFEAYIEKLTQFVYKTNLFMKPVFAQAKEDKKRVILTDGEEKRVLHAIQEIATLGIAYPVLLGRTHIIEESIKKLGLQLQVGRDFEIIDIENNPYYEECCDTYYNKLKRQGMTPTGAKRKMLHNPTALGAVLLELGKVDAMICGLVGPFAAHLATVKEVVGEKEHEIPATVNGLVLPTGNLFIADTFVNSSPTAEELAEITIMSAKEVRRFGIEPQVALVSHSNYGSINDPSAVKMRQVLELVREKAPDLIIDGEMHCDIALSENLRKEVMPDSPIKGAANLLIMPNMETARISLNLLQGTATPITIGPILMGVEKPAHILTSASSVRRIINMVAVAAVKAQNR

SEQ ID NO: 14589 - protein, 393 aa, Haemophilus somnus 2336
MKNVVIASAVRTAIGNFGGSLADTSAVELGTAVIKSAIERAGIDITAIDEVIMGNVLQAGLGQNPARQALLCSGIAQDVPAYTVNKVCGSGLKAVVLGTQAIKAGDAKVIIAGGMENMSQAPYLLESKSRWGYRLGDAKVQDVILSDGLICATNHYHMGITAENIAKKYDITRQMQDELALASQQKATAAIQSGAFKNEIVPLNIKIKRKEVIFDTDEFVKQDSTAEGLARLRAAFDKEGSVTAGNASGINDGAAALVIVEEETAKALGLNILARIKGYASGGVSPDIMGIGPVPATLNALKKTGLQLSDIDLIEANEAFAAQFLAVGKELGVNPEKVNVNGGAIALGHPIGASGARILVTLLHAMQARDKQLGLATLCIGGGQGIAMIVERI

SEQ ID NO: 14590 - protein, 242 aa, Haemophilus somnus 2336
MSTSISILVIDDDIQICELLTDTFEEYGYRVVAVSSGQEALTLLQTNSRFDLILLDLILPDINGLVLLQQLKNLLNKPIIMLSGLNSESDVVVGLEMGADDYITKPFYPRIVVARAKAAIRRTQPQATTTVYTHSGFLFHQWYLDTETHKLYSPQKQEIELTHGEYLLLYALVSHAQKVLSRQKLLELTHAENLEIFDRTIDVLIMRLRKKIEPNVKAPSFIQTVRGLGYCFEASVEKLGEN

SEQ ID NO: 14591 - protein, 304 aa, Haemophilus somnus 2336
MREKMTEQETYCGFIAIVGRPNVGKSTLLNKILGQKISITSRKAQTTRHRIVGIHTEGVYQAVYVDTPGLHIEEKRAINRLMNRAASSAIGDVDLIIFVVDGTHWNDDDEMVLNKLRRAKAPVVLAINKVDNIKNKDELLPFITDVSQKLEFKEIIPISAQRGNNIHNLEKIVRTSLRKGVHHFPEDYVTDRSQRFMASEIIREKLMRFTGEELPYSVTVEIEQFKLNDRGIYEINGLILVEREGQKKMVIGAKGQKLKTIGTEARQDMERLFDNKVHLELWVKVKSGWADDERALRSLGYIDE

SEQ ID NO: 14592 - protein, 404 aa, Haemophilus somnus 2336
MRVFPKSDKLEHVCYDIRGPVHQEALRLEEEGKKILKLNIGNPAPFGFEAPDEILVDILRNLPAAQGYCDSKGLYSARKAIVQYYQSKNILSATVNDVYIGNGVSELITMSLQALLNDGDEVLIPMPDYPLWTAAATLAGGKAVHYLCDEQADWFPDVADIKSKVTSRTKAIVIINPNNPTGAVYSKELLLDIVEVARQNGLMIFADEIYDKILYDNAVHHHIAALAPDLLTVTFNGLSKSYRVAGFRQGWMILNGPKQQAKGYIEGLDMLASMRLCANHPMQHAIQTALGGYQSINEFILPGGRLLEQRNKAYELINQIPGLSCTKPMGALYMFPKIDTKKFNIYDDEKMVLDLLRQEKVLLVHGRGFNWQQPDHFRIVTLPYVNQIEDALGRLAKFLTHYRQ

SEQ ID NO: 14593 - protein, 356 aa, Arabidopsis thaliana
MKPVFCGNFEYDARESDLERLFRKYGKVERVDMKAGFAFVYMEDERDAEDAIRALDRFEYGRTGRRLRVEWTKNDRGGAGRSGGSRRSSSGLRPSKTLFVINFDAQNTRTRDLERHFEPYGKIVNVRIRRNYAFIQYEAQEDATRALDATNSSKLMDKVISVEYAVKDDDSRGNGYSPERRRDRSPDRRRRSPSPYRRERGSPDYGRGASPVAHKRERTSPDYGRGRRSPSPYKRARLSPDYKRDDRRRERVASPENGAVRNRSPRKGRGESRSPPPYEKRRESRSPPPYEKRRESRSPPPYEKRRERSRSRSKSSPENGQVESPGQIMEVEAGRGYDGADSPIRESPSRSPPAEE

SEQ ID NO: 14594 - protein, 104 aa, Arabidopsis thaliana
MSANQEEDKKPGDGGAHINLKVKGQDGNEVFFRIKRSTQLKKLMNAYCDRQSVDMNSIAFLFDGRRLRAEQTPDELDMEDGDEIDAMLHQTGGGAKNGLKLFCF

SEQ ID NO: 14595 - protein, 362 aa, Chenopodium rubrum
MMKKEVPGGDNNSWARVCDTCRSAPCTVYCKEDSAFLCTSCDARIHAVNQMASRHERVWVCEACEREPAAFLCKADAASLCATCDADIHSANPLARRHHRVPIMPVGCVYGPSDGRMSEDGFLDLPDRDDQTTDHEGDEDEAASWLLLNPGKNSNNQTTNGFLTGGGEVDEYLDLFEYNSGADNQFCEQYNQQQEFSVPEKNCGGDSVVPVQCREVKDHQIQYQNFLFGMECETKSEYTYNTSISHSVSVSSLDVGVVPESTMSDMSVSHSRPPKGTIDLFSSTPMQVPTQLSPLDREARVMRYREKKKNRKFEKTIRYASRKAYAETRPRIKGRFAKRTDVEAERTNSLMSDGGYGIVPSF

SEQ ID NO: 14596 - protein, 336 aa, Chenopodium rubrum
MMKKEVPGGDNNSWARVCDTCRSAPCTVYCKEDSAFLCTSCDARIHAVNQVASRHERVWVCEACEREPAAFLCKADAASLCATCDADIHSANPLARRHHRVPIMPVGCVYGPSDGRMSEEGFLDLPDGDDQTTDHEGDEDEAASWLLLNPGADNQFCEQYSQQQEFSVPEKNCGGDSVVPVQCREVKDHQIQYQKFLFGMECETKSEYNYNTSISHSVSVSSLDVGVVPESTMSDMSVSHSRPPKGTIDLFSSPPMQVPTQLSPLDREARVMRYREKKKNRKFEKTIRYASRKAYAETRPRIKGRFAKRTDVEAEMDQMFTNSLMSDGGYGIVPSF

SEQ ID NO: 14597 - protein, 564 aa, Clavibacter michiganensis subsp. sepedonicus
MLVGAGLTVVPPLLTQQAFDRGLFPPTGGPDIPVLVELVAIMIAIWVVGAGLGVWQTYLTATVGNRVMGSMRVDLFRHLQSMELGFFTRTKTGVIQSRLQNDVGGVAAVLTNTVSSVLGNTVTVIAALVAMLVLNWQLTLVAVILMPVLVVAQPRVGQVRARIASKTQESLSDMTAITQETLSVSGILLSKSFSRQAAETERYEAENRNQIRLQVSQQMSGQWFFALVQIFLSIIPAIVYVVAGFLITGGVSVTAGTIVAFTTVQARLMWPLIGLMRVALDLQTSGALFARIFEYLDLEPAIRDRHDARPVSAGPALGRVAFDEVRFSYPDTRAGERPTLDGMSFEIQPGQFAAFVGPSGAGKTTVSYLIPRFHDVTGGRVLFSGADVRDLEQESLLENIGIVSQETYLFHATIGENLRYARPDATQEQIEQAARAANIHQTIESFPDGYETLVGERGYRLSGGEKQRIAIARVLLKDPAVLILDEATSALDAISERVVQQALDTASRGRTTIAIAHRLSTVVDADVIFVVVAGRIVEQGTHVELLARGGEYARLYSDQRTAAA

SEQ ID NO: 14598 - protein, 705 aa, Clavibacter michiganensis subsp. sepedonicus
MARSIYITSAEGHSGKSTVALGVLDTLTHQIQRVGVFRPIARSIVERDYVLEALLSHDGVDLDYDECVGVTYDDVHADPEAALSRIVERYKAVEAKCDAVVIVGSDYTDVGSPTELSFNARIAANLGAPVLLVLTGRRTDETGGRSPDEMRQIADLAIPELVTAHAGLLGVVVNRADPEQLDAITAAIPAAVPASLQAQAPHVPVWAIPEDAFLVAPTVAELLDAVDGTLVKGDAALLSREALGVVVSAMSMENVLARLTEGAIVVIPGDRSEVLLGVLTAHASETFPTVAGIVLNGGFALSPTIERLVSGLDETLPIISTELGTYETAKRITQTRGRLSPESSRKMDTALAAFEQHVDTSRLLELLDVSRSDVVTPLMFEYGLIERARKAGKRIVLPEGTDDRVLRAAGTILSRGIADVTILGEEIEVRSRAIGLGIDIGRATVLSPFDAVLRERFAEEYVRLRAHKGMVLDIARETVTDVSYFGTMMVQLGLADGMVSGAAHTTAHTIRPGFEIIKTTDGVSVVSSVFLMALADRVLVYGDCAVNPDPTADQLADIAISSAGTAAQFGIEPRIAMLSYSTGESGAGADVEKVRQATARVRELRPDLAVEGPIQYDAAADAAVAATKMPGSEVAGRATVFIFPDLNTGNNTYKAVQRSAGAVAIGPVLQGLRKPINDLSRGALVQDIVNTVAITAIQAEGIEAG

SEQ ID NO: 14599 - protein, 396 aa, Clavibacter michiganensis subsp. sepedonicus
MPVVLVVNSGSSSFKYQLIEMDTETVLASGLVERIGEEVGSTRHKAGGDSWERELPIADHTAGFQAMLDAFADHGPSLEEGPPVAIGHRVVHGGDVFVEPTVVTEKVKADIDDLSALAPLHNPGALQGIQAAQTAFPDVAHVAVFDTAFHQTLPAEAYTYAIDRELAAAHRIRRYGFHGTSHKYVSEAAARLLGKPLEETRIIVLHLGNGASAAAVQGGRSIDTSMGLTPLEGLVMGTRSGDIDPAILFHLARHTDLGLDDLETLLNRKSGLLGLTGLGDMRDVQRAAADGDEDAQTALGVYRHRIRHYVGAYAAQLGGVDAVVFTAGVGENNPLVRRRSLAGLEFMGIGIDDDRNELISSEARFVSPDGSPVAVLVIPTDEELEIARQSLAATGN

SEQ ID NO: 14600 - protein, 291 aa, Clavibacter michiganensis subsp. sepedonicus
MALLGTGVMGAGMSRSILRAGLPLRVWNRSAGKAAPLADAGATVADSAADAVRDADVVVVMLFDADAVLEVLAEVAPALRPDAVVLQSSTVGVEGTQRIAALAAEHGVRLVDAPVLGTRGPAEQGLLVHLVSGSEDDIAVARPVLEATGSRTVVAGSTAGPGSALKLACNAWIASITAATGQSLGLARLLGVEPRLFLDAIAGGAADTPYAHLKGGAMLSGELAPSFALDGLLKDVTLMLAALDGADAHDFDTAMLEALRETYAEASAAGHGGDDVAAVGTVFGLPASSDS

SEQ ID NO: 14601 - protein, 510 aa, Clavibacter michiganensis subsp. sepedonicus
MSLFRTKSIESSLADAAGGERSLTRSLGTWDLMLMGVAVAVGAGIFSVGAKAAGNYAGPSVTLAFVLAAVTCGLAIMCYAEFASAVPVAGSAYTFTYATMGELLAWIIGWDLILEMLTAAAVIAKYWGIYLESALKLAGLDIPSTITVFGLGISWGAVLITAIFTVLLVLGTKLSSRVSSVFTVLKVAVVLFVIVVGAFYVKAENYSPFIPPQRPTEGGSADVWTQSLFSWASGQEPTQYGLYGLLAGASLVFFAFIGFDVVATSAEEVKDPQRTLPRGIFAGLAVVTVLYVLVTLVLTGMVPYTVLADAKEPSLTTAFTAVGAGWAAQVISIGTLLGLTTVLMVLLLGLARVVFAMSRDGLLPRGLSRTSAKRRTPVRVQIIAGVVVAALAGFTDVGVLEEMINIGTLSAFVLVSIGVIVLRKKRPDIRAAFRVPLMPWLPILSAVLCVWLMLNLTTLTWVRFLVWLALGFAVYFLYGRRHSLVGQEEARIAAGGEPAPELPSAATPRD

SEQ ID NO: 14602 - protein, 513 aa, Clavibacter michiganensis subsp. sepedonicus
MTTDTFGALGVPAPLVSALTANGITTPFPIQVDTLPDTLNGRDVLGRGKTGSGKTLAFAIPMIARLGGGLAGGRRRPGRPLGLILAPTRELATQITAAMAPLAEAYNLTTTTIFGGVSQQRQVAALKAGVDVVVACPGRLEDLMKQGFVNLDAVEITVLDEADHMADLGFLPVVTRILDKTPNTGQRMLFSATLDNGVDKLVRRYLHDQVLHSVDEANSPVAAMTHHVFEASDVEAKRLLVQKLAGGSGRRILFMRTKHHAKKLAKQLTDAGIPSVDLHGNLSQVARDRNLAAFSAGDVKVLVATDVAARGVHVDDIELVIHVDPPAEHKAYLHRSGRTARAGSAGDVVTIMLPAQRKDVQLLMRKADIHVTPQQVTESSPAVAELTGAVAAYVKPAPRETKSVRETTQRQSQGGRANGGGRSQGANAQRKRAARDGAPVGGGRRDGASSGRRDGASGGQRGGAPRNFSTSSEGFGGGSSVGTARPRQERPAASGGASAGGRERTHRRVSSGR

SEQ ID NO: 14603 - protein, 418 aa, Clavibacter michiganensis subsp. sepedonicus
MLGAGIYALMGTLAEDVGGALWVPLVVALLLALLTAGSYAELVTKYPKAGGAAIFAERAFKLPVVSFLVGFSMLAAGVVSAAGLSLAFAGEYLSTLLAPVMDVPRIPAAIVFLLLVAALNARGITESMRGNVVMTVIELSGLVIVIVVVAVMLGGGGGDVSRVTEFPEGSNAALATLSAAIVAYYSFVGFETSANVAEEVRDPSRVYPKALFGALATAGVVYVLVALASSAALPAEELAESTGPLLAVVQATGAGIPPWVFSLIALVAVANGALLTMIMASRVTFGMSEQGLLPGVLGRVLPRRRTPWVAIVVTTLVAIGLTAVGDVGTLAETVVLLLLFVFISTNVAVLVLRKDRVDHAHFRVWTAIPVLGTLSCVLLLTQQSGQVWLFGAILVAVGIVLYLLSRVTGARSRPVDRG

SEQ ID NO: 14604 - protein, 255 aa, Clavibacter michiganensis subsp. sepedonicus
MDPTSIAPVRAVLDGLSQLVVGLADLIHPLAGASATGVAVILLTLVVRAVLVPVGVAQVRAEIQRLRIAPALAELRRRHAGKPEQMSRAVQELYAREGASPLAGCLPTLAQAPVLAAVYTLFAHARIGGEANALLAAPFAGLPLGSNALAAAGMGVAPLVVSLVVLGLLAVVIEVRRRADLRFQGPPAAADPALPGMAGMTAMTRVLPFVTVVFAGVAPLAAALYLLSSAAWTLLERAALRRLLGRARATGTAPA

SEQ ID NO: 14605 - protein, 161 aa, Clavibacter michiganensis subsp. sepedonicus
MIAPAITVLRRRAHGRRPSRGARMLRTMMTAKIHRATVSHADLHYVGSVTVDRDLLDAADILVGERVSIVDVTNGARLDTYTIAGERGSGVLGINGAAARLVDVGDTVILIAYGQMTTEEARALEPRVVHVDAANCIRAVDADPTAPPAPGLERPPLAEPV

SEQ ID NO: 14606 - protein, 323 aa, Clavibacter michiganensis subsp. sepedonicus
MNSNFIFLALGEIFSPTTAAYALATVGLVIHFGFTGLLNFGQAGFMAIGGYAFAITAVMYEWPVWASLLAAIVASTVFALILGIPTLRLRADYLSIVTIAAAEIIRLSVKTPEFSSVTGGSEGINGAANGFNALNPLPEGRFGAGVLTYSSDQWWIRIVGWGLVGIACLLVFLLMRSPWGRVLKGVREDEDAVRALGKNVYSYKMQALVLGGVFGGLAGVVFILPRSLQPDNYGTQLTFFLYTIMLLGGAATIFGPVIGSIIFWVTLSLSDGLLSLAVTNEWLPLSSTQQGPIRFIIVGVALMLLVIFRPQGIFGKKKETHFA

SEQ ID NO: 14607 - protein, 226 aa, Clavibacter michiganensis subsp. sepedonicus
MTARILVVDDDTALAEMIGIVLRTEGFEPSFCADGGQALAAFHEAKPDLVLLDLMLPGLDGIQVCDLIRAESGIPIIMLTAKSDTADVVKGLESGADDYIVKPFNPKELVARIRTRLRPAAAASPGLLQVGDLVVDVEGHEVRRGEDRINLTPLEFDLLHALASRPQQVFTREMLLEQVWGYQYKADTRLVNVHVQRLRAKVEDDPDNPRIVMTVRGVGYRAGAAA

SEQ ID NO: 14608 - protein, 730 aa, Clavibacter michiganensis subsp. sepedonicus
MANMQGAPATDENAKTALEQYGVNLTEIAKSGKLDPVIGRDAEIRRISQVLTRRTKNNPVLIGEPGVGKTAVVEGLAQRIVAGDVADSLKGKQLVSLDLAALVAGAKYRGEFEERLKAVLKEIDDADGEIITFVDELHTLMGAGGGEGSVAASNMLKPMLARGELRLIGATTLDEYRQYIEKDAALERRFQQVYVGEPSVEDTIAILRGLKGRYEAHHQVPITDAALVAAASLSNRYIPARQLPDKAIDLIDEAASRLRMEIDSSPVEIDELRRAVDRMRLEELALKREKDEASKARLAKLREDVAAREQTLGELQRRWEAERASVNRVGKLKDELNELRIRAERAQREGNLEKASRLLYGEIPVIEREVAQAEAAESVPSAEDRMVNEQVTAEDVAAVVAAWTGIPVGRLLQGETEKLLHLEQELGKRLIGQKQAVRAVADAVRRTRAGISDPDRPTGSFLFLGPTGVGKTELAKALAEFLFDDEKAMVRIDMSEYGEKFAVSRLVGAPPGYVGYEQGGQLTEAVRRRPYSVVLLDEVEKAHPEVFDVLLQVLDDGRLTDGQGRTVDFRNVILVLTSNLGSQFISDATLPLDQREQAVQQLVRQTFKPEFVNRLDDIVVFQTLSMDDLAQIVELYIDRLGVRLSDRRLALGVTPDARRWLAERGHDPLYGARPLRRLMQREIDDRLARELLAGDIRDGDAVRVDLAPDGDGLTVARAWSDEPEDAAPGA

SEQ ID NO: 14609 - protein, 622 aa, Clavibacter michiganensis subsp. sepedonicus
MPMPPSPQEPIPSMTSTRTTAERLLDRLVPKRRSGPDGTRPPRRDHSDHRLLEARFTGSVDLYEPEHPRIDRLVFGVTAVLAVGFVVWGIVSTDGLASVSGAAQSWVINQTGWLFVLAASFFVIFVLWLAASRYGRIKLGADDEKPQFKTVSWIAMMFSAGMGIGLMFFGAAEPLSFFVSPPPGTTQPESEAAIRTAMATAMFHWGLHPWAIYAVAGIAIGYGTFRKGRKQLFSSIFQPLLGTKRTEGWAGRVIDMLAIFATLFGSAASLGIGATQIGAGLEFNGWVDEATAPLLIGIIVMLTIAFIFSAVSGIARGIQWLSNINMVLAVVLAVFVFVVGPTLLILNLIPATLGAYLGDMTEMASRTAATGGDEMSAWLSSWTVFYWAWWISWTPFVGMFIARISRGRTIREFVVGVLLAPSIVALIWFSIFGGSAIHAQQTDGDMTIDGAVVSDNTLFQLLNHYPLASISTILVMLLVAIFFVSGADSASIVMGTLSQRGALHPSRKVVVFWGVVMGAVAAIMLAIGGGGTEALTGLQNLTVVASLPFVIVMLVACYALWKELRTDPLIVRRQVAVEMMRDAVVNGVEQHGDRFQLSVDPVEPEDAEIREPLGDEDEARRS

SEQ ID NO: 14610 - protein, 401 aa, Clavibacter michiganensis subsp. sepedonicus
MTVYLDHAATTPMRPEAIAALAGALTLVGNPSSIHSHGQEARRVLEEAREAIARALDADPVEVVLTSGGTESVNLGIKGLHGAQVTADPRRTRILVPDGEHHATVDTVEWLERRGAVVERLPIDDLGRIRVDAVAAALAADPGSVSLLTFLAASNEVGTIQPVEELAALAASHGVPVHVDAVAALGHMPVPFRRWRDAGVHAVSVSAHKVGGPVGSGALVLARQATVDPQIHGGGQQRQVRSGTQDAASAVAFATAVTLAVAELDAERVRLQALRDRLVATALRDVTGAVLRGDPDPAGRLPGNAHLTFAGCQGDSLLLLLDMAGVSVSTGSACQAGVPEVSHVLLGMGIPEDEARGALRFTLGRTTTDADVDALLAALPDAVARASLAGLAGRAARKLGG

SEQ ID NO: 14611 - protein, 428 aa, Clavibacter michiganensis subsp. sepedonicus
MTDTIEQGTAGTNWAGNYAYTAREVRTPTSVEELRAIVRDAPTIRVLGSRHSFNDIADSEVLVSLAELPADLVIDRDASTATFSAGLPYGKLAELLGAEGLAIHNLASLPHISVGGAIATATHGSGIGNGNLGTAVAALEMITADGETVTYRRGDDDFDGVVVGLGALGVVTRVTLDVEPSYLVRQRVFEGLSWDAFDENLEDVFGGAYSVSVFTRFGETTDQVWLKSRVQLGVDGQPEDEVVVADYFGAPAATEERHPILGIDPVHSTSQLGVVGLWSDRLSHFKMGFTPSDGEEIQSEFHVPLDRAVEAVQALRAMGDRIRPILLVCELRAVAEDRLWLSPQYGQTTIGLHFTWKRDQEAVEALLVELEAAIRPFGARPHWGKVFTAEAADIVPLYPRSGDFLALAERLDPTHKFRNAWYERSLLG

SEQ ID NO: 14612 - protein, 330 aa, Clavibacter michiganensis subsp. sepedonicus
MHLAPRAIPIASVIHLTTQGTGTMKNRKLTIAAAAAIVVVALTGCGAAGSASNSGIDAGTNAPENGDGPYKLELTENPTFDEGTTMARLAAAGEMKVGTKYDQPLFGLAGLDGKPAGFDVAIAALIASKMGIPFDGITFTETVSANREPFIQNGSVDAVVATYTINDKRKEVVGFAGPYYVAGQALMVLADDTTINTPEDVRGKQVCSVAGSTPAANIEATFGAVVVPTDVYSKCLDPLRNGQVSAVTTDNVILSGFIDQNEGEFKLVGGGETFTQEPYGIGIAKGDEAFRTFINDTLQEAYDDGTWARLFEATAGTVIDTPEPPAIDRY

SEQ ID NO: 14613 - protein, 417 aa, Clavibacter michiganensis subsp. sepedonicus
MAERVVLAYSGGLDTSVGIGWLKDATGKEVVALAVDVGQGGEDMEVIRQRALDCGAVEAVVVDAKDEFADDYIVPALKANALYQKRYPLVSGLSRPLIAKHLARVAHELGANSVAHGCTGKGNDQVRFEAAVAALAPDLTSIAPVRDLALTRDKAIVYANEHDLPIEQSKKSPYSIDKNVWGRAVETGFLEDPWNGPIEDLYEYTQDPDVLREATEVTITFEAGVPVAIDGIRYSPLRIVQELNAAAGAHGIGRIDVVEDRLVGIKSREVYEAPAAMTLIEAHEELEALTIERDLGRYKRGVEKDWANLVYDGLWFSGLKRSLDAFIEDSQRHVSGDIRMTLRGGRAVVTGRRSETSLYDFDLATYDTGDTFDQSLSKGFIELWSLPSKISARRDLAVEQAALAADDATPAAAPAAE

SEQ ID NO: 14614 - protein, 436 aa, Clavibacter michiganensis subsp. sepedonicus
MTAASAASAGARAPQPGLARRLGLLDATVLGLGLGAMIGAGIFAVMPAAARAAGSGLLVGLAIAAVVAFCNATASAQLAARYPSSGGSYLYGRERLGEWPGFLAGWSFVIGKTASCAAMALTFAAYAVPAAWQRPVAALAVTALAVVGCLGVTRTARLARVIITVVLAVIALVLVAGLVAGGPEAAAEQVAGVVDTTPYGVLQSAGLLFFAFAGYARIATMGEEVRDPARTIPRAILLALGGALVVYALVAVTLLGVLGQARLGGSTAPLADVVRDAGWSWAVPVVGVGAAAACLGALLALLPGIGRTSLAMAREGDLPRGLAVVHPRYRVPQRAEIAVAVVVVALVLTVNLRGVVGFSSFGVLLYYVVANAAAFTQERADRRYPRALQVVGVVGCLVLVATLPGVSIGVGAGVLLVGVVGRAIVLARRQRGAQAR

SEQ ID NO: 14615 - protein, 534 aa, Clavibacter michiganensis subsp. sepedonicus
MTPPPSSTPSATEPTTEPRTADAHDGDVEPGAYDLVVVSNRLPVDRVVAADGTTSWRHSPGGLVTALEPVMRANEGAWVGWPGIADHDVEPFVDAGISIIPVTLTEQDLAEYYEGFSNDTLWPLYHDVIAQPSYHREWWDTYVTVNQRFADAAAKAAAPGATVWVQDYQLQLVPKMLREQRPDLTIGFFNHIPFPPYGIYSQLPWRTQIIEGLLGADVIGFQRVADAGNFTRAVRRLFGYTTRGSTVDVPVRGGIPLTVPGTKPSKPVRELRTRQVVAKHYPISIDARSYEEMAKDPAIQERARQIRADLGDPKTILLGVDRLDYTKGIGHRLKAFGELLAEGRVTVEDATLVQVASPSRERVETYKQLRDEIELTVGRINGDYGSISHTAISYLHHGYPREEMVALCLAADVMLVTALRDGMNLVAKEYVATKHSNEGVLVLSEFAGAADELKAALLVNPHDIEGLKEAILRAIEMPKAEQRKRMRSLRKRVFENDVTAWSSSFLADLGRTHAASIHEGPDEEVVEPLMDEGW

SEQ ID NO: 14616 - protein, 611 aa, Clavibacter michiganensis subsp. sepedonicus
MPALPTPPPTPQAPTAHQGDEILTGAQAVVRTLELLGVDDIFGLPGGAILPTYDPLMDSTKLRHILVRHEQGAGHAAEGYASSSGRTGVCIATSGPGATNLVTAIADAYMDSVPLLAITGQVFSTLMGTDAFQEADIVGITMPITKHSFLVTRPEDIPSTIASAYHIASTGRPGPVLVDITKDAQQLEAPFHWPPKIDLPGYRPVAKAHGKQIQAAAQLLVEAKKPVLYVGGGVIRAKAHEELLALAEAVGAPVVTTLMARGAFPDSHPQQLGMPGMHGTVPAVLALQESDLLVSLGARFDDRVTGKASLFAPNAKVVHVDVDPAEISKIRIADVPIVGDAKDVIADLAVAFREAKAASAVEQDIADWWTYLDGLREEFPLGYTPPEDGQLAPQYVIQRIGEITGPEGVFASGVGQHQMWAAQFIKYERPNSWLNSGGAGTMGYSVPAAMGAKVAQPDRHVWAIDGDGCFQMTNQELATCTINDIPIKVAIINNSSLGMVRQWQTLFYEGRYSNTDLNTGGGTRMVPDFVKMADAYGALGIRVTKPEEVDDAIRLALATNDRPVVIDFVVSRDAMVWPMVPQGLSNSAVQYARDHAPDWDDDLAETGRTEK

SEQ ID NO: 14617 - protein, 529 aa, Clavibacter michiganensis subsp. sepedonicus
MTKPVVVIAEELSPATVDALGPDFDVRSVDGTDRPALLAALAEADAVLVRSATKIDAEAIAAAPRLQVVARAGVGLDNVDIKAATTAGVMVVNAPTSNVISAAELAIGHILSLARFIPDASASLKQGLWKRSSFTGVELYEKTIGIVGLGRIGTLVAQRLAGFGATLVAYDPYVTPARAQQLGVQLLPLDELMKASDFITIHIPKTPDTTGLISTEQFALAKPSLRIVNASRGGIIDEDALYTALKSKRIAGAGLDVFVSEPPTGSPLLEVDNIIVTPHLGASTDEAQEKAGVSVARSVRLALGGELVPDAVNVAGGVIDPYVRPGIPLMEKLGQVFSGLAHEALTSIDVVVRGELAGYDVSVLKLAALKGVFTNVVSENVSYVNAPLLAEQRGLEVRLITDAVSEEYRNVLSIRGALSDGTQVSVSGTLTGTKQIEKLVEIDGYDVEVPFSRHLIVMKYEDRPGIVAVYGKEFGDAEVNIAGMQIARQEAGGRALSVLSVDSPVPDGVLENVRRAIQTTSLREIDIAD

SEQ ID NO: 14618 - protein, 203 aa, Clavibacter michiganensis subsp. sepedonicus
MTNSTPDPRPTGDAPVDVATALTLIADENARVARALAEPDLAARLDEAARVIRDGRRVFALGAGRSGLALRMTAMRFMHLGLDAHVVGEATSPAIAEGDVLLVASGSGTTAGIVAAAQTAHDVGARIVALTTADDSPLADLADVTVLIPAAAKQDHGGTVSAQYAGGLFELSVALVGDAVFHALWQASGLSADELWPRHANLE

SEQ ID NO: 14619 - protein, 443 aa, Clavibacter michiganensis subsp. sepedonicus
MIEYRNLRVALLGCGSVGTQVARLMREHGDELAQRVGARLELVGIAVRDADAPRDPSVPRELLTTDAESLILGADIVIELMGGIEPARAHILAAISSGADVVTANKALLATHGPELFEAAEQVGAQLYYEAAVAGAIPIIRPLRDSLAGDRVERILGIVNGTTNYILDEMDTHGLGFDEALATATELGYAEADPTADIEGYDAAQKAAILASLAFHTRVPVEAVHREGITGLSSAQFDSARKAGYVIKLLAICERLTDPATGRDGVSARVYPALVPRDHPLAAVHGANNAVFVEAEAAGDLMFYGAGAGGVQTASAVLGDVVSTARRHVVGGPGVAESTHADLETLPVGAITTQYQITLQVADEPGVLARIAQLFSEHGVSVETLEQTTHQAPVAGGAGARPTASLVIGTHRATDAALRATVDAVSNLDAVTAVASVLRVEGA

SEQ ID NO: 14620 - protein, 248 aa, Clavibacter michiganensis subsp. sepedonicus
MPGPGPERVPGLVPAVPASVGGEWRTATITAVEHPTPTTVLLRFDVPDRIPHLPGQHCVVRLRAEDGYTAQRSYSILSAPHEPGVELLMERYEDGEVSGFFADVARVGDEIEMRLPIGGFFVWDGATPAVALGGGTGAVPLVAMVRHARHLGVPHLVRVAVSARTAADVPCRAELEAAGALVVTTRERYGARGYGRLRAEEVAELATGAGVALVCGSTAFAGGATRLLLDAGVGRDAIRIEQFGPSGE

SEQ ID NO: 14621 - protein, 359 aa, Clavibacter michiganensis subsp. sepedonicus
MTDPRDDETPADETRTETTAADATADDATDATATAEPAPLSDEAWGIDRAAEPSRSKRKPRGGAPAYRAGFVSFVGRPNVGKSTLTNALVGEKVAITSSKPQTTRKAIRGIVHRPDGQLILVDTPGIHRPRTLLGERLNALVQTTLGDVDVIGLCIPADERIGPGDRFINEQLDEYPRARKIAIVTKTDSASRHAVAEQLLAVQELREWDAIVPVSAVEAIQLDALVGELLKALPVSEQLYPSDAVTEEGLEARISELIREAALEGVQDELPHSLAVTIDDMIQREDKELLEIYANLFVERDSQKGIVIGAQGSRLKHVGQVARAQIEPLVGTRVFLSLRVKIAKDWQRDPKLLGRLGF

SEQ ID NO: 14622 - protein, 517 aa, Clavibacter michiganensis subsp. sepedonicus
MATFVDTVTLHLRAGNGGNGCVSVRREKFKPLAGTDGGNGGNGGDIVLVADPQVTTLLAYHRGPHRSSRNGGPGMGDHRHGTLGETLELPVPVGTVVKDADGNELADMATPGMRFIAAEAGQGGLGNASLATTKRKAPGFALLGTQGYEGDVVLELKVVADVALVGYPSAGKSSLVAAISAAKPKIADYPFTTLHPNLGVVEVADSRYTVADVPGLIEGASEGKGLGLEFLRHVERCSALLHVLDCATLDPGRDPVSDLDIILTELAAYPVPDGQVPLLERPQLIALNKIDVPEARELAELVRPELEARGYRVFDISTVSHDGLRQLSFALAELVKDARTKAAEEPEAPRIVLRPRAVDEKPFTIRVDGGSYGDIYRVIGTKPERWVQQTDFRNDEAVGYLADRLAKLGVEDGLFKAGAVAGSSVVIGEGDGVVFDWEPTLTSTAELITSPRGADARVDPISRRTNQARREDYFARMDAKAEARAELVREGEAGLWADEDGTGQDGTDEDATTDAKA

SEQ ID NO: 14623 - protein, 585 aa, Clavibacter michiganensis subsp. sepedonicus
MSTDETASPSETDAPRTTFSDLGLSDQVLKALKDVGYETPSAIQAATIPSLLSGRDVLGVAQTGTGKTAAFALPILSNLDVAQKTPQALVLAPTRELALQVCEAFERYASGMRGVHVLPVYGGQGYGVQLSALRRGVHVVVGTPGRIMDHLDKGTLDLSQLKFLVLDEADEMLKMGFAEDVETILADTPKSKQIALFSATMPAQIRRISGKYLQDPEEITVKNKTTTSANTTQRYLMVSYPQKVDALTRILETENFEGMIVFVRTKNETETLAEKLRARGYAAAAISGDVAQAQRERTVEQLKNGKLDILVATDVAARGLDVDRISHVVNYDIPIDTESYVHRIGRTGRAGRSGAAISFVTPRERRLLTAIEKATRQPLTEMRMPSAEDVNVTRLSRFDDAITAALADRERLDAFRDIVGHYVNHHDVVESDVAAALAIVAQGDTPLLLSADDLRPPRVERERRDDRPGRDGDDRGERRARPARGSGNMATYRIDVGRRHRVEPRQIVGALANEGGFSREDFGHIDIRPDFSLVELPAATSDDQLRKLANTLINGRPIDIRPDRGGPRAAERGAAPERRGRKPRD

SEQ ID NO: 14624 - protein, 520 aa, Clavibacter michiganensis subsp. sepedonicus
MTFTELNIDEDMVQALADHGILEPFPIQEQTIPLALSGQDIIGQAKTGTGKTFGFGLPLIQRLGLTPEPGVQALVVVPTRELAVQVTEDLQIATKHRATTVVSIYGGKAYEGQIEQLKAGAQIVVGTPGRLLDLVGQRLLSLKYVREMVLDEADKMLDLGFLSDIEKLFAQTPAVRHTMLFSATMPGPIVALARRFMTKPIHIRATDPDEGLMQANIRHLVYRAHNMDKDEVIGRILQAEGRGKTVIFTRTKRAAARLVEELNDRGFNAAAVHGDLNQEQRERAMAAFKAGKKDILIATDVAARGIDVLDVTHVINHTIPEDDKAYLHRVGRTGRAGKTGIAVTFVDWDDLHKWALINRALEFGQPEPTETYSSSPHLFTDLDIPAGSKGRLRATPTVNPDGTPRERPGSRGGDSGRDGGRGGSRDGGRGGDRGGDRSGGRSSSSSSTSTSSGGGDRDRSRSRSTSTASATAPADATATIGSEQPNTAGGHDAPHADGQTRPRSRNRRRRSGGDRPTATS

SEQ ID NO: 14625 - protein, 256 aa, Clavibacter michiganensis subsp. sepedonicus
MSTLTITDLHVSVDTEQGRKQILKGVDLTINEGEIHAIMGPNGSGKSTLAYTIAGHPKYHVDSGSITLDGVEVLDMTVDERARAGLFLAMQYPVEIPGVTTTNFLRTAKTAIDGEAPAIRGWIKDVRTSMAALKMDPAFAERNVNEGFSGGEKKRNEVLQLELLKPKFAVLDETDSGLDVDALKIVSEGVNRAKANTGLGLLLITHYTRILRYIQPDFVHVFVAGRVAEQGGRELADRLEDEGYDRFLTPSTTVDA

SEQ ID NO: 14626 - protein, 761 aa, Clavibacter michiganensis subsp. sepedonicus
MPYNNDSPRGAKRAPAGSRSPNHRGYNSDPAPKKQRWNADERAQRSGQDDRPQRGGAARPARGGDRPNWEPRAERPAGRGERPAYGDRPNRAGQRPERGDARPQRGERPSYGGGNDRGQRSERPSYGAERGQRSERPSYGNARPARDERSERPSYNDRAPRNDRPSYGNDRPQRSERPSCDDRPARSERPSHNDRAERPSYGDRAQRSERPAYNDRAERPSYNDRNTRTERPAYSDRPARAERPSYNDSRPARTERPSYGDRAERTERPSYNDRPARTERPSYNDRPARTERPSYNDRPARTERPSYGDRPQRSERPSYGDRPQRSERPSYDDARPKRDSDFYPSKEGAPRHAPAEDVVLERLEAQATTAKDVDGVTFAALGLGQNIVRVLEELGASSPFPIQAATIPDVLAGRDVLGRGRTGSGKTIAFGAPLVERLLENDGAKNRKMGRKPRALILAPTRELAMQIDRTVQPIARSVGLFTTTIFGGVPQFKQVGALQRGVDILIATPGRLEDLIDQGRLDLSEIVVTVLDEADHMCDLGFLEPVQRILRQVKKDGQRLLFSATLDKGVATLVNEFLPSPSVHEVAGEDQASSTIDHRVLLIEQRDKAAIIEQLSSGEGKTLIFARTRAFAEQLADQLEDAGIPATSLHGDLNQARRTRNLQLLTSGKVRVLVATDVAARGIHVDDIGLVIQADAPDEYKSYLHRAGRTGRAGKQGTVVTLITKARRRRMDDLLGRAEIKATTVMAAAGDRVIADLARV

SEQ ID NO: 14627 - protein, 488 aa, Clavibacter michiganensis subsp. sepedonicus
MSNPIEAQAPPRSELKRSITVKQLYFYVVGDVLGSGIYVLVGLVAAAVGGAFWMAFLVGVSIATITGLAYAELVTKYPQAAGASLYINKAFKSPVPTFFITICMLSANMAAVGSLAAGFVRYLSDLIGLPESAIWATTGIAVAFVAVITLINLIGISESVVANVIMTFVEISGLIIVVAIGVIALIEGVGDPAVLLQFQVEGGPGSAVLAVLAGVSLAFFAMTGFENAANVAEETIDPSRAFPRALIGGMMTAGVVYVLVSMAAALAVPIDALAGNTLPEVVRADLFVIPAAVMLVVFGLIAMVAISNTALVTVVAQSRILFGMARENVVPAVFAKVHPARRSPYVALIFGGAVVAGLLIIGAAIRSSQASIPEDERLDIVDRLATITVVFLLFIYALVIVACLKLRGHDERDDTYRANTPLLVVGILGNVAVLIYTLVDDPGALFWVGGLLALGLVLYLAQRTFGAKKPDLEAAADVAASGPTDREV

SEQ ID NO: 14628 - protein, 468 aa, Clavibacter michiganensis subsp. sepedonicus
MPSAPQLHKSLTQRQLTMIAIGGVIGAGLFVGSGVVINGAGPGAFLTYAISGVLIILVMRMLGEMATANPSTGSFTDYARHALGGWAGFSMGWLYWYFWVIVVGFEAVAGAKALTYWFDAPLWLLSLGLMALMTATNLISVGAFGEFEYWFAGIKVAAIILFLGLGSLYVMGIWPGRSLDFSNLVANGGFFPNGVGAIFSSVVVVIFSMVGAEIATIAAAESKDPAKAIRKSTNSVILRISLFFVGSLFLLAVILPWDSTELGASPFVSAFDRMGIPFAGDVMNAVVLTAVLSCLNSGLYTASRMLFVLAARREAPARLVKVTERGVPRAAILLSSVVGFLCVIAAAVSPDTVFLFLLNSSGAIILFVYLLISISQIVLRRRSGSAGLPVKMWLFPGLSIVTVVGILAVLAQMALDPEIRPQLVLSLVAWAVVLVLYVVTKARGGSVDPADATTDAAPEVAVPAAREA

SEQ ID NO: 14629 - protein, 480 aa, Clavibacter michiganensis subsp. sepedonicus
MSTSSTSLWAALTRRKPVETIEAEPGAATEEGGLTRSLGLWQLTAIGVGGIIGTGIFTLAGTVANQTAGPAVLISFLIAGIASAAAALSYAEFAGMIPKAGSAYTYGYAALGEIVGWFIGWDLLLEYTAIVGVVAIGVSGYAGFLLDQFGVDLPAWMLGAAGTGDGHVVDLFAVILCLGTAFVLTRGMKSVGRFELYLVGLKVTLVLVIVVIGFTQITGANYQPYFPFGAAGVFTGAATVFFAVFGYDAMSAAAEESKDATKHMPKAILLSLAIAMVLYVLATIVLTGMQKYSDINPESGFATAFESVGLPAVANVVAVGAIVSVVTVMLTFMLGASRVWFSMSRDGLLPKWFAVTDRKRNVPTRVTWIIGIGSALFAGFLPITVVAELTNIGILLAFVVVCAAVIVLRYKRPEIPRAFRLPLMPVVPIIGIGFSLWLVSSLPWETWVRFAVWLVIGLVIYLTYSRRNSVLSPDSPRNRR

SEQ ID NO: 14630 - protein, 325 aa, Clavibacter michiganensis subsp. sepedonicus
MSAIKTAGEKRLVIVTGRAHPELAEQIAEELETTLVHTDARTFANGELYIRYDESVRGSDAFVIQSHTAPINEWLMEQLIMVDAMKRASAKRITVVAPFYPYARQDKKGRGREPISARLVADLFKAAGADRIMSVDLHAAQIQGFFDGPVDHLFAMPVLLEHMRSVLDSKTLTVVSPDMGRVRVADIWSDKLGAPLAIIHKRRDPKVHNQVTVHEIVGDVAGRVCLLVDDLIDTGRTIVSAAEALKKNGATGVVVAATHAVFSDPATQILDSEHIDSVVVTDTLPIPEDKRWDKLTVLPIAPLLARAIHEVFDDGSVTSMFDGAA

SEQ ID NO: 14631 - protein, 401 aa, Clavibacter michiganensis subsp. sepedonicus
MPMRALIAGGGIAGLACGVALRRAGIAATVLERRDAATDEAGSWLQVAGNGMAALEALGLGEVASGLGEPSGRLRTHAADGRTTADMPFGPRPGRGPSARTLMRAELHGILRQEAERQGVDIIRGARVTSAEQDVHGASLVTATGERHSADLVIGADGVRSAVRATILPPDPAAAPAAPTMVDIVGSAAAASLPEEYAAPAGTLQFRFGRDCFVATVALRDGSTWWFANPRLSALPGGAASAAHLSPDEWAEAVVRLAAPDALPVEHLVAEAPRLVARLSARAAPQARWGSGRCVLVGDAAHTMPSTSGQGASLALEDAVVLGRIIGSTSSPTDVVASLARRRDERVARIIAQGTLLDRSKLLGPVGSLLRDRVVLPLAARDAARTGSGPSSWMYEFTDEG

SEQ ID NO: 14632 - protein, 405 aa, Clavibacter michiganensis subsp. sepedonicus
MAEPQSTVPLSRVSTRIGSIAESATLKVDGKAKALQAAGRPVISFAAGEPDFPTPDYVVEAAVEAARDPRNHRYTAAAGLPDLREAIAEKTRVSSGLDVGIDRIIVTNGGKQAVYQAFQTLLDDGDEVLVPTPYWTTYPEAIRLAGGVPVDVFAGADQGYLVTVEQLEAAWTPRTKVLLFVSPSNPTGAVHSREQTREIGEWAESKGLWVISDEIYQDLVYDGAEAASIVDVVPALADRTILVNGVAKTYAMTGWRVGWMVGPADAIKAAGNLQSHLSSNVSNLSQRAAIAALRGPRDTVDRMREAFDRRRRTIVAELDAIPGFVTPTPQGAFYVYPDVTGLFGRDIDGVTPTTSLEVADVLLEKAEVAAVPGEAFGPSGFLRFSYALGDDALLEGVRRIRDLLA

SEQ ID NO: 14633 - protein, 538 aa, Clavibacter michiganensis subsp. sepedonicus
MARGAVGYVSVMRSPGNDLEAVLFDRDGTLVVDVPYNGDPALVTLMPGAREAVDAVRAAGLRIGMVTNQSGIARGLITRQQADAVNARVQELLGAFDLVLLCPHGSEDGCECRKPRPGMVLEACRTWGVDPSRVAVVGDIAADMGAARAAGARGVLVPTPVTREEEVAEAELVAPTILDAVHLLIHDPAPRRVLVVRLDSVGDVLISGPAVRAVAADPRVEVHLLCGPRGASAGRLLPGVHAVHVWDAPWISSPAPAADAASVDALHAILAEVDADEAVILTSFHQSPLPLALLLRLAGVERITGASVDYAGSLLDVRLKPGEDLDEDQPEPERALAIAAAAGHALPDGDDGRLAVLPAELPSDVEALLPDGPFALVHPGAAVGARAYPADQHRDAVALLAARGIPVVVTGGPDERDLTAHVAGSIALDLGGRTDLAGLGALMRRAAVLVSGNTGPAHLAAAVGLPVVSLFSPVVPPIRWAPYRVPVILLGDQDAACKLSRARDCPVPGHPCLAGVAPAEVADAVVRLMATSRAEVPA

SEQ ID NO: 14634 - protein, 372 aa, Clavibacter michiganensis subsp. sepedonicus
MKVGIPTEIKNNENRVAATPAGVHELVRRGHEVLVQEGAGLGSSITDADYVEAGATIVATADEVWGQADLLLKVKEPILEEYPRMRAGQTLFTYLHLAASRPCTDALVASGTTAIAYETVQLPNRQLPLLQPMSEVAGRLSTQVGAYHLMRAAGGRGILLGGVPGTPKARVVVIGGGVAGEHAAANALGMGADVTIIDLSIPRLRELEIRFGGQVQTRVSSAYEIAAQLKDADLVIGSVLIPGAQAPKLVTDAMVATMKKGSVLVDIAIDQGGCFEGSRPTTHDDPTFAVHDSVYYCVANMPGAVPETSTRALTNATLPYVIALAEKGWKRALAEDPALALGLNVHDGHVTEPHVAAALDMPLTPVAEVLAA

SEQ ID NO: 14635 - protein, 320 aa, Clavibacter michiganensis subsp. sepedonicus
MDFLGTILWPIKWVIELILVGFHTLWTTLGLDPDNGATWVLSIVGLVLVVRAALIPIFVRQIKNQRRMMEVVPQLKKIQDKYKGKRDQFSREAMSRETMALYKDTGTNPLSSCLPLLLQMPIFFSLYSVLHRAAVEELPGIGLLNEQLSRSFGESSFLGAPLQSAISTANGNITVIVIATTMVILMSASQFITQLQIMAKNMSEETKASPMFKQQRILLYILPLVFAVSGIAFPLGVMFYWLVSNFWTMGQQFLVIRNMPTPGSEAARAREARLARKGKLVAPEVSAESSTIVVEERKPAQRQQPVSKNRAKKQAGSKSR

SEQ ID NO: 14636 - protein, 466 aa, Methanocaldococcus jannaschii
TTVMKFGGTSVGSGERIRHVAKIVTKRKKEDDDVVVVVSAMSEVTNALVEISQQALDVRDIAKVGDFIKFIREKHYKAIEEAIKSEEIKEEVKKIIDSRIEELEKVLIGVAYLGELTPKSRDYILSFGERLSSPILSGAIRDLGEKSIALEGGEAGIITDNNFGSARVKRLEVKERLLPLLKEGIIPVVTGFIGTTEEGYITTLGRGGSDYSAALIGYGLDADIIEIWTDVSGVYTTDPRLVPTARRIPKLSYIEAMELAYFGAKVLHPRTIEPAMEKGIPILVKNTFEPESEGTLITNDMEMSDSIVKAISTIKNVALINIFGAGMVGVSGTAARIFKALGEEEVNVILISQGSSETNISLVVSEEDVDKALKALKREFGDSFLNNNLIRDVSVDKDVCVISVVGAGMRGAKGIAGKIFTAVSESGANIKMIAQGSSEVNISFVIDEKDLLNCVRKLHEKFIEKD

SEQ ID NO: 14637 - protein, 470 aa, Methanocaldococcus jannaschii
  misc_feature (469)..(469): Xaa can be any naturally occurring amino acid
  unsure (1)..(470): unsure at all Xaa locations
TTVMKFGGTSVGSGERIRHVAKIVTKRKKEDDDVVVVVSAMSEVTNALVEISQQALDVRDIAKVGDFIKFIREKHYKAIEEAIKSEEIKEEVKKIIDSRIEELEKVLIGVAYLGELTPKSRDYILSFGERLSSPILSGAIRDLGEKSIALEGGEAGIITDNNFGSARVKRLEVKERLLPLLKEGIIPVVTGFIGTTEEGYITTLGRGGSDYSAALIGYGLDADIIEIWTDVSGVYTTDPRLVPTARRIPKLSYIEAMELAYFGAKVLHPRTIEPAMEKGIPILVKNTFEPESEGTLITNDMEMSDSIVKAISTIKNVALINIFGAGMVGVSGTAARIFKALGEEEVNVILISQGSSETNISLVVSEEDVDKALKALKREFGDGKKSFLNNNLIRDVSVDKDVCVISVVGAGMRGAKGIAGKIFTAVSESGANIKMIAQGSSEVNISFVIDEKDLLNCVRKLHEKFIEKXD

SEQ ID NO: 14638 - protein, 468 aa, Methanocaldococcus jannaschii
  misc_feature (467)..(467): Xaa can be any naturally occurring amino acid
  unsure (1)..(468): unsure at all Xaa locations
TTVMKFGGTSVGSGERIRHVAKIVTKRKKEDDDVVVVVSAMSEVTNALVEISQQALDVRDIAKVGDFIKFIREKHYKAIEEAIKSEEIKEEVKKIIDSRIEELEKVLIGVAYLGELTPKSRDYILSFGERLSSPILSGAIRDLGEKSIALEGGEAGIITDNNFGSARVKRLEVKERLLPLLKEGIIPVVTGFIGTTEEGYITTLGRGGSDYSAALIGYGLDADIIEIWTDVSGVYTTDPRLVPTARRIPKLSYIEAMELAYFGAKVLHPRTIEPAMEKGIPILVKNTFEPESEGTLITNDMEMSDSIVKAISTIKNVALINIFGAGMVGVSGTAARIFKALGEEEVNVILISQGSSETNISLVVSEEDVDKALKALKREFGDKSFLNNNLIRDVSVDKDVCVISVVGAGMRGAKGIAGKIFTAVSESGANIKMIAQGSSEVNISFVIDEKDLLNCVRKLHEKFIEKXD

SEQ ID NO: 14639 - protein, 460 aa, Methanocaldococcus jannaschii
TTVMKFGGTSVGSGERIRHVAKIVTKRKKEDDDVVVVVSAMSEVTNALVEISQQALDVRDIAKVGDFIKFIREKHYKAIEEAISEEIKEEVKKIIDSRIEELEKVLIGVAYLGELTPKSRDYILSFGERLSSPILSGAIRDLGEKSIALEGGEAGIITDNNFGSARVKRLEVKERLLPLLKEGIIPVVTGFIGTTEEGYITTLGRGGSDYSAALIGYGLDADIIEIWTDVSGVYTTDPRLVPTARRIPKLSYIEAMELAYFGAKVLHPRTIEPAMEKGIPILVKNTFEPESEGTLITNDMDSIVKAISTIKNVALINIFGAGMVGVSGTAARIFKALGEEEVNVILISQGSSETNISLVVSEEDVDKALKALKREFGDLNNNLIRDVSVDKDVCVISVVGAGMRGAKGIAGKIFTAVSESGANIKMIAQGSSEVNISFVIDEKDLLNCVRKLHEKFIETT

SEQ ID NO: 14640 - protein, 461 aa, Methanocaldococcus jannaschii
TTVMKFGGTSVGSGERIRHVAKIVTKRKKEDDDVVVVVSAMSEVTNALVEISQQALDVRDIAKVGDFIKFIREKHYKAIEEAIKSEEIKEEVKKIIDSRIEELEKVLIGVAYLGELTPKSRDYILSFGERLSSPILSGAIRDLGEKSIALEGGEAGIITDNNFGSARVKRLEVKERLLPLLKEGIIPVVTGFIGTTEEGYITTLGRGGSDYSAALIGYGLDADIIEIWTDVSGVYTTDPRLVPTARRIPKLSYIEAMELAYFGAKVLHPRTIEPAMEKGIPILVKNTFEPESEGTLITNDSDSIVKAISTIKNVALINIFGAGMVGVSGTAARIFKALGEEEVNVILISQGSSETNISLVVSEEDVDKALKALKREFGDLNNNLIRDVSVDKDVCVISVVGAGMRGAKGIAGKIFTAVSESGANIKMIAQGSSEVNISFVIDEKDLLNCVRKLHEKFIETT

SEQ ID NO: 14641 - protein, 454 aa, Methanocaldococcus jannaschii
TVMKFGGTSVGSGERIRHVAKIVTKRKKEDVVVVSAMSEVTNALVEISQQALDVRDIAKVGDFIKFIREKHYKAIEEAISEEIKEEVKKIIDSRIEELEKVLIGVAYLGELTPKSRDYILSFGERLSSPILSGAIRDLGEKSIALEGGEAGIITDNNFGSARVKRLEVKERLLPLLKEGIIPVVTGFIGTTEEGYITTLGRGGSDYSAALIGYGLDADIIEIWTDVSGVYTTDPRLVPTARRIPKLSYIEAMELAYFGAKVLHPRTIEPAMEKGIPILVKNTFEPESEGTLITNDSIVKAISTIKNVALINIFGAGMVGVSGTAARIFKALGEEEVNVILISQGSSETNISLVVSEEDVDKALKALKREFGDLNNNLIRDVSVDKDVCVISVVGAGMRGAKGIAGKIFTAVSESGANIKMIAQGSSEVNISFVIDEKDLLNCVRKLHEKFIETT

SEQ ID NO: 14642 - protein, 67 aa, Neisseria meningitidis MC58
  misc_feature (1)..(1): Xaa can be any naturally occurring amino acid
  misc_feature (36)..(36): Xaa can be any naturally occurring amino acid
  unsure (1)..(67): unsure at all Xaa locations
XATGIVKWFNDAKGFGFITPDEGGEDLFAHFSAINXEGFKTLKEGQRVSFDVTTGPKGKQAANIQAA

SEQ ID NO: 14643 - protein, 365 aa, Pseudomonas putida
MDRAIQSPGKYVQGADALQRLGDYLKPLADSWLVIADKFVLGFAEDTIRQSLSKAGLAMDIVAFNGECSQGEVDRLCQLATQNGRSAIVGIGGGKTLDTAKAVAFFQKVPVAVAPTIASTDAPCSALSVLYTDEGEFDRYLMLPTNPALVVVDTAIVARAPARLLAAGIGDALATWFEARAASRSSAATMAGGPATQTALNLARFCYDTLLEEGEKAMLAVQAQVVTPALERIVEANTYLSGVGFESGGVAAAHAVHNGLTAVAETHHFYHGEKVAFGVLVQLALENASNAEMQEVMSLCHAVGLPITLAQLDITEDIPTKMRAVAELACAPGETIHNMPGGVTVEQVYGALLVADQLGQHFLEF

SEQ ID NO: 14644 - protein, 356 aa, Vitis vinifera
MALLSDLINLNLSDVTEKIIAEYIWIGGSGMDLRSKARTLSGPVSDPHKLPKWNYDGSSTGQAPGEDSEVILYPQAIFKDPFRRGNNILVMCDTYTPAGEPIPTNKRHNAAKIFSHPEVLAEETWYGIEQEYTLLQNSVKWPIGWPVGGYPGPQGPYYCGIGADKAFGRDIVDSHYKACLYAGINISGINGEVMPGQWEFQVGPAVGISAGDELWVARYILERITEIAGVVVSFDPKPIQGDWNGAGAHTNYSTKSMRNDGGYEIIKKAIEKLGLRHKEHIAAYGEGNERRLTGRHETADINTFLWGVANRGASIRVGRDTEKEGKGYFEDRRPASNMDPYVVTSMIAESTILWKP

SEQ ID NO: 14645 - protein, 353 aa, Lupinus luteus
MSVLSDLINLNLSDTTEKIIAEYIWVGGSGVDLRSKARTLSGPVNDPSKLPKWNYDGSSTGQAPGKDSEVILWPQAIFKDPFRRGNNILVMCDTYTPAGEPIPTNKRHAAAKIFSHPDVVAEEPWFGIEQEYTLLQKDIHWPIGWPLGGFPGPQGPYYCGTGAEKAFGRDIVDSHYKACLYAGINISGINAEVMPGQWEFQVGPSVGISAGDELWVARYILERITEIAGVVLSLDPKPIPGDWNGAGAHTNYSTKSMRNDGGYEVIKKAIEKLGKRHNEHIAAYGEGNERRLTGRHETADISTFFWGVANRGASIRVGRDTEKEGKGYFEDRRPASNMDPYVVTSMIAETTLL

SEQ ID NO: 14646 - protein, 357 aa, Pinus sylvestris
MSSVLTDLLNLDLSDVTEKVIAEYIWIGGSGMDMRSKARSLSGPVSSVKELPKWNYDGSSTGQAQGHDSEVILYPQAIFRDPFRRGKHILVICDAYSPNGTAIPSNKRAAAAKIFNEKAVSDEETWYGLEQEYTLLQKDVKWPLGWPIGGYPGPQGPYYCGVGADKAWGRDIVDAHYKACLYSGINISGINGEVMPGQWEFQVGPSVGISAADELWCARFIMERITEKAGVVLSFDPKPIEGDWNGAGCHTNYSTKSMRKEGGFEVIKKAIEKLKLRHKEHISAYGEGNERRLTGRHETADMNTFSWGVANRGASVRVGRDTEKEGKGYFEDRRPASNMDPYIVTSMIAETTILWKP

SEQ ID NO: 14647 - protein, 652 aa, Pneumocystis wakefieldiae
MIIIRIFLYKLFFWLNFLIFVLPRYGWAQKEESYGTVIGIDLGTTYSCVGVMQSGRVEILANDQGNRITPSYVAFTNDERLVGDAAKNQAPANPLNTIFDVKRLIGRRFDDVDVQADMKHWPFKVHHQDGKPHVIVNIAGEKKTFTPEEISAMVLRKMKEIAESYLGRTVTHAVVAVPAYFNDAQRQATKDAGTIAGLNVLRIVNEPTAAAIAYGLDKKEGERLIIVYDLGGGTFDVSLLSIEDGVFEVIATAGDTHLGGEDFDHQVMSYFKTIFHQKNGVRLDDDPKALGKLKREVEKAKRILSSQMSARVDIESLYQGIDFSETLTRPKFEEINMHLSKKTMKPVEQVLKDGNVKKSDIDDIVLVGGSTRIPKVQQLLEDYFDGKKVSKSINPAEAVAYGATVQAGILSLEEGVEDIVLVDVNPLTLGIETTGGVMTKLIARNTVIPTRKSQIFSPASDNQAVVLIQVFEGERPLTKDNNMLGKFELTGIPPAPRGVPQIEVTFEIDANGVLKVSATDKGAGKSESITIKNDKGRLSQEEIDRMIKEAEQFADEDRAQKEKIEARNSLESYVHTLRNQLNDAEGMGGKLKEEDKKTISDAVDETLKWLDQNSMTATTIDFEEKRNSLANIVMPITSKLYDTAKDEPSDEL

SEQ ID NO: 14648 - protein, 409 aa, Podospora anserina
MATSLPLDRSQHRAYWASLLFLTATSINCILNSYSARCQRQEYGDPRGLWRNVGPFPLHRGHWITMPSLGLGGWYVYFAACLCVEFLELTVPLQGYQMARNLQSKLPPGDTIRLYDINRSAAEKLVEEMKTQQAGGAAPEVSTSVSDAAKEAVGFLPFFLPHPPQAFISLKTLVFTTPPQSVDIADLPPRPQPRLFIDSSTIDPHTSSTVCQLVEDKLPGQGHFVDAPMSGGVVGATAGTLTFMLGSDKSLVGRLEPILLRMGKRVLHCGPQTAGLAAKLANNLLLGIQNIGTAEAMLLGVKLGLDPKVLADVINASTGKCWASEVNNPVPGVVPTAPASRGYEGGFGIELMLKDMKLAQDAARRIDLQQTMATKALDLYERASKDAECKGRDFSVVYQVFDKTNGQGP

SEQ ID NO: 14649 - protein, 669 aa, Podospora anserina
PPQLPRPLSSTPGFGHDGPLLRRIFVSVLESANTSHPLELKETHLGPLTSTFSRSPSTSTITDKDSKSQGDISGAVTPTNENTIAASEALTQAPVVAPPKPGILVVTLHEGQGFSLPEQHRASFNNPAHGGNSLSTGNALNMSSSIRPSSSSRTSGFMGRPQTSGGFSGIPTNHGRISSKYMPYALIDFDKLQVFVNSVEGTPENPLWAGSNTQYKFDVSRVTELVIHLYIRNPNAPPGSGRSQDIFLGVARINPRFEEKQPYVEDPKASKKDREKAAAEHANREKTLGQTGVEWVDVQYGTGKIKIGVEYVENRAGKLKIEDFELLKVVGKGSFGKVMQVKKKDTNRIYALKTIRKAHIISRSEVAHTLAERSVLAQINNPFIVPLKFTFQSPEKLYFVLAFVNGGELFHHLQKEQRFDVNRSRFYTAELLCALECLHGFNVIYRDLKPENILLDYQGHIALCDFGLCKLDMKDEDRTNTFCGTPEYLAPELLMGNGYNKTVDWWTLGVLLYEMLTGLPPFYDENTNEMYRKILSEPLHFPSQEVVPPAAKDLLTKLLNRDPQQRLGANGSAEIKAHPFFHAIDWRKLLQRKYEPTFKPSVVDALDTANFDPEFTSEPPQDSYVEGPVLSQTMQNQFTGFSYNRPIAGLGDAGGSVRDPSFVGSIQDR

SEQ ID NO: 14650 - protein, 324 aa, Podospora anserina
RFVRVLSDADRPLLILLLHHVGRNGERDQADQWPQPPRAERQDCEAVARTISLNYSNQETSFTVGESVRDEDVFIVQSTATGDVNEGLMELLIMISACRTASCYDKKDKSRAPISARLVANMLQTAGANHIVTVDLHASQIQGFFSVPVDNLYAEPSFLRYIRENFNPEDCVIVSPDAGGAKRATSIADHLNTAFALIHKERPRPNVVGRMVLVGNVEDKVAILVDDMADTCGTLVKAAAVLKENGAKSVLALVTHGILSGNAIETLNGSVLTALVVTNTVPLGDKVQRCPKLRVIDISPTVAEAIRRTHNGESVSYLFTHAPV

SEQ ID NO: 14651 - protein, 583 aa, Podospora anserina
MTQLTHFGAARWRCVHCGVWSVHARVRVPAFRLAAPERHEISERRLDVLQCGNDIGFGIPVCHSLDNMDIWSFLSSCPGQGALLTTADPYHEQEILTAWFTFQKTVDMASLFGLLLLLSAALPCSFAVSQWNEEVVNGIPYRTFYHADTNSKLSIVSNSGICETTPNVNQLSGYIRISEDINLFFWFFESRNSPATAPLALWLNGGPGCSSMLGLFVEHGPCRFPDGSPAGSDPVLNEESWNSYANMLYLDQPVGVGFSYGVGQVNATTQGSIYVWTFLQAFLAAKPELAKSQFGLFTESYGGHYGPDIVRFIQQQNKVVDQNVSNAVKIDIIALGINNGWVDPKLQFPAYLDFGLTNNYRQLVNQSQYSTGITLYQQRCVPALQNCTVTAGTAEDCNHAHNTCYDALGLFTVELQRFDLYDVRRVDTWTGIPGTDMYHEYLARSDVKDAIGAQRDYTECSDVAWGLFDSTGDPSRSFLGELSEVVQSGVRVLLWAGDADYLCNWMGNLAVANAIDYSGQLDFVKRGMSAYQVNGTSFGEFKTVENLSWLRVYSAGHLVSSDQPRAALQAFRQTMENRPLEAT

SEQ ID NO: 14652 - protein, 318 aa, Saccharomyces cerevisiae
MSSNAQVKTPLPPAPAPKKESNFLIDFLMGGVSAAVAKTAASPIERVKLLIQNQDEMIKQGTLDKKYSGIVDCFKRTAKQEGLISFWRGNTANVIRYFPTQALNFAFKDKIKLMFGFKKEEGYGKWFAGNLASGGAAGALSLLFVYSLDYARTRLAADSKSSKKGGARQFNGLIDVYKKTLKSDGVAGLYRGFLPSVVGIVVYRGLYFGMYDSLKPLLLTGSLEGSFLASFLLGWVVTTGASTCSYPLDTVRRRMMMTSGQAVKYDGAFDCLRKIVAAEGVGSLFKGCGANILRGVAGAGVISMYDQLQMILFGKKFK

SEQ ID NO: 14653 - protein, 125 aa, Aeromonas hydrophila
STLLFVEILRERDVQAQWFDVRKVMRTNDRFGRAEPDIAALAELAALQLLPRLNEGLVITQGFIGSENKGRTTTLGRGGSDYTAALLAEALHASRVDIWTDVPGIYTTDPRVIPAAKRIDEIAFA

SEQ ID NO: 14654 - protein, 644 aa, Stylosanthes hamata
MSSLGTEQFSERSQWVLNSPNPPPLTKKFLGPLKDNKFFTSSSSKKETRAVSFLASLFPILSWIRTYSATKFKDDLLSGLTLASLSIPQSIGYANLAKLDPQYGLYTSVIPPVIYALMGSSREIAIGPVAVVSMLLSSLVPKVIDPDAHPNDYRNLVFTVTLFAGIFQTAFGVLRLGFLVDFLSHAALVGFMAGAAIVIGLQQLKGLLGLTHFTTKTDAVAVLKSVYTSLHQQITSSENWSPLNFVIGCSFLIFLLAARFIGRRNKKFFWLPAIAPLLSVILSTLIVFLSKGDKHGVNIIKHVQGGLNPSSVHKLQLNGPHVGQAAKIGLISAIIALTEAIAVGRSFANIKGYHLDGNKEMLAMGCMNIAGSLTSCYVSTGSFSRTAVNFSAGCKTAVSNIVMAVTVLLCLELFTRLLYYTPMAILASIILSALPGLIDIGEAYHIWKVDKFDFLACLGAFFGVLFVSIEIGLLIALSISFAKILLQAIRPGVEVLGRIPTTEAYCDVAQYPMAVTTPGILVIRISSGSLCFANAGFVRERILKWVEDEEQDNIEEAAKGRVQAIIIDMTDLTNVDTSGILALEELHKKLLSRGVELAMVNPRWEVIHKLKVANFVDKIGKERVFLTVAEAVDACLSSRFANSA

SEQ ID NO: 14655 - protein, 258 aa, Hordeum vulgare
MAPSSPEAAVPEGGEQQQIVAAAAAAAAKKGGGKRGRREMRRIEDATSRQVTFSKRRSGLLKKAFELGVLCDAEVALIVFSPRGRLYEYASAPDLQRTIDRYLNHTKGTSANQKTVEQPAAGVEMCRSEATAWKHKIDAIEAYQRKLSGEGLGSCSSHELHELELQLEKSLSCIRQKKQQKMLDKISELREKERKLLMENSVLREEYKALPLLELATAAAAETSPDGAGAEEDEEDERQRHYMEVETELVIGRPGSSS

SEQ ID NO: 14656 - protein, 431 aa, Pseudomonas putida
MGLPALVLFGLAYMVPLAVFTTYGLVTQMTKGHLPIAYLLTLAAMLLTAYSYGRMVQAHPYSGSVYTYTRKAFGSHIGFITGWTLLLDYIFLPLLSYLLIGIYMSEYFPAIHAWVWVAGSIALVTFLNLIGIESITRVNWILVVVQLVFIIVFVALSIHNLSGQAQPVSLLAPFHHEGFSVPLIMTGAAVLCLSFLGFDAVSTMAEETSNPTYRIPVAILAVSLIGGMLFLVVSYCAQMVFPDWGSFADPDSASVDVMRRVGGELLVTAFTATYVAGCFASAMVSQASVSRVLFAMGRDGALPRAFGQLVTKKRVPATAILLVSLLSLIALVISLDTVANMISFGALFAFSAVNLAVVKHYLIDHKLRGGRNYLLYGAIPGLGFLSTLWLWSSLTSLSFTIGLCWMGMGLVVLLGLTRAFRVKLPELQMAE

SEQ ID NO: 14657 - protein, 272 aa, Bruguiera gymnorhiza
METLNFGPSGIQEMYGQSMAESDLALLESIRLHLLGETPSYCNPAVTATATANSINNCCRPAYCRSSSFGSLYPCLTENWGDLPLKVNDSEDMLLFGVLRHAVTLGWVPSDPKADAQVAAEDFPAVKVEPLEAPVAQTPRERIDEAAAPAVVPAKGKNHYRGVRQRPWGKFAAEIRDPAKNGARVWLGTFETAEDAALAYDRAAYRMRGSRALLNFPLKVNSGEPDPVRITSKRTSPEPSSSSESGSPKRRKKAVGSAATTANATVGWNWKW

SEQ ID NO: 14658 - protein, 317 aa, Bruguiera gymnorhiza
MESKRVNTSLDLNINPFKDNIAVLKREFEEDSRGCEQKVPIRHETAVDLVGELNRMRTENRKLTETLTVLCENYNALQSQLNDFMIKNNCEKEAAVISRKRKAENIDDYVHSSNTVGNNNFGNAETSCSDEESSKRLKENSRTKISTVYCRTDASDRSLVVKDGYQWRKYGQKVTRDNPSPRAYFRCSFAPACPVKKKVQRSAEDASVLVATYEGEHNHQMSPSRPELQLGSTTAQNSNTGVLSTSTPMRSSVPIVTLDLIQAAGNGTQDGVAKKMAQEFQVPAAIQNILVQQLSSSLSRDPNFTAALAKVLSGTTF

SEQ ID NO: 14659 - protein, 672 aa, Cryptococcus bacillisporus
MTTMPNNDVPNSPTSTSFSGTFSPAATAANTAANARSRDAPSPTTSSGPKLETNKDQRLIVVSNRLPVTISKDDNGEYHFKMSSGGLVSALSGCKKTMSFTWIGWPGKDIPMQDRETVNRRLLEEYNCYPVYLSDELADSHYNGKFSNSILWPLFHYHPGEMNFDAAHWLAYREANMRFADVVSSLVQAGDMVWVQDYHLMLLPMLLRSMITGESAQGEMVRQELGRVKEGVDDTVVKEVLKMDPGVAQAEDEGVEMLGDVEEEGGEMDVKSSPSKRPPYARGMSTFQKQEMVAKEKGKEGIRIGFFLHTPFPSSEIYRILPVRREILLGVLQCDLIGFHTYDYARHFLSSCTRILGLETQPNGIEFDGRYCQVGTYPIGIDPNQFVEGLQKESIVKRLRSLEARFEGVKVIIGVDRLDYIKGIPQKLQALETFLTQHPEWIGKVVLVQLAIPSRQDVEEYQDLRACVNELVGRINGRFGTVESVPIHYMHKSVPFEELTAMYALADACLVTSTRDGMNLVAYEYISSQAEKHGSMILSEFAGAAQSFNGSLLINPWDVQSTADAIYQALTLSPQQRKSNWQKLFNYVSKYTAEAWGVSFVNELNRLSGQRPSGPAGLAGRRKSGSLSRRSSKASIQRRKSSQSGGIVTGLGAAAGAAVNWAQSQVQGGSQA

SEQ ID NO: 14660 - protein, 989 aa, Cryptococcus bacillisporus
MDSMHPDPTPSIPPSLPELKAQVARLEASHKEKGLPLSGRIIHVMHHLPVEIVRIVPADSLESAGTGFLSPPMTPEFKPEDAETTVESADAKWRIHARTAHPALVSGIKSLSETHDQLLVAWTGEVLIQPDNTQSPQVPSQPTFSSIASNLLAPFSGTPGDSTPRLQPPPQQGTLKVFGGEFNEADQKEIASELDRFAEAEAKFDPTDKLKYVPVFLPPDVSKGHYEGFCKKTLWPLFHYLLWLDSTATVPSPDPSWLAYHKTNQMFAQRVAQIYKPGDLIICHDYHLLLAPKMIREALGQVFHPNAGWGTAHPSPSLHHAQGKGFEWESNQQTPTPEKAKGEKIGAFMNHVGTALGNHLGVMEHGQQNEIMIGMFMHTPWPSSEIFRCLPKRREILDGMLGANLVSFQTYSYSRHFVSTCIRVCGYESTPGGVDANGQVTAVGYCPIGIDIKRVVHDRDQPGVLPKAQALRDLYKDKKIIVGREKLDVAKGVYNKLQAFEKFLQVYPQWRGKVVLIQVTTPALSESPKLERMTAELVSHINGTYGSLDFTPVHHYHQALEKDEYFGLLSCADLALITSLRDGMNTTSMEFILCQDKTSKSPLVLSEFMGTAPSFASALQINPHDLLGVAQAINKGLTMRPEEKAERHAKLLEGVLAHTSHTWAATILKQLLENVGGEHTAHHTPVLDTALFADAYKKANKRLLLFDYDGTLTPIVKVPAHAVPTERTRSAITALCKDPKNVVYLISGRDGDFLEEHWGHLDRLGLSAEHGSFVKQPGEEEFINMTETLDMSWMSEVEEIFKYYTERTTGSTIEVKKASITWHYRNSDPDFGEFQCKQALDLLESSLAPRRPIEVLVGKKNLEVRPLAVNKGEIVRRLMYENPDVDMIFCAGDDKTDEDMFRALRTVFPPGGVVDDNPVVLKPPVAVTSAMEPEEADELPDVELSIRPKGVFATTVGPPAKKTLAGWHVTCPEEVVEALESLLEEIQVA

SEQ ID NO: 14661 - protein, 439 aa, Glycine max
MNFRNFGVGDNHPTWDAMHGKTPANNNVTGTTLLRQPSTIYSLTFDEFQSTMGGIGKDFGSMNMDELLKNIWTAGETQAMVFSAVAAAGGVEGHNNNSNNNPINCSGLQRQGSLTLPRTLSQKTVEEVWRDLIKESGGEANDGGSGGNGGSSNPQMQATLGEMTLEEFLVRAGVVREDVPQQQQNGKPNDNGWFGDFPRPKHNNTSLLLGFQQPNRSNGNGNLGENTNLVSKQQPPPLSLNSNHSQRQAQHQHQHQQHPPPLFPKPANVTFAGAPTHLLNNAHQHASPGRRGGLIGVAAEHSMNVGMVGLATANVTASPSSKISPDVITRSNNNVDNSPISPHYVINRGRKFSAIEKVVERRQRRMIKNRESAARSRARKQAYTFELEAEVAKLKELNRELQRKQEEIMEMKKNKDLDPACRPRISKIQCLRRTLTGPW

SEQ ID NO: 14662 - protein, 349 aa, Micromonospora chersina
MENPPQQFAPPVSVTVLEKLLGRLTSVCIQVATAGLDLPDRLRNGPKSIDELAAEVGGDRDVLLLFMRALTSESIFQEVEPGVFAHTEESRCLISDAPNSLHGIAEMLGAEWAWKVWEPAEVLHTIRTGQPAFEHVFGRDIWDYMTANRDQYAVFSRAQTIFSGPKDDAIVDAYDFEGVKTIVDLGGGEGTFLEKILLKHPGIEGVLFDLPPVVERARARVAGSAVADRYTCVGGSFFDRVPPGADAYVLKQVLHDWSDDESVEILRKVREVLPPSGRILVAAHLVPAPPRRPLKYLMAGMWVRLNTPGGYERTEQEFRDVFDRAGLELVRILPTASTHSILETRRAED

SEQ ID NO: 14663 - protein, 346 aa, Saccharomyces cerevisiae
MAEASIEKTQILQKYLELDQRGRIIAEYVWIDGTGNLRSKGRTLGHDSDIYLKPVAYYPDPFRRGDNIVVLAACYNNDGTPNKFNHRHEAAKLFAAHKDEEIWFGLEQEYTLFDMYDDVYGWPKGGYPAPQGPYYCGVGAGKVYARDMIEAHYRACLYAGLEISGINAEVMPSQWEFQVGPCTGIDMGDQLWMARYFLHRVAEEFGIKISFHPKPLKGDWNGAGCHTNVSTKEMRQPGGMKYIEQAIEKLSKRHAEHIKLYGSDNDMRLTGRHETASMTAFSSGVANRGSSIRIPRSVAKEGYGYFEDRRPASNIDPYLVTGIMCETVCGAIDNADMTKEFERESS

SEQ ID NO: 14664 - protein, 404 aa, Citrobacter freundii
MSHKIMAINAGSSSLKFQLLAMPQGEMICQGLIERIGMSDAQVTLKAPAQKWQETLPVADHREAVTLLLEKLLSHNIISSLEEIDGVGHRVAHGGESFKDSARVTDETLAEIERLAELAPLHNPVNALGIAVFRQLLPKTPAVAVFDTAFHQTLDEPSFIYPLPWRYYSELGIRRYGFHGTSHKYVSAQLAEKLGVPLSALRVVCCHLGNGSSICAIKGGHSVNTSMGFTPQSGVMMGTRSGDIDPSILPWIALREGKTPQQLNQLLNNESGLLGVSGVSPDYRDVEHAADTGNHQAALALTLFAERIRATIGSYIMQMGGLDALVFTGGIGENSARARAAICHNLNFLGLAVDEEKNQRNATFIQTENAVVKVAVINTNEELMIAQDVMRLAISETVTLGIPA

SEQ ID NO: 14665 - protein, 287 aa, Solanum lycopersicum
MEEIGFLGIGIMGKAMAVNLLRHGFKVTVWNRTLSRCDELVQHGASVGETPAEVIKKCKYTIAMLSDPAAALSVVFDKHGALEHICAGKGYIDMSTVDADTSSQISQAITSKGGSFLEAPVSGSKKPAEDGQLVILAAGDKDLYDQVVPAFDVLGKKSFFLGKIGNGAKMKLVVNMIMGSMMNAFSEGIVLADKSGLDPHTLLDVLDLGAIANPMFKMKGPAMIKNSYPPAFPLKHQQKDMRLALALGDENAVPMPVAAAANEAFKKARSLGLGDLDFSAVFETLSK

SEQ ID NO: 14666 - protein, 363 aa, Solanum lycopersicum
MAMCSTFCPRLSFHLNCKKSLSLFPVKHRFFVTIKAFSSQTSAPKADDLPASIGFLGLGIMGNPMAQNLIKAGCDVTVWNRTKSKCEPLISLGAKYKSSPEEVAASCDVTFAMLADPESAADVACGKYGAAKGMGPGKGYVDASTVDGETSKLICEHIRATGAHFLEAPVSGSKKPAEDGQLIFLTAGDSVLYDKAAPLLDIMGKSRFYLGEVGNGAAMKLVVNMVMGSMMASFAEGLVLSEKVGLDPSVLVEVISQGAISAPMYAVKGPSMVKSSYPTAFPLKHQQKDLRLALGLAESVSQPIPIAAATNELYKVAKSHGLSDQDFSAVIEALKVKFATVKHKSSLCLVSLCALCYISTVIC

SEQ ID NO: 14667 - protein, 61 aa, Eucalyptus occidentalis
LVMTDPDVPGPSDPYLREHLHWMVTDIPGTTDATFGKKVVEYEMPRPNIGIHRFELMATVR

SEQ ID NO: 14668 - protein, 534 aa, Verrucomicrobium spinosum DSM 4136
MAKFHILVADPISQTGIDLLQAEPSFEVVVNLGLKKESDFCEAAKDANAIVVRSGVKVTAKVMEAAPNLKVIGRAGVGVDNIDVPAASKRGVVVMNTPGGNTISTAEHAFALMTSLARKIPQAHANVASGKFDRKTFQGTELNKKTLAVLGMGRIGAEFAKRAQAFGMRVVAYDPYLSANRAEMLKVELADNLDDAVKDADFITMHMPLTPETKHMLNEERMRKIKKGVRIINCARGGLVDDNALAKLLEEGHVAGAALDVYEVEPPPADYPLLKAPNVVFTPHLGASTDEAQESVGIEIAEQVKANLLEGTVVNAVNMPNVDPRTLAAIGPALRFGEILGRLISQIAPARAEKLRVNYSGKLGEMDTTLVSRGVLKGYLEKPIGADQVNLINAIGTAENLGLRFTESRVPGPTEFTDLIEVQVGSGDQTAVIAGTFFGGDPRIVKINGRRVEAKPEGTLLLLENDDRPGMIGAYGTILGQHQVNIANMSLSRNEEGGTAMTLLTLDTAPADVVIKDLETIPGVKRVYCMVLDS

SEQ ID NO: 14669 - protein, 312 aa, Verrucomicrobium spinosum DSM 4136
MNNKLRILSGTAHPALSQAIADNLGVPLGSAVVETFPDGETFVQINENIRGRDVFIVQPTCPPANQNLMELLIMVDAVRRASAHRITAVLPFFGYARQDRKDRPRVPITAKLVANLLVAAGVNRVLTMDLHAGQIQGFFDIPVDHLYASPVLIKAIRERGLEDIVVVSPDVGGLKMSHAYAKALGAPFAIVAKNRISAEEVEALSVIGDVKDRNVLLVDDLTESAGTLTAAARLLAEKGAKNIYAGVSHGVLSEKGHERLKNSPIIELFSTDSVPQAHGNKVTVLSVAPLLGEAIKRIHSDESVTSLFDIRG

SEQ ID NO: 14670 - protein, 437 aa, Verrucomicrobium spinosum DSM 4136
MPPDRLSFTAATAIVVASMVGTGVFTSVGFQLADIPSGFPILILWLIGGVVSLCGAFCYAELGAMMPRSGGEYHLLSRAYHPLVGFLAGWISLTAGFAAPIAAAAKLFGSYTHGIVPGLNETALSVGLVLVIMGVQLCHLRFIERFQLGFTILKVTLVISFIFGACWLGQGRWDLLQPRPGDGVYFLSKPYAVALVFVMYAYAGWNAASYIAGEIENPARNLPRALIIGTSAVTFLYIALNAVFLVGAPWQEMTGNMQSALIAGRAIFGQRGGDAMGTLIAFGLVAHVSAMLFSGTRVLRVMGQDRRILRSMTYTNAVGAPWLAVLVITVVVLTLMLTGTFDQLLLYIETLLLGCSLLCVLAVPWMRWRQPGLERPFRVPLYPLPPLIFAAVVGWMLFSLVIRRPVETAWGAATLVVGVVIYFLDRAGRRPEPGAES

SEQ ID NO: 14671 - protein, 241 aa, Verrucomicrobium spinosum DSM 4136
MANHPKPQPNEWYVVRNSQIHGRGLYARKAIPKDTWIVEYVGERVDKDESDRRANALLDEAKESGGARVYMFILNDEWDIDGNVSWNTARLMNHSCEPNVEAQTWDEQEIWFVALRDIKKGEELTFNYGFDLECWEDHPCRCGTASCVGYIAGDDYWPALKKKVAAKKAREEKKALAAQAVKKVAKGKKSVTKKSVAKKEVAAKKAVAAKKEIAVKKTVAKSVKAPAKKKQAAKKSKPAAK

SEQ ID NO: 14672 - protein, 246 aa, Verrucomicrobium spinosum DSM 4136
MSLLIQDLHACIPDREILKGFSLEVKPGEVHAIMGPNGSGKSTLSKVLCGHEDYEVTSGSVTLDGEDLLAMEVDARSRAGLFLAFQYPFEIPGVSNANFIRAALQARLPKGEELDAVAYYKKLYSRMDELEMSRSFTARSVNEGFSGGEKKRNEILQLMMLEPKYSILDETDSGLDIDALKVVSQGVNSMRSPERGFLVITHYQRLLDYIKPDIVHVMVEGRIIRSGGPELALELEAKGYELTHAA

SEQ ID NO: 14673 - protein, 606 aa, Verrucomicrobium spinosum DSM 4136
MCGIAGIVESNPSGTIRTDQLQAMLDALRHRGPDGSSSWQSPCHTAAFAHARLAILDLSPAGIQPMSSPDGRFTITFNGEIFNFGALRQELEDSGVPFSTGTDTEVVLQLYARQGAACLQSLRGMFAFAIWDHQEETCFLARDPFGIKPLYYADQNGNIVFASELRSMIASGFVPLRPDEESVCLFLQSGSVPEPRTLLEGVSMLEAGCHLTWRAGHTTITRWWEVGFPVSNCSDLAESVQLARLALLDSIEHHFVSDVPVGLFLSGGIDSTALLALANATGRDRLQTFSIGVDDSVADETGPAARTAKHFGAIHHEMHLSAETGAELFAKFLDSVDQPTIDGFNTYCVASLARHHGMKVVLSGLGGDEVFGGYPSFRQVPRLQRLHKTLAFAKLNGLAGRSLQLHGRSSRLRRLGSLLTSPAPATIADAYSSFRSIRTHEEAKALASLVLNRPQVSMKQSSSSWSIPQDGPDAVSALELTHYMRNQLLRDSDVMSMAHGLELRVPLVDKTLFESVAKVPASLRLRMGKMLLVDAVPEIPPWIKNQPKRGFLFPYQKWLATPEWKQQFDSLTKSFPMKHPTWYERWSLFMLVHWLEKHRITPSTFR

SEQ ID NO: 14674 - protein, 319 aa, Verrucomicrobium spinosum DSM 4136
MTRVLLTTTSYQDTPGDHHALLESQGFEIHRERGPLPESRMLELAGEFDAFLCGDDEITQAVLEKSLPRLKVISKYGIGLDKIDVTACTAAKLPVLFTPGVNHTTVAEHTFCLLLAQVRNLVDSANAVRNGQWKRVTGHEIWNKSIGIVGLGRIGQEVAKRAIAFGMKVHALDPYWPEAFATENGVTRHEKIETMLPEIDVLSLHANLSESTRHLVNAERIKLCRKDLLVVNTSRAELVNMPDMIAALDAGTVGGYATDVLDEEPPPADHPLLKHPKALITPHIGSRTYESVPRQAMRATLNLVNYLKGEKDVIQANKF

SEQ ID NO: 14675 - protein, 618 aa, Verrucomicrobium spinosum DSM 4136
MDRKAWIVVTLCAIGMAFNFWWTAKHPPVPVPQPPPASAAPAPAADPAQAVATNPGGLANPATPAAPGAAAPVAEEKIELKNASAIYTFTNVGGGIASVVMLDTKDHIRLNQHGKAAIGALGTAAKAYQDLTYHVVEKTDKRVVFEALSPEQVLVRKEYSFSEGSGSSDHLVELKVTIKNQSSAKLVRDSYYLYTGAASSLRPDEIEAPAFVWNDAGDASSFATGSFRDGAGFLGFGGPVVELQKNFQHLRWGGVMSRFYTTLISTKTDIPAKTWATRFLIDHSNDEFKDHKKALQDYAIHGGVGLPTIELEPNASTSVDYRIYIGAKIFHDLKKIDVAEGQPNRQMQYVMFYGWFTFVSRGLVFLLRWFHDLTGNWGVAIVLLTITVRSLLWPVQARSNATMKRMGLLAPKIKELQEKHKDDPQKVNTEMMRMYREYGVNPLGGCLPLLVQIPIFFGFYSVLRYAAELRGQPFFGWIQDLSLPDTVTTLHLLGYHLPLNPLPLLMGLTMFLQMKLTPQPASADKTQQRIFMLMPFMFLFFCYSFASALALYWTVQNIYSIFQAQVSRLWQKDPVLEKKAVIDVKPASGSGQPGKDKKDKASIPRLGGGGSKSRKPKA

SEQ ID NO: 14676 - protein, 631 aa, Verrucomicrobium spinosum DSM 4136
MAVLEGGEAQVLENSEGARTTPSVVAFTKSGERVVGQAAKRQAVTNPRNTVFSVKRLMGRKFSELTAADKQVPYKIVAASNGDAHVEVEVGGEKKVYSPQEISAMILAKLKSDAEARLGETITEAVITVPAYFNDSQRNATKAAGEIAGLTVRRIINEPTAASLAYGLDKKKDEKIAVYDLGGGTFDISVLEIGDGVFEVLATDGDTHLGGDDWDNKLIQWIISDFKADSGIDLSGQPDALQRIKEEAEKAKIALSSSQSYDLNLPFITADATGPKHIMKSLSRAKMEQLTDDLFERTVKPVRECLNAAKLDASKIDELVLVGGMTRMPKVVETARKLAGKEPHKGVNPDEVVAVGAAIQGGVLQGSVKDVLLLDVAPLTLAIETEGGIATPMIPRNTTIPKRHTQTFSTASDNQPGVEVVVIQGERPMARDNKTLGTFKLDGIPPMPRGTPQIEVTFDIDANGILHVSAKEKTTGKESKISIAGSSGLSKDEIERAKQEAESHAEEDRLRKEGVETKNQAETMVYQVEKSLADLGDKVPATQKQPIVDKVDALKKAIADNDTSAMKSQTDELQKLFAEAYQHMAQAGGAPEGAAPGPEAAGAPEGAAEAPKDKGKVVDADFEVVDSDKKS

SEQ ID NO: 14677 - protein, 233 aa, Verrucomicrobium spinosum DSM 4136
MNVLEVSGLQASIGGSRILRGIDLTIPEKSVFCLMGRNGVGKTSTLKSIMGLLAAEKGQINLTGTELKGMRPEARAHLGLAYVPQGRDIFPHMTVEENLHIGPIARGKKLNGELDRIYTLFPILKEFLPRKGGMLSGGQQQQLAIGRALLTNPKLLILDEPTEGIQPNIIDQIGDAIKMLRAEGQMSILLVEQYLDFCKELGDVFTILERGTVAAAGKMSDLSEEMIKEFLTV

SEQ ID NO: 14678 - protein, 596 aa, Verrucomicrobium spinosum DSM 4136
MSRSSSSERKSNLKSGFKEEAGFFIKYLKPHASVFIPALFVLIITALLTLVLPEFMGKIVARAVPAHGEDVGQALHTINHYALLIGTVLGVQALLAFWRIFFFSKAAERALVQVRLDTFSRILKLPMATLQARRVGELGSRLANDVEVIRETLVSTIPQIIRHSIMLVAGIVLVFTKSVKLSLFMLACIPAAVLLVAIFGARIRKVSRMAQDELAASQVVVDESLTSITSVKAFANETQEIGRYHGFLESFLKAAMRGAWLRAAFVAFIIFVFTSVLTLCIWFGVRMVINGEIDRERFIQLTLFTAVMSGSIATLPELVSQLQKAVGALERVREILEEPEENLRPDESVRLHGDIAMQGVWFHYPSRTDTTVLADFNLEAKAGQKIALVGPSGAGKSTVVNLLYRFYEPEKGEVLLDGRPARDYPLAALRKNFSLVPQEVLLFGGSIQENIRYGRPDATDAEVVEAARQANAHLFIEKLPEGYQTLVGERGTQLSGGQRQRVAIARAILANPAVLVLDEATSSLDAESERLVQEALDKLMANRTSIIIAHRLSTVRRADQILVMSGGTVIERGTHDELYARENSLYRTLAKLQLEE

SEQ ID NO: 14679 - protein, 644 aa, Verrucomicrobium spinosum DSM 4136
MCGIYGFAGFKEENLLDRMGKVIHHRGPDGQGRYEAPDGVPFSMGMQRLSIIDLEGGWQPVYNEDSTVAVCYNGETYNYVELRQELIAKGHAFRTHSDTECIVHGYEEWGIEGLLRRMNGMFAFCLYDVRRREFLIARDRCGQKPLYYHHANGRFLFGSEVKSLLESTHVSAEPNIEAIDPYLTLRNVPEPQTMFKGIYILPTSHYLRYKLANHSLEIQRYWEVPLLDARTATYKSEGEYFEALEEVFNDAVRLCMRSDVPVGAYLSAGVDSSLTVAAMTKHSSNINTYSVGFNSPVDETPAARETAAFLGTKHHEIICQPEDFDLLPKIVWHMDRPVGDALLIAFYKLAQGASKDLKVVLGGEGADEAFAGYSFQGVITKVEKMRRKIPGVTSLAAPLFAATPASLLNKFFKFPADLGSQGKKRVVEFLAGYTRRDLNHNFNALRTLWSHDERHDVYAESYKRLATDAWMAKEKEKDKGGPFLDRLLKLQYDEWLQDWALIRQDKNTMAHSLEYRLPFLDHRLIELAFTMPAEMKINNGTDKYIERKLADKIFPPHIARRAKIPFYLPVEYFLDKPQFRKLVAETLNETAVKRRGYFEPAKVRALVENMNRTREFVFCKQVVSLVILELWHQVFVDKAFSFGR

SEQ ID NO: 14680 - protein, 667 aa, Verrucomicrobium spinosum DSM 4136
MCGIAGMLDLGGERTVPEEALRRMARAIVHRGPDEEGFFIRPGVGLASRRLSIVGLADGQQPMKNETGNVHVVFNGELFDHIEKRRELTERGHVLRTHCDTEILPHLWEDYQEGFFEKLRGQFAVALWDDSKRQLILGRDRFGIAPLFWTRQGDWLLFASEIKALLASGMVPARPDHKGIDQIFTFAALPGPTTCFEGVRMLPPAHYLRIQPGRQSAGPTLDERAYWKMDFPDQGQEVDGDAKNLVDDFEKHLLHAVGMRLRADVPVGSYLSGGVDSSMILALACHLQGKNVHTYTVRVDHPDLDELDAASMVARYIGAPSPIVQNFRTEDILNTYPRLIQAAEAPVIDTSCAALLQLAQKVNASGQKVVLTGEGADEWLMGYPWYKLAKVLGYLDVLPNVRLSDWMRRGYLRLNKVPQYSRAIRRQIEDVIGGPNAWVDSFGLLSITKFRFYSEAMRPMLDTIEPWESLNMDLNRAKQWAPSNRGVWMAGRVTLAGHLLQAKGDRVAMHSSVEVRYPFLDEEVFDFTSKLHPKWKLNGFRDKHILRLLAERWVPPSIYKRGKVIFRAPLDSFHLDPSPEFINELLSEESLNRSGYFDATAVHQWRKAYQDLREGSMPRLSVEMGLAAVVATQLWHHLYIDSSLCSLSDWTSIVPPAEKGLPAVTTH

SEQ ID NO: 14681 - protein, 399 aa, Verrucomicrobium spinosum DSM 4136
MSHPRKLDLESKLSTQLSGIPRSGIRDFFELVIGRSDVISLGVGEPDKPTPWPIREAAIRSLEKGQTSYTSNLGLESLRIGISKYVEEHFRVSYDPKTEILVTVGVSEALDLAFRAVLNPGDEVIYHQPCYVSYGPSITMAYGVPVPVNTRLEDNFALKASDVEKAITPRTKVIALNFPTNPTGAVEPPEELEKIAALCVKHDLLCFTDEIYSELLYDGAKHKSIVEYPGMRERTVLLHGFSKAFAMTGWRLGYACAPAPLREAMMKIHQYCMLCAPIMSQMAGVEALRLGAEAYEGMRQSYEERRNFVVKRLNEMGLHCFNPGGAFYVFPDVSSTGLTGREFALKLLEEKSVAVVPGDAFGPSGESCVRCCYATAPELLEKAMDGMAAFVAKYRKAGA

SEQ ID NO: 14682 - protein, 116 aa, Verrucomicrobium spinosum DSM 4136
MLRIQLKSKLHRAAITDSNVEYEGSISIPPDLMRAVDIWVGEKVLVTSVTNGARLETYVIEGKEGSGQIVVNGAAAHLITAGHRVTIMAFGLDDKPITPKRLLLGPNNEPLTQQVL

SEQ ID NO: 14683 - protein, 623 aa, Verrucomicrobium spinosum DSM 4136
MDLNKSILRTWGTLAGVWEQVKSFALDHPLDPFPLRHTLRGYNTVKAKADLKAGVTVALLDLPQGMAYAVIAGLPLWYGATCSAVAALVGPLLASSRHTILGPTNATAFITFSYFASHPSINQLALMPMLVFLVGALLLLGGYFRVADLAQYISRTVIVAYVTGAALLIMVNQLPALLGVTIPKGGASRTLFGTLGALLDRLGEVQWTSIVLTSSTIALFVLLKRWRPQLPTFVIVLVAMSGLAAWMKSSGFPVVTYADAKFTIYDLLPPFPDFLSKDVAVQFSQLFGLAVAIAFVATLEQSAMSKTIASRGNYRVDANQDMLSLGTANLACAYLSGMPASGSLTRSALNFESGARTPLSSMINGSICLVGALTIGPLVAYIPRAVLATLVICIAISLIHRRQIRISLRATKSDALVFVVTLASTLLVPLHVAIFTGVGVSIMLYLRKASQPSLVEYEFNKEGNLAEAQGKERQNPSISIVHVEGDLFFGAAELFRTQIQRTCSDPNLKIIILRLKNARHLDATSVMALEELIRVMKQANRHLIISGAMRDVVRVLKNSGLIEVLGRENLFMGNASNPNLSTRDALKRAQEILGFREADVHIYYDPRHSRKGDGGGSAGSPAG

SEQ ID NO: 14684 - protein, 282 aa, Verrucomicrobium spinosum DSM 4136
MGANMVRRLMDCGYNVTAVYDTYKEGASALAKEVGCHHAETLAGVTAAADVIFTVVTNDESMRTIFFGEGDNLLKGASGKIFINCATVSPAIHREVYDAAKKAGASSLEASMASSISHAREGKLYLMLAGDEATYNKVLAIIEDMSVNRRFIGGPGRAAEVKVLVNMVMNINTAGLAEGLGLAAALGHDLDMVREVFSQTGANSRVLETDGGDMADRSHDCWFSAAHAAKDSGIAGAMGKEVGLNLPLNDATTAQYRKMVDLGLGELDKSGIAELTFKGRHG

SEQ ID NO: 14685 - protein, 345 aa, Verrucomicrobium spinosum DSM 4136
MFVDQIRVFARAGRGGDGSAHFHRGKFRPKGGPDGGDGGNGGNVILQVDPSTDSLRTFFYNAKMVAEDGKPGAGAQCTGRSGSHGVYKVPPGLLVSRIEERFDEETGEMVTETTPVADLTETGQEYVLCKGGKGGKGNVHFKSPTNQAPKEFTPGTDGESGFYHFELRSIADAGLVGFPNAGKSTLLTKLSHAKPKIANYPFTTLQPHVGVVEFTETRRGTVADIPGLIEGAHANVGLGHDFLRHIMRCRILLFVVDTPGSEGRDPIADISTLREEISLYSSELAKRPWCILANKMDLPQAEENLALLKDRFKRVKVIPISANEGIGMDKLRAFLSEKIGHEIDF

SEQ ID NO: 14686 - protein, 317 aa, Verrucomicrobium spinosum DSM 4136
MKLTVLDAHTANPGDLSWDGLHALAECTFHDRTPASEVVNRAEDCELILTNKTVISSDAIRSLPKLKYIGVLATGYNVVDIAAAQERGITVCNVPGYSTASVAQTVFALLLELTHRVGHHAQTVREGRWSACQDFSYWDGSLVELSGRTLGILGYGAIGEAVARIALAMGMKVIANRRTWSSEPLQGVEKVDLESCFNNSDVLTLHFPLTPNTSGIINRENIAKMKPGAFLINTARGPLINEADLAEALNTGRIAGAGLDVLSSEPPAADNPLIAARNCLITPHIAWASLEARARLIQVATENVRAYLAGVPQNTVG

SEQ ID NO: 14687 - protein, 329 aa, Verrucomicrobium spinosum DSM 4136
MLAPVTMNFPEKARRVIELEIEELNRLRDRVGESFTEAVNVLLGCLTATRKIVVCGVGKSGNIGRKLVATLNSTGATSVNLNAQDALHGDLGVLDDGDAVVLLSYSGETQELVDLLPHLRRHRVTLIAITGGLSSTLARNADVVLDVHVQREACPLNLAPTSSTTAMLVLCDALAMVLLEARGFREDDFAKYHPSGSLGRALLTKVGDVMRTGTSLALATEESTIQEALQAMTRARCGAAVIVNPAGMLAGVFTHGDFVRAFQADPNIAGRPVAHFMTRNPVSIAESKLAAEVLAVLEHHRVDDLVVLNETGQPVGLVDTQDLTRMKLV

SEQ ID NO: 14688 - protein, 388 aa, Verrucomicrobium spinosum DSM 4136
MDFISKNVSELAPSLTLSITSQAKALKKQGVDVLSFGAGEPDFNTPAHITEAAIKALQDGQTRYTESSGLIELREAISAKFEMDNGLKYSPSQISVNCGAKHSCYNAILAVCNPGDEVIIPAPYWTSYPEMVRLVGAVPVIVETKAEDGWKITPEQFEEAMSPLTKMIILNSPGNPTGSVYSKDELEKIAEIAVGEDIVILSDEIYEKLVYGDNKHISIASLGKEVSDLTITVNGFSKAYAMTGWRLGYTAAPKAIADAIDTIQSHTTSNPTTFAQYGAIAALNGDQQIVADMREEFNVRREFMLGRLQGIKNIRVVEPWGAFYFLVNIEPIGIKSVNFAEKLLSKQKVAAVPGIAFGEDYTIRFSYATSLDVINAGMDRFEEFCNQH

SEQ ID NO: 14689 - protein, 650 aa, Verrucomicrobium spinosum DSM 4136
MCGFIGWFQNGGGLDDGRRQRLSQALNLITHRGPDDGSEAGGPGWYMGFRRLAIQDLSPAGRQPMRFAGDRCTLTFNGEIYNFRELRETLAGATFHSTGDTEVLGRMLERASEPEQVLRRLRGMFAFAWWNEESGTLLAARDPFGIKPLYYRLFPDGSLMVGSEIKALRKMMGPDTAISRAGLAEYFRWGAVQAPHTIYDGVKCLPPGHLLRWSAGDLQVERYFVPEWPGKSERVGGKAALDLTREVVSQSVKAHLVSDVPVGVFLSGGLDSTLMVALMRQHGLTDIQAFSIGYEENAGVPDESDAAEKTAEFYGCRFFRERLTSASLFAKLDDYLSSLDQPTGDALNTWLVSQVAAKHVKVTLSGLGADEWFGGYNYHRLLHLARLLPVGRTPLRLLSAPLAGALNGLLPAGAQGHKAWKALYYASGAAGRSLPEMHAHARGIFSSKETARLLGSRTRVVEHLALGNEIRDVLVADLDQRAPDSWLHQLLLLETETYLPNTLLRDNDVTSMAHSLELRVPLVDPEVFTLAGRILPSSKLNLRGGKRNLRAAFRDILPEWIAQDTRKKTFTLPLMKWMRDEAWKERISDTLHSHKCRERGLMNPKVVRKHLEAYYRTDVSDKRAWRLSQSVWLMFVLESWAARQTERFQE

SEQ ID NO: 14690 - protein, 338 aa, Verrucomicrobium spinosum DSM 4136
MAKYKLEYIWLDGYTPVPNLRGKTQIKEYASFPKLEELPNWGFDGSSTQQAEGKSSDCVLKPVAVYPDTTRKNGVLVMCEVMLPDGVTPHPTNHRATILDDAGTWFGFEQEYFLYQDGRPLGFPEDGYPAPQGPYYTGVGYKNVGDVARQIVEEHLDLCLDAGINHEGINAEVAKGQWEFQVFGKGSKKAADDVWVARYLLNRLCEKYCVDVEYHCKPIKGDWNGSGMHSNFSTEYMRSVGGKDYFEALMAAFQKHMDEHIAVYGPDNHLRLTGLHETQSIDKFTYGLADRGASIRIPHSFINSGYKGYLEDRRPNSQGDPYQIASRILKTIASVPTP

SEQ ID NO: 14691 - protein, 502 aa, Verrucomicrobium spinosum DSM 4136
MEIQNPKMVAIVGRPNVGKSALFNRLAGKNIAIVHDRPGVTRDRLVATCRRGVVPFDIMDTGGIGATIEDEFAAQVQAEANLAMEEADLILFVVDGVEGVTPIDLELSRTLRKSPKPIILVVNKADSDKRRAHGAEFAKLGFNHLVDVSAAHGLRIDELMALTITHLGLQAADGSTERVKPAKYPSRNKSRKADAEPSQDESAEGDEGEAAPAKPQKPLRIAIVGKPNAGKSSLVNAILGEQRTIVSEIAGTTRDAIDIPCTVAGKNYTLVDTAGLRRKAKIQDAVESFSAMQATKTIRRADLCLLMVDCAEGISMQDRKIASLIVEYQKPCIILLNKFDLYHPTGKMKDRTEELLENAGREFFFLRHAPMIPVSAKEKQFLDKVFKAIERVHHGAKNPPGTGVLNRMLQKAIASSPAAVGRSGSSFNLLYATFRKEDEPSAIPVPNIVLFANRADKLQESYLRHLESTIREAWPAEGLPFQWTIRGKEKKADLKSKKKKGR

SEQ ID NO: 14692 - protein, 430 aa, Verrucomicrobium spinosum DSM 4136
MKMYPEAGLTRREMIRKTTKALGASALFSGLPAGWVGSAFADDSPEVKDVNLGIIALTDCSSIVIAHEKGLFKKYGINSKVSKGASWAAIRDSLSNGDLQATHMLIGMPIASTMGLGGAPKKPMIVPWLINRNGQAITLKKELKGKVGADPKALKPFVDEAKAAGKPMTFAMTFPPGTHAMWMRYYLAAGGIHPGDASGAGADVSLITIPPPQMVANMKVGQMDGFCVGEPWNARSIAEDIGFTSITTQAMWKDHPEKVCAFTQEFAEKNPKTVKAVLKGLHEASVWLDKMENREEQANIVSAATYINCPPEILLPRLQGKYDMGDGRRYRDPNYMIFSDRNCNYPQAKFGLWWLTQLRRWGFTPGAPDYAAVTQQVMRGDIYEEAMKEIGYAHGGADDKPESFFDGSVFDPKGDLEAYAASFAIKSLKA

SEQ ID NO: 14693 - protein, 590 aa, Verrucomicrobium spinosum DSM 4136
MFTELLPPPSRTVAPATQDFSTDQKRYLEGFFAALQARGVSFGDMAPLPMAPPSAEPRVNLEDLTKEERIKRDVHPFDAIEQLIIDARWNAAPEPESVFRNKWNGLFWLSPVKDGYMCRLRIPGGMVKSFQLRELAAISRELTTGYIQITTRNNFQIRLIEPKNCPEVLRRIQSVGLHSKGAGGDNIRNITMNPCAGYDPYELVDVRPYVNELATHIIASKEFYDLPRKFNIAYDGGGLVSSVEDTNDIGATAVEIGANDQGIEPGLWFRIGLGGVTGHKTFASDWGVLVKPEELNKVILAIVRVFIRDGDRTNRKKARLKYLLEGRGLDGFRNDVEAVLGYTLQSLAPDSPLQLPRRFSQQGHSHVGAYPQKQEGLHYIGASVPVGQLTARQLERIADIADSYGTGEIRLTVWQNFIVPNVPTAFVATASKALRKLGFPTDQSPLRNGFVACTGNRYCKYAASDTKGHAIAMMDYLDKRVKLDTPVNIHFTGCAHSCAQHFMGDIGLLGTKAKGESGEGYHITVGGGFGENRMVGRQIFSAVPYESLGTTLEAMLKTYLAKRQPEESFHKFCNRHSVGDLQVLFSEAMG

SEQ ID NO: 14694 - protein, 603 aa, Verrucomicrobium spinosum DSM 4136
MEESAPLGATFALVKRPTPHSPLTPPPCKGTHLSRSMSNPTESATPRLDFIREFIANDVRSGKNGGQVVTRFPPEPNGYLHIGHAKSICLNFGLAEENAPNSRCHLRFDDTNPTKEETEYVDSIMEDVKWLGFDWGTHLYYASDYFGKFYEFAEQLITKGLAFVCDLNAAQMREYRGNLTEPGKPSPFRDRSVEENLDLFRRMRAGEFPDGSHTLRAKIDMASSNLNLRDPVIYRILHAEHHRTGNEWCIYPMYDFAHPLSDALEGITHSLCTLEFEDHRPLYDWLVENVDGLPSRPVQREFSRLNLNWTVMSKRKLLRLVKEDRVSGWDDPRMPTLSGIRRRGYTPAAMRNFSKGVGLTKFKALTDYGVLENAVREDLNKVALRRMAVLRPLKLVLTNYPKGQVEEIEAPNNQEDPNAGMRKVKLGRELYIDQEDFAEVPPKDWRRFTLGAEVRLTNAFCVICMGVIKDEAGNVIELRGTYDETTRHGKNPEGRPKVKAAVHWVSAEHSVTAPVRLYDRLFTVDDPDAAAGENGDFVDFINPKSLEVLEDARLEATLGEAKAGEHFQFIRVGYFVADSKDSQPGAPVFNRTVSLRDGFAKGK

SEQ ID NO: 14695 - protein, 429 aa, Verrucomicrobium spinosum DSM 4136
MPESALFSLDFTFRTHAKHMALIVQKYGGTSVGTPERIRNVARRVLETQKSGHQVIAVVSAMSGVTDSLLKLARDVSESPTERELDVLLSTGEQQTIALTAMAINAQGGKAVSLTGAQAGIQTDGVHTKARIANITPTEVHEMLDEGNIVILAGFQGQTRDGLITTLGRGGSDLTAIAMAAAVKADLCQIYTDVDGVYTCDPRVVPTAQKIDVISYDEMLEMASSGSKVMQSRSVEFAKKFGVRFEVRNSMNNNPGTLVKEEEPGMESVVVRGVSLERNQAKITIDDVPDRPGVAAKIFGAIHKAGVVIDMIVQNVSWDNETDISFTLSAADLPKAEAALQAVLAELGDKVELRSQTGVAKLSIVGIGMRSHSGVASKMFGALANAGINIQMISTSEIKTAVTVEEGEIEKAAKVVHEAFGLDGAAPTA

SEQ ID NO: 14696 - protein, 104 aa, Verrucomicrobium spinosum DSM 4136
MSYAVIKTGGKQYRVNVGDKFDVEKLVAGEGDVVTFNEVLAAGEGEAIRFGAPFISGATVEAKVLKQHRADKVTAFKFRRRKGYHRTKGHRQLITRVQITSINA

SEQ ID NO: 14697 - protein, 396 aa, Verrucomicrobium spinosum DSM 4136
MGEDGPMIYLDSNATTQTDPRVVEAMMPFLTKHFANPSSGHAGGRFVHKAVEHAREQVAALIDCEPNELIFTSGGTEANNAALASALTLQQPRKTHLIIFKTEHSSVLEPARRWTEEGRSASFLDVNREGVPMIRELKSCTRSGQTALVSMMWANNETGVIGPIEESAELVHSNGAMFHSDAVQAVGKIPVSVKKIPVDYLSLSGHKFHAPKGIGALFISKRVRFRPWMLGGGQEFGRRSGTENVPHIVGLGKAAELMLEHLRDDGAAKVAAMRDAFENRILAEVPGTEVNGSREFRVPGTSSLFFPGVDAAGLLILLDDRGVACSEGSACHAETLRPSHVLCAMGFTEERLGGTLRFSFSRMNTAEEAVIAAGKVIECVAKLKSLNVEGPVKMSA

SEQ ID NO: 14698 - protein, 396 aa, Verrucomicrobium spinosum DSM 4136
MDSPNILVINCGSSSLKFAVIWPVSGKVLSQGLAERLGSQEARLIWTATDGEKHTKLLPKADHEEALDFILSGLRGLALGAVGHRVVHGGEQFSDSVRLNTDTLVGIEACNELAPLHNPANVTGIRAAMERFPELPHIAVFDTSFHQTMPTHAYLYAVPYELYEKHRIRRYGFHGTSHRYVAGEASTRLGRLPTELQLITAHLGNGCSACAVKHGRSVDTTMGFTPLEGLVMGTRSGDVDPNLHQYLAEHTGRTLQEITDLLNRESGLLGLSGLSNDMRTLVAASEQGDTHAHLAIEVFCYRLAKGILGLCASLDHVNTLVFTGGIGENSAPVRARTLAHLGLLKARIDHDLNAQHGSAVAGRITTTDSGLLAMVVPTNEELVIAREADRLRLVET

SEQ ID NO: 14699 - protein, 694 aa, Verrucomicrobium spinosum DSM 4136
MPHTLYLAPSGSSAGLTTIALGLVRSLDIHGVKVAFCKPIGQSTSQDKGPERSTHFVREATHLLPSTPIPLDQAERLITTGRMDELLERVIENYHASAADADVVIVEGLVHTAETPQADELNLQLVKTLSAEVILVGSLGYVPLDEFESRMEYTSRKFGDSVVGCIINRVPDAVDQSLKELGMSFALRSRLFHSSGFHLIGAVPEKAELASCRAVDMARYLNATVLHEGELKTRRVRRFTMLARTVPNMLDTFLPGSVLITPSDRSDVIVATCMATLNDIPIAALLLTGDMEVPPAIFDLCRAGLATGLPILQVPTNSWHTATALTRMSAEVPVDDIERVQQSMDYVASYIDSEWIASHAAIPVEARMSPAAFCFRLTERARQTSRRIILPEGNEPRTIRAAVICAQRGIARCVLIGSPEEIRRVARGQEVELPPQVEILDPVPLRQNYIAPLVEMRKAKGLTPEAAAELLEDNVWLGTVMLALGQVDGLVSGAVHSTANTIRPALQIIKTRPGAKVVSSIFFMCLPDQVLVYGDCAVNPDPDAETLADIAIQSADSAATFGLPVRVAMISYSTGESGSGVDVEKVREATQIARSKRPDLMLDGPLQYDAAAVAEVAASKAPDSPVAGKATVFIFPDLNTGNTTYKAVQRSASVVSIGPMLQGMRRPVNDLSRGALVEDIVYTIALTSIQAGQI

SEQ ID NO: 14700 - protein, 420 aa, Verrucomicrobium spinosum DSM 4136
MLSPQTIAIVKATAPVLEQNGELLTRHFYERMFRHNPEVAPFFNRANQTSGSQQKALAAAICAYAANIDNLEVLGGAVELIAQKHASLQIKAEHYPIVGTNLLASIREVLGSAATDDIVNAWAEAYQFLADILIGRESQIYREHREAPNGWEGFKSFFVTRKEQESEQITSFYLETADGSNVPDFKPGQYITLRLPSLCGHTTMRNYSLSDKPGQSWYRISVKREAARAGSTPDGFVSSYLHDQVRVGDRIEVGPPCGEFFLDVTEKHARPLVLLSAGVGVTPVMCMLLSALEATPEREIFFLHGCLNSRHHAFRQKLNGLAKDHPNLVVHHRYDDPTEMDRLRMHRDHASEGRIDASLIESLVPDRDADYYFCGPKPFMIDIYHQLLAWGIPASQARFEFFGPRQELERPRAQSAVCPV

SEQ ID NO: 14701 - protein, 433 aa, Verrucomicrobium spinosum DSM 4136
MKKKIVLAYSGGLDTSVLLSWIKDTYDAEVIAFCANIGQDDELKGLNAKAKKTGASKIYIDDLQEEFARDFIYPMMQAGAIYEGQYFLGTSIARPLIAKRMVEIAQAEGATAIAHGATGKGNDQVRFELTAAALAPEIEIIAPWRDERFRTAFPGRAEMIAYCADKNIPVQASAKKPYSSDRNLLHISFEAGILEDPWFDAFAPSNKDMFTLSVAPEDAPDKAEYVTLEFMKGDCVAVNGKELSPLQVMKTLNKLGGKHGVGRVDMVENRFVGMKSRGVYETPGGAILHFAHRQIESLTMDREVMHLRDSLIPKYATLVYNGFWYAPERLALQALVTESQKNVSGTVRVKLYKGGIYAAGRKSAYSLYNPHIATMEADPTKAYNQDDATGFIRLNGLRLKVGATVEAEVNAQAPKKAATATKAPKAKKAAKKK

SEQ ID NO: 14702 - protein, 1933 aa, Verrucomicrobium spinosum DSM 4136
MEPCAAEVRRDVCGFFTPITMKFTTKCFTPRGGCPSGVALHACRLPDGEDVHAVGSAGVDGPQGAGGRRGVGRGWGMLRLRSTGWTTLTTALVALAGLAWSGGGMAQAVTGKNLAAGHAHTVVAREDGTVWGVGAAELGQLGVSLTGSSALPVQAGSLTDVVCVTAGAAHTAAVRSDGTLWMYGLNTFGQLGLGYASVSVWSPTQVGALSGVTADVAAGDLHTLVLKTDGTVWGFGENGVGNLGDGTTTGRVSPVQATGLTDVVDLAAGSLHSLALKSDGTVWAFGANFEGQLGDGTNTMRLTAVQVSALTDVVAIAAAGRHSLALKSDGTVWAFGANEAGQLGDGTTTSRNAPVQVSGLTGVVAIAAGGAHSLALKADGTVWAFGANTYGQLGDGSLTAGTVPVEMAITDVAAIAAGAEHSVLMKADGTLWGVGYSAGGRLGGASPSPRKLPMPVSGVTTVATLKAGGDNTGVVRGNGAVLGFGYNHAGQLGNGGVLPSSVPVQPTGLSGVRDVGVGYNHTVVAKTDGTVWSYGLNSLGQLGVTAGASQLTPVQVTALSDAKAVAVGYDFSLVLKTDGTVWGFGSNTNGTLGDGTFVSSRATPAQVSGTVDITAVAAGRGHSALLKSDGTVWTFGGNTYGQLGDGTTTSRYAPVQATGLTGAVAVAAGGRHTVVLKGDGTVWAFGGNASGQLGDGTTTTRLTAVQMSGLTNVVAIAVGEEHTVAVRSDGTVWAAGKNASGQLGDGTVTDRLTAVQVPGVTHALAVAAGRGHTLALKIDGTLLSWGAGEQGQLREFGTGVPVSLPVNSPALGYEFVEPTAAIVSPPTETIVPLGTAQTLTAEVTGSAPAAKVHFYHQGVLLGTDDTAPYTVEFTPWTYGDFEITAVGEDELGALSLPSAPVVIRAPYDHDGDDLPDWWEHAHHGTLAHDQADDVDGDGLTEAGEYLYGSSPVDTDSDDDSITDGQAFATAQGLVATGVTVTERHANAVKLTWLSACPFETSFRMEKSLDGGTTWVAAGSVPANATSCLVSGLPEKTAHLFRVATVSLYGTGRSAAVSASTKPAKPAAPAQLTLVSASPVEATLSWVDQAGNETGYVVEGKVVGAPAFLTGATTGGNATTATVGSLVGASDYVFRVRAVNTDGVDTEYSDYSSELTLPKVPAAPTSLVVAATLPYQASLGWALPVDATRTAVRVRGYDATGANQRFQIDLAPAALQYVDTGLVPATTYQYKVAAVNVRGETQTAFVGATTQGLLPATPTGVTATALAARAMLVNWTDNANNEVSYIVERSTTSGFAVVVASPLLPANTTSYEDRVGLKGATTYYYRVKAVNESGSSAYSATATGVTSNYPTANHAPDALGVVPDELALYSTSAPSYAVFTTIGTGQFTEAFQDGEFVATSVGTVFLWRTTPASPTGAAPLNQVEVYLYNGSSWVYQGALSPPGGAGTTSGFGTSIVASGNKAFIGAPGAVNGGSGATGLVYVLDFNGLSISSSVIAPPGGGAAGDQFGASLSVDGTRLIVGSPGKDKPNGGGSITDAGAAHLYNWNGSAWALHRTEYSLGAQTGGKYGFSVSLRGRNYVVGAPYEDGLFQVGSTLYALGDTGAVYLSRWNEPGQILGFQNLFALYPAVQAKIAGLGSSLFGYSVSIDSAMRIAVGRPASSWTAGDNMSAWDRGNVMLLQWNGELDQDYIFAIDTITDGALAAGARFGEYVEEAQGYELAVRTGLRNTTNLPGHYYSYLGITARPGQVIGGVPVSRRVGDMVGLDEDYDPLTFSIPGTSNPLATHFEIGGDGVLKAKNTLSGVTNGLYVLALAVSDDRGGSVARGLVVDVTGATASNDADQDGIDDTWELAHGLNPADGLDSLSDLDGDGYTALEEYQRALSGQSYAINPGSWDLDPNGDIDGDSIANKLDGNPHDPSVGQMNVQITSPGSGVTL

SEQ ID NO: 14703 - protein, 1522 aa, Verrucomicrobium spinosum DSM 4136
MTKHPYYDEPIPNEGTLHNMDMERDACGVGFVAQVDGKRSRKILDYALGGCCAVVHRGAMEADMKTGDGAGVLTQIPHKLLLPEVEKFGVKLEHELDLGVGMFFLPQDETARLRIQLVAESVVDKRDVTVIGWRKVPVNERELGEKARRTMPFITQLLVRRPEDMDDAAFERVLFLARREIELKGKQQGLADFYIPSMSHRTVIYKALVVATALEKFYYDLQDENYETALAVFHQRFSTNTFPTWALSHPFRMLAHNGEINTVRGNRNWMASRASDFEHPWWEGDEHLLKGLCDPKQSDSASLDAALELLVLSGRSVTESMSMLVPPAYGIDPTTTEEEKSYYEYHSCFSEPWDGPAGLIYTDGRVIAATLDRNGLRPSRYKLTEDGVFALGSEVGIVPLDDAKVIKKGRLSPGEMISVDISKGVVTYNEEIKQQLVSRQPYGEWLTEQRVELTAQAPHAPKEDLDILGLSQKQVTFGWNKEEVEMAFAPMLARGEEAVYSMGDDAALSILSKQPKLLFTYFKQLFAQVTNPPIDPIRERGVMSLDVVLGWQRNWLAETPEHAHVVHLTSPFLFENELETLKGLKDFPCRVLDITFPVSEGPEGLKKAVDRLCSEAEQAVNDDIRILILSDRAVDHTRVPVPSLMATGAVHHHLNRKQVRMRLSLVVDSGEARDTHQMALLFGFGASAVCPYLAFETVQEVLEKDKTARKPILEGFDFAKALTYYRKGLEKGVLKIMSKMGISVLSSYTGAQIFEAVGLGKELMDKCFTGSPSQIAGIGFNEVAEESLARHAAGYGTAVPEAGAIELADPGFYRPRREGEMHAVTGPVIRNFHTFVKSGKPEDYESYVKAQLENTPVALKDLMEFVPSSDGPIPLDEVEPIEDIRVRFTTAAMSLGAISPEAHEALAIAMNSIGGKSDSGEGGEDPRRFKPFENGDWAMSKIKQVASGRFGVTAEYLANAWELEIKMAQGAKPGEGGQLPAMKVNRLIARLRNTQPGVTLISPPPHHDIYSIEDLAQLIHDLKEVNPRARVCVKLVAESGVGTVAAGVAKANADIILISGHDGGTGASPLSSIKHAGLPWELGLAEAQQVLMLNGLRDRVTLRTDGGLRNGRDIAMAAILGAEEFNFGTIALIALGCVYVRQCHLNNCPVGVATTDPKFRSRFKGKPEHVVNFFNSVAHEVRQIMAQLGIAKMNDLIGRPEFLRQRHVPDHKKANLLDLSRILRDVGKEADEDLPRICRVNSNERINNHPLDDKILQAAQVAISDKRKIKPLSYKVVNTNRNIGTGLSGEIAFHHGNHGLPDGTIQVNLEGSAGQSFGTFLCGGVKLNLTGEANDYVGKGLCGGEIVIRTPNKTHPSFKSWENSILGNTVMYGATSGSLYAAGRAGERFCVRNSGGTAVVEGIGDHGCEYMTNGLVAVLGSFGKNFGAGMSGGVAYLLDEAGMFDKLHNPEMIRGVQVSEPEDIKQLQQLIYNHLEKTDSARAKDILDRWDHFRPLFVKVTPKVEPVALPPEEEAPATLVTA

SEQ ID NO: 14704 - protein, 461 aa, Verrucomicrobium spinosum DSM 4136
MNQPDSHTPPQQPALQKTLGPWQILFYGLGSMLGAGIYALVGRAADSLGNAIWLAFLAAMVAALLTGLSYACAGSRYPKAGGAAYVTHRSFKYSWLSYVVGIAVMMSGLTSMATGSQAIAENLEKALGMALPIKFVAIGLVALVGGIIYRGIRESMWANIVCTVVETAGLLFIIVVGMRFWGGVNYLETPGDTIEGGLGSGITLALVLQGAVLMFFSFIGFEDILNVSEEVKNPRRDIPFGLIGAMILATLIYMAVAITAVSVVPWKELAASKTPLMEVAHRAAPWFRGIDKIYVGISIFAIGNTALLNYIMGSRLLYGMSRQGLLPQVLGRVHPRRHSPHVAIAVLFVIVTGLILSGGVKALAESTVLLLLTVFTVVNIGLVILKRRKDEPKGGFEVPVIVPILGALVCASLVVVRVMSAIQSADPANRTAPLIAAAVLVVALALYFIIKPKHDMGEVEM

SEQ ID NO: 14705 - protein, 1014 aa, Verrucomicrobium spinosum DSM 4136
MFGSKNNSVGVIGLGIIGSRVAERLRNADFNVYVWNRSIKPEPNFMASPAEVAEVAQVIQIFVRDAEALVAVMEDMKTALTPDHVVLCHSTVNSWGIRRAVAIADSVGAAFLDAPFTGSKTAAEKGQLVYYIGGDQAPLDRARKVLETSGKKIITLGKAGDATVLKIATNLISAAVIEALAEAMAITKAEGIDVSKLQEALADNANSSALLTMKLPTMAARSYAPHFSLKNMLKDARYAQAIADEKGLALPVLNASALAMDRGVRSGQGEFDYSVVLENFAPMLRAVEERAARFKAKEAAAVPPPTPVEAAPVEPTPVEPTPAEPTPAEPTPAEPTPAEPTPAEPTPAEPTPAEPTPAEPTPAEPTPAEPTPAEPTPAAETPPLETEKKKAEADAVKTEEAGKVTPPADAAAEKPKESPLKPLAPTSASADAPSLAKKDEAAKDKAAPEPSSELPATITKDAEKAPAEKEISESKDASTATAETKDQQKDEKKEKDVPEIKVAGDAPAEKKEGEKSAAEKAQKTARDSDEKKAEPDAPTPSGLPKPPAIAKAGLKPSAPGSDKTEDIPDSKLAEGTADSSKVEKPSSAPAQTEVAPAVKQPSFVSRLFRGITGRGKKDKQDQATPPVAKDVKTPDPVSAATPLPAAPAVTGKDKGQDKPKEAAKEKDKTQSSPPTAKSSGGSLAAVLATESREVKATSTDSEKPALPPTKLPPPPIRPVKTLRPKNPAAPATTLVAKLLSDTDADDGDDDIDGPAAITAVAAPPPPSDEKEKGKLAPPPVNPVVAPEKTAEPTPAIAEIAPASAGSPAPTVSEPVSQPVEVETTPTPAEEKPARAKTEPDAPKPPPADTPSVVELAPKSEVSAKTEPEPAVPAFDASKSLEDIAREVNAKLSAFPKIPERTVALPETKEPVAAPPPITPPQTRLEGTRGFIVPNLAPAPPLPAEGPASGPAPAPNPAPAPAAVKATASLADTEASEKGKSSRKGDPSQPEKKEPETPGSPEAAVPADRKAPPQA

SEQ ID NO: 14706 - protein, 157 aa, Verrucomicrobium spinosum DSM 4136
MNTLTRWTPFRTGTWDPLKEISEMENRLSRLFPTAASNGGAKEALTVAEWAPPVDITEDDKEYVIKAELPEIKKEDVKVTVTNGELTLAGQRKFEKEEEGKKYHRVERSYGSFLRSFTLPDAVDATKVEAQFKDGILTVHLPKDERAKPKSVEVKLN

SEQ ID NO: 14707 - protein, 407 aa, Verrucomicrobium spinosum DSM 4136
MAIVVQKYGGSSVADPEKIRKVAERIMATQREGHQVAVVVSAMGDTTDHLLELARKVSHNPERRELDMLLSVGERISMSLLCMAIRELGGDAISFTGSQAGIITNDRHIDARIIEVRPFRVQDELARGRIVIIAGYQGVSYRKEVTTLGRGGSDTTAVALAAALEAEWCEICSDVKGVYSTDPRVVPQARLIPEVSYEEMQEMAEAGAKVLNAQAVEFAKEKGIAIYARATAQSPPGHDVPTDSTVVRKFGPQVPGRVVGVASEKDLLILQASGNVDAVLEFLDSWSVQGKQLHVASRNRAGADSLSLVISRENFHDETRVRALLEQRFGGAATLTDGVGAVSVIGTGINETYKNLRAGSAALEGHAILGMATSRFRITWLVPVAVVDEAVRRLHRTFMESEPEPVP

SEQ ID NO: 14708 - protein, 179 aa, Verrucomicrobium spinosum DSM 4136
MSSPAFFFDRDGVVNVSPGAGYVLSWEAFHFCEGIVKALARLKEAGFILVVVTSQQGVGKGLMTQAALDDIHDRMQAALEPHGAAFDAIYACTCLSSDPDCTCRKPSPEMIEQAAAAHDLDLSRSWLIGDHDRDIQMAVNAGVPRTIRVLGEKEATVAASHTLQSVSELPALLERVLPA

SEQ ID NO: 14709 - protein, 371 aa, Verrucomicrobium spinosum DSM 4136
MIIGVPKEIKAQENRVGLLPSAAYQLVKRGHRVVVETQAGAGSGFPDEEYAHAGAEILLTHEAIFAQAEMIVKVKEPLPQEYPLLRPGQILFTYLHLAASKSLTEALLASRCTGIAYETVEVNRRLPLLEPMSEIAGRMSVVVGAYFLAKHEGGKGVLLGGVPGVLPGKVVVIGGGTAGVNAARMATGLGADVTILEVDVERMRFLDITLHTAHTLYSNHAHILEMLPSVDLLIGAVLVPGAKAPKLITRQMLQVMKPGSVLVDIAIDQGGCCETSRATTHDDPIYVEEGVTHYCVANMPAAYARTATQALTNVTYRYIELLADHGVPGAFQRDANLLDGLNVFDGKVTHAAVADAHGMPYLDADTIFASR

SEQ ID NO: 14710 - protein, 334 aa, Verrucomicrobium spinosum DSM 4136
MPAPKGPHLLCLAPLPGRLSHALAECFICHTTLNDGEENSIRGLVGSGNALYRESLLDILPNLEIISVFGTGYEGVPVDYCRSRGIRVTHTPDVLTEDMADVALALVLMTSRRLLEANRFLHDGGWPAMSFPLGFKPGGKRAGIFGLGRVGQAVARRLEALGMRVGYAARRPNLTVSYPFFRSLHDLAFWSDFLIIACPGGSATRHLVDTSVLEMLGPDGTLINITRGSVVDEAALVHALETGTIRAAGLDVYEREPLVPDQLTRLPQVVLLPHVGSRTEENREEMARMVHDNLIAYFQGQPLLNVIPELRTTTQRRLESVTLFSSPPPVAAAK

SEQ ID NO: 14711 - protein, 373 aa, Verrucomicrobium spinosum DSM 4136
MRGYFDHNATTPLHPAARAAWLEATDRCWQNPSSLYREAAAVKHRLEEARERLADLLGCDPGRIIFTSGATESNNALVRWLAQQSGPEGRVVSSSMEHPSLAEPLEQEFNGRVLKVPAHADTTLNLEAADRLIQQGNAVLMAVMAANNESGTLNPWRDLAALCRAKQVAYHCDASQWIGKMPLAGLGECDYLTGSAHKFGGPKGTGFLVVRDENERLHLARGGPQEEGRRAGTENYPAIEAMVTALEAVEEALATVVAQQASLRDAFEATLCSLIPGTQIVGREAPRLWNTSLMVLPAHDHRKWLGRLSQAGFAVSTGSACSAGDKGASSVMQAIRAPVEEWRRVLRISGGWKTTQEEWQALAEALGKVSAGL

SEQ ID NO: 14712 - protein, 320 aa, Brassica oleracea
MVRTPCCRAELGLKKGAWTPEEDQKLTSYVNRHGEGGWRTLPEKAGLKRCGKSCRLRWANYLRPDIKRGEFTEDEERSIISLHALHGNKWAAIARGLPGRTDNEIKNYWNTHIKKRLIKKGVDPVTHKSISANLQDIPEKLNINQTIITSDDDLDHNKKMEKSARFLNRVANRFGKRINQSVLSEIIGSGGPHATISNNTTTVTTSVTVDSKSDKSTSSSFTPTSNLLMTANGNATSSPSAFSESSISDRLMYWDKEDNIEFSTFLNDEDFMVLEESCAENNEFMKELTRFLQEDETDNIEMMPANEHQDSFEDIDNYFA

SEQ ID NO: 14713 - protein, 386 aa, Cyanothece sp. ATCC 51142
MTIQPIYLDYHSTTPVDPRVAELMVYYLTTAFGNASSIDHTYGDEAEKAVYNARQAIAQLIKASPKDIIFTSGATESINLAIIGHIQAINSPKLPRIAVSPVEHKAVLDTIQMLAKKGQAELIYLKVDGFGRLDLENLENTCADGLSLLCVMAANNEIGNIYPIEKIGQIAHQYDIPFLCDASQAVGKIPINFNDWGITYLAISAHKLYGPKGVGALVVRKGYPLEPIIFGGGHQKGLRSGTLNVPGIVGLGEACRLRQLEMEQDEQQIARQRDRLQTLLQAQIPDLQVNGNINARLAGNLHISLPGIPNSAIIARVRHQLAISTGAACSSGVATPSHVLRALKLSDEMIEGALRIGVGKFTTDEDIEKAANILTVAVEKIRPYLS

SEQ ID NO: 14714 - protein, 322 aa, Cyanothece sp. ATCC 51142
MIKLVQSMDQQKQPKKKTNSPFRYPGGKFYARKLILASLPEHDSYCEPFAGGASIFFAKPTVKNNILNDKDEDLVNCYISIRDHVEKLISLLDGIPAKKELHSYYKNEFQPQNDLERAMRWYYLNRTSYSGIMKPQNCYWGYGDKYSMRPENWPYHLRTTSERLQGVDIYCLDFEELIGSLSDGYFLFIDPPYFNADQDKFYTCSFTTEDHQRLCSLLQKNKSKYNFLITYDNSPEIKEMYNWCVSVQDNQWNYTINRTDDQQNSRNLGDGYKGSRYKGRELFITNYDINSVVGITPLNLDQQGTKINSTENRYLQLSLFEN

SEQ ID NO: 14715 - protein, 366 aa, Cyanothece sp. ATCC 51142
MRNYMKIGVPKEIKDQEFRVGLSPNSVRALCDKGHQVSVETKAGIGSGFTDQEYEQAGAKIVSSAAQAWEQELVVKVKEPLSQEYPYLNTAKILFTYLHLAADKDLTKALLSSQITAIAYETVELSDRRLPLLTPMSIIAGRLSVQFGARYLEKQQGGRGVLLGGIPGVFAGRVVILGGGVVGTEAARIAVGMGAQVQIFDISVERLAYLETLFGSRVELLYSNVSSIETAVPNADLLIGAVLVTGKRAPTLVSRELVSKMRPGSVIVDVAVDQGGCIETLRTTSHSSPTYVEEGVVHFGVPNMPGAVPWTATQALNNSTLPYVLKLANDGLDALEKDASLAKGVNVKDGVLVHPAVQEVFQDLIG

SEQ ID NO: 14716 - protein, 188 aa, Cyanothece sp. ATCC 51142
MITTLTPYTQLQKALFLDRDGVVIKYVPYLSQPEQVELPLGAGEALKRWQDAGYLLILITNQAGVGRGYYTLEDVDNVHNYIIDEYGKFGVTFDDIFLCPHHPQENCSCRKPSPKMLIDASKKHGISLSQSFFVGDAPSDVECAINAECEPVLVLTGRGQETLENIAKYPRKVEIFDSLQDTVKLLKP

SEQ ID NO: 14717 - protein, 392 aa, Cyanothece sp. ATCC 51142
MQIYLDHSATTPPRSEVVAYVSQLLTEEWGNPSSLHQWGQRAAMVIETARVQVASLVNAREPESIIFTSGGTEADNLAILGIARQYSTPQHLIISSIEHPAISEPVACLEAQGWEVTRLAVNGQGRINPWDLKAAIQSNTVLISIIYGQSEIGTVQPIEELSNIAHDHAILFHTDAVQSAGRLSIDVQRLPIDLLSISSHKIYGIQGAGALYVRPGVDIDPLLLGGGQEGKKRSGTQSVGIIGGFGLAAELAVREMATESSRLIGLRDRLFDLMADCPYVIPTGDRLYRLPHHVSFVINDPFQTSETEKITGKMIVRQMNLAGIAISAGSACHSGKLSPSPILLAMGYSEKEAIKGIRLTLGQNTTREDIDWTAMVLKQVLNRLMPQLVIAK

SEQ ID NO: 14718 - protein, 388 aa, Cyanothece sp. ATCC 51142
MSQRPIYLDCHATTPMDKRVLEVMLPYFTEHFGNPSSVNHLYGWEAEASVKKARTTIANAINCSPEEIIFTSGATEANNLAIKGIAEAYFNQGQHIITVQTEHRAVLDPCQYLEQLGFEITYLPVKKDGLIDLELLEKSFRPETILVSVMAANNEIGVLQPLKEIGEICQKNQVLFHSDAAQAIGKIPLDVQEMNIHLLSLTGHKVYGPKGIGALYIRRRNPRVNIAPQLHGGGQEKSIRSGTLYTPQIVGFAKAIELALAEIETENKRQSELRNQLQEQLLNLEGVHLNGHLTQRLAGNLNVSIEAVDGAALLLGLQGIVALSSGSACTSTTTKPSHVLKALGHSDKLAYASLRFGLGRFTTSQEIDKVGQRVLDTIKSLRQATIRN

SEQ ID NO: 14719 - protein, 453 aa, Cyanothece sp. ATCC 51142
MMSNFSPVTRRKFLRTSALSAAGAILLKGCAGNPPEPGGTNASTTQGVADISPEMQPETTAIKLGYIPIVEAAALVVAKEQGFFAKYGMTDVELSKQANWASARDNVTIGSQGGGIDGGQWQMPMPHLITEGIITNGRKVPMYVLAQLNTQGNGIAVAPMHEGKGVSLDISQAADYIKNFASTNGRKFKAAHTFPNVNQDFWIRYWFAAGGVDPDVDIDLLAVPPAETVQGMRNGTMDAFSTGDPWPYRIIAEDIGYMAGLTSQIWQFHPEEYLAIRADWVDKNPKATKALLKGLMEAQQWIDQNNNRAATVKILAGRNYFNVPVDILDAPYKGNYKMGDGKAEVKDINMGPLYWKDGKGNVSYPYKSHDLWFLTETLRWGFHKDQISDLDTAQKIIDKVNREDIWREAATEAGFTADIPASTSRGVETFFDGVTFDPENPQAYLNSLTIKRV

SEQ ID NO: 14720 - protein, 315 aa, Cyanothece sp. ATCC 51142
MTKISNNSTVSFCIKGKIMYKKMPLVALSLMAMLTLPNKSLAETVIERVARTGVLNVSTRVDLVPYAYVNDEDELVGYSVELIELIRETLAQEIGKDVQIKVIVDDSLDERISSLLNREVDIACDTTFTWQRDRFVDFSLAYGVSGIKVFVKEDSNLSSPDSFKNKRIAIIESVLSPESIKVIESQVTVVDVDSIEAGIKAVEDGEVDGFAFDGTILEGTRQTLTNPNAYKVVPDESYFKHGIACMVPEQDSTFLNLVNLTIGKLMDGYIRGDSRYVEMVNRYFGEEGIVPFEPARIKDFFEIIIITREQIPPEQ

SEQ ID NO: 14721 - protein, 297 aa, Cyanothece sp. ATCC 51142
MTQQLAFVGLGLMGGFMAANLAKKGLAVKAWNRSPNRPGITIAHNAGAMIAPSIEAAVKEADIIFTCVGDVPDVNDVIFGENGIINHAKPGALIVDFSTIGTQAAREIGTQLKAQQFRFLDAPISGGDIGAKQGTLTIMVGGEKKDFEECFPYFEAMGKIIIYCGSTGNGQAVKMCNQALCSVHMIALCEAIKMAETQNIDPNLMIEVCQTGAAGSWALANLGPKIVDSDLEPGFAIKHLLKDLRLVQEIMAESDNQLPGVALAESFLKVVANMDNGKAKEQGTQAMIRYYNQENNV

SEQ ID NO: 14722 - protein, 226 aa, Cyanothece sp. ATCC 51142
MMELSVPQDKPLAAVFRRIGGGAYPPVVEAFDRGKTIFFPGDPAERVYFLLKGAVKLSRVYEAGEEITVALLRENSVFGVLSLITGQRSDRFYHAVAFTPVELLSSPIEQVEQALKNNPDLSILMLQGLSSRILQTEMMIETLAHRDMGSRLVSFLLILCRDFGVPTPEGIRIDLKLSHQAIAEAIGSTRVTVTRLLGDLRQEEMISIHKKKITVHNPVALSQQFA

SEQ ID NO: 14723 - protein, 400 aa, Cyanothece sp. ATCC 51142
MRDCIYLDNNATTQIDEEVLGAMMPYLTLYYGNPSSMHTFGGQVGKAVKTAREQVASLLGAEPSEIIFTSCGTEGDNAAIRAALTAQPNKRHIITTEVEHPAVLNLCRHLEKQGYTVTYLGVDSQGRLDLDEVQASITGGTALVTIMYANNETGVVFPIEQVGALAKEYGALFHVDAVQAVGKIPLDMSSSTIDMLTLSGHKVHGPKGIGALYVRKGTRFRPFMVGGHQERGRRAGTENVPGIVALGKACELAESHLANISHERQLRDYLETSILTLIPDTVVNGSTKERLPNTTNIGFKYIEGEAILLSMNQYGICASSGSACTSGSLEPSHVLRAMGLPYSVLHGSIRFSLSRYTTQDEIDRVIEVLPDTIARLRSLSPFSSDDATWLQEQEKATLAK

SEQ ID NO: 14724 - protein, 266 aa, Cyanothece sp. ATCC 51142
MSTIQQLIKIMSNVILSVKNLTANVEGTPILKGVNLEIKAGEVHAIMGRNGSGKSTLSKVLAGHPDYEVTGGEVVYKGENILDKSPDERALEGIFLAFQYPLEIPGVSNLDFLRVAYNTRRKHLGLEEIDTFDFEDLVEEKLEVVKMNAAFLDRSLNEGFSGGEKKRNEILQMALLEPTLGILDEIDSGLDIDALKIVANGVNQLSTPDNAFLLITHYQRLLNYIEPHHVHVMYDGQLVTSGGKELALELEESGYDFIEEKLLAQA

SEQ ID NO: 14725 - protein, 403 aa, Cyanothece sp. ATCC 51142
MKILVLNAGSSSQKSCLYSIEGNSLPKHSPDPIWTGNIDWTVSKNEGILTVKANEIKQTITLNQENKAQAIPKMLETLTQGQTKVIDNLSEINVVGHRVVHGGKNYSEATKITPEVKAKITELIPLAPNHNPGHIEGIEAIETVLGDVPQVALFDTAFHQTIPLENAAYPLPFEWLEKGIRRYGFHGISHEYCAHRAAEILDQPLSSLKLINCHLGNGCSLTAIKNGKSIDTTMGFTPLEGLMMGTRSGSIDPAILIYLMREYSLTPDDLNTLLNKESGLKGVSGISADIRAILQGIKEHNFRAQLAFDMYIHRLRSQMGSMLAVLGGLDVLIFTAGVGENAVLVREKACEAFEFLGLKLDQTKNESSPMDEDIATENSSVRILVIHTEEDWAIAQQCWHLCH

SEQ ID NO: 14726 - protein, 385 aa, Cyanothece sp. ATCC 51142
MLKIAVPKESDLGELRVALVPDIVARFIKLGFEVLVQSGAGLGAHFTDSEYEAAGATIINSAKALWEAADILLKVAPPGEQQGEEEMNWLKPGATLISFLNPLANPEQVQALAQRKINAFSMEMIPRTSRAQSMDALSSQANIAGYKAALIAAASLPRLFPMMTTAAGTIPPAKVLVVGAGVAGLQAIATARRLGAVVEAFDVRPAVKEEVQSVGAKFIEIPIEEDTATTGGYAKEVGQSTQEKIRQVLTEHVKKSDVVITTAQVQGKRAPLIVTEEMVGEMNPGAVIVDLAAGQGGNCACTEAGKDVYYNGVTIIGPLNLPATLPVDASKVYAKNLLTLVKYVVKDGAIDFNFEDDIVDGTCVTYEGEIRNDRIKQALATLVQA

SEQ ID NO: 14727 - protein, 330 aa, Cyanothece sp. ATCC 51142
MSHTPTLMPHLAMSSLSDNNRLSLFCGSSNIALAQEVARYLGMDIGPMIRKRFADGELYIQIQESIRGCDVYLIQPCCNPVNDHFMELLIMIDACRRASARQITAVIPYYGYARADRKTAGRESITAKLVANLIVEAGANRVLAMDLHSAQIQGYFDIPFDHIYSTPVLLDYFATKDLSDIVIVSPDVGGVARARAFAKKLDDAPLAIIDKRRQSHNVAEVMNVIGDVKGKTAVLVDDMIDTAGTITEGAKLLREEGARQVYACATHAVFSGPAIARLSSGVLEEVIVTNTIPIPEEHRFEQLTVLSVANLLGEAIWRIHEDTSVSSMFR

SEQ ID NO: 14728 - protein, 151 aa, Cyanothece sp. ATCC 51142
MGTIRLMHAKLHRVQVTEANIDYVGSITIDPILLDKVGILPLEEVDIVNLNNGNRFSTYVIPGETGKGEICPNGGAALLCQPGDLLIIYAYENCDRQEVIQRGHTARVIVADEDNKIQDFLIQTLVPCEDGNKVEFHNSSMIDTILESSQT

SEQ ID NO: 14729 - protein, 408 aa, Cyanothece sp. ATCC 51142
MYSSALAATSGKTTAYGSRLFVYEVAGLSQNTDNDSLDYPIRRSGSVFITVPYERMNQEMRRITRMGGRIVSIKPLDAETPLKPTSNRSSEAEVAQPQQSKSNPTEKKRKPMTQAKTKVPVNIYKPKDPFIGKCIENYPLVAEGGSGIVQHLTFDLSGGDLHYLEGQSIGIIPPGTDDNGKPHKLRLYSIASTRHGDKGDDKTVSLCVRQLEYQHPETNETVYGVCSTHLCNLEVGADVAITGPVGKEMLLPDDEDANIVMLATGTGIAPFRAFLWRMFFEKHEDYKFKGKSWLIFGVPYTANILYKDKLEEIETNYPDNFELTYAISREQKNSEGGRMYIQHRVAEQAEKLWTMLQDPKTHLYMCGLKGMESGIEEGLSPFAAKQGVEWSDFVKKLKKEHRWHVEVY

SEQ ID NO: 14730 - protein, 387 aa, Cyanothece sp. ATCC 51142
MTNFTSRMNRVQSPIIPMVGQLIRENPGTISLGQGVVYYPPPPEAIEGINQFFNHPHNHQYKSVQGIHSLIEQIVTKLQEDNKITINNYRSIIVTAGSNMAFMNAILAITNAGDEIILNTPYYFNHEMAITMASCHPILVNTDDKYQLSLDKIKAAITAKTRAIVTISPNNPTGVIYSESSLREVNQLCRENGIYHISDEAYEYFTYDGIKHFSPASIIDSDSYTISLYSLSKAYGFASWRIGYMVVPNHLLEAVKKIQDTILICPPVISQYAALGALKVGKSYCKKHLEEIKKVRDIFIYHLRPLEAMCTLVSSQGAFYFFLKINTDMKDFELVKKLIENYQIAVLPGETFGIKKGCYLRIAYGALQKETATTGIERLVQGLKHLI

SEQ ID NO: 14731 - protein, 514 aa, Cyanothece sp. ATCC 51142
MVQSTQPKNQEKLNKFEKIKAEKDGLDIKDQLEHFAQIGWEAMDKTDLEHRLKWVGIFYRPVTPGKFMLRMRMPNGILTSEQMRVLGYIVQRYGDDGNADITTRQNLQLRGIRLEDIPDIFNRLKDAEMTSMQSGMDNVRNITGSPMAGLDADELIDTRELVQKVQDMITNHGEGNYEFTNLPRKFNIAIEGGRDNSVHAEINDIAFVPAYKNGELGFNVVVGGFFSAKRCEAAIPLNAWVSPTDDAVVGLCRAILTVFRDHGSRANRQKSRLMWLIDEWGIDKFREAVEAELGYKLTPEAETDEIDWEKRDHIGVFPQKQAGLNYVGMHVPVGRLYAENMLDLARMAEVYGNGEIRLTVEQNVIIPNIPDDNLETFLEEPILEKFSISPKPLQRALVSCTGAQFCNFALVETKNRALTLAKELDEALELPQTVRIHWTGCPNSCGQPQVADIGLMGTKVRKDGKTVEGVDLYMGGKVGKDAHLGTCVQKGIACDDLFPVLTDLLIENFGAKRR

SEQ ID NO: 14732 - protein, 628 aa, Cyanothece sp. ATCC 51142
MKISWRTLLLWTVPLLVVGFFLWQGAFPSASTQMGNNTANTRMTYGRFLEYLDSGRILSVDLYEGGRTAIVQAVDPEIEDRVQRSRVDLPMNAPDLVAKLRKSDVQLESHPVRNEGALWGFLGNLLFPILLIGALFFLFRRSSNLPGGPGQAMNFGKSKARFQMEAKTGIMFDDVAGIDEAKEELQEVVTFLKQPERFTAVGARIPKGVLLVGPPGTGKTLLAKAIAGEAGVPFFSISGSEFVEMFVGVGASRVRDLFKKAKENAPCLIFIDEIDAVGRQRGAGIGGGNDEREQTLNQLLTEMDGFEGNTGIIIIAATNRPDVLDSALMRPGRFDRQVIVDAPDFKGRIEILEVHARNKKLAPDVSIESIARRTPGFSGADLANLLNEAAILTARRRKEAITLLEIDDAVDRVVAGMEGTPLVDSKSKRLIAYHEVGHAIVGTLVKDHDPVQKVTLIPRGQAQGLTWFTPNEEQGLTTKAQLMARIAGALGGRAAEEEVFGYDEVTTGAGGDLQQVTEMARQMVTRFGMSELGPLSLESSSGEVFLGGGLMNRAEYSEEVAMKIDSQVRTLAEEGHQLARQLIRDNREVIDRLVELLIEKETIDGEEFRQIVAEYTHVPEKEQFVPQL

SEQ ID NO: 14733 - protein, 374 aa, Cyanothece sp. ATCC 51142
MSSKTTKITPVTTSMNSLWVSPTQVIQGEGIISQTGKVIARLGQRPLVVGGNHSLKLISSHLKPIFQKFGLTAVFDSYAPDCSETSLKNLSQTSQDHQADLIIGVGGGKALDTAKLLAHQQQLPIVTIPTSGATCAAWTALSNIYSNQGAFQYDVPLSRCPDLLILDYNLIKTAPKRTLVAGIGDAIAKWYEASVSSGNSTATLTIAAVQQARVLRDILLQKSATALDNIGGEDWQEVVNATVLLAGVIGGLGGANCRTVAAHAVHNGLTHISAAHDALHGEKVAYGILVQLRLEEIIQGNQLAVASRQQLLKFYEEIGLPKSLEELGLSQVTLAELRHAAVVTCHPNSDIHRLPFKVSPEQLLSAMVSTLAEN

SEQ ID NO: 14734 - protein, 197 aa, Cyanothece sp. ATCC 51142
MSSFEYNQESDSEDIDRVTLTDEMGRTLDCYVENAMEGNDGTYLLLMPVDIPVVILSWDSEEEDSEDNEEISNAVLLEDQEEIEEVFPDAKAVLAELDLTLKLTAFTLTVTGELPPIEDDGILTLELENDGPSLDSEELQFLKDFYHHEQKYSIYTPLSPLLFLAKYNLLGKVELVSPEDEEMQVILEELLFDDIDE

SEQ ID NO: 14735 - protein, 113 aa, Cyanothece sp. ATCC 51142
MSQGVSMTPETKEKIDQLVKNNKILVFMKGAKLMPQCGFSNNVVQIFNTLGVPFETIDVLADPEIRQGIKEYSNWPTIPQVYINGEFVGGSDIMIEMYQNGELQQMVEVALAS

SEQ ID NO: 14736 - protein, 636 aa, Cyanothece sp. ATCC 51142
MKYISSLTSRQYQSTTMVQPKQQKSTTRQHSRQRRLMGWGKLITSGLFLQLLLIAGPGWGQEEKEQYSYSELLNDINAGKVTEVEIDPRLQKATVSFKNQEKTEEVALLKQNPELINSLKANDVKIDYSPSPDNSAMVRLMLQIPLLLLILFVVIAIVRRSANVSGQAMSFSKSRARFQMEAKTGISFTDVAGIDEAKEELQEVVTFLKEPEKFTAIGAKIPKGVLLIGPPGTGKTLLAKAVAGEAGVPFFSISGSEFVEMFVGVGASRVRDLFKKAKENAPCLIFIDEIDAVGRQRGVGYGGGNDEREQTLNQLLTEMDGFEGNTGIIVIAATNRPDVLDKALMRPGRFDRQVMVDYPDFKGRQGILEVHARDKKIDSEVSLEAVARRTPGFTGADLSNLLNEAAIFTARRRKEAITMTEINDAIDRVVAGMEGTPLVDSKSKRLIAYHEIGHALVASMMTGHDPVEKVTLIPRGQAKGLTWFTPDEDSGLVTRNQLLARIAGLLGGRSAEEVIFGDDEVTTGAGNDIEKVTYLARQMVTRFGMSELGLLALEEDDQDNYAAFDEIATKVDTQVNLIVEKCHEKAQTIIRENRAMVDQLVEILIDQETIEGDEFRQLVEKFKQPIDSGPELCKSV

SEQ ID NO: 14737 - protein, 342 aa, Cyanothece sp. ATCC 51142
MQFIDRAEIEVEGGKGGDGIVAFRREKYVPAGGPAGGNGGKGGSVVLKAEENLQTLLDFRYARRFKADDGKRGGPNNCTGAMGKDTIVEVPCGTVVYDLETEEILGDLVKNGQTLCVAQGGKGGLGNKHFLSNQNRAPEYALPGLEGEHRNLRLELKLLAEVGIIGLPNAGKSTLIASLSAARPKIADYPFTTLVPNLGVVRKPTGDGTVFADIPGLIAGAHEGIGLGHEFLRHIERTRLLLHLVDVTSADPIADYEVIQQELTAYGRGLSDRPQIIALNKVDACDQDTLDLIAEELQQLSQSEIFTISAVTKTGVEELLQAIWHRLDQATSNHQDSSLPLV

SEQ ID NO: 14738 - protein, 637 aa, Cyanothece sp. ATCC 51142
MGKVVGIDLGTTNSCVAVMEGGKPTVIANAEGFRTTPSVVAYAKNGDLLVGQIAKRQAVMNPDNTFYSVKRFIGRKHEEVTNEATEVSYKVIRDNNGNVKLDCPAQSKQFAPEEISAQVLRKLLEDAGKYLGEKVTEAVITVPAYFNDSQRQATKDAGKIAGIEVKRIINEPTAASLAYGLDKKSNETILVFDLGGGTFDVSILEVGDGVFEVLATSGDTHLGGDDFDKKIVDYLAADFQKNEGIDLRKDKQALQRLTEAAEKAKIELSSVTQSEINLPFITATQEGPKHLDMTLTRAKFEELCSDLIDRSRIPVEKAMKDAKLSNSDIDEVVLVGGSTRIPAVQELVQKLLGKEPNKGVNPDEVVAMGAAIQGGVLAGEVKDILLLDVTPLSLGVETLGGVMTKIIPRNTTIPTKKSEVFSTAVDGQSNVEIHVLQGEREMAKDNKDLGLFRLDGIPPAPRGVPQIEVTFDIDANGILNVTAKDKGTGKEQSISITGASTLPDTEVDRMVQEAEANASADKERREKIDRKNQADSLVYQADKQLNELGDKVPAGDKTKAEGLIKDLKDAIAQDNDDQIKSLTEELQQLLYSIGSSVYQQAGGAPGAAPGGDAGTPPGGGSSDGGDDVIDAEFSESK

SEQ ID NO: 14739 - protein, 525 aa, Cyanothece sp. ATCC 51142
MAKVLVSDPIDQVGIDILSQVAQVDVKTGLPPEELVKIIPEYDAMMLRSGTRVTKEIIAAGTQLKIIGRAGVGVDNIDVPAATRQGIVVVNSPEGNTIAAAEHALAMMLSLSRHIPEANQSVKNNKWERKRFIGAEIYKKTLGVVGLGKIGSHVANVAKSMGMKLLAYDPFISKERADQLGCTLVDLDLLFAESDYITLHIPKTPETTHLINKEALGKMKPTARIINCARGGTIDEDALAEAIAEGKIAGAALDVFEEEPLGESKLRNYDNIILTPHLGASTAEAQVNVAVDVAEQIRDVLLGLPARSAVNIPGLTPDVMEKMRPYLQLAETLGNLVGQLAGGRIERLTVRLQGELASTKGQPIVVASIKGLLSQALRERVNYVNAAIEAKERGVRIIETRDASIRDYSGSLHLSAQGSLGEHSVTGALLSDGEIRITDVDGFPINVPPSNYMLFTVHRDMPGIIGKIGSLLGSFNVNIASMQVGRKIVRGDAVMALSLDDPLPEGLLTEITKVSGIRDAYTVKL

SEQ ID NO: 14740 - protein, 491 aa, Cyanothece sp. ATCC 51142
MLNLKVFNYTIGEFQDKTLTPDQIKREWIIGRATTCDLVLATPEVSRVHGRIGYDQGQYYFSDLGSTDGSRVNHETAMVNQRYALKPDDIIRIGDFVLAVQGMEKNLETTISNHKILETNVASWTQEDLTVKCIRIIEETEDVKTFSFVAEPAISFAYQPGQFVTLNLNIDGKPVKRAYSISSTPTRPHLLEITVKRVPSPPNAPHVPPGLVSNWLHDRLKVGDQIQLSGGPMGKFTCAKDSNPKLLLISAGSGVTPMISMARWLYDTAGKQDVVFVYCGRRCSDIIMAQELQLMAARNPHFHLAISLTQPDPGQPWLGYRGRLSEQMLSTMVSDFRERSVYVCGPDGFMKGVKTLLGNMGLPPENYHEESFGVGKKQAKVTSPVKLQGSGEQGEGEKIEKPSSKPAIAFIESGKTVTCDGQESILEVAQQEGINIRSGCMQGVCGACKKRKRKGNIRYEGEPDGLDQQEQEEGFILPCIAYAVDEIEIEA

SEQ ID NO: 14741 - protein, 349 aa, Cyanothece sp. ATCC 51142
MLKKPYLILITLLLTMPLTACGGGGETPDPTTATTSRLDTIKQRGTLICGVNGEVPGFSFVDENGQYSGLDVDICRAIAAALFDDPEKVEYRKLSAQERFPAVQSGEVDVLNRNTTWTISRDTTNGMEFAPTVFYDGQGIMVTTASGVADMEGLAGKSICVLAGTTTEQNLADQMRKRGIEDYNPVTFEDVDALYAAYQEGRCEGVTADRSQLVARRSILPNRNDHAILNVVLSKEPLGPAVKNNDSAWFDAVKWITFSLIQAEELGINSQNIATFETSEDPNVRRFLGLDDKLGEGMGLPNDFAARVVKHVGNYGEVYERNIGEPLGLDRGPNNLWTEGGLLYSPPFR

SEQ ID NO: 14742 - protein, 336 aa, Cyanothece sp. ATCC 51142
MVNEINYQSTQQLSLFLNQDHKDMIKPSPVLKWAGGKTQLLPAIKKQYPQQLQQGKIKTYIEPFFGGGAVFFDIYSNFKIEKAYLFDKNPELIILYKVIQNNVEDLIKELSILETQYLDLNNEQRKEFYYKVRDDYNKLDKKIDANDYKKEWIKRAAYTIFLNKTCFNGLYRVNTKGYFNVPMGRYKNPKILNEKNLLAVNQAFKIAEIKHTDFAEVLKCSNNSTFIYYDPPYRPISETANFNAYSSLEFNDDEQRRLKDMFVKISSQGALQMLSNSDPTNYVDDPFFDKLYQDFNISRILASRMINSKGGKRGKIREILVTNYENKKIRNPLANT

SEQ ID NO: 14743 - protein, 432 aa, Cyanothece sp. ATCC 51142
MTVKIGLLGLGTVGTGTAQILLDPTGRNPLLQDINISKVGVRSLDKPRQVQLAPGVITTDLETVVNDPEIAIVVELLGGIEPARSLILQAIAQKKHVVTANKAVIARHGDEIYSAANEAGVYVLLEAAVGGGIPIIKPLKQSLGANRISSIIGIVNGTTNYILTKMTSAGADFAEVLTEAQQLGYAEADPTADVDGLDAADKIAILASLGFGGRVKREDVYCEGIRQVSAADITYADQLGFVIKLLAIAKGAEGEISEQLQLRVHPTLVPKDHPLANINGVSNAVLVEGSPLGQVMFFGPGAGAGPTASAVVSDIMNIVAILKSSGLTTTLDPLLSCVHQHFCQITPIEAINTRFYARFLTKDLPGVIGHLGTTFGNHQVSLESVVQIGFQGELAEIVVVTHYVCEGNFRTALDEIRTLEAIDSIPSILRVL

SEQ ID NO: 14744 - protein, 503 aa, Cyanothece sp. ATCC 51142
MKSSLVILYHREPYDEVVENGQVRYLPKKSPNGIVPTLKSFFADDNNQGTWIAWKQVSPEQKNQFNKNVVVEDDGNYRVSRIPLTAEQVRDFYHVTSKEAFWPILHSFPYHFTSESSNWDNFVKINRLFAEAACEEAADDALIWVHDYNLWLAPQFIREKKPDARIAFFHHTPFPSVDIFNILPWREAIVDSLLCCDVVGFHIPRYSENFVNVARSLRPIDIVEKTKVTGHITPVGIALAEPEATTKLKYKNQIVKVDAFPVGTSPQNILDVLRTPEAEAKVAEIKETLQGRKLIIAAGRVDYVKGNKEKLEAFERLLERRPELHGKVNFIMTCVQAATGMQVYQEAQREIEYLVGKINGRFAKFDWIPIRLSTQPIPLLDLFCYYRAADICWTTPLRDGLNLVAKEYIVAHEGKDGVLVLSEFVGAATELPQAILTNPYSIKLMDEAIDQALDMSPEEQQEKMAKMYETVTKYDVKYWSDRLLNYFAKMTREFVDDKEPALN

SEQ ID NO: 14745 - protein, 276 aa, Cyanothece sp. ATCC 51142
MKNKSLILVLITLIFCSIFPSFALAETVLEKIKRTGELNAGVRKDAIPFGYVNQRGKWTGYSVDLIHLIHKRLEKDLNQSIKLNLREATIDSRFRIVQRGDVDIMCGATTITQTRSKRVDFSVPFFMTGAQFLVKLEDAPNFDYNGSLNNIPIAFLPGTTTQEIIPQIYPSANWKNIKNREEGVRKLKRDEVKAVVSDGILLLGEIVQQGNNIEDFVLLPSQPITRELYGCILPQKNPQWKQFVNVTILSPENRILQKEWFSINSGEFPYIIENNN

SEQ ID NO: 14746 - protein, 288 aa, Cyanothece sp. ATCC 51142
MNIAVFGIGLMGKPLAKRLLQANHSVIVYNRTISKAQELEPFGAKIAQTPLEAIQTADILILMLTDAKAIREVLLSPETADKLQNRTIIQMGTIAPNESRSIQKDVEKQGGQYLEAPVLGSIPQAKDGTLLVMVGAKPSQFEEYKPILQQFGSQPEYIGEVGTASALKLALNQLIASLTSGFALSLGLIERQGVDVDKFMGILRESALYAPTFDKKLDRMQQRNFDNPNFPSKHLLKDVNLFLNQAEENGLNTEVLQGIRSIIQQAIELGLSDSDYSALFSAINTEKH

SEQ ID NO: 14747 - protein, 332 aa, Cyanothece sp. ATCC 51142
MNQKPKVVITHWVHPEIIDYLTPHCELILNQTKETLTREEVINRSKDAQGLMVFMPDYIDVNFLEACPQLKVISGALRGYDNFDVEACTKRNIWFTIVPDLLAAPTAELTIGLLLILARRMVEGDRLIRSGNFQGWKPQLYSTGLLNKTLGIIGMGKLGKALTKRLMGFDMTLLYHDKITLTSQQERDWKITKTSLEELLTKSDYVVLMVPLVPDTYHLINENSLKMMKPNSFLINPCRGSIVDETAVATAIKSGHLAGYAADVFEMEDWAIANRPQSINQTLLTDINHTFFTPHLGSAVNEVRRDIALEAAKNIIEVLSENRPQGAVNGIV

SEQ ID NO: 14748 - protein, 314 aa, Cyanothece sp. ATCC 51142
MNENLDLGNLSTIPIAPEGFKSGFVGIIGRPNVGKSTLMNQLIGQKIAITSPVSQTTRNRLQGILTTDKAQIIFVDTPGIHKPHHTLGKIIVKNAKTAINSVDIILLVVDSSVKSGGGDRYIIDLLKTVNQPVILGLNKSDQQTEKYQEIDESYANLIQDHNWPMIKFSALTGDGVETLQNTLIEQLEPGPYYYPPDLITDQPERFIMAELIREQILQLTRQEVPHSVAVTIEKVEESPKITKIFAAINVERSSQKGIIIGQKGNMLKAIGTTAREQIQKLIAGEVFLKLFVKVEPQWRQSNLRLAEFGYRVEE

SEQ ID NO: 14749 - protein, 390 aa, Cyanothece sp. ATCC 51142
MIQLATRVTQVTPSLTLAITAKAKEMKAQGIDVCSFSSGEPDFDTPQHIKEAASSALAQGKTKYGPVAGEPGLRQAIAHKLNQDNQLNYSADHIIVTNGGKHSLFNLMLALIDKGDEVIIPAPYWLSYPEMVKLAEGTPVIVNTTAETDYKITPEQLRQAITSNTKLLVLNSPSNPTGMVYNHEEIKALAEVVVDHNLWVVSDEIYEKILYDGTEHISIGSLGEEIFKRTIISNGFAKSYSMTGWRIGYLAGPGDLIKATSTIQSHSTSNVCTFAQYGAIAALESPDSPQCLQKMLDAFTQRRQVILERIRSIPKLSCPTPMGAFYVFIDISQTGLNSLEFCDGLLNKQQVAAIPGKAFGADNCIRLSYATDLASIEKGMDRIEKFVTTL

SEQ ID NO: 14750 - protein, 300 aa, Cyanothece sp. ATCC 51142
MMKKKFVLLALTLLLMATSQSPSWAGEILEKIKQTGVITAGTRKDAIPFAYVNEEGEWVGYSIDVLEIIRQDIEKKLGKPIQLKLVEVTPQNRFDKVKNREIDIECASSTFTWERDEVVDFSVSYFASGTKIFRKKGSDLGTIDSLAGRRIGVIPNTTNEQAIKLQQPAAILVPIKDRTEGLEKLNNGEIEAIAGDGIVLQGLRLENGNADKFEVVPEFPYMYEAYACMIPEDESAWRGMVNYSLVKFMEGIISDQPQQVEIYERWFGEETGVTPYSREAINDYFQGIVDGYEWIPLISY

SEQ ID NO: 14751 - protein, 497 aa, Saccharomyces cerevisiae
MLKSTATRSITRLSQVYNVPAATYRACLVSRRFYSPPAAGVKLDDNFSLETHTDIQAAAKAQASARASASGTTPDAVVASGSTAMSHAYQENTGFGTRPIYLDMQATTPTDPRVLDTMLKFYTGLYGNPHSNTHSYGWETNTAVENARAYVAKMINADPKEIIFTSGATESNNMVLKGVPRFYKKTKKHIITTRTEHKCVLEAARAMMKEGFEVTFLNVDDQGLIDLKELEDAIRPDTCLVSVMAVNNEIGVIQPIKEIGAICRKNKIYFHTDAAQAYGKIHIDVNEMNIDLLSISSHKIYGPKGIGAIYVRRRPRVRLEPLLSGGGQERGLRSGTLAPPLVAGFGEAARLMKKEFDNDQAHIKRLSDKLVKGLLSAEHTTLNGSPDHRYPGCVNVSFAYVEGESLLMALRDIALSSGSACTSASLEPSYVLHALGKDDALAHSSIRFGIGRFSTEEEVDYVVKAVSDRVKFLRELSPLWEMVQEGIDLNSIKWSGH

SEQ ID NO: 14752 - protein, 698 aa, Cyanothece sp. ATCC 51142
MTNSIYISTLEPRSGKSLIALGMIELILRKTTKVGFFRPIIQDSIDHKPDKHIDLILSYFKLPQSYDDSFGLYYSEVNHLMEQEKLDEILDKIISKYKKLEENCDFIVCENSDYVGENSAFAFEINVAIAKTLGCSLLILGNGYQKSLQEISISLKIVADAYREKHCRILGIIINKVSSSDRKNLENHLEKTYRKNNYLFSVIPYDKKLDSPRMKEVAEQLKAKVLYGEKRLNNLVFNYLIAAMQMQHAITQLQDNDLVVTPSDRGDVIIGALQAHQSTNYPNLAGILLTTECELEKSIGRLIGGLSDPLPILWVDTYTYPTASRLQTVDSSLKAGDIEKINWSIELFDQSVNLTMLEHLINKIEVEGITPKMFTYNLIQKAKLNKRHIVLPEGKDPRILKAVATLLSQDIVDITVLGEKKRIERTIQSHGIQLDINNLKIINPLSSPKLDDYIKTLYELRKHKGITLENAKDMLMDVSYFGTMMVYSGDADGMVSGAIHTTGNTIRPALQIIKTKPEYQLVSSVFFMCLGDKVLVYGDCAINPNPTAEQLAEIAVISAETAQTFGIFPRVALLSYSSGESGTGEDVERVKQATILAQKRRPDLLFEGPIQYDAAVDKTVAAQKMPDSEVAGQATVFVFPDLNTGNNTYKAVQRETGAIAIGPILQGLKKPVNDLSRGCTVEDIINTVVITAIQGSDN

SEQ ID NO: 14753 - protein, 470 aa, Cyanothece sp. ATCC 51142
MVDQIGIIITFIFFLLLFTGVGTYSATKKQATTTDYLLASRQVNPWLTALSAMATGQSGLLFIGQVGFAYNIGISAIWLIIGWAIGDYLAWLFVFKPLREQSEATASDTVSSFLGKNIKGYRLIALFSAIITIIFLGSYAAAQLVAGSKALNAVFGWNYNLGIIVGTVIVVIYCFSGGIRASIWTDALQGILMLGSLLLLLAIAIIQCGGFSNLWASLKQIDPNLTNFSPQSLPLGFIPFLIGWIVAGFGVVGQPHIMVRAMAIDSPKNIAFARNLKLSLGLTNSFSALGIGLTARVLLPELLTSGDPELALPYLSLELLPVVLVGLILAGLFSATMSTADSQILSCSAALTQDVFPGMSQSYNFAKIGTLTVTAVILVIALAGDNNVFALVTFAWSALASGLGPLLLVKVWQQPVNTITAIAMMVIGIATALTWNLVLNLSSVVYEVLPGMVAGMAVYGIYRSLYSFKT

SEQ ID NO: 14754 - protein, 382 aa, Cyanothece sp. ATCC 51142
MDNALLVQLIGISGYIIYITTSAGVYGIFALGLNLQWGFTGLINFGVVGFMTLGAYTSVLLTLTGVPFVLAVLAGAILAAILGLLIGLSTLRLREDYLAIVTIGVSELVRLVALNEEWLTKGALGLRQYPLPLNIEATFPIKLSLIAILTILAIYAEWTLYKSLIDEWKQNKEIQGKSYQPRKPLSLIIWGVIATTLILLVYITGITSLSFYTYKAGLMVLVLLILALTYGCLEFLVNSPWGRILKAIREDEEIPRALGKNVLLYKLQSFMLGGAIAGIAGAFFAWQLTTIYPDKFDPLITFNTWIIVVLGGSGSNAGTILGAIIFWAYDSLTRFLLPQLGILSPSQAGYFRIMIIGLILMILMVWRPQGILGKKEELTLGR

SEQ ID NO: 14755 - protein, 504 aa, Cyanothece sp. ATCC 51142
MNHLLKMVSTRTTKDVPSWQPLKAVARSFSPYWIACIPLAAIITIVLNKAVVAQDVEVDIFALTEATPEAIIQLQGTLNAIWVLIAAILVIFMNAGFGMLETGFCRHKNAVNILAKNLIVFALATLAYWALGYSLMFGGPENPIIGFGGWFLSGEPATYGLDPFPIGLPVSVAFLFQAAFAGTAATIVSGAVAERIKFTDFLIFSLLLVGISYPITGHWVWSGGWLGSLGFSDFAGSTVVHSVGGWAALMGAAILGPRMGKYVDGRPQAIPGHNMSIATLGCLILWIGWFGFNPGSQLAADSAVPYIAVTTNLAAAAGGVAATFVAWAKDGKPDLSMIINGILAGLVGITAGCNGVSYWGAVIIGAVAGVIVVYSVSFIDSVLKIDDPVGAISVHLVNGMWGTLAVGLFNTESGLFYGGGIGQLINQIIGIVAIGAFTVAFSAIVWTVLKATMGIRVSAEEELNGLDIGEHGMEAYHGFVKEPDGFGGAGSHSINDDIPTGAGM

SEQ ID NO: 14756 - protein, 402 aa, Cyanothece sp. ATCC 51142
MNTILLDIRQTIIIAILVLYLGKYLTKKIKFLQNFNIPDAVSGGVLASLVFGLLYAVFQVEIEFALNIRDLFLIIFFTTIGLSSKLKTLLQGGKPLLILLAIAVSYLFLQNLTGLGMAALMGLERPIGILSGSVSLSGGHGTAIAWSPIFAETYNIANALEIGIASATFGLVLGGIVGGPIAKWLIVKHRLNTKDQDENLTIGIKHQEKDVIIDYNTMLNSLLVIGITIGLGIQINYLSTLIGLRLPDFVTCLLAGIILTNTIPLLFKRFPWPSDTPSLALISDVSLGLFLAISLMSLQLWTLLDIGVSIAVVLLTQLIVCIIYTIFLVFPVMGRDYDAAVICAGYSGLTLGATPTAIANMTAVTAQFGGSSQAFIIVPLVGAFFIDIVNAFVIQRFLTLIS

SEQ ID NO: 14757 - protein, 544 aa, Cyanothece sp. ATCC 51142
MENNKSIGNYLIERLLQLGVNHVFGVPGDFVLGFNKLLEKSELEFINTCDEQGAGFAADAYARLRGLGVVCVTYCVGGLKIANTTAQCFAEKSPVVVISGSPGVNERTKNPLLHHKVKEFDTQYKVFQEITVASTVLDNPDTAYSEIERVLTAALRYKRPVYIEIPRDMVNVTLGADNQPSSNNSSSNPDALQEALEEAVNLINQAQHPVILAGVEIHRFKLQESLLKLVEKTNLPVAETLLGKSVINEMHPNNLGIYEGAMGKEFTRKYVEESDCVIALGTFLSDVNLGIFTAKLNPQSFIDVNSEKTSIHFHNYEDISLVDFLNGLLNADLKHRQVDLPSRFLLPTNFSVKPGEKITVQRLFERLNLFISNDMIVIADVGDALFAGADLVVHQKSRFLSPAYYASLGFAVPASIGAQMANSTLRPLVLVGDGAFQMTGMELSTIVRYGLNPIIIVLNNLGYGTERPMQDGKFNDILLWNYSQLPTIFNAGKGFDIRTEDELELGLEKSQTYTEGFCILDVHLDPQDSSLALKRLTKALREKV

SEQ ID NO: 14758 - protein, 259 aa, Cyanothece sp. ATCC 51142
MTVATANHSFNATLQDLIEYPTHGINSKVLLKDNNSQYSLFCLAAGTEIDEHTSTRNAVITVIEGKGNLNLEGKDIPLTRGVFVFMAANAPHAVQAQENLAFTLALSEHLPAKKGVSQKTIDIVKSTAPVIKQHGQKITTRMYEIMFDTHPEVKAQFDMSAQANGTQPAKLATAVYSYATHIDDLESLKAMVDKIAHRHVQTHVLPEQYPIVGECLLQAIKDVLGEAATEEVMTAWAKAYQALAEVFINREQQIYQNAS

SEQ ID NO: 14759 - protein, 243 aa, Cyanothece sp. ATCC 51142
METHKEKILVVDDEASIRRILETRLSMIGYDVVTAADGEEALDIFHEAVPDLVVLDVMMPKLDGYGVCQELRKESDIPIIMLTALGDVADRITGLELGADDYVVKPFSPKELEARIRSVLRRVEKNGAPGIPSSGVISIASIKIDTNKRQVYKGDERIRLTGMEFSLLELLVSRSGEPFSRSEILQEVWGYTPERHVDTRVVDVHISRLRAKLEDDPSNPELILTARGTGYLFQRILEPGEEP

SEQ ID NO: 14760 - protein, 501 aa, Cyanothece sp. ATCC 51142
MCGIAGIWGKTSQSNIEAMMESIVHRGPDANGIFVVPDGSGILGHQRLSIMDVEGGDQPIYGDGKKAIIGNGEIYNYPQLFSDLESKYQFVTKSDTEAILHLYDDKNITAIPELDGMFSFAIIDNNKFIAARDPIGIKPLYYSEKDGNFWFASELKAITQFCEDVKEFPPGTFFSSETGFSTYYNLPDISPDIDANVDDIVKEIQETVQASVVKRLMADVPLGAFLSGGLDSSIIAAIAKKHKSELHTFSVGVEGSKDINAARLVSDYLGTIHHEYLITPKEAIAKLPEIIYALESFDQDLVRSAIPCYFTSRLAAQYVKVILTGEGADELFAGYTYYKDITSDAILHTELRRSVSSLHNINLQRVDRLTMAHSIEGRVPFLDLKMIELGQKIPAHLKLRGNPPVEKWILRKAFEDILPDEIVWRKKEQFDEGSGTVDLLVDTLKDIMSEEQAQTYQKQHSHINLRSAEECYYHQIFMDVFDNPTAILNNVARWADRPVLV

SEQ ID NO: 14761 - protein, 215 aa, Cyanothece sp. ATCC 51142
MRIMIYLDSAIIKDVETAIKYGWVKGITTNPTILAKSNLSPEETLRKLANLSPGELYYQLTATEAETMIAEAQKAYELIGEKTVLKIPATTIGFQVTASLSPKIPCAVTAIYSSAQAAIAKEAGAKYAIAYVNRATRLLGDGLALVNNMAKVLEGSDTEILAASLKSPEEAAAALKAGAHHLTIPLDILTAMTTHELSEKTVIEFNEKGQGIEVK

SEQ ID NO: 14762 - protein, 550 aa, Cyanothece sp. ATCC 51142
MGEMNTAELLVKCLENEGVEYIFGLPGEENLHILEALKDSSIQFITTRHEQGAAFMADVYGRLTGKAGVCLSTLGPGATNLMTGVADANLDGAPLVAITGQVGTDRMHIESHQYLDLVAMFAPVTKWNKQIVRPSITPEVTRKAFKLAQSEKPGAVHIDLPENIAALPVEGWPLTRDSQEKTYASYRSLNAAAMAISKAKNPLILVGNGTIRAHASEALTEFATTLNIPVANTFMGKGAVPFTHPLSLWTVGLQQRDLITCAFEQSDLVIAVGYDLIEYSPKKWNPEGTTPIIHIGMTPAEIDSSYIPLVEVVGDISDSLMDILKRADRQGKSTSVAAGLRSDLVREYEKYAHDEGFPVKPQKIIYDLRQVMGPEDIVISDVGAHKMWMARHYHCDTPNTCLISNGFAAMGIAIPGAIAAKLVAPDKKVVAVTGDGGFMMNCQELETALRAGTPFVTLIFNDNGYGLIEWKQINQFGQSSFIKFTNPDFVKFAESMGLKGYRVESADDLVPTLKTALEQGVPAVIDCPVDYQENIRFSQKAGDLSCQIWE

SEQ ID NO: 14763 - protein, 492 aa, Cyanothece sp. ATCC 51142
MICIQSIKKINIRFFTTMLTQNQLSTQNPSEFTNWGKTIISHPKIVVKPKTLDDLILIIRDTQTYPSPIRAIGSNHSTTQCAVADGGTVVDMTGFNQILEINTEAKTVTVQAGALYLDVAEELRKQGLQFFVNVELGNLSMGSAACGGTKDASMPGEFGQVCSYAISLKMVTPQGKPIEINEEQPELLRIARSSYGLLGIVYEVTFKVRPARPMALRHKVYQLEEFICALPNMINRPLEQQESIMLYLFPFLDEVAVEFRQYQEEGKTSGSLLWDLRNWTWSSLAPGLSYLLTRLMPIKTFRYGLIDQFNQKVQLVMEKILKNPSGTSATDQIIRYPDESDWKKYTFSIWAFPEAEYPAILRAYFEFCRNYYKEQGYRCNMLNVAYRILQDDSSLFSYSSDSNVMTLDPVSTGDPGWGDFITAYNEFCSQYGGVPLFNQTRGITPQQVEKAFGDRLATFEQYRQQYDPHDRMLNQYFRDRLQGTLISSQQNA

SEQ ID NO: 14764 - protein, 1560 aa, Cyanothece sp. ATCC 51142
MTCMDERTIMNMTQNTHNQPNATYMGIPSLVEERDACGVGFIADVKGNGSHKLIQQTLTALSCMEHRGGCSADNDSGDGSGIMTAIPRELLGDWFEANGLTMPPVEQLGVGMVFLPQDSSKRQEERSHVETVVKRANLTVLGWREVPVNPDVLGVQAKENQPHIEQIMVTSGEGLSGDDLDRVLYIVRSQIGKRLADDFYICSFSCRTLVYKGMVRSAVLGEFYQDLNDPNYISRFAVYHRRFSTNTMPKWPLAQPMRLLGHNGEINTLIGNINSMATREVKLTVPGWKAEELEALTPIVNTANSDSYNLDSTLELLVRTGRSPLEAAMILVPEAYKNQRDLKDYPEITDFYDYYSGFQEPWDGPALLAFSDGKMVGACLDRNGLRPARYCITKDDYVVVGSEAGVVDLPEADIVEKGRLGPGQTIAVDLTTQEVLKNWDIKQRIAQTHPYGEWLQHHRQNITPQAFADQILLTESGQLLQQQTAFGYTAEDVEMIVVPMATQGKEPTFCMGDDIPLAVLSDKPHLLYDYFKQRFAQVTNPPIDPLRESLVMSLEMLLGSKGNLLDPQPEDAKLLKVESPVLNETELEQIKTSDFNTTELSTLFDIKTGPDGLKAALERLCNQATQAVEKGAKILILSDRFSGVGSINETNSYIPPLLAVGTVHHHLITQGLRLETSLVVDTAQCWSTHHFACLVGYGASAVCPYLTLETIRQWWSDPKTQKLMANGKLETITLEDALGNYRHAVEAGLLKILSKMGISLLASYHGAQIFEAIGLGMELVDMAFKGTTSRVGGLNIAELAQEIIAVHSRAFPSLTDKKLKNFGFINYRPGGEYHMNSPEMAKSLHKAVKAYKIGENGANAEAYDHYELYQKYLEERPITALRDLLEFKGDQPSIPVEEVEPVEAIVKRFCTGGMSLGALSREAHETLAIAMNRLGGKSNSGEGGEDPTRFITLSDVDESGNSATFPHLNGLRNGDTASSAIKQVASGRFGVTPEYLMNGQQIEIKMAQGAKPGEGGQLPGKKVSPYIAMLRRSKPGVTLISPPPHHDIYSIEDLAQLIFDLHQINPSAKVSVKLVAEIGIGTIAAGVAKANADIIQISGHDGGTGASPLSSIKHAGCPWELGVTEVHRMLMENKLRDRVILRADGGLKTGWDVMMAALMGAEEYGFGSIAMIAEGCIMARICHTNNCPVGVATQQEKLRKRFTGVPENVVNFFYFIAEEVRSILAKLGYRSLDEVIGRSDLLKMRKNANLTKTQSINLDCLLNLPDVKSDRSWLNHEDVHSNGPVLDDELLADAAVSSAINTHGRVSKNVKIVNTDRTVGARISGTLAKKYGNTGFSGELKFNFTGAAGQSFAAFNLPGMIMYLEGEANDYVCKGMHGGEVVIVPPKDATYKAADNVIVGNTCLYGSTGGVLYANGRAGERFGVRNSMGKAVIEGAGDHCCEYMTGGVIVVLGSVGRNVGAGMTGGLAYFLDEDNNFPEKVNPEIVEIQRICTEAGEAQLKGLIEAHFERTGSKKAEHILNNWGEYVGQFWQVVPPSEANSPETNPNPVMVEEKTLTPAK

SEQ ID NO: 14765 - protein, 761 aa, Cyanothece sp. ATCC 51142
MGVTKMGSLGEDALEYHRSGRPGKLEVNGTKPFITQRDLSLAYTPGVAEPCRHIHQDSEQVYDYTTKGNLVAVATNGTAVLGLGNIGPLAGKPVMEGKAILFKRFADIDVFDLEIDAYDPDQFIATVKSLEPTFGGINLEDIKAPDSFYIEETLKKTMKIPVFHDDQHGTAIITSAALLNALKVAKKSIETVKVVYCGAGAAAIACAKLHLTLGVRPEHLIMCDRKGVIYEGRKEDMNPYKALFASTTKARTLEEAVKDADVFIGLSVKGALSVSMLQSMAENPIVFALANPDPEIEYDEAKNARFDVIMATGRSDYPNQVNNVLGFPFIFRGALDVRATDINETMKIAAVKALAKLAHEEVSYTVLRAYGLKELSFGRDYLIPKPFDHRVLFWVAPAVAQAAIDTQVAKKSLNLDNYKESLEQRMGISKEIIRHSIQKAKTNPKSIVFPEGDNPKILKACQILIEERIAQPILIGSVDKIKQKITELGLELDNVPIIDPLNFSERDYYIQELFALRQRKGMTLTQAKQSVLDPTIFALLIVQLGQADGMVAGVSQAYPSILRSALQIIGTKAEVNCASGVYLMLFKHRVYFFADTTVNIEPTAEILADIALESATLAKRLDIVPRIAMLSFSNFGSVKHPLCDRVKNAVQLVKMRQPDLIIDGEMQADTAVNPTLVAEHYPFSEIKGNANILIFPDLQSGNIAYKLLHELGGAEAIGPILLGMKKPIHILQRGCQINTIVNMSAIAVLDAQDLENHSYAN

SEQ ID NO: 14766 - protein, 400 aa, Cyanothece sp. ATCC 51142
MGRAKKVVLAYSGGVDTSVCIPYLKHEWGVDEVITLAADLGQGDELGPIQAKALKSGAVESLVEDATAEFVTDYAFKAIKANALYESRYPLSTALARPLIAKLLVEAAEKYGADAVAHGCTAKGNDQVRFDLGILALNPTLKVLAPAREWKMSREQTIAYGEKFGLDFPVKKSSPFSIDRNLLGRSIEAGPLEDPMTEPPEEIYLMTKAIADTPDTPEYVEIGFEKGLPVSLNGQTLDPVTLISQLNDVVGKHGVGRIDMIENRVVGIKSREIYEAPALLVLIDAHRDLESLTLTSDVTHYKKGVEETYSHLIYRGLWYSPLKESLDAFIDHTQERVNGTVRIKLFKGNANIVGRQSDYSIYSPNLATYGEDDHFDHKAAEGFIYIWGLPTRVWAEKTKG

SEQ ID NO: 14767 - protein, 493 aa, Cyanothece sp. ATCC 51142
MTISSDSFFARQDTTPLIDVLTTLKNKPDAAFYVPGHKRGQGISDPLLSLLGETVFQADLPELPELGNLFAPDEAVAKAQILASEAFGADQTWFLVNGSTCGIIAAIVATCGPGDKVIVPRNAHQSVIMGLIVSGAVPIFLNPEYDPTWDLALSITPKALEAALKEHSDVKAVLLVYPTYHGVCGDIESIVAITHRYNIPLLVDEAHGAHFNFHKALPPSALSMGADLSVQSTHKVLSAMTQASMLHLQGDRIDPQRVSQALQLVQSTSPSYLLLASLDGARQQMALQGERLLTQTIELSKLAVEKIKEINKLSVLELKEKRPGFHDLDITRLTVNVTGLGITGLEVDDIFREKLEVTAELPMLSHLAFIISIGNTKQDIYKLIDAFTNLNNYFFSSSNCLFSSSSHLLNPSPWKLSPRDAFFSPKKSVKIEQSIGKISGELICPYPPGIPVLMPGEMITSEAITYLRQIQQLGGMISGCTDTTLKKINVVID

SEQ ID NO: 14768 - protein, 480 aa, Cyanothece sp. ATCC 51142
MTISFENLGLSEARINQLQTLGFESPTEIQEKAIPLLLEGHDVLGQSQTGTGKTAAYSLPILEQIDTRNSNVQALILTPTRELAQQVAEALKDFSTERRLYILTVYGGQSIERQIRSLERGVQIVVGTPGRVIDLLERKKLVLDSLRWAVLDEADEMLSMGFIDDVKTILRKTPDARNTACFSATMPREIRDLVNQFLKSPVTVSVERTQAAPTRIDQHLYMVPRGWSKRKALQPILEIEDPESAIIFVRTKQTASDLTSKLQEIGHSVDEYHGNLSQSQRERLVHRFREGKIKLVVATDIAARGLDVENLSHVINYDLPDNSETYIHRIGRTGRAGKTGTAISLVEPIDRRMVRQIEKRLRQKLETCKLPSRSQVEAKRLEKLQNEIKESLAGERMASFLPLVRELSDEYDPQAIAAAALQMIYDQDCPDWMKTDWEVPESTVPKPVIKRKGKYNSNHSKHNGNSNRGNRKIVTHQQSR

SEQ ID NO: 14769 - protein, 619 aa, Cyanothece sp. ATCC 51142
MVSSIAKITSPLAETPQRRTGAYALIDSLVRHGVKHIFGYPGGAILPIYDELYRAEARGDIQHFLVRHEQGASHAADGYARATGKVGVCFGTSGPGATNLVTGIATAHLDSIPMVVVTGQVGRAAIGSDAFQETDIFGITLPIVKHSYVVRHAEDMAKIVAEAFHIASTGRPGPVLIDVPKDVGLEECDYIPVEPGQVKLPGYRPTVKGNPRQINAALSLIETSERPLLYVGGGAIAANAHAQVQELAERFQIPVTTTLMGIGSFDEHHPLSVGMLGMHGTAYANFAVSECDLLIAVGARFDDRVTGKLDEFASRARVIHIDIDPAEVGKNRLPEVPIVGDVRQVLEQLLQRSREIDVPLDAEKTTPWLNRINRWREQYPLVAPHYDHRISPQEVIVEVGRQAPHAYYTTDVGQHQMWAAQFLNNGPRRWISSAGLGTMGYGMPAAMGVKVALPEEEVICISGDASFQMNLQELATLAQYNIAAKTVIINNGWQGMVRQWQQTFYGERYSSSNMQTGMPDFELLAKAFGVKGITVTEHSQLAGAVAEMLAHDGPVLMDVHVKRDENCYPMVAPGKSNAQMIGLPELKSSELMTELIRCTYCGTDNPVTNKFCPECGTKI

SEQ ID NO: 14770 - protein, 599 aa, Cyanothece sp. ATCC 51142
MALIVQKYGGTSVGSVERIQTVAQRIQKTVQQGNTVVVVVSAMGKTTDTLVSLAQEITANPSRREMDMLLSTGEQVTIALMTMALQEIGQAAISLTGAQVGIVTEAEYSRARILSIKPDRIKRHLDKAEVVVVAGFQGISSRENLEITTLGRGGSDTSAVALAAALKASFCEIYTDVPGILTTDPRIVPEARLMDEITCDEMLELASLGAKVLHPRAVEIARNYGVRLVVRSSWSDAPGTSVISPIPKPRSLEGLEIAKAVDAVEFDGEQAKIALLRVPDRPGIAARLFGEIAHQQVDVDLIIQSIHEGNSNDIAFTVINNVLTKAEAVAEAIAPALRTTPSNVTEAEVMVETGVAKISIAGAGMIGRPGIAATMFKTLAEANINIEMISTSEVKVSCVVAKEDGDRAIKVLCEAFDVELSPNPVASQAVEVSPPVRGVALDQKQAQIAIRHVKDKPGMAASIFGVLAENNISVDTIIQSQRCRILDGMPTRDIAFTVCEGDAKAACQVLSSLSDGFDEVIVDEDIAKVSIVGAGMVGQPGVAAKFFGALATENINIKMIATSEIKISCVVPKEQGVKALKAVHQAFELAGIEKVEVSA

SEQ ID NO: 14771 - protein, 260 aa, Cyanothece sp. ATCC 51142
MLNALTRKLVSMLIIGVIFNLGNSNLIAATLEEIKQRGKLIVAVKDNVRPLGFRNQNNQLQGLEIDLAKQLAQDILGDPQAIILQPVQNQERLQKVIDGEVDLAIARITINSSRGRLVNFSPYYYLDGTGIITNNPRIRAVDHLSQGKIALLKRSSTIAVIRAELPQAELIGVNSYQEALTLLETEQVDAFAADNSVLAGWVQAYPQYYQLPVRLSGEGLGVVMPKGLQYASLRSRVNEAIGRWKASGWLANRLKYWGLP

SEQ ID NO: 14772 - protein, 556 aa, Hevea brasiliensis
MGCCSSKEKPSKSEANKGYRLGGTGNLRQNQQQQSYYQQPEYQQQQAVQHPKMTVPQTQTQTPQTRPQQPQASTPPPVRAAPTNLTARSVQTPRTILGKPLEDIKQYYSLGKELGRGQFGITYLCTENSTGHIYACKSILKRKLTNKGDREDIKREVQIMQHLSGQPNIVEFRGSYEDRQSVHVVMELCAGGELFDRIIAKGHYSERDAARICKDIVNVVHACHFMGVMHRDLKPENFLLASKDEGAMLKTTDFGLSVFIEEGKTYRNIVGSAYYVAPEVLRRSYGKEIDIWSAGVILYILLSGVPPFWAETEKGIFDAILEGYIDFESSPWPSISDSAKDLVRRMLTQDPKRRITSAQVLDHPWIKDGGAASDKPIDSAVLSRMKQFRAMNKLKKLALKVIAENLSEEEIKGLKAMFTNMDTDKSGTITYEELKTGLARLGSRLSETEVKQLMEAADVDGNGPNRLHEFISATMHRYRLERDEHLYKAFQYFDKDSSGYITRDELEPAMMEYGMGDEASIKEIISEVDTDNDGKINYEEFCTMMRSGVQQPGKLF

SEQ ID NO: 14773 - protein, 548 aa, Cyanothece sp. ATCC 51142
MENNNSIGNYLIKRLLQLGVNHVFGVPGDFVLGFNKLLENSELKFINTCDEQGAGFAADAYARLKGLGVVCVTYCVGGLKIANTTAQCFAEKSPVVVISGSPGVNERIKNPLLHHKVKDFDTQYKVFQEITVASTVLDNPDTAYSEIERVLTAALRYKRPVYIEIPRNMVNVTLGANNKPSTNNSSSNPDALQEALEEAVNLINQAHHPVILAGVEIHRFQLQESLLKLVEKTNLPVAETLLGKSVINEMHPNNLGIYEGAMGKEFTRKYVEESDCVIALGTFLSDINLGIFTAKLNPQSFIDVNSEKTSIHFHNYENISLVDFLNGLLNADLKHRQVNLPSRFLLPTDFSVKPGQKITVQRLFERLNLFISNDIIVIADVGDALFAGADLVVHQKSRFLSPAYYASLGFAVPASIGAQMANPNLRPLVLVGDGAFQMTGMELSTIVRYGLNPIIIVLNNLGYGTERPMQDGTFNDILLWNYSQLPTIFNEGKGFDIRTEDELELALEESQTYTKGFCLLDVHLDPQDSSLALKRLTKALREKVYATI

SEQ ID NO: 14774 - protein, 408 aa, Cyanothece sp. ATCC 51142
MINILVLNAGSSSQKSCLYCLDEKELPQETQKPIWSANIDWTATSNQGVFNVKANGIKQHLTLESNDHHQGIRQMLDTLIQGKTKVIDNFSAINLVGHRVVHGGTNYSEATLINSDVKATITELIPLAPTHNPAHLEGIEIIESILNNIPQVAVFDTAFHSQMPLENAAYPIPYQWLEKGIRRYGFHGISHQYCANRVAELMNQPLSSLKLITCHLGNGCSLAAIKNGISIDTTMGFTPLEGLMMGTRGGSIDPAILIYLMREHNFQAEELNHLLNQESGLKGISGISSDMRAICQGIKEGNQRAKLAFDMFIHRLHSCLGSMLTSLGGLDALVFTAGIGENSTIVREKACEALSFLGLELDLFKNNDSPVGVDISSSDSSIKVFVIQTQEDWAIAQSSWQLYNSLSH

SEQ ID NO: 14775 - protein, 64 aa, Cyanothece sp. ATCC 51142
MAQGQVKWFDTQKGYGFIAQQDGGEDLFVHYSEVQSQSLEEGQTVEYEVGQGRKGPCAVNVRTI

SEQ ID NO: 14776 - protein, 469 aa, Exiguobacterium sibiricum 255-15
MPIIEALCAHVERNATSWHVPGHKNGTLFEGLPSFFEWDKTELRGLDDFHYPEEAIYEAKLLLRQVYEARDSHFLINGSTVGNWAMLAAVSQRGDRIYVQRNSHKSVFNALEWLGLSPILLGPEIDPSTGISGNVSRETLEEALTTFPGGVAVFLTSPTYYGETARIEELLPFTTASGIPLLIDEAHGAHFGEAFGVRSAFELGATAVVQSAHKTLPALTMGAWIHERFTDDERRRLTRALQAFQTSSPSYLLMASLDFAREYREKWTVSNMKSVRTSHEHLHQQINQLTDITAFTFDDWSRMILSCEEYSGSQLIEALADQGLDAEFALGPHVVCILPLRSIEPFEQDTWINQIQLAIETLKAEGIPDKRYMEQPFMGKIKVSSLACPLDQLEDAEAVEQTFEQSVGLVSLETIIPYPPGIPLILRGERITAEHITMIEHYINTSIHLQGGEFLHQGKLRVIQEGIRE

SEQ ID NO: 14777 - protein, 318 aa, Exiguobacterium sibiricum 255-15
MSTVLEHEIRIFALNSNKPLAEEIAKVIGIPVSESSVKHFSDGEISMNIEESVRGDDIYIIQSTSQPVNENLMELLIMIDALKRASARTINVVIPYYGYARQDRKARSREPITAKLVANLLEVAGATRVVTMDLHAAQIQGFFDIPVDQLMGVPLLASYFEKKNIDPNELVIVSPDHGGVTRARKLAEQLKAPIAIIDKRRPKPNVAEVMNIVGQVDGKIAIIIDDIIDTAGTITLAANALIENGAKQVYACCTHPVLSGPAMERIENSAIEELVVLNTIDLTQRECASKIKQISVARLLAEAIIRVHEQKSISPLFS

SEQ ID NO: 14778 - protein, 668 aa, Exiguobacterium sibiricum 255-15
MNRAVKNTLVFGVIFLALILFLQYLQSPVNKSKEINYTQFVESVEKGDVKTATFQYEGQTYNVTGELREKDTTYETVVPAVDTELTDLYTQLRSQNVKMDFKAAETNGGWIALLTTIVPFIIIFILFFFLINQAQGGGGGGRVMNFGKSKARLYDTEKKKITFDDVAGADEEKQELVEVVEFLKDPRKFARLGARIPKGVLLVGPPGTGKTLLARAAAGEAGVPFFSISGSDFVEMFVGVGASRVRDLFENAKKNAPCIIFIDEIDAVGRQRGAGLGGGHDEREQTLNQLLVEMDGFSENEGIIMIAATNRADILDPALLRPGRFDRQITVERPDVVGREAVLKVHARNKPLDTTVDLKAIAQRTPGFSGADLENLLNEAALIAARTDRDKISIVDLEEAIDRVIAGPAKKSRIISPKEKKIVAWHEAGHTIIGVTLDDADEVHKVTIVPRGNAGGYVIMLPKEDRYFMTKPELEDKITGLLGGRVAEDIVFGEVSTGASNDFQRATGLARKMVMEFGMSEKLGPLQFGSGQGGNVFLGRDFQNEQNYSDAIAHEIDMEIQAIINKCYQKAKTILTEKRDQLDLIATTLLEVETLDQKQIHHLLETGEYKKHEPAAITEPKAEEKTPESTTPVIDQPTESPTQRGSVIDEGQNVDTENPDQPRRDDQI

SEQ ID NO: 14779 - protein, 460 aa, Exiguobacterium sibiricum 255-15
MKEHPTELRRDLKTRQLTMIAMGCAIGTGLFLGSGLAISLAGPSVLVSYAIGAFIVLLLMGCLAEMTVAHPTSGSFGTIAEKYIGPYAGFLVRYSYWVANVLAIGVEVSAIAIYMKYWFPDVPGYIWIFVFAAALIYINATTVNTFATFEYWFSVIKISAILMFMILGAYLVFGSSSPEIGPQNFTNDGGFMPFGFSGLWIAVFISLFSFLGTELIAVTAGEAKDPDVAVPKALKATVFRLSTFYVITIALMLMIVPWQQAGGVDESPFVKVMEMLSIPGAAGIMNFIVLTAALSAMNSQLYASTRMMYSLSKATYAPRMFSRLNAKGVPLFALAVSTLGIFLAAVISSQSSVSYPFMMGISMFGAIFTWFMIFISHLYFRKAWERDGGRKLPVRMMGYPYLTALGALLLFALVITTWFTDFQIVLKFGIPWLIFLTIAYVFWKRNHPPQADQTNRSQSL

SEQ ID NO: 14780 - protein, 477 aa, Exiguobacterium sibiricum 255-15
MSLTRKKDVSAMIAASQRNSGLARNLGAMDLTFLGIGAIIGTGIFVLTGTGALTAGPGLIVSFILSAIACGLAALAYAEFASTIPVSGSVYTYTYATMGEIFAWIIGWNLILEYGLASSAVAAGWSGYFQSLLGGFGIHLPTALSAAPGAVEGAKTFFNLPAFLILLAITGLLSMGIKETKRVNNIMVIIKLAVVVLFIVVGVGYVEPTNWAPFTPFGWGGVFSGAAIVFFAYIGFDAVTSAAEEVREPQKNLPRGIIGSLAVCTVLYVIVAAIMTGIVPYQKFAGVDHPVSLAIQMAGQNWVAGFIDLGAILGITTVILVMTYGMVRLAFAISRDGMFPKVFSEVHPKYKTPFKATWMIGLGSATVAGLVPLDVIANLVNMGTLAAFVLISVAVLILRKTQPDLPRAFKCPGMPYVPIAAIASCLFLMFNLKLETWIAFFIWLAIGLVLYFAFARKNSNLEPGNMPAAELAASDDK

SEQ ID NO: 14781 - protein, 328 aa, Exiguobacterium sibiricum 255-15
MQLFEMLETKVKAHQPTIVFPEGIDARVLGAAVRLKKDGLVTPIVIGPRGQIEETASANNIDVADLETIDPASYEGIEELVASFVERRKGKATEEQARALILKDVNTFGTMLVHTGKAEGLVSGAMHATGDTVRPALQIIKMQEGYKKTSGVFIMVRDDEQYVFADCAINIAPDANDLAENAIASAKTAKTFGIDPKVALLSFSTKGSAKSPETERVVEATCLAKERAPELSIDGELQFDAAFVPSVAKSKAPESDVAGQANVFIFPSLESGNIGYKIAQRLGGFEAIGPILQGLNKPVNDLSRGCNEEDVYKLAIITAAQAVEERQA

SEQ ID NO: 14782 - protein, 458 aa, Exiguobacterium sibiricum 255-15
MKQQTELNRGLEERHITLMSLGAAIGVGLFLGSAKAIQLAGPGILIGYLIGGLIIFIIMRALGELAVREPVSGSFAEYARKYVSPLAGFLTGWNYWLLWIFTCMAEITAVGIYMQEWFPNSPTWMWALGALILMTSINFIAVKFYGEFEFWFALIKIVAIVAMIILGTLTIVIGFGNGGTPVGISNLWSHGGFLPNGFGGVLLAMQMVMFAFLGIEVIGVTAGEAKNPKKTIRKAVNNVFLRILVFYIGALFVILSIYPWDQVGQNNSSPFVLLFDSLGIPAAAGIINFVVLTAALSSCNSGIFSTARMMMNLSQNQEAPKRFAKISKNGVPALATILSGVALLVGVALNYFLPDDVFAIVTSIATFGAVWTWAMILIAQMRARKVHGSAEFGVPFFPIANYLALAALVGVIVLMAFDAGTRIALIVGPLWYVILIAVYYARGMHKQKRQPLDRASGE

SEQ ID NO: 14783 - protein, 518 aa, Exiguobacterium sibiricum 255-15
MENKRKSKITNVFIISVIFCVLFTIWGILPESLIGAANLGNVTGIAQSFVSNGFGWLYLFGMSAFLLIAIFLIFSRFGSIRLGKDSDRPEYGLISWFAMLFSAGMGIGLVFWGVSEPLTHFHTPPVATNDLTDAAPLAMRYSFFHWGLHPWALYAVVALAIAYSTFRKGRPATIGDTVASLMKPKYEAAGKGTVEVLAIVATAFGVATSLGLGAQQISGGLHFLVDGIPNSFMTQLIIILVVSVLYMMSAASGLDKGIVRLSNANIVLAILLMVGVLFLGPFSFIMDLFVQTTGAYLQNLPTMSFRASAFNPDERGWINDWTIFYWAWWISWSPFVGTFIARVSKGRTIREFVLGIMLVPTIFGLLWFSVFGGSAIWNELFNNVDLISTVNEKGVETGMFALFETFGGLGTFLSIIAVFLITTFFITSADSATYVLGMLSSGGSLLPSLRIKLTWGIIQSSIAAVLLYSGGLSALQAAAVLAAFPFIFVVGMMVIALFMDLSNEPDAAKSADQLKKEA

SEQ ID NO: 14784 - protein, 290 aa, Exiguobacterium sibiricum 255-15
MRFDEAYSGKVFIASQPTHEDAKGVLYGMPMDWTVSFRPGSRFGPARIREVSLGLEEYSPYLDGDIADAKLFDAGDIPLPFGNAQKSLDMIEEYVDSLLTAGKFPLGMGGEHLVTWPVVKAFDKHYEDFVVLHFDAHTDLRDSYEGEPLSHSTPLKKIANLIGPENCYSFGIRSGMKEEFEWAKTSGYNLFKYEIVEPLKAVLPKLAGKKVYVTIDIDVLDPSAAPGTGTQEIGGVTTKELLEVVHMIARADVDVIGADLVEVCPAYDQSDMTAIAAAKVLREMMIGFIK

SEQ ID NO: 14785 - protein, 541 aa, Exiguobacterium sibiricum 255-15
MNAAERFVQCLEAEGVTHIFGVPGEENITLLEAISKSDITFITTRHETNAAFMASMFGRLSGRPGVCLSTLGPGATNMMTGIASATMDHSPVVAITGQGATWRQHKASHQMFDLVEMYRPITKSSTSIVSGEVISEVVRQAFAKAVSEKPGSTHLSFPEDIAKADVDAKMSFLQDSPPTFLHPTSVADSDVLLRIEQAERPVVIAGFGINRSGATEAFRAFAERLGAPVVETMMGKGALSSLHELAAHTIGLPNADYNQRILDQSDLIIAVGYDITELPPSKWNPERTPVLHIDTNPHEIDQFYPVVANLIGSIPDILHLLSESIPNRAWTGWQQDRDRLRQEIQATYSLALPLHPQSIVRELEQATGEDGMIFSDVGAHKIWLGRHFQTTRPNQLFISNGFSSMGYGLSSAIAAKLLHPEQRVLCASGDGAFLMNGQDLETAVRLKLPIVVIIWRDGTYGLIEWKQQQAYGRAPYIEFDNPDLVQLATAFGALGLRVGEHGTLSSCLEQAFLSDGPVLIDCPVDYRENLKLSDRLRTYGG

SEQ ID NO: 14786 - protein, 462 aa, Exiguobacterium sibiricum 255-15
MSLLRKKDVSVMMDQKSHSKLARHLSGFDLVLLGIGAIIGTGIFVLTGTGALYAGPALPVAFIISAIVCALAALCYAEFSSMIPVSGSVYTYTYATIGELVAWIIGWCLILEYGLASSAVATGWSGYFQSLLSGFGISLPTALTAAPGAVPGSETFFNLPAFLILMVITLLLSMGIKETKRVNNIMVLVKVAVVVLFIVVGIWYVEPGNYTPFAPFGISGVLQASAIAFFAYLGFDAVTSAAEEVKDPGRNLPIGILGSLAIVTVLYVVVSAIMVGIVPFKQFEGVDSPVSLALKVAGQDWVAGFVDLGAIVGMTTVILVMTFGLVRLLFAMSRDGLLPKIFSDVNEKSHTPVKATWILGTTAGLIAGFVPLGTLAELINIGTLAAFALISIAVVILRKTRPDLKRAFKVPWVPFLPILSVLACIMLMLNLQTFTWIAFFIWTAIGLLVYFGYGRSRSKLQQ

SEQ ID NO: 14787 - protein, 402 aa, Exiguobacterium sibiricum 255-15
MRRVAIIDAVRTPIGRYNGALKDVRPDDLGACVIQALVDRNPNVDPKQIEEVIFGNANQAGEDNRNVARMSGLLAGLPVEVAGTTVNRLCGSGLDAVIAAARAIAMNEGDIYIAGGTESMTRAPFVMGKPETGFARGNPTLYDTTIGWRFVNEKLQGMYGTDSMPETAEHVATRYGISRETQDDFAFSSQQRAKQAMETHRFQTELVPVRYTTRKGQVIEVDTDEHPRPDTSREKLGTLKSLFPNGTVTAGNASGVNDGAAALLLMSEETAEHLGLTPLAYYRASAVAGVEPAVMGIGPVDATRKVLKRAGLTVEQLDLIELNEAFAAQSVACMNELGLPPEKVNVNGGAIAFGHPLGASGARILTTLIHEMCRTNQTYGLATMCVGVGQGIALIVEREELT

SEQ ID NO: 14788 - protein, 341 aa, Exiguobacterium sibiricum 255-15
MIRQAVLQYIHEEQAVDRLSELLRGRKAVLIHGEQALKSSEQYLPELPKLLFSGHCTDQQVIELTEQCAAYEMIIALGGGSVIDTAKQVAVKRNYPLIVIPTIVSNCAPWTPLSVMYDERGRYLRFDTIPVVIEALLLDYRILAASPYDYFVAGLVDTLAKWYEARALSGSTSDHPVVESALRMAEHCKRLILQTPISPKQFQEYSSPIQHLVETVIPLAGSVGGFGDEATRGAIGHGVHNALSPFPSTNRILHGSKVGYGLLIQELLLDETVFYNELLQYLMENKQPTTSTALGLTEAERADLAQRIGREPLCQLIETDWSKATVLSTLMKNDREAVLIP

SEQ ID NO: 14789 - protein, 401 aa, Exiguobacterium sibiricum 255-15
MTKQKLILAYSGGLDTSVAIKWLSKDYDVVALCMDVGEGKDLSVIKEKALLVGAIESIVLDVKDEFANDFVLPALQYGAHYEGAYPLISALSRPLIAEKLVEVAHAQGATAVAHGCTGKGNDQVRFEVSVAALDPSLEVIAPVREWKWSREEEIAYAKENNVPIPINLNSPYSIDMNLWGRSNECGVLENPWTEPPQDAYALTVAPEDAPDQAEEVIIGFEAGVPVSINGTAYPLAKLITELNIIAGAHGVGRIDHVENRLVGIKSREVYECPGATVLLKAHAALETITLTKDVAHFKPILSKQYAETIYNGLFHAPLTKGLKAFLTATQQDVTGEVRVKLYKGNATVTGRQSAVSLYDEKLATYTKEDAFDHEAAKGFIKLHGLAISTHASVHRQEGVKK

SEQ ID NO: 14790 - protein, 399 aa, Exiguobacterium sibiricum 255-15
MTTVLKFGGSSVATVEQIQSIANYLKNRTEQGEKLVVVVSAMGKMTDSLIAQAQAITDRPERRELDRLLAIGEEQTISLLSIALNSLGIKALSQTGAQAGISTMGLHTKSKIKQIDGELLRKKLETYDVIIVAGFQGVNELGDVTTLGRGGSDTTAVALAAVLDKRCEIYTDVDGVYTADPRIHATAQPIPHISYDEMMEMSALGSKVMEMRSVELGKKYGVHIFVGKTLESERGTWIMEATETMEQKAVTSVSVTKNVLTVSIKHVPQTNSAVADIFELLSGRHVNIDMISQTTFDSDIFLSFSCPLDEEEFLEEALQDIINRFPTVKVDRHNQHAKLSVVGIGMRDATGVASKLFATFRAENITFYQVTTSEISISYTIAQADIERTVAAIAKAFDL

SEQ ID NO: 14791 - protein, 278 aa, Exiguobacterium sibiricum 255-15
MNEVEALEGLRKKAVKSTQMLRMRPLEYLVRAMLAGVFIGFAIIFTLKAINGLYLNESPVTTLVGGLTFGVALVLIVYGGAELFTGNTMYFTTSTMRGFTSKMDTLKVWTLCFIGNGLGGLAFALLFSQTGIIQELGMENWLFAVSETKIHHTTWEIFTRAIFCNWMVCLAIFIPKNMKNELAQIMMMMILVAVFFASGFDHVIANMALFSLALVVPHPEAISFAGAIHNLVPALLGNIIGGALFMGMVYTWLNKSKLEVEQSNEQAATINIASKQKA

SEQ ID NO: 14792 - protein, 324 aa, Exiguobacterium sibiricum 255-15
MTTLVSMKQTQEAITLVKKRFEEQFSAQLGLTRVEAPLFVESTLGVNDHLNGTERVIRFDAIDHQAELEIVQSLAKWKRQALHTYGFAKGEGLYTLMHAIRRDEVLDETHSIHVDQWDWERVISKEERTIDYLQKTVQAIYASIRQVEREVEEQLAIEAILPETIHFMTTQELEDAYPTLSTKERETEVTKEYGAVFLMQIGGALASGEKHDGRAADYDDWTLNGDILVHHPEIGAFELSSMGIRVDRETLLAQIETTGEHAKLDFPFHQGVLAETLPLTIGGGIGQSRMAMFLLKKRHIGEVQASVWSEETRASYREQGVHLL

SEQ ID NO: 14793 - protein, 595 aa, Exiguobacterium sibiricum 255-15
MGKAKQKQLKKKGSIRRYMEFVKPYKKQILLTVFVGIIKFSIPLGLPLLYKYIIDNLLDNQTVPLAERSKELAYLIGAGFFVFLVIKPPLEYIRQYLAQWSASKILFDVRNRLFDHVQKLSLRFYSNTKTGEVISRIINDVEQTKDFVVTGLMNLWLDMITILIAIAIMWTIDPKLTLVAIIPLPFYALAVKFFYGRLRSLTRDRSAALAELQGHLTERVNGMAVIRSFALEPHENQAFKKQNDGFLTAALRQTNWNARTYVVVSTITDFAPILIFGAAAFLVLNGQESLGTMVAFIAYIDRLYAPLGRLVNSSTTLTQSIASMDRMFEFLDEPYDITEKANARNPVHVKGNVQFENISFSYEEGGERAIDRLTLDVQAGERIAFVGMSGGGKSTLVSLIPRFYDVSSGRITLDGVDIRDLKLRGLRDQIGMVMQESILFSESVEMNIKMGNPEATDEEVIAAAKAANAHEFIERLPDGYKTPVGERGVKLSGGQKQRLAIARVFLKNPPILILDEATSALDLESESMIQDSLARLAKGRTTFTVAHRLSTITDADKIVVIENGQITEMGRHEELMRKRGAYFELYAIQNLELVE

SEQ ID NO: 14794 - protein, 431 aa, Exiguobacterium sibiricum 255-15
MKLEEMLVSVDTFYVLFATLLVFTMQIGFLLLETGMLRAKNAGHVAVKQLISFSVAALAFWAIGFGLTFGDGPGLIGTEGFFLHGGFSSLDWSNVTIDVKFLFQLSFVAVSLAIAWGGFAERAKLSVYLLFGTFFVAVIYPIIARSVWAGGFLGSLGMQDFAGSTVVHLQGGIAALVAALILKKRIGAEKTPLLGHNVIYSVVGAFILWLCWFGFNAGSTLTIADGFFSYVALTTLLATAAGALGALAISFWHRRVADIPSIINGVLAALVAITAACAFVEPWGAVVIGFLAGVITYATSILLARRVDDPLCAFSVHGVAGIWGTLATGFFASPRLVEITGIGQAGLFYGGGFTQLGVQALGVVFAVVVVSVLSYVFLKLLDVTIGLRITREDELRGLDVAEHGQASYDLPAPVSKESHPTYEEESTEKVN

SEQ ID NO: 14795 - protein, 374 aa, Exiguobacterium sibiricum 255-15
MRLNTHMEEINCAGCGVAIQTEDPKAPGYAPKSALDREMVICQRCFKLKHYNQIQDVALTDDDFVKILDGIGQKDALVVKIVDIFDFNGSWLPGLHRFVGKNDVLLVGNKADLLPKSLNPNRLMNWMRQTSKELGLRPVDVHLISAKKGHGVDELAEKIDYYRKGRDVYVVGCTNVGKSTLINQVIKRFGEEEEAVITVSHFPGTTLDLIDIPLDDNCNLYDTPGIINHHQMAHYVDARDLKLITPKKEIKPQVFQIHPQQTLFFGGLARLDYMEGNKRSFVIYMSNDLKVHRTKLDKADDLYANHNGELLSPPNEKTLEMLPPLVRHEFSLRDNMKTDIVFSGLGWVAVHGKGGRVAAYAPKGVAVSLREALV

SEQ ID NO: 14796 - protein, 302 aa, Exiguobacterium sibiricum 255-15
MFKEGFKSGFVSIIGRPNVGKSTFLNRVIGQKIAIMSDKPQTTRNKIQGVYTTDDVQTIFIDTPGIHKPKHKLGDFMMKVATNALREVDAILFMINVTEPKGKGDEFIIEKLKDLDTPIILVMNKVDLIHPNDIPPIIESYQNELNFAAVVPISALQGNNVEPLLQEISKILPEGPMYYPADQITDHPERFIISEMIREKVLQKTRDEVPHSIAVAIDQIKTREDGNMVDIHATILIERDSQKGIIIGKRGALLKEIGSEARTDIEMLLGTKVYLNLWVKVQKDWRNKAGQLRELGFRDDEY

SEQ ID NO: 14797 - protein, 475 aa, Exiguobacterium sibiricum 255-15
MKRIAVGAVIAVYMTVFSFSLWTYQHPVLTSSDQSKLLPTRVKQIRSATSTNDLKSWVAQAKQRQETVSVAGMQHSQGGQTYLPDTTVLDMTDYDRILAYTPDKHRITVQSGITWAEIQERIQPDGLAVQVMQSQNIFTVGGALSVNVHGRDIRYGSLLDTVDSFRLLKADGTVVHVSRNENADLFRLVPGGYGLFGIILDVTLKLTDDEWYTEQTVALDYHDYPAYFRQHVLGDADVRMHIGRISVAPDGFFKEMYVTNYHKAERTVPIEEEPLKQETIIALPKALLGLSRYSDFGKNKLWSFQKSYFLKQSGTYESRNNVMRSDSAFMEYISPGRTELLQEYFVPVDSFVSYIDQLRTILTTDELNVLNITIRYVEQDRTAALSYAKQDMFALVWLINTETDPASINETKRIVQKLIDATLEHQGSYYLPYYPFATRDQFTAAYPNAAAFKAAKQRQDPKGLFMNQFYLDYLK

SEQ ID NO: 14798 - protein, 570 aa, Exiguobacterium sibiricum 255-15
MLKRFYHYYIPHKRLFWLDFSSALFVGLLELAFPLAVKWFIDSLLPDGELNWIILVSVGLLGLYVISTLMQFVVNYFGHKLGINIETDMRRQLFGHVQKQSFRFFDNTKTGHIMSRITNDLFDIGELAHHGPEDAFIAVMTLLGAFSIMMTINVPLALVTIIAVPFLIWLISYANVRMNRSWDRMYGNIAEVNSRVEDSVSGIRVVQSFTNEAHEVARFEKDNATFRQSKINAYKVMGTSLSGIYLTTRLMTLAVLVVGAYLSYQNKLSYGELVGFILYMNILLKPIDKITALLELYPKGMAGFKRFLEMIDHDEELKDAPDAIHVSALRGAIRFDDVSFGYEAERLILKDISLSVEPGQTIAFVGTSGAGKTTICSLIPRFYDVTDGAITIDGIDIRQMTKTSLRQQIGIVQQDVFLFSGTIADNIAYGDLSADRADIVEAAERAHLGQMIADLPDGYDTEIGERGLKLSGGQKQRLAIARMFLKNPPILILDEATSALDTETEAIIQESLAELSKNRTTLIIAHRLATIRQADRILVVTKDGIVEDGTHEELVENGGYFARLLDRQRV

SEQ ID NO: 14799 - protein, 582 aa, Exiguobacterium sibiricum 255-15
MKPATFKSFLSLLKKSEPPIGLLSAAVTVSIIQALAALMIPWFLKSLIDNFSVDRLTPGLITLFIVIFIVQMISNAFSIYWLHIAGQRIVANLRTMLWKHLLALPIPFYDETKSGELVSRLNNDATTLQQLLSEQLVRLLTSIVSIVGAITILFFLDWQMTLVMVIAVPITLLIIIPLVRKLHQISRETQKELAGLSGFFAEMLGEVRLIKSQATEEYEMDRGQTRIENLYGFGVKEGKVQAILLPVFNVALTSMLIIIISFGAYRVATNQITAGELVAFSLYLFQIMTPLVTMTEFVSKLQKARGATERISELLEEQPETDGTRQVERPFAAVHFNQLSFGYDDTTLLHDVTFSLPRGQTTAIVGPSGSGKSTLFALLERFYQPTAGQIELGPHAINEFELASWRNSIGYVAQDSPVLSGTIRDNLLYGLTGEVTEQQIREAAEMANADEFIRSFAQGYETEIGERGVKLSGGQRQRIAIARALLRDPELLLLDEATSSLDSESERVVQEALERLMEGRTTFVIAHRLATVRHADQIVVLEQGRVSGIGTHDALVASNVLYNKLVTQQFIGQTETTRGSNR

SEQ ID NO: 14800 - protein, 396 aa, Exiguobacterium sibiricum 255-15
MSEQVVIVSATRTAIGSFNGSLKDVPATKLGATVIEAALAQANVAPALVEEVIMGNVLQAGLGQNPARQASLLAGLPESVPAMTINKVCGSGLKAIHLAFQAIKSGEAEIIVAGGMENMSQAPYVLSGARTGLRMGDQPLVDTIIKDGLECAFNDYHMGITAENLAEQYTISREAQDQFAATSQQKASQAIEADRFQAEITPVEIPQRKGDPVVFAEDEFPRAGTTAESLARLRPAFKKDGTVTAGNASGINDGAAAVVVMSARKAKELGLTTLVEIVANGTSGVDPSIMGIGPVKAVSQALHKAGLELDAIDVIEANEAFAAQSLAVDAELRFDPAKLNRNGGAIALGHPIGASGTRIMVTLIHEMLRTGESHGLATLCIGGGQGIATIVKKYEE

SEQ ID NO: 14801 - protein, 369 aa, Exiguobacterium sibiricum 255-15
MSERVFISPAKYVQGKNVIDRLGTYVSPIGDVALVIADDVVWKIVEERVHASFSAEGIKIEKADFSGEASKHEVERIAAQAKDAGVKFVMGVGGGKTLDTAKAVSDEFHLPVVIVPTIASTDAPTSALSVIYSDEGIFESYRFYNKNPDLVLVDTKLISEAPARFFASGIADALATWVEVRSVIAFGGTTMAGGRPTIAAEAIAKRCEEVLFEHGRLAYESVQAKVVTPALEAVVEANTLLSGLGFESGGLAAAHAIHNGFTALEGDIHHLTHGEKVAFGTLVQLALEEHPQEEIERYISFYMDLGLPVTLEDVKLKDASREDILKVGHAATAEGETIHSGFDVTADEVADAIIAADRYSKAYQAKLKN

SEQ ID NO: 14802 - protein, 454 aa, Exiguobacterium sibiricum 255-15
MESNLKRELTARQVQMIALGGTIGVGLFLGSSSTIAWTGPSVILAYMFAGAFIFLIMRALGEMVYTHPHTGSYAKFANDYIHPAAGFMTASSNIFNWVIVGMSEVIAVGAYMRFWWPDLPTWIPGVVVIVILTLANLASVKMFGELEFWFASVKVITIILMIIAGLGLILFGFGNDGTPIGFSNLWSHGGFFTNGFSGFFFALSIVFASYIGVELIGVTAGETKDPETNITRAINGVIWRILIFYVGAIFIIVTVYPWDQLADIGSPFVATFAKVGITAAAAIINVVVITAAMSGCNSGIFSSSRMIYTLAEKGQMPSLFLKVNKNGIPLYTVLAVSAGIFVGVILDIVLPLFLGKDTNIFVYVYSASVLPGMVPWFAILISHIQYRKIEADRIADHPFKMPGAPFTNYITIVMLLIVLVGMLFNDETRVSILIGIVFLILSGIYYIVRTPKSF

SEQ ID NO: 14803 - protein, 384 aa, Exiguobacterium sibiricum 255-15
MLTPSAITIIKSTVPVLAEHGHSITRVFYQRLFENHPEMKHIFNQSNQKNDRQSQALATAVYAAAAYIDQLETLKPTLLPVLHKHRSLQIKPYMYDIVGTELIGAIQDVLKDAATPDIIDAWTAGYGEIAKLFISLEAELYQQDEQATDFEGYQPFVIETMTTESSDIKAFTLRPADGRPLAPYQTGQYVTVRLQAPDGLWQNRQYSLTTVANGTSYTIGVKQDGSVSRQLHGLSVGEKVLLSAPAGSFTLTDASTPFVGLAGGIGLTPLLAMTEAALAVGRKTTLYVAVQDDLDRPFAEQLARFEEQGATIIRYAERNALPGTTPGRLSVADVTNIDPAADTYVCGPEAMIQFVRRYFSGQADKLHFEVFGPSLALEAPTAVS

SEQ ID NO: 14804 - protein, 66 aa, Exiguobacterium sibiricum 255-15
MEQGKVKWFNAEKGFGFIERESGDDVFVHFSAIQTDGFKSLDEGQEVSFEVEEGQRGPQATNVTKL

SEQ ID NO: 14805 - protein, 66 aa, Exiguobacterium sibiricum 255-15
MEQGTVKWFNAEKGFGFIERENGDDVFVHFSAIQTDGFKSLDEGQEVSFEVEEGQRGPQATNVTKL

SEQ ID NO: 14806 - protein, 1492 aa, Exiguobacterium sibiricum 255-15
MSFHQIPQRQGLYDPRQEHDACGIGVYAHRTGRASHEIVQNALNMLCQMEHRGGQGSDAKTGDGAGILTQIPDRLFRQALRNVHLPRSGDYGVMMMFLPREDRLRQRLERALESIILSEGQRLIEWRTVPVTNTVIGEKARQTEPVIRQCFIEANKVEGLAFERALFLIRRLFEREAEQLGIEQYVLSSSSETIVYKGLVTTDQLGLYFDDLQDERYQSGFAIVHSRFSTNTFPSWKRAHPNRYLIHNGEINTLQGNVRAMRSRENGLAKTTYGRRGKDVLPILDESGSDSSMLDNAFEFLYLSGLTLAETALMLVPEPFEHAEVRPAKRAYYEYHSSMMEPWDGPSAIVFTNGKQIGATLDRNGLRPARYMMMRDGHFMLSSESGVLPIAEHDILFKKRLVPGELLLLDFASGQLISDEEVKRELAMRHPYAEWLAEEMITLPADVRTEEVSNLGTLQRLFGYTREDIDQYLIPLVEEKKDPLGAMGTDIPLAVLSERPQSLFRYFKQLFAQVTNPPIDALREQIVTSTMTWLGQQGELLTPNRQNCRRIRLASPVLTPAEAAALKQTKLAHKTLSTVFDGQLEEALEALLEQAVHAVRGGCELLILSDRNVRPGAVPMPILLVTSAIHHHLIREGLRTKASLIIEGGEVREVHHFAALVGYGADAIHPYLVYATLQDAVDETMPDYAERYRSAVTEGVVKVMSKMGISTVFSYRGAQIFEAVGISEEVIDRYFTGTVSQLDGLTLALIEQEALRQHEEGVKRTRLESGSVFRYRHDGEHHAFNPATIHLLQHACRTGRYDLFKTYSSRIQEEPATFLRHLMSFRETTPIPLAEVEPVSEIVKYFKTGAMSYGSLSKEAHETLAIAMNRLGGKSNSGEGGEEEERYQLDENGDSRMSRIKQIASGRFGVTSDYLVHADELQIKVAQGAKPGEGGQLPGEKVYPWIARVRASTPGVGLISPPPHHDIYSIEDLAQLIHDLKRANDRARISVKLVAKGGVGTIAAGVAKGLADVIVISGHDGGTGASPKTSIQHTGLPWELGLAETHQTLALNGLRDRVVLETDGKLLTGRDVVIAAMLGANEYGFATAPLIAVGCIMMRACHLDTCPVGVATQDPKLREKFTGSADHVVHFMEFVAEEVREYLAQLGVRRLADLVGRTDLLQSSDRLKTHWKAASLDLSRLFVMPGYSPENRQYQEHHVSASFDGRELETLITDQSFTEQQTFTFPVTNTDRAIGTNTGSRLTRLYGAMGLPTDRLTLNLTGSAGQSLGAYIPRGMTLNVSGDANDYVGKGLSGGVIAVRPQAKSSFVSSDQVIIGNVALYGATSGELYVNGQAGERFAVRNSGATAVVEGIGNHGLEYMTGGSVVILGDVGLNFAAGMSGGVAYVLPKDVTRFEARINRELVVTGAVSDPEEATRLKTFIERHVARTNSEQGHAILANWDHVLSSFIRVIPSTYQAVTTLMAGYAQQGHNTEEAMLLAFETHIGRGTGGKQ

SEQ ID NO: 14807 - protein, 490 aa, Exiguobacterium sibiricum 255-15
MTQEWISISLYLVMMLAIGYIAYKRTTNTEDYMLGGRDLGPGVTALSAGASDMSGWMLMGLPGAMYATGVSALWLALGLLIGCYVNYLILAPRFRLYTEMANDSITIPDFLENRFKDTSCVLRTVSAVVIIVFFTFYTSAGIVSGGKLFESSFGFDYHYGMLLTIAVVVAYTLFGGFLAVSWTDFVQGCIMFIALVLVPVVALTDVGGIDGAYSYAENLDPTLFDPLKGTTFLGIIGFLAWGLGYFGQPHIIVRFMAIRSVKDLKNARRIGIGWMFISILGAMMTGLVGIACFKGQGNGLGDPETVFIRFSDVLFHPYITGFLMAAILAAIMSTISSQLLVTSSALTEDFYKTFLNKKATDKQLVLTGRIAVLVIAVIGSILAWNPSATILSLVGYAWAGFGSAFGPIILLSLYWKRMTKQGALAGMLSGAITVIAWVQLGLSDTLYEMVPGFFTSLLFTVVVSLLTKQPVESVQDTFDDMEEELKEAIE

SEQ ID NO: 14808 - protein, 203 aa, Exiguobacterium sibiricum 255-15
MKEIRLHDVKRVFASSTEQLPKNAAAVLVPLVERDGEVHLLFQVRAKTLRSQPGEIAFPGGRIDPGEQPRAAAVRETTEELNIRETEIEIIGTLEPLVTPNRSIIYPYLGILTAEDIQPSPMEVDHIFYVALADLLAAEPIQGEMEWRIRPGKTVPTDRLANRDAYVDRTYKTVEHFYEHEEYLIWGLTAKILRQMLRTLTQY

SEQ ID NO: 14809 - protein, 393 aa, Exiguobacterium sibiricum 255-15
MLSKRVQQLTPSTTLAITAKAKALREEGQDIIGLGAGEPDFNTPEFIIQAAFAAAEAGDTKYTPSGGTVALKDAIIEKTRRDLWVSYDRSEVMVASGAKHALSTLFQAILDPGDEVIVPAPYWVSYPEQIKLSDGVPVILETTEASRFKVTRDLLEQHITPKTKALVLNSPSNPTGMVYTKEELEMVAEVAIAHNLLVISDEIYEKLLYNGVTHLSIATLPDMRERTVIINGVSKSHAMTGWRIGYAIGPKDIISAMTNLASHSTSNPTSIAQAASVAAYAEGDAPVEAMRVVFEERLEQIYDRLIQIPGLTCLKPEGAFYLFPHALQAAKMCGFSNVDDWCTAVLSEAKVALIPGSGFGAPEYVRLSYATDPKRVLEALDRIEGFITAHTAV

SEQ ID NO: 14810 - protein, 127 aa, Exiguobacterium sibiricum 255-15
MLRTFMHAKLHKARVTEANLHYVGSITIDEDLLDAVGILENEKVQVTNNQNGARIETYAIKGARGSGVICLNGAAARHFQIGDEVIIMAYAQLTNEEIATHVPKVAVLDQENSIKQMLSQEIAHTIL

SEQ ID NO: 14811 - protein, 467 aa, Exiguobacterium sibiricum 255-15
MQLKREMTSRHLFMISLGGIIGTGLFLGSGLTISQAGPLGAVLSYIVGGTIMYLTMLCLGEMAVHMPVSGSFQTYTTRFIGPGIGFAVGWIYWLGWAVTVALEITAAGSLMDRWFPNTPIVIWCAIFTVILFGLNAVSAKAFGEAEFWFSSLKVLAILFFIALGGAAWFGWIDMTAARPESLFANFTSNGLFPNGALGVLTTMIAVNFAFQGTELIGVAAGESNDPEKSIPKAIRNTVWRTFIFFVLSITIVGALIPYETAGGISSPFIMVFDAIGIPYAADLMNIVVLTALLSVGNSGLYAATRMLWSMSQEGMISKKLAIVNSRGVPMRALCFTMLFAMLSLLTAFFAEDTVFIWLLSLAGLGAQVGWISISASQIAFRRQFIKNGHTVSELKFKTPFFPVLPIISFSLNMLVLISLAFQADQRIALYIGVPFFLLTWGCYHLFVKGKHIAAQTERQAASSTLES

SEQ ID NO: 14812 - protein, 495 aa, Exiguobacterium sibiricum 255-15
MQTKSLTQLDTPLFDALLAHAKRQPIQFHIPGHKNGQGMDPAFRSFIGQNALDIDLINIAPLDDLHHPKGIIKDAHQLAAQAFHADETFFSVQGTSTAIMAMIMSVVGPDDKILVPRNVHKSVMSAIVLSGAHPIFIHPEFDEMFGIAHGITPSAVERALSLHPDTKAVLVINPTYFGVAGDLESIVTLAHSKGIPVLVDEAHGVHIAFHDDMPLSAMQAGADLAATSVHKLGGSLTGSSVLNVRRGLVSPDKVQAVLSMLTTTSTSYLLLASLDCARRHLAINGEAMNRRALELATRMRMGLAKLPYLAVFGESDLHSSATFAFDPTKVLISVKGLGISGHLVEEFLRDEHRIEVELSDLNNILLIITSGDSEETIDALLAGMADLVERHRDTGAKTSSHSIVLPDIPALALSPRDAFYEETETIPLADAVGRISAEFMMVYPPGIPIFIPGEMITTDNLAYIKENIEAGLPVQGLEDHTLETIKVIQQSNAIR

SEQ ID NO: 14813 - protein, 376 aa, Exiguobacterium sibiricum 255-15
MMYFDHAATTPMRPEVLEKMTPYMLEQFGNPSSVHAFGRTGRAAIDTARRMMATELNAKPTEILFTSGGTESDNYAIIGAAMQYQSKGRHVITTRFEHHAVLHAFEELEKRGFDVTYLEIPESGIITEEALRAAVRPDTILVSIMFGNNEVGTVQPIAACGRFLREQQIIFHTDAVQVFAKSPIDVEAMQIDLLSASSHKINGPKGVGLLYIRSAVKLAPQSYGGEQERKRRAGTENVAGIVGFAEAVRLTATEREEQFEQYQLLRRTLLERLRSSTIEFEVNGTDGLPQVLNLYFPDVEIEPFLIMLDMRGIAVSSGSACTAGSVEPSHVLSAMYGENPRTKQSVRISFGRGNDLSQVELLAQGLIDVVKSFQNN

SEQ ID NO: 14814 - protein, 363 aa, Exiguobacterium sibiricum 255-15
MIYLDHAATTPMHPDAIEQYRDTAERFYGNSSSLHDTGEDALQLLEQARNKLMQWLGVTEGTIIFTGSGSEANYIALNHLLRQTNKTTVLTLKSEHDSVLLPLQRWAVHWQALDLKTTGEFDWDLFEQACTEEVGVVSIQQVNSETGFIFPIAAIAAFCRKKGILFHCDGIQGFLKNPVDLTDVEAYTISSHKVYGPKGLGAVYLRHPLFSPYYEAHHEFGIRPGTVDVPGIAAFMMACHRYLQENQQIQASSKRFRGMLKKRLPAAYYQIIESPQQLHSICAIHTKQRDGQFVLLALNRAGIAVSAGSACRAGENGPNSTLRAIGFDESAAHGLIRLSFGRMTTAEEVERCIDVLCSLEESD

SEQ ID NO: 14815 - protein, 431 aa, Exiguobacterium sibiricum 255-15
MFVDQVNIYVKAGDGGRGQVAFRREKYVPDGGPAGGDGGHGAHVVLEVDEGLRTLMDFRYKRHFKAVQGENGMSKGMHGRKAEHLVVKVPPGTVVYDDDTDAVIADLVHHGQQAIVAKGGRGGRGNSRFATPANPAPEHAENGEPGEEKYLKLELKMLADVGLVGFPSVGKSTMLSIVSAARPKIGAYHFTTITPNIGVVETEDSRSFVMADLPGLIEGASEGVGLGHQFLRHVERTKVIVHVIDMSGMEGRDPIDDYNIINKELADYNLRLTERPQVVVANKMDMPDAEANLEAFKEAFPDLEVFAISAATRQGLRDLLFRIADLVDATPEFGLEELEEKTATPRVVYGYEAPEAGFTVSKDEDDCFVIKGPRIEKLFTMTNFMREESIKRFARTLRQMGVDEELRKMGAIDGDVVRIRDFEFEFIESSF

SEQ ID NO: 14816 - protein, 102 aa, Exiguobacterium sibiricum 255-15
MYAIIKTGGKQVKVEAGQEIYVEKLNADVDSTVEFGEVLILGGDDVKVGAPLVEGAKVVATVIKHARAKKITVFKMKAKKNYRRKQGHRQPYTKVRIEKIEA

SEQ ID NO: 14817 - protein, 403 aa, Exiguobacterium sibiricum 255-15
MAKIMAVNAGSSSLKFQLLEMPNETMIAVGLVERVGKDDAIFTIKYGEGQKFTDVLPLATHKEAVELSLEKLMEFGIISSYDEIKGVGHRVLHGKEKYADSVIITEDVMQDIESYTELGPLHIPPNLIGIRAFQAILPNVPQVAVFDTAFHQTMPEENFLYSLPYEYYTEYGIRKYGFHGTSHKYVTERASELLGRPLQDLRLISCHLGSGASIAAVAGGESIDTTMGFTPLEGITMGTRSGSLDPALIPFLMEKTGKTAEDVLNVMNKESGIYGLSGLSSDLRDVQTAAKEGNHRSEMALRIFANRIHGYIGQYAAEMNGVDAIIFTAGVGENSDSIRERVLRGLEFMGVYWDPSLNNGARGEELFINYPHSPVKVIIIPTNEELMIARDTVRVGGLVEQNA

SEQ ID NO: 14818 - protein, 564 aa, Exiguobacterium sibiricum 255-15
MKEKQNSDSNDLVQKKTGADLVVDTLIEQGVDYIFGIPGAKIDSVFNVLQDRGPELIVARHEQNAAFMAQAIGRLTDKPGVVLVTSGPGASNLATGLVTANSEGDPVVAIAGAVTRADRLKRTHQSMDNQALFKPITNFSAEVQDADNIPEVLSNAFRTAETTSGAAFVSIPQDVGLNEANVTSFKAVEAPKLGIAPEEWIDETATLIEQAKLPVLLLGMRSSQPRVVQAIRALLERVSIPVVQTFQAAGTLSRELESNFYGRVGLFRNQPGDALLAEADLVLSIGYDPIGYDPKFWNQPSHERTLIHLDQMRAEIDHFYRPDRELVGDVAATINALSERLHALTLPASSTEFLHGLQQRLEERDIPPIVKDSPLTHPLYFMKTLREQIADDVTVTVDVGSHYIWMARHFRSYEPRHLLFSNGMQTLGVALPWAIAATLVRPGKKAVSISGDGGFLFSAMELETAVRLNAPLVHFVWRDSGFDMVAFQQEMKYKRKSGTSFGEVDLVKYAESFGAKGLRVNHPSELISVMEEAWQTEGPVIVDVPIDYSDNITLGKEVHLDQLN

SEQ ID NO: 14819 - protein, 396 aa, Exiguobacterium sibiricum 255-15
MKHLSERVERLAPSGIRRFFDLAGSMEDVISLGVGEPDFVTPWNVREASFAALEQGYTAYSANAGLVELRQEIKLYMQEKFSIDYRVADEIIVTTGASEGLDLAFRTLINPGDEVIVVEPAFVSYAPLIELAGGIPVAAACRAEDGFTIQPETIEAVMTERTKAIIFCFPSNPTGSVMTRDQLADLALLAKKHDLYVISDEIYAELSYEDEPTCFATLPDMRERTIVINGFSKAFAMTGWRLGFTCAPPAISQAMLKVHQYGMMCAPTLVQFAGIEALRSRHKTVPDMVRSYRQRRNYFVKALNDAGLPTHSPGGAFYAFPYIGGTGLTSEEFAEQLLLAERVAVVPGSVFGASGEGYVRASYASSIEQLQQAIHRINRFMQHLNQKQVELSNPSR

SEQ ID NO: 14820 - protein, 261 aa, Exiguobacterium sibiricum 255-15
MKASHLKIEDLHVAIDGKEILKGVNLEIKGGEIHAVMGPNGTGKSTLASALMGHPTYEVTSGSVTLDGEDVLEMEVNERAQAGMFLAMQYPSEISGVTNSDFLRSAINSRREEGDEISLMKFIRQLDAQMGLLEMPGEMAHRYLNEGFSGGEKKRNEILQMTMLKPAIAILDEIDSGLDIDALKVVAKGVNEMRSPEFGCLIITHYQRLLNYIEPDFIHIMMGGKIVMSGGKELAHRLEAEGYDWVKKELGIEEVEIETKA

SEQ ID NO: 14821 - protein, 396 aa, Exiguobacterium sibiricum 255-15
MKEAVIVAGARTPVGKAKKGSFKSMRSDELAGIVIKETLKRANYTGAIDDVILGCALPEAEQGMNIARYASVLGGLSHEVPAITINRYCSSGLQSIADASMKIMTGQATAVIAGGLESMSQVPMPGHVVRPNPSIVETEPEYYMSMGHTAEQVASTYQVSREDQDAFALKSHQKAAAAIASGKFADEIVPVTVTEQFVNDELKIEEKTWVVEHDEGVRADSSPEGLAKLRPAFRLGGSVTAGNSSQTSDGAAAVLIMEREEAERQGLPILGKFKSFAVGGVRPEVMGIGPVVAIPKALELAGITLEEVGLIELNEAFASQSLGVIRELGLNEDIVNVNGGAIALGHPLGCTGTKLTLTLLHEMKRRNVQYGVVSMCIGGGMGAAGVFELVEGGTGQ

SEQ ID NO: 14822 - protein, 492 aa, Exiguobacterium sibiricum 255-15
MQIEMTGITKAFGPVPVLKGVDFTLATGEIHALMGENGAGKSTLMKILTGVHKADQGTILVDGVEQQYKNPKLAEEAGIAFIHQELNILPDLTVTENLFLGRELKSRFGVLKQAEMKRLAERELAELNVFMDVNQLARTLSVGQQQMIEIAKALMTDAKVIIMDEPTAALTEREIRALFSVATALREQGVSIVYISHRMEEIFELCDRITVLRDGVSVSTHRIADTSFEQIVREMVGREMGERYPERQVTLGQTVLEVTGATGKRFEDVSFSVRAGEIVGFSGLMGAGRTEVMRGLFGIDRMKAGTISLNGKTIKIKSPHDAIKQGLGFLTEDRKGEGLFLDFSLRENISLPTIRSLSKSGVISDQSERQFAEGYLKSLSVRHSSMDQPAKSLSGGNQQKVVLAKWLGTKPDVLILDEPTRGVDVGAKKEIYMIMDELAATGVAIIMISSDLPEILGMSDRVYVMREGQMSGMLNQEEATQESIMTLATGGQ

SEQ ID NO: 14823 - protein, 66 aa, Exiguobacterium sibiricum 255-15
MEQGKVKWFNAEKGYGFIETSDAKDVFVHFSAIQADGYKSLEEGEEVEFEIVDGDRGPQAANVSKL

SEQ ID NO: 14824 - protein, 287 aa, Exiguobacterium sibiricum 255-15
MALGWIGLGHMGVPMALRLRRAGHPVNVYNRTVEKTESLVKEGAVALESPRAVVEQSDIIFLMLADGPAITAVFEQENGLLASKLSGKTLVNLSTISPEQSVSFAERIEQAGATYLEAPVSGSVGVAEAGQLVLLLGGDEQAIAACRPYFEILGKESIHFGAHGTGSSAKLAINLLLALVGEGVAETLLLGERAGLDKEKLIQLIGASGMNTPLFQGKQTMYRDEQFPPAFPLRLMAKDLGLITEEAKRLTLDLPLAATAQTQYQHALESGHGDEDMAAVYLSLKQR

SEQ ID NO: 14825 - protein, 215 aa, Exiguobacterium sibiricum 255-15
MRFFIDTANVEDIKKAHKMGILDGVTTNPSLVAKEGVDFHTRLREICEIVGDVSVSAEVIALDAEGMIREGKELAQIAPNITVKVPMTPAGLEAVAALSKENITTNVTLIFNPNQALLAARAGATYVSPFLGRLDDIGQDGMGLVETIAQIFVIHDIPTQIIAASVRNPVHVTNAALAGADIATIPLNVIESLTQHPLTTQGIERFLADWEKAQQ

SEQ ID NO: 14826 - protein, 374 aa, Exiguobacterium sibiricum 255-15
MIIGVLKEIKNNENRVALTPAGVAALMGQGHTVIVETTAGMGSGFTNEEYTQAGAQIIETAAEVWATAELALKVKEPVASEYQYFRPELTLFTYLHLAAEPELTRALVDSKITAIAYETVEKNRTLPLLTPMSEVAGRMASQIGAQFLEKPHGGMGILLAGVPGVRRGKVTVIGGGVVGTNAAKLAVGLGADVTIIDVSPERLRQLDDIFGNSINTLISNPYTIAEAVAESDLVVGAVLIPGAKAPKLVTAEMVERMKPGSVIVDVAIDQGGIFETVDRISTHDDPTYEKFGVVHYAVANMPGAVPRTSTLALTNATLPYVLELANKGTHRALAENAALEKGLNVVQGFVTYEAVARDLGYTYKSVEDVLHLHA

SEQ ID NO: 14827 - protein, 66 aa, Exiguobacterium sibiricum 255-15
MNTGKVKWFNAEKGFGFIEVEGGEDVFVHFSAITGEGFKSLDEGQEVEFEITEGARGAQAANVVKL

SEQ ID NO: 14828 - protein, 466 aa, Exiguobacterium sibiricum 255-15
MKEGTFRRKMESRHIVMLSLGGVIGTGLFLSTGYTLEQAGRVGTILSYLVGALAIYLVMLCLGELAVHMPETGAFHSYATKYIGSGTGYTVAWLYWLTWTVALGSEFTAAGLLMQRWFTDVPVWLFSALFVVMILGINVLTVRLFAEVEFWFSAVKVLTILVFIVLGTAAIVGFLPLADGSQAPLLAPLTEGGLFPNGAFAILMTMLAVNFAYSGTELIGIAAGEAVDPKRTVPLAIRTTVFRLVLFFVGTIIVLAILLPNDSKGVLESPFVAVFERIGLPFAADIMNFVILTAILSAANSGLYAASRMLWSLSDQRMITPYFSKLNASGVPTRAVLFSMLGGLLALFSSVYAPGSVYIALVSISGLAVVVVWMSISASQFMFRKRYLQEGHDLNDLVYRTPWYLFVPILSFLMCLASLIGIAFDPTQRVALYFGVPFIAVCYIVHHLTKTSWKRSVEDVKEQQSS

SEQ ID NO: 14829 - protein, 455 aa, Exiguobacterium sibiricum 255-15
MEQQGLKRDLSNRHVQLIAIGGTIGTGLFLGSGKAIQLAGPSIVFAYLLVGIAIFFVMRALGELLLSKAGYQSLTDIAEDYLGPRAAFVTGWTYWFCWIMTAMADVIAVGVYVKYWFDIPQWIPAVIALLILLGFNLLTVKLFGELEFWFALIKVVTILALIGVGIVLLVIGFNTDAGPVTVKNLWQHGGMFPNGVTGFLLSFQMVVFAYVGVELVGVSAAETADPKKNIPSAINKIPLRILFFYVGALLVLLMINPWTGLNATESPFVKTFSLIGIPVAAGIINFVVLTSAASACNSGMFSTSRILYNLGNQKQAPQSFSKLNKNHVPANALFVSTLVVSGGALLSKLLPGQAFSIVTTISAICFIWVWGVILVCHLKYKKTQPELHAASTFKAPLTPFVNYLVLGLFTLILIVMLVADETRPALLLTPVWFIGLFILYQLRTKKHQKAERHSA

SEQ ID NO: 14830 - protein, 191 aa, Morus bombycis
MMSTSQFLSLIIFTLSFIGCPLGWNASLLPFIDRTDPFLVLEQVPLGLEKDEISTALSPARADWRETPEGHVITLDVPGLKKEDLKIEVEENRLLRVSGERKSEKVRKEDHWHRVERCQGKFWRQFRLPENVDLDSIKAKLEDGVLTLTLHKLSPDKIKGPRVVNIAGSSDNHDQHGNINISAGDQAKQEL

SEQ ID NO: 14831 - protein, 409 aa, Vibrio fischeri ES114
MMNVITQRLNHYQHRQPREGLIMKNVVIVDCIRTPMGRSKNGVFRHTRAEDLSAHLMKGLLKRNPSVDPNDIEDIYWGCVQQTLEQGFNIARNSALLAGLPQSIAATTVNRLCGSSMQALHDASRAIMVGDAEICIIGGVEHMGHVPMNHGVDFHSGLSKSVAKASGMMGLTAEMLGKMHGISREQQDAFALASHQKAHKATIEGYFDSEILPMEGHDENGALTLVTHDEVIRPETTLEGLAALRPAFDPANGTVTAGSSSALSDGASAMLVMSEEKANELGLPIRAKVRSMAVSGCDPSIMGYGPVPATKKALKRAGLSLDDIELFELNEAFAAQSLPCIKDLGLLDVMDEKVNLNGGAIALGHPLGCSGSRIATTLINNMERTGAKLGVATMCIGLGQGIATVFERP

SEQ ID NO: 14832 - protein, 409 aa, Vibrio fischeri ES114
MELSTTVSELRYALDTFFFLMSGALVMWMAAGFAMLEAGLVRSKNTTEILTKNICLYAIACTTYLVVGYNIMYVDNGSGGFLPSIGTLIGTQAEGADHSLESDFFFQVVFVATAMSVVSGAVAERMKLWSFLIFSAILTAFIYPMEGYWTWGGGFLSEAGFSDFAGSGIVHMAGASAALAGVLLLGARKGKYGKKGQIYPIPGSNMPLATLGTFILWFGWFGFNGGSQLMVSDFENATAVGQIFLNTNAAAAAGAITALFVCKSTWGKADLTMVLNGALAGLVAITADPLSPSPLAAVSVGAVAGALVVFSIVGFDKIKIDDPVGAISVHGVCGFFGLMVVPLSNSDATFGAQLLGAVVIFAWVFGASLVVWAVLKATVGIRVTEEEELEGMDVHDCGIDAYPEFVSVK

SEQ ID NO: 14833 - protein, 483 aa, Tuber borchii
MNDPDHLNYVPLVPFNGTKPFGGDSLTQDLNIWYESGNVAWVMTSTALVLLMIPGVGFFYSGLARRKSALSLIWLSMMATAVVSFQWFLWGYSLAFSHTGGRFIGNLDNFGFKGLLGYPSIGSEKIPDLLFALYQGMFSAITVALAIGAAAERGRMLPCVVFMFVWATLIYDPIACWTWNSSGWSFRMGGLDFAGGTPVHISSGSAALAYSLMLGKRRGHGTHELNYRPHNVTHIVLGTVFLWVGWFGFNGGSALSGNMRAVMACVVTNLAASVGGITWCLLDYRLEQKWSTVGFCSGVIAGLVAITPGSGYVPSWAAVIYGVVGGAACNYATKLKFVIGVDDALDIFAEHGVGGIVGNILTAFFAADYIAHLDGSTEINGGWLNGHYKQLGYQVADSVAGFAYSFGGTCIILFIMNLIPGLSLRATEEAEILGIDDAELGEFAYDYVELTREVISDDDTVPKMSSENNASVELPAERAEKSA

SEQ ID NO: 14834 - protein, 351 aa, Gelidium crinale
MEKSFDQLLSLNVDEGCIVEYVWIDGYDAVRSKGRYLKNIPSKASDLPDWNYDGSSTNQASGEDSEVIIKPQRIFPDPFRGKPNLLVMCDTYTPNGEPLKTNTRFECERIMNQAKDLKPWFGLEQEYFLINPNTGKPLGFPNDKDPEPQGPYYCGVSGSKMFGRDIADAHFKACVYAGIKISGINAEVAPGQWEFQVGPCVGIEEGDELWMGRYLLQRIAEMKGLDVNYDPKPVKGDWNGSGCHSNFSTKPMREKDGYQNAIIPALEKLSKKHKEHIAAYGIGNEDRLTGKHETASIEQFKWGVADRGASCRVGHDVEKKGYGYFEDRRPAGNCDPYVVTMMLVKTCCLED

SEQ ID NO: 14835 - protein, 605 aa, Fragaria x ananassa
MDTKIGSIDVCKTENHDVGCLPNSTTSTVQDSVPSTCLSSADATLGRHLARRLVQIGITDVFTVPGDFNLTLLDHLIAEPGLTNIGCCNELNAGYAADGYARSRGVGACVVTFTVGGLSVLNAIAGAYSENLPVICIVGGPNSNDYGTNRILHHTIGSPDFSQELRCFQTVTCFQAVVNNLEDAHELIDTAISTALKESKPVYISIGCNLAGIPHPTFSREPVPFSLSPKLSNKWGLEAAVEAAAEFLNKAVKPVMVGGPKLRSAHAGDAFVKLADASGFALAVMPSAKGQVPEHHPHFIGTYWGAVSTAFCAEIVESADAYLFAGPIFNDYSSVGYSLLLKKEKAIIVQPDRVTIGNGPTFGCVLMKDFLVGLAKKLKHNNTAYENYRRIFVPDGHPLKAAPKEPLRVNVLFKHIQKMLSAETAVIAETGDSWFNCQKLKLPPGCGYEFQMQYGSIGWSVGATLGYAQAVPEKRVIAFIGDGSFQVTAQDVSTMIRNGQRTIIFLINNGGYTIEVEIHDGPYNVIKNWNYTGLVDAIHNGEGKCWTTKVRCEEELIEAIETANGPKKDRLCFIEVIVHKDDTSKELLEWGSRVSAANSRPPNPQ

SEQ ID NO: 14836 - protein, 189 aa, Gossypium hirsutum
MSFIGTQQKCKACEKTVYPVELLSADGVPYHKSCSKCSHCKGTLKLANYSSMEGVLYCKPHFEQLFKETGNFNKDFQLSAKAAEKLTPEMTRSPSKAASMFSGTVEKCATCGKTAYPLEKVTVEGQSYLKSCFKCSHGGCSLSPSNYAALEGILYCKHHFSQLFKEKGSYNHLIKSASIKRAAASVPEA

SEQ ID NO: 14837 - protein, 332 aa, Nostoc sp. PCC 7120
MKPKVVITNWVHPEVIELLKPSCEVIANPSKEALSREEILQRAKDAEALMVFMPDTIDEAFLRECPKLKIIAAALKGYDNFDVAACTHRGIWFTIVPSLLSAPTAEITIGLLIGLGRQMLEGDRFIRTGKFTGWRPQFYSLGLANRTLGIVGMGALGKAIAGRLAGFEMQLLYSDPVALPPEQEATGNISRVPFETLIESSDFVVLVVPLQPATLHLINANTLAKMKPGSFLINPCRGSVVDEQAVCKALESGHLAGYAADVFEMEDWYRSDRPHNIPQPLLENTKQTFFTPHIGSAVDELRHNIALEAAQNILQALQGQKPQGAVNYLRES

SEQ ID NO: 14838 - protein, 277 aa, Nostoc sp. PCC 7120
MVSQIPKETCPRPFLKWAGGKSRLIPQYLSHLPKNYRTYHEPFLGGGALFFYLQPSKSILTDINSELITTYRCVRDCIEELIGLLKDHKSQHNRDYYYSVRGKTVDNELEEAARFIYLNKTCYNGLYRVNSQGRFNVPLGKYNNPNICQEDLLRAASNVLATSEIKQADFTQVLDYATGSEDFVFFDPPYYPISSTSYFTGYSKNSFGEKDQLILRNTCVELASRGVKVVVCNSDCEFIKNIYQEIGFNIYFIEAKRSINSNIKKRGLVKELLITSY

SEQ ID NO: 14839 - protein, 130 aa, Nostoc sp. PCC 7120
MAYAIIETGGKQVRVEPGRFYDIELLSVEPDEKVTIDSVLLVQNDGEVTIGQPLVAGATVQGTVLRHLRGRKVLVYKMKPKKKTRKKRGHRQEITRLLIDSITLNGTVLTAPTATEETADATPDTETAAE

SEQ ID NO: 14840 - protein, 447 aa, Nostoc sp. PCC 7120
MSKPKNNSPVVNVIQDQSVISSVITDFGSLIKGNTLGIIRPHNLEELSSALRFAKQQNLRLKARGKGYTQGGQSVAQDAFTLDLTRLNHVSKVDTVAQAIATEAGATWQDIVTTTVKYGMLPCVLPLNLEQTVGGLLSTGGIGSTSKTYGPVVANVIDLHIITGNGEYIQCSRTQTPELYHAVLGGLGGCGVIASATLALRKTKKYIRTFHLLYDSLKPWMDDHIFLGRNHQIEHLEGFCWTSAKGIRHTTSGKKFFAHWLYGLQVGIEYDEVAPSASDVLHDLNYWRLFHTEDEETVSHVFRYQPRFEVMRTSGAWNQAHPWIECFISAEALAEVLPEILDMLPLSLGDGHRAIMVAPDNLPNLFMMPPAKNILCFAILPMAVPVEDTKTFDVLEKVNQLLLRAGGKRYLSGWLGKSNFDWRQHYGTSYKTWETMKQQYDPSHVLS

SEQ ID NO: 14841 - protein, 536 aa, Nostoc sp. PCC 7120
MTDTVTTPKASLNKFEKFKAEKDGLAIKSEIEKIASLGWEAMDATDRDHRLKWVGVFFRPVTPGKFMMRMRMPNGILTSDQMRVLAEVVQRYGDDGNADITTRQNIQLRGIRIEDLPHIFNKFHAVGLTSVQSGMDNIRNITGDPIAGLDADELYDTRELVQQIQDMLTNKGEGNREFSNLPRKFNIAIAGGRDNSVHAEINDLAFVPAFKEGIGDWVLGNGEESSTYQKVFGFNVLVGGFFSAKRCEAAIPLNAWVTPEEVLPLCRAILEVYRDNGLRANRLKSRLMWLIDEWGIDKFRAEVEQRLGKSLLPAAPKDEIDWEKRDHIGVYKQKQEGLNYVGLHIPVGRLYAEDMFELARIADVYGSGEIRMTVEQNIIIPNITDSRLRTLLTDPLLERFSLDPGALTRSLVSCTGAQFCNFALIETKNRALEMIKGLEAELTFTRPVRIHWTGCPNSCGQPQVADIGLMGTKARKNGKAVEGVDIYMGGKVGKDAHLGSCVQKGIPCEDLHLVLRDLLITNFGAKPRQEALVTSQ

SEQ ID NO: 14842 - protein, 107 aa, Nostoc sp. PCC 7120
MTQETSEKINNLITQNKIMVFMKGTKLMPQCGFSNNVVQILNTLGVPFETINVLEDQEIRQGIKEYSNWPTIPQVYINGEFIGGSDILIELYQKGELQQLVEVALAS

SEQ ID NO: 14843 - protein, 337 aa, Nostoc sp. PCC 7120
MSKEKTKLSQLENMTAELKVASIDNHISSLSGEVSIPQAPPEFKSGFIGIIGRPNVGKSTLMNQLVGQKIAITSPVAQTTRNRLRGIVTTPEAQLIFVDTPGIHKPHHQLGEVLVKNAKLAIESVDVVLFVVDGAVACGAGDRFIADLLIHSKTPVILGINKVDQQPPDSQKIDESYQQLASAYQWPTVKFSAKTGAELPQLQELLVEHLEHGPYYYPPDLVTDQPERFIMGELIREQILLLTREEVPHSVAIAIDLVEETPTITRVLATIHVERDSQKGILIGKGGSMLKSIGSAAREQIQKLIAGKVYLELFVKVQPKWRHSRVRLAELGYRVEE

SEQ ID NO: 14844 - protein, 498 aa, Nostoc sp. PCC 7120
MAINTGKNKLMNRHIRPWQRLLVLAIGSMVFAVFAPTIVQAVDTPTLESLSETTIKLQISIDTTWVLLSGFLVFFMQTGFAMLEAGLVRQRSVVNTLLENFIDAAVTVLAWWAVGFGIAFGTSAGGLFGIDTFFLSQLPGADGSYPLGAPGSTAAINTYTLFFFQFAFAATASTITTGSMAGRTDFIGDLIYSAIMGAISYPIIVHWAWNSNGWLGKLSYHDFAGGSIVHTVGGWTALVGAYLLGPRPDRPPWGKLPPAHNLALATLGTMILWFGWYGFNPGSTLGTANPGLIGLVTINTTLAAGAGALAALIFLYVRTGKWDLVYCLNGSLAGLVAITAPCAYVAPWASVLIGLTGGIAVVLGVSLIESLHIDDPVGAFSVHGISGMMGTLSIGFLGQEELTLNQKAGLLLGGGFDLLGIQMLGIVAITVFTVAFAFLMYGGLKAMGHLRVNAEADRIGIDTYEHGASVWPDVYSVEELSKPQEHTKISENKTLEGE

SEQ ID NO: 14845 - protein, 518 aa, Nostoc sp. PCC 7120
MYQQKSRTRNRRFSTRNYAKSRQSNSQIQIFNLVKKLSPSWQACIPLACLIVLGWSYVAVAQAPAAGPTTAELKVALDTLWVAIAAFLVFFMNAGFGMLETGFCRQKNAVNVLAKNLIVFALATVAFWAIGFGLMFGDGNDFIGFNGLFLSGVDNSPATGDAYKGVFSALSWAGVPLAAKFLFQLVFAGTAATIVSGAVAERIKFVDFLIFSLLLVGIAYPITGHWIWGAGWLAKAGFWDFAGSTVVHSVGGWAALMGAAFLGPRIGKYQDKQIVALPGHNMSIATLGCLILWLGWFGFNPGSVMAADPNAITHIALTTNMAGAVGGIAATATAWLYLGKPDLSMIINGILAGLVGITASCAYVSIPSSIIIGLIAGVIVVFSVTFFDKLGIDDPVGATSVHLVCGVWGTLAVGLWSVGPGVYSWYGEGLGPTKGLFAGGGLGQLITQFLGAAAVGGMTVLVSSIFWVVLKATLGIRVTREEELEGLDIGEHGMEAYSGFLKEASPGGFAEGKTSDGY

SEQ ID NO: 14846 - protein, 398 aa, Nostoc sp. PCC 7120
MTNFTSRMQAVQSPIIPVVGELIQNSPGTISLGQGVVSYSPPPEAIELLPRFLADPANNLYKAVEGIPPLLNALTEKLSTFNNIEITTDNCIVVTAGSNMAFMNAILAITSPGDEIILNTPYYFNHEMAITMAGCRAVLVETDENYQLCPEAIAQAITPKTRAVVTISPNNPTGVVYCEDLLRNVNQICANYGIYHISDEAYEYFTYDGVKHVSPASFAGSSEYTISLYSLSKAYGFASWRIGYMVIPKHLLVAIKKVQDTILICPPVVSQYAALGALQAKPEYLQDHIGALAQPAVGIAQVRQIVFDYLKQLQGLCNITPADGAFYVFLKVHTQIDAFALVKQLIQEYKVAVIPGTTFGMENGCYLRVAYGALQKDTVKEGIERLVQGLKTILDTGK

SEQ ID NO: 14847 - protein, 377 aa, Nostoc sp. PCC 7120
MIEYLIFLAISTATFALFSLGLNLQWGFTGLINFGHIAFMTLGAYTTVLLSLKGVPLFISAIVGAIFAALLGLVIGFATLRLREDYLAIVTIGTGELIRLVVNNQDLPVGDTWVSGAFGVQSYPIPLSTEPNLFFRLLMIGILTLLFAVTVFSLWRWIRNAQKLQLTDATDKTSSKQEIASRFGVGIILGLLATAIYISGVITLYNYIPKAGLMLVSLLVLAFVFWRLEYLVRSPWGRVLKAIREDEEIPKAMGKNVFWYKLQSLMLGGAIAGIAGAFFAWQISAIYPDNFQPQLTFDSWIMVILGGAGNNIGSILGAVIYFAYDAITREVLPKIIPLDEARLGAFRIMCIGLILMVLMIWRPQGILGKKEELTLGK

SEQ ID NO: 14848 - protein, 513 aa, Nostoc sp. PCC 7120
MNLSFPELGISQERVEHLEKLGFTAPTNIQAQAIPQLLSGRDVVGQSQTGTGKTAAFSLPILERLDPQQKAVQAIVLTPTRELAIQVHDAMAQFVGNSGLRTLAIYGGQSIDRQMLQLKRGVHIVVGTPGRVIDLLERGNLKLDQVKWFVLDEADEMLSMGFIDDVEKILSQAPQDRQTALFSATMPPSIRMLVNKFLRSPVTVTVEQPKATPNKINQVAYLIPRHWTKARALQPILEMEDPETALIFVRTRRTAAELTSQLQAAGHSVDEYHGDLSQQARERLLTRFRSRQVRWVVATDIAARGLDVDQLSHVINYDLPDSVETYVHRIGRTGRAGKEGTAITLVQPFERRKQQIFERHVRQNWQLLSIPTRAQIEARHILKLQEQVREALAGERLASFLPIVSELIEKYDAQAIAAAALQIAYDQTRPAWLSTDAEIPEEVASTPKPKLGGKRREFSGDRGRSNWNKSDNNNSDDERRGTPKPKLRTGRRETSATPSNPKLGSPAARESAS

SEQ ID NO: 14849 - protein, 400 aa, Nostoc sp. PCC 7120
MSVIYLDNNATTKVDPDVVEAIMPYLTDYYGNPSSMHTFGGQLGKAVRTAREQVAALLGADESEIVFTSCGTEGDNAAIRAALLAQPEKRHIITTQVEHPAVLNVCKQLETQGYTVTYLSVNSHGQLDLDELEASLTGNTALVTIMYANNETGTVFPIEEIGKRVKERGAIFHVDAVQAVGKIPLNMKTSTIDMLTISGHKIHAPKGIGALYVRRGVRFRPLLIGGHQERGRRAGTENVPGIVGLGKAAELELIHIETAIKKETRLRDRLEQTLLAKIPDCEVNGDITQRLPNTTNIGFKYIEGEAILLSLNKYGICASSGSACTSGSLEPSHVLRAMGLPYTTLHGSIRFSLCRYTTEAQIDRVIEVMPEIVERLRALSPFKNDEAGWLQAQEQTLAHR

SEQ ID NO: 14850 - protein, 455 aa, Nostoc sp. PCC 7120
MSRHTDYSSLEQIQTTGADAPKPLLTLSDAVALIVGIVIGVGIFQTPALVASQAGSDTAVLLFWLAGGIVSIIGALCYAELATTYPNVGGAYYYLKRAFGQNTAFLFAWARLTVIQTGSIALAAFVFGDYASEIWRLGTFSSSMYAAVIIALLTILNILGLHQGKWTQNLLTAAQVLGLLLVVLFGLASTANSANSAVSPEPSSSGSWGLAMVFVLLSYGGWNEAAYISAEIKNRQRNILRSLMWSIGIITAIYLLINLAFLRGLGLANMANSSAVAADLMRAVWGTPGVVFISLLIAICALGTINASIFTGARTNYALGQDFNLFGFMGSWRQIPSTPATALLVQGAIALALVVLGTFTRKGFETMVDYTAPVFWFFFLLSGISLLILRQKEPHIPRPFRVPFYPITPLLFCAVCGYLLYSSVVYTNVGAVVGVLVVIAGVPLLFWNRYRQGKA

SEQ ID NO: 14851 - protein, 633 aa, Nostoc sp. PCC 7120
MAKVVGIDLGTTNSCVAVMEGGKPTVIANAEGFRTTPSVVAFAKNGDTLVGQIAKRQAVMNPENTFYSVKRFIGRRYDEVTNEATEVSYKVLSSGGNVKVDSPGAGKQFAPEEISAKVLRKLVEDASKYLGETVTQAVITVPAYFNDSQRQATKDAGKIAGIEVMRIINEPTAASLAYGFDKKSNETILVFDLGGGTFDVSVLEVGDGVFEVLATSGDTHLGGDDFDKKIVDFLAEQFRKDEGIDLRKDKQALQRLTEAAEKAKIELSSVTQAEINLPFITATQDGPKHLDMTLTRAKFEELCADLIDRCRIPVEQALRDAKLKKENIDEVVLVGGSTRIPAVQQLVKNLLGREPNQTVNPDEVVAVGAAIQAGVLGGEVTGILLLDVTPLSLGVETLGGVMTKIIPRNTTIPTKKSEVFSTAVDGQTNVEIHVLQGEREFANDNKSLGTFRLDGIPPAPRGVPQIEVVFDIDANGILNVTAKDKGTGKEQSISITGASTLDKTDIDRMVREAEQNASSDKERREKIERKNQADSLAYQAEKQLQELGDKVPEADKTKVEGLVKDLREAVAKEDDEQIKKLTPELQQALFAVGSNIYQQAGGGAAPGAAPQDGGTTSSDGGDDVIDADFTETK

SEQ ID NO: 14852 - protein, 526 aa, Nostoc sp. PCC 7120
MSKVLVSDPIDQAGIDILSQVATVDVNTGLKPAELIEIIGQYDALMIRSGTRVTQEIIEAGTQLKIIGRAGVGVDNVDVPAATRRGIVVVNSPEGNTIAAAEHALAMMLSLSRHIPDANASVKRGEWDRKTFVGAEVYKKTLGVVGLGKIGSHVAAVAKAMGMKLLAYDPFISTERAEQIGCQLVDLDLLMQQSDYITLHIPKTPETTHIINATTLAKMKPTARIINCARGGIIDEAALAAAIKEGKIAGAALDVFESEPLGESDLRAIGKDIILTPHLGASTTEAQVNVAIDVAEQIRDVLLGLPARSAVNIPGLGPDVLEELKPYMQLAETLGKLVGQLAGGRVELLTVRLQGELATNKSQPLVIASLKGLLHQALRERVNYVNANIEAKERGIRVIETRDASARDYAGSLRLEATGTLGTHSVTGALLGDKEIHLTDVDGFPINVPPSKYMVFTLHRDMPGIIGKLGSLLGSFNVNIASMQVGRKIVRGDAVMALSIDDPLPDGILAEITKVPGIRDAYTVTL

SEQ ID NO: 14853 - protein, 613 aa, Nostoc sp. PCC 7120
MSDLFKGFEQLIELVKTLEEKAEKGEIKTDFQINSRSMSSIPRTGNIPRPNNMANDIGTSRIRTQPSPNSDSGNGDSSDVVVPPDAPSGNSLKDVGGLGEVVKELKELIAIPLKRPDLLAKLGLEPTRGVLLVGPPGTGKTLTARGLAEELGVNYIALVGPEVISKYYGEAEQRLRGIFEKAAKNAPCIIFIDEIDSLAPDRSAVEGEVEKRLVAQLLSLMDGFSHSQGVIVLAATNRPDHLDPALRRPGRFDREVQFRVPDVKGRRDILQILTRAMPLEETVDLDAIAERSVGFVGADLKALCQKAAYTALRRQMPSVESAVPENMTVSQADFLQALKEIKPAVLRSVEVEVPHIAWDDIGGLDTIKQTLRESVEGALLYPELYLQTKALAPKGILLWGPPGTGKTLLAKAVASQARANFIGVNGPELLSRWVGASEQAVRELFAKARQAEPCVVFIDEIDTLAPARGSFSGDSGVSDRVVGQLLTELDGIEVGSTILVIGATNRPDALDPALLRAGRLDLQMKVDLPDLASRLAILLVHSQGRPLDGVDFNYWAEMTQDWNGADLTLLCNQAAVEAIRRFRSQGLTDPSEIKITTDDFNYAYKVLTEQRPD

SEQ ID NO: 14854 - protein, 346 aa, Nostoc sp. PCC 7120
MINQLQDYNPSGVGEINGNLLGLPCDYDSANLIVFAVPWEVTVSYGAGTANGPQRILDASVQLDLFDFDHPDGWKQGIFLVEIPQEMIEKNNYYRDLAAQIIERLAQGKLLTDTPDLTPVLTEINQASQQVNQWLFTQCQAAMSQGKQVAVIGGDHSSPLGYFQALAAKYSNFGILHIDAHADLRDAYEGFEFSHASIMFNGLKLPQISKLVQVGLRDISHDEVRMIEESHGRIVAYYDPMIKQKLYGETNWIELSREIVNHLPEYVHISFDVDGLDPKLCPNTGTPVPGGLELEQVFCLFRELVNSGRKIIGFDVCEVGDAEWDGNVGARVVYKLANLMDLSHKQ

SEQ ID NO: 14855 - protein, 363 aa, Nostoc sp. PCC 7120
MEIGVPKETKDQEFRVGLSPASVRVLKENGHSIFVQTQAGSGAGFTDDDYRSVGADIVPTAEAVWSRELVVKVKEPLTSEYNFLQKGQILFTYLHLAADRKLTEHLIDCGICAIAYETVEQPGANRLPLLTPMSIIAGRLAVQFGARYLERQQGGRGVLLGGVPGVKPGKVVILGGGVVGTEAARIAVGMGATVQILDVNVERLSYLETLFGSRVELLYSSSAHIEAAVKEADLLVGAVLVLGRRAPILVSRELVKQMHPGSVIVDVAVDQGGCVETLHATSHTNPTYLEEGVVHYGVPNMPGAVPWTATQALNNSTLPYVVQLANQGLKALEVNQVLAKGLNVQNHRLVHPAVQEVFPDLVH

SEQ ID NO: 14856 - protein, 653 aa, Nostoc sp. PCC 7120
MGKVIGIDLGTTNSCVAVLEGGQPIVIANSEGGRTTPSIVGFGKSGDRLVGQLAKRQAVTNAENTIFSIKRFIGRRWEDTETERDRVPYGCVKGRDDTVDVQIRGRNYTPQEISAMILQKLKQDAENFLGEAVTQAVITVPAYFTDAQRQATKDAGTIAGLEVLRIINEPTAAALAFGLEKQDQEQLILVFDLGGGTFDVSILQLGDGVFEVKATSGNNQLGGDDFDGCVVCWMIERFQQQEKIDLAQDKMALQRLREAAEKAKIELSSMASTSINLPFITADETGPKHLEMELSRSKFEELVGQLIEATIQPMIQALKDADLKPQDIDKIILVGGSTRIPAVQNALIKFFNGKAPDRSVNPDEAVALGAAIQAGVLGGEVDNLLLLDVTPLSLGIETLGEVFTKIIERNTTIPTSKSQIFSTAVDGQTSVEIHILQGERTMARDNKSLGKFLLAGIPPASRGVPQIEVSFEIDVNGILKVAAQDKGTGREQSIRITNTGGLSTNEVERMRQEAEVFAEEDRRRKELVELKNQADNLLIIYESTLKDNGDLIGEQIKVLANEKVAQIQSVMTNPAISLKEFQQCLDDFQQTLFSIGANVYQRANTQTDDELEVMSDGSSPSDIEHPISGTLIPQFNFDFDDESTAQADYEAID

SEQ ID NO: 14857 - protein, 262 aa, Nostoc sp. PCC 7120
MIIENSEVVLSVRGLTAEVDGTPILKGVNLEVRSGEVHAIMGPNGSGKSTLSKVLAGHPAYTVTGGEVVFQGQNLLELEPEERARTGVFLAFQYPLEIPGVSNLDFLRVAYNSRRKAQGLEEIDTFDFDDLIEERLEVVKMNPAFLNRSVNEGFSGGEKKRNEILQMALLEPKLAILDETDSGLDIDALKIVAHGVNQLASPENATILITHYQRLLDYIVPDFVHVMARGQIITSGGKELALELESRGYDWLLEDAAVEVGV

SEQ ID NO: 14858 - protein, 388 aa, Nostoc sp. PCC 7120
MSNRPIYLDCHATTPLDEQVLAVMLPYFTEKFGNPASIGHIYGWEAEAAVKQAREILAAEINASPEEIIFTSGATEANNLAIKGVAEAYFQKGQHIITVATEHHAVIDPCEYLKTLGFEITILSVQADGLIDLAQLEKALRPETILVSVMAANNEIGVLQPLAEIGEMCRTHNIIFHTDAAQAIGKIPLDVQAMNIDLMSLTAHKVYGPKGIGALYVRRRNPRVQLAPQQHGGGHERGMRSGTLYTPQIVGFAKAVEIALAEQTTENQRLTQLRDRLWSQLAQLEGIHLNGHPTQRLAGNLNISIEGVDGAALQLGLQPVVAVSSGSACSSTKTAPSHVLTALGSPEKLAYASIRFGIGRFNTAEEIDIVAKHAIATIQSLRKQATLV

SEQ ID NO: 14859 - protein, 405 aa, Nostoc sp. PCC 7120
MKVLILNAGSSSQKSCLYEIPDDALLSEAPQPLWEGKVNWTQDRSVAEIEVKTARGETLHESIYGDSRQAHVTYMLYTLSRGATKVIGQLSEIDVVGHRVVHGGQNYRHSVIITEEVKQAIAKLSNLAPAHNPAALEGIEAIEKSLGDVPQVAVFDTGFHATLPDAAAIYPGPFEWVEQGIRRYGFHGISHQYCSARAAQILGRDLASLRIITCHLGNGCSLAAIKNGRSIDTTMGFTPLDGLMMGSRSGAIDPGIIVHLMRQSDYSAERLDYVLNKASGLRGISGVSSDLPQVIEAITQGNYRAQLAWDMYVHRLRSGIGSMLASLGGLDVLVFTAGVGEKSAGIRQAACEAFGFLGLKLDPEKNQNKPVDIDIATADSTVRVLVIHTQEDWAIAQQCWHLLKR

SEQ ID NO: 14860 - protein, 447 aa, Nostoc sp. PCC 7120
MRSLLMKNPVVIGASWIAAYIVIILFPLFILLLYPPTPSNERSFLLEFSAALGFIGLAMMAMQFALTARINRIEASYGVDLILQFHRYTSIVAFLFLLAHPIILFINNPETLQLLNFFQAPWRARAAVIATLALIAIIVTSIWRKQLNIGYENWRIAHGILAVIIVSFGLGHVLGVLNYLSLFWKAVIWTGIAIAALWLLIYIRLVKPYFMLKKPYLVEAVIPQRGNVWNLVLRPRGHQGIYFQPGQFAWLTLEISPFRMREHPFSIACSAEHSDRLEFGIKALGDFTKTIKDVKPGTKAFLDGPYGVFTTDRYENTAGFVFIAGGIGITPIISMLFTLAERKDERPLLLIYASKNWEDITYREEIEALTDKLDLTVIHVLKEPPEDWSGESGYVDQQLLERYIPKRPATRNYFICAAPKMMDQVEIYLHNLEVPITNIHMEHYNLV

SEQ ID NO: 14861 - protein, 387 aa, Nostoc sp. PCC 7120
MQIYLDYSATTPTRAEAIAVMQSVLTQQWGNPSSLHEWGQRATTIVEQARVQVAGLINAANPESIIFTSGGTEANNLAIMGVVRMQNVPQHIIISSVEHSAISEPANLLEKWGWEVTRLGVDNTGRVNPEHLKAALRHNTVLVSVIYGQSEIGTVQPIAELGKITQQHGALFHTDAVQAVGRLPIDVQQLPVDLLSLSSHKLYGPQGVGALYIRPGVELLPLLNGGGQERGLRSGTQAVPIIAGFGVAAEIAAEELSIEIPRLITLRDRLFAQLADVPGLIPTGDRESRLPHHVSFYLQQADGEKLSGKTLVRHLNLAGIGISAGAACHSGKLSPSPILLAMGYSKKAALGGIRLTLGRETTAADVDWTAMVLKQVLQRLIPDVSLV

SEQ ID NO: 14862 - protein, 215 aa, Nostoc sp. PCC 7120
MICHSRAKLCLHLLVLIKSHTLAMFSSPFSEDNDNAPNGSITLTDEKGRSLECYVEHSLSVDEQEYVLLLPVDSPIEIFAWEGEDEDEEAVLVEFDDAIIDEIFPTAQAVLAEQNLVLKQTAYALTVAGDLPPVEESELFTLEIEEEEAADLEPEQLQLLANFYHDEQEYAIYTPLDPLLFFAKITKTGQPVLLSPEEFRKVQPLLEEQLFNEVE

SEQ ID NO: 14863 - protein, 292 aa, Nostoc sp. PCC 7120
MKVAFLGTGLMGLPMAQRLLAANIEVVAYNRTPEKLAPLQAAGAEVVTHPRYAIREAECVILMLTNAAAIYHVLLSDTSWRTLQGRTIIQMGTITSTQSQEIRDSIVGGGGEYIEAPVLGSIPEAQAGTLTVMVGAEPQQYERCLNLLKNFGPDPLLIGPVGTASGLKLALNQLIASLTTSFALSLAFVQRQGIDVDKFMQVLRESALYAPTFDKKLQRMLDGNYSNPNFPTKHLLKDTDLFISEAQYLGLDLSSIETVQKLLQTTMKMSFANDDYSALFSVIRDWGEASGG

SEQ ID NO: 14864 - protein, 411 aa, Nostoc sp. PCC 7120
MTFLISKVADFAEIRYLSSGDFMRIAVAKEIEVCERRVALNPDTVARLVKQGLEVWVEAGAGERSFFDDAAYVAAGATIVGDSGKLWGETDVLLKVSPPQEREDGRLEIDLLREGAVLISFLNPLGNPVVAQQLVNRKVTALSMELIPRTTRAQSMDALSSQASLAGYKAVLIAAAALPKYFPMLTTAAGTIAPAKVFIMGAGVAGLQAIATARRLGAVVEAFDIRPAVKEEVQSLGAKFVEVKLEEETTAAGGYAKEISEASKQRTQEVVAEHVKNSDVVITTAQVPGRKAPVLVTAEMVAQMKPGSVIVDLAAEQGGNCACTDPGKDIVWNGVTIIGPINLPSSMPVHASQLYSKNLTSLLQLLIKDKALQVDFTDDIIDAACITHAGEIRNQRVKDALQASTTQLVRD

SEQ ID NO: 14865 - protein, 271 aa, Nostoc sp. PCC 7120
MNNGCNRWQIISRLHLILSAIIICFMISATGLVASAAEMPEIQRRGYITVAVKDNLPLLGFKDADGKLQGLEIDLAKRLAADLLGKADAVKLQPVSNRDRLSVVFNHKVDIAIARVTATESRSRLVSFSVPYYMDGTYLITKDATVQQINDLAKRKIAVLNNSSTIAEVRYYIPKAELVGVNSYQEAQAAIENNSVAAFAADGSLLSGWVREHPQYRLLPTKLSTAPLSVVMPKGLQYDELRREINEAIARYIAQGWLKERIEYWGLVNSQ

SEQ ID NO: 14866 - protein, 547 aa, Nostoc sp. PCC 7120
MNTAELLVQCLENEGVQYVFGLPGEENLHVLEALKHSSIQFITTRHEQGAAFMADVYGRLTGKAGVCLSTLGPGATNLMTGVADANLDGAPLVAITGQVGTDRMHIESHQYLDLVAMFAPVTKWNKQIVRPSITPEVVRKAFKRSQSEKPGAVHIDLPENIAAMPVEGKPLQKDNIEKTYASFASIRAAAAAISQAVNPLILVGNGAIRAKASDAVTQFATQMNIPVANTFMGKGVIPYTHPLALWSVGLQQRDFITCGFDNTDLVIAIGYDLIEFSPKKWNPEGKIPIVHIGADSAEIDSSYIPNVSVIGDISDSLVEILKVADRQGKPNPYAISLRGNIREDYEQYANDDGYPIKPQKLIYDLRQVMGPDDIVISDVGAHKMWIARHYHCHSPNTCIISNGFAAMGIAIPGALAAKLVYPNRKVVAATGDGGFMMNCQELETALRVGTPFVTLIFNDGGYGLIEWKQENQFGKGQSSFVHFGNPDFVKLAESMGLKGYRVESALDLIPVLKEALAQDVPAVIDCPVDYRENRRFTQKAGELSCSV

SEQ ID NO: 14867 - protein, 127 aa, Nostoc sp. PCC 7120
MQRTLLLAKIHNCTLTGANINYVGSISIDQILLDKSGILPYEQVQVVNNANGQRFITYAIPAPAHSGIIELNGAAARLGIIGDRVIIMTYGQFTSEELKSYTPTVVIVDEKNRPLEVRRYDDLLSQV

SEQ ID NO: 14868 - protein, 628 aa, Nostoc sp. PCC 7120
MKFSWRVLVLWTLPALVIGFFFWQGTFAGAPADMSKNAANTRMTYGRFLEYVDAGRVTSVDLYEGGRTAIVEAQDQDIENRVQRWRVDLPVSAPELISKLKDKKVSFDAHPARNDGAIWGLLGNLVFPILLITGLFFLFRRSNNLPGGPGQAMNFGKSKARFQMEAKTGVKFDDVAGIEEAKEELQEVVTFLKQPERFTAVGARIPKGVLLVGPPGTGKTLLAKAIAGEAGVPFFSISGSEFVEMFVGVGASRVRDLFKKAKDNAPCIIFIDEIDAVGRQRGAGIGGGNDEREQTLNQLLTEMDGFEGNTGIIIIAATNRPDVLDAALLRPGRFDRQVTVDAPDIKGRLEVLQVHARNKKLDPSVSLEAIARRTPGFTGADLANLLNEAAILTARRRKEGITLSEIDDAVDRVVAGMEGTPLVDSKSKRLIAYHEVGHALVGTLLKDHDPVQKVTLIPRGQAQGLTWFTPNEEQGLISRSQLKARITGALGGRAAEEIIFGSAEVTTGAGGDLQQVSGMARQMVTRFGMSDLGPLSLESQQGEVFLGRDWMTRSDYSESIAARIDSQVRLIVDECYQNAKKIMREHRTVTDRIVDLLIEKETIDGEEFRQIVAEYTDVPDKQQFVPQL

SEQ ID NO: 14869 - protein, 606 aa, Nostoc sp. PCC 7120
MALIVQKFGGSSVGSVERIQAVAQRVYKTVKAGNSLVVVVSAMGKTTDGLVKLANEISRNPNRREMDMLLSTGEQVTIALLSMALQELGQPAISMTGAQVGIVTEAEHTRARILHIETERVEGHIKEGKVVVVAGFQGISSNGSLEITTLGRGGSDTSAVALAAALQADFCEIYTDVPGILTTDPRIVPEAQLMGEITCNEMLELASLGAKVLHPRAVEIARNYGMPLVVKSSWTDDPGTWVTTPKPQGRSLINLELARPVDDVELDTDQAKVALLRVPDKPGVAAKLFGEISRQKVDVDLIIQSIHEGNSNDIAFTVTTPILKRAEAVAAAIAPSLRSPSHPKSDEAEVMVEQNIAKVSIAGAGMIGRPGVAAQMFATLAEAGVNIQMISTSEVKVSCVIDAQDGDRAIIALRKAFEIETPLHSQLPTPSSLSTHNSPPVRGVALDLNQARLAIRQVPDRPGMAAQLFGILSQHNISVDMIIQSQRCRIVDGVPRRDIAFTVPRMDGETAQKLLCQVAPELGWGDVVLDSAIAKVSIVGAGMVGQPGVAAKMFEALAKHQINIQMIATSEIKISCVVSQEQGVQALQVIHTAFELAGTEKFVVPA

SEQ ID NO: 14870 - protein, 225 aa, Nostoc sp. PCC 7120
MDRSATSATAMKEPSMKDHKRLLLIDDDPNLILLVKDYLEFRGYEVITAENGREALEILEHDVPDMIICDVMMPEMDGYTFVEQVRQNERTSWIPVLFLSAKGQSADRVKGLNKGADVYMVKPFEPEELVAQVESSLKQTIRWKEHQAKGGENGSRIQVPFDVQLTPTELKVVQFVARGLANREIAEELNVSQRTVESHVSNMLGKTNLHNRTELARWAIENQMA

SEQ ID NO: 14871 - protein, 342 aa, Nostoc sp. PCC 7120
MQFIDQAQIEVEAGKGGDGIVAFRREKYVPAGGPSGGNGGRGGSVIFVAVENLQTLLDFRYKHIFKADDGGRGGPNNCTGASGKDLIVQVPCGTTIYDAETGDLLGDLTQPNQELIIAAGGKGGLGNQYFLSNRNRAPEYSLPGLPGERKLLRLELKLLAEVGIIGLPNAGKSTLISSLSAARPKIADYPFTTLIPNLGVVRKPTGDGTVFADIPGLIEGAADGAGLGHDFLRHIERTRVLLHLIDATSDDVIRDYNTIEQELQAYGRGLNERMQILALNKIDAVDRETVDLEALAIQLNHLSHAPVFLISAVTRTGLEPMLQEVWGILDQVNALEEAEVFS

SEQ ID NO: 14872 - protein, 242 aa, Nostoc sp. PCC 7120
MESHKEKILVVDDEASIRRILETRLSMIGYDVVTAGDGEEALDTFRKSDPDLVVLDVMMPKLDGYGVCQELRKESDVPIIMLTALGDVADRITGLELGADDYVVKPFSPKELEARIRSVLRRVDKTGASGIPSSGVIHVGNIKIDTNKRQVYKGDERIRLTGMEFSLLELLVSRSGEAFSRSEILQEVWGYTPERHVDTRVVDVHISRLRAKLEDDPSNPELILTARGTGYLFQRIIEPGEE

SEQ ID NO: 14873 - protein, 440 aa, Nostoc sp. PCC 7120
MSNQGAFDGAANVESGSRVFVYEVVGMRQNEETDQTNYPIRKSGSVFIRVPYNRMNQEMQRITRLGGKIVSIQTVSALQQLNGRTTIATVTDASSEIAKSEGNGKATPVKTDSGAKGFAKPPAEEQLKKKDNKGNTMTQAKAKHADVPVNLYRPNAPFIGKVISNEPLVKEGGIGIVQHIKFDLTGGNLKYIEGQSIGIIPPGVDKNGKPEKLRLYSIASTRHGDDVDDKTISLCVRQLEYKHPESGETVYGVCSTYLTHIEPGSEVKITGPVGKEMLLPDDPEANVIMLATGTGIAPMRTYLWRMFKDAERAANPEYQFKGFSWLVFGVPTTPNILYKEELEEIQQKYPDNFRLTYAISREQKNPQGGRMYIQDRVAEHADELWQLIKNEKTHTYICGLRGMEEGIDAALSAAAAKEGVTWSDYQKDLKKAGRWHVETY

SEQ ID NO: 14874 - protein, 301 aa, Nostoc sp. PCC 7120
MYKNLAIALFSLTLTTVIPGAALAETVMQKVSRTGVLTAGTSKDAMPFAYTNAQGQLTGYSVDMLSEIKRHLEKELGKKIQLKLVPLTPAQRIPKIVNRQVDIVCDASSFTWERDKKVDFSVSYGATGTQLLVKSGSNLGSPESLIGKRIGVLAQTTNEQAIKRVQPQAKLVYLKSRSEGYTALQEGKIDAFSSDSILLEGWLQRVENPDDFAIVPDRPYSREGIACMVPEDNSKFLDAVNYSLVKFMQGFVNGDTRYVTIFDRWFGAKGALLLNRDLRDLMKETMQLFIEFREEIPQREL

SEQ ID NO: 14875 - protein, 1559 aa, Nostoc sp. PCC 7120
MNDNSTHQNQQITANNNSGDTYQGQRWLVEERDACGVGFIAHRQNHGSHEIVAKALAALTCLEHRGGCSADQDSGDGAGILTAIPWELLQQDYPQGQIDFLSSKNIAVGMIFLPQDGEVARKAKAIFEQIATEEKFTVLGWRVVPVQPDLLGIQAKENQPRIEQVILSADNSGDALERQLFIARKRLFKAVKSISEEFYICSLSSRTIVYKGMVRSAVLGAFYLDLQNPAYKSAFAVYHRRFSTNTMPKWPLAQPMRLLGHNGEINTLLGNINWMMAREANLSHPIWGDRFDELKPSVLMGNSDSATLDNVLELLVHSGRSPLEALMIMVPEAYQNQPSLRNYPEIIDFYEYYSGLQEAWDGPALLVFGDGKTVGATLDRNGLRPARYLITKDDYIVVASEAGVVDFPEADIIEKGRLGPGQMIAVDLVNHEVLKNWEIKQRIAKQQPYGEWLQKYRQELKQVTIQVNGNGNGNGNGNGNGHVTTAKIDKETLLRKQLAFGYTTEDVEMVIQPMAATGSEPTFCMGDDIPLAVLTDKPHLLYDYFKQRFAQVTNPAIDPLREKLVMSLKVELGERGNLLEPKPEYARRLKLESPVLLESELAAIKLSGFATAELSTLFAIASGPDGLKAAVLALQQQAAESVRAGAKILILNDRAGEGISTEYSYIPPLLAVGAVHHYLIREGLRTKTSLIVNTAQCWSTHHFACLIGYGAGAVCPYMTLETVRNWWSDPATQQFMERGKITSLSLEQAIANYRKAVESGLLKILSKMGISLLSSYQAAQIFEAIGIGGDLLALGFQGTASRIGGLSVSELAQEVLSIHSKAFPELATHKLENLGFVNYRPTGEYHMNNPKLAKALHEAVDGKKYDHYEVYKQYLQDRPITALRDLLDFHSDRTPISLEEVESVSDIVKRFCTGGMSLGALSREAHEVLAIAMNRIGGKSNSGEGGEDPVRYKVLDDVDASGHSPTLPHLRGLRNGDTASSAIKQVASGRFGVTPEYLASARQIEIKIAQGAKPGEGGQLPGPKVSQYIAMLRRSKPGVTLISPPPHHDIYSIEDLAQLIFDLHQINPKAQVSVKLVAEIGIGTIAAGVAKANADIIQISGHDGGTGASPLSSIKHAGSPWELGLSEVHRVLMENSLRDRVVLRVDGGLKSGWDVLIGALMGAEEFGFGSIAMIAEGCIMARICHTNNCPVGVASQKEELRKRFTGIPEHVVNFFYFVAEEVRHLLAKLGYRSLSEIIGRADILTTRKDVQLPKTQAINLNCLLQLPDTKENRSWLVHEQVHSNGPVVDDQLLADPDIQAAIRNQSAVTKTLPIVNTDRTLGARLAGAIASQYGDSGFEGQINLNFTGSVGQSFGAFNLPGIILTLKGEANDYVGKGMHGGEIIIKPPTEATYDPAQNVIVGNTCLYGATGGVLFANGLGGERFAVRNSKGVAVIEGTGDHCCEYMTGGTIVVLGKVGRNVAAGMTGGLAYFLDEDGLFPELVNREIVKIQRVLTTAGEKQLQDLIQAHAERTGSPKAQMILDNWQEYLPKFWQLVPPSEAESPEANPQAVVEKYLSSV

SEQ ID NO: 14876 - protein, 223 aa, Nostoc sp. PCC 7120
MIVTQDKALANVFRQMATGAFPPVVETFERNKTIFFPGDPAERVYFLLKGAVKLSRVYEAGEEITVALLRENSVFGVLSLLTGNKSDRFYHAVAFTPVELLSAPIEQVEQALKENPELSMLMLRGLSSRILQTEMMIETLAHRDMGSRLVSFLLILCRDFGVPCADGITIDLKLSHQAIAEAIGSTRVTVTRLLGDLREKKMISIHKKKITVHKPVTLSRQFT

SEQ ID NO: 14877 - protein, 632 aa, Nostoc sp. PCC 7120
MTVSLPSPTSPSQTEKHTQSVNSPSVVVTPQRVTGGFALLDSLLRHGVEYIFGYPGGAILPIYDDLYKVEATGSLKHILVRHEQGAAHAADGYARATGKVGVCFGTSGPGATNLVTGIATAYMDSIPMVIVTGQVPRKMIGTDAFQETDIYGITLPIVKHSYVVRDPQDMARIVAEAFHIASTGRPGPVLIDVPKDVAFEQFDYVPVEPGSIKLRGYRPTVKGNPRQINAAIELIRESRRPLLYVGGGAIASGAHAEIQELAELFNIPVTTTLMGIGAFDEHHPLSLGMLGMHGTAYANFAVTDCDLLICVGARFDDRVTGKLDEFASRAKVIHIDIDPAEVGKNRIPEVPIVGDVRKVLLDLLRRCKQTSAKTTPNQNQEWLNLINRWREDYPLVVPQHPDSIPPQEVIVEVGSQAPHAFYTTDVGQHQMWAAQFLKNGPRRWISSAGLGTMGFGLPAAIGAKVAFPDEQVICISGDASFQMCLQELGTAAQYKINVKTVILNNGWQGMVRQWQQAFHGERYSCSNMEVGMPDVELLAQAYGIKGIVVTHREQLKDAIAQMLAYDGPVILDVRVTKDENCYPMVAPGKSNAQMIGLPKQPPKTSVEPVYCSHCGTSNLPNHNFCSECGTKL

SEQ ID NO: 14878 - protein, 330 aa, Nostoc sp. PCC 7120
MLSSATFKLQPTATGLTENHRLRLFSGSSNVQLSQEVARYLGMDLGPMIRKRFADGELYVQIQESIRGCDVYLIQPCCQPVNDHLMELLIMVDACRRASARQVTAVIPYYGYARADRKTAGRESITAKLVANLITQAGANRVLAMDLHAAQIQGYFDIPFDHVYGSPVLLDYLTSKQLHDIVVVSPDVGGVARARAFAKKLNDAPLAIIDKRRQAHNVAEVLNVIGDVKGKTAVLVDDMIDTGGTIAAGAKLLREEGARQVYACATHAVFSPPAVERLSSGLFEEVIVTNTIPIPESDRFPQLVVLSVANLLGETIWRIHEDTSISSMFR

SEQ ID NO: 14879 - protein, 426 aa, Nostoc sp. PCC 7120
MSFSHLGLSNEIINAVTELGYTKPTPIQMQSIPAVLSGRDLLAGAQTGTGKTASFTLPLLHLLSQDSLKSASNASSPIRALILTPTRELAAQVESSVRDYGKYLKLNSMVMFGGVSINPQKQRLKGRVDILVATPGRLLDHVQQGTVNLSQIEILVLDEADRMLDMGFIRDIRRILSLLPKQRQNLLFFATFSDKIKELAAGLLNRPQMIEVARRNVTADTVTQKVYKIERDRKRDLLAHLIRKDNWYQVLVFTRTKYGADRLVKQLGHERIQALAIHGNKSQSARTHALAKFKNGSLQVLVATDIAARGLDISELPYVVNFDLPYVPEDYVHRIGRTGRAGASGEAVSLVSADEYHLLADIEKLIEKRLPFELVAGIGANSQAKPEPTQDERKQKPKDSQHQPRSAAQGVPKKSGKKRLTNSGKR

SEQ ID NO: 14880 - protein, 656 aa, Nostoc sp. PCC 7120
MAIFARRIGLNQHSAYGSRQRVIVMKNFGKKALIKQQSPKRVAWTGALAASLIMLPTMFGGNPVLAQKAERESLSYGELIQKVNQEQVKRVELDETEQIAKVYLKGQKPDAPPIQVRLLEQNNELINRLKEKNVDFGEISSANSRAAVGLLINLMWILPLVALMLLFLRRSTNASSQAMNFGKSRARFQMEAKTGVKFDDVAGIEEAKEELQEVVTFLKQPERFTAVGARIPKGVLLVGPPGTGKTLLAKAIAGEAAVPFFSISGSEFVEMFVGVGASRVRDLFKKAKDNAPCLIFIDEIDAVGRQRGTGIGGGNDEREQTLNQLLTEMDGFEGNTGIIIIAATNRPDVLDSALLRPGRFDRQVIVDAPDLKGRLEILQVHSRNKKVDPSVSLEAIARRTPGFTGADLANLLNEAAILTARRRKEAITILEIDDAVDRVVAGMEGTPLVDSKSKRLIAYHEVGHGLVGTLLKDHDPVQKVTLIPRGQAQGLTWFTPNEEQGLISRSQLKARITSTLAGRAAEEIVFGKPEVTTGAGDDLQKVTSMARQMVTKFGMSELGPLSLENQSGEVFLGRDWMNKSDYSEEIAAKIDSQVREIINTCYQTSKELLQTNRVVMERLVDLLTEQETIEGDLFRKIVSESQNPVVDEQLSMVNSQ

SEQ ID NO: 14881 - protein, 400 aa, Nostoc sp. PCC 7120
MGRAKKVVLAYSGGVDTSVCIPYLKQEWGVEEVITLAADLGQGDELEPIREKALKSGASESLVADVKESFIKDYAFPAIQANALYENRYPLGTALARPLIAKILVEAAAKYGADAIAHGCTGKGNDQVRFDVSCTALNPNLKILAPAREWGMSREATIAYGEKFGIPSPVKKSSPYSIDKNLLGRSIEAGALEDPKFEPPEEIYEMTKAIADTPNEPEYIEIGFTQGLPTTLNGIPKDPVALIQELNQVVGSHGVGRIDMIENRLVGIKSREIYESPAMLVLIPAHRDLESLTLTADVSHYKRGIEETYSQIVYNGLWYSPLKAALDAFIQKTQERVSGTVRVKLFKGNATIVGRWSDSSLYTPDLATYGAEDQFDHKAAEGFIYVWGLPTRIWAQQDRG

SEQ ID NO: 14882 - protein, 388 aa, Nostoc sp. PCC 7120
MKLAARVSQVTPSITLAIAAKAKAMKAEGIDVCSFSAGEPDFDTPAHIKAAAAKALDEGKTKYGAAAGEPKLREAIARKLQKDNHLDYKPENVIVTNGGKHSLYNLIVALIDPGDEVIIPAPYWLSYPEMVTLVGGKSVIVPTDASTGYKITPEQLRKAITPKTKLFVLNSPSNPTGMVYTPEEIKALAQVVVDADIYVVSDEIYEKILYDGAQHISIGSLGKEIFNRTLISNGFAKAYSMTGWRLGYLAGPVDIIKAASSIQGHSTSNVCTFAQYGAIAALEDSQDCVEEMRQAFAKRRQVMLDRLNAIPGLSTAKPDGAFYLFPDISKTGLKSLEFCDALIEEHKVAVIPGIAFGADDNIRLSYATDLATIEKGLDRLEKFVRSRI

SEQ ID NO: 14883 - protein, 488 aa, Nostoc sp. PCC 7120
MLDQNQTPLIESIKACTARHHAAFYTPGHKQGRGIAQPLADLLGKAVFSADLTELADLDNLSAPQGVIQEAQQLAAAAFGASQTWFLVNGSTCGVEAAILATCRPGDKIILPRNVHSSAIAGLILSGAIPIFIYPEYDPVLDIAHSITPEAVKAALQQHPDAKAVLTVYPTYYGVCGDLEAIAQVTHHYNIPLLVDEAHGAHFAFHPELPTSALAAGADLTVQSIHKVLGAMTQASMLHIQGDRINAVRVSQALQLLQSTSPSYVLLASLDAARQQMALSGKQLMSRTLQLANEARERISQIPGLSVLQPPTKTPSPGFTTLDKTRLTVTVSGLGLTGFAAEEILDEQLGVTAEFATLQHLTFIISLGNTATDIEQLVQGFTTLAETTLPTKALVNPKVNSNLEYFSEISPRDAFFADSETLSIEQACDGICAEIVCPYPPGIPVLMPGEVITKPAIEYLQHIQSLGGFITGCADTSLNTLKVLVNSH

SEQ ID NO: 14884 - protein, 56 aa, Bradyrhizobium japonicum
  misc_feature (21)..(21): Xaa can be any naturally occurring amino acid
  unsure (1)..(56): unsure at all Xaa locations
LQGFGFITPDDGSKDVFVHFXAIQNDGYKSLDEGQKVSFTIESGAKGPAAANVTGS

SEQ ID NO: 14885 - protein, 391 aa, Paracoccus denitrificans
MTKAVIVSAARTPVGSFLGSFANLPAHELGAIVLKAVVERAGIDPSEVSETILGQVLTAAQGQNPARQAHIKVGLPRESAAWVINQVCGSGLRTVALAAQQVLLGDARIVVAGGQESMSLAPHAAYIAPGQKMGDMKMLDTMIKDGLWDAFNDYHMGTTAENVAGKWEISRAEQDQFAVASQNKAEAAQKAGKFADEIVPVTIKSRKGETVVDADEYIRHGATLEAMENVRPAFSKEGTVTAGNASGLNDGAAAVLVMTEDEAARRGLTPLARIASYATAGVDPQIMGTGPIPASRKALEKAGWSVGDLDLVEANEAFAAQAIAVNRDMGWDPSIVNVNGGAIAIGHPIGASGCRILNTLLFEMQRRDAKKGLATLCIGGGMGVALCLERP

SEQ ID NO: 14886 - protein, 1129 aa, Petroselinum crispum
MSSSRPANSSSNPGRANQNARVVLTTLDAKIHADFEESGNSFDYSSSVRVTSAVGENSSIQSNKLTTAYLHHIQKGKLIQPVGCLLAVDEKSFKIMAYSENAPEMLTMVSHAVPSVGEHPVLGIGTDVRTIFTAPSAAALQKAVGFTDINLLNPILVHCKTSGKPFYAIAHRVTGSLIIDFEPVKPYEVPMTAAGALQSYKLASKAVNRLQALPGGSMERLCDTMVQEVFELTGYDRVMAYKFHDDDHGEVTAEVTKPGLEPYFGLHYPATDVPQAARFLFLKNKVRMICDCRANSAPVLQDEKLPFELTLCGSTLRAPHSCHLQYMENMNSIASLVMAVVINDSDEVVESSDRNSVKSKKLWGLVVCHNTSPRFVPFPLRYACEFLAQVFAIHVSKELELENQIVEKNILRTQTLLCDLLMRDAPLGIVSQSPNMMDLVKCDGAALLYKNKVYRLGATPSDYQLRDIVSWLTEYHTDSTGLSTDSLYDAGYPGALALGDVVCGMAVVKITSHDMLFWFRSHAAGHIRWGGAKAEPDENHDGRKMHPRSSFKAFLEVVKTRSTTWKEFEMDAIHSLQLILRKALSVEKAVAAQGDEIRSNTDVIHTKLNDLKIEGIQELEAVTSEMVRLIETATVPIFAVDADEIVNGWNTKIAELTGLPVDQAMGKHLLTLVEDSSVGTVVFLLALALQGKEEQGIPFEFKTYGSREDSVPITVVVNACATRGLHDNVVGVCFVAQDVTSQKTIMDKFTRIQGDYKAIVQNPNPLIPPIFGTDEFGWCSEWNQAMTELSGWRREDVMNKMLLGEIFGIQTSCCHLKSKEAFVNLGVVLNNALTGQISEKICFSFFATDGKYVECLLCASKKLHGEGTVTGIFCFLQLASQELQQALHIQRLTEQTAMKRLKTLSYLRRQAKNPLCGINFVREKLEEIGMGEEQTKLFRTSVHCQRHVNKILDDTDLDSIIDGYLDLEMSEFRLHDVYVASRSQVSMRSNGKAIQVVDNFSEEMMSETLYGDSLRLQKVLADFMSVCVNLTPVGGHLGISVTLTEDNLGQSVQLVHLEFRITHTGAGVPEEAVSQMFGSDSETSEEGISLLISRKLVKLMNGDVHYLREAGKSTFIITVELAAASKRES

SEQ ID NO: 14887 - protein, 1115 aa, Ipomoea nil
MENYGKAVTFSSSATSNLNTGKAIAQYNADAKLMAEFEQSRESGKSFDYSRSVIHAPQNVTEEEMTAYLSRIQRGGLIQPFGCMLAIEEPSFKIVGFSENCFDLLGLKSGVEPPERMSLIGIDARTLFTLSSRASLAKAVASREISLLNPIWVHSKINQKPFYAVLHRIDVGIVIDLEPANSADPALLLAGAVQSQKLAVRAISRLQSLPGGDIGTLCDTVVEDVQKLTGYDRVMVYKFHDDSHGEVVSEIRRSDLEPYLGLHYPATDIPQAARFLFKQNRVRMICDCNAQPVKVLQCEELKQPLCLVNSTLRSPHGCHTKYMANMGSIASLVMAVVINSSESMKLWGLVVCHHTSPRYVPFPLRYACEFLMQAFSLQLYMELQLASQLAEKKILQTQTLLCDMLLRDAPFGIVTQTPSIMDLVRCDGAALYYNGKCWLLGVTPTETQVKDIAEWLLHNHGDSTGLSTDCLSDAGYPGAPLLGDAVSGMATARITSKDFLFWFRSHTAKEVKWGGAKHHPEDKDDGGRMHPRSSFIAFLEVVKSRSLPWEDSEINAIHSLQLIMRDSLQGIGENYMKSVSSPQQNDSDGVRFYELSSMALELVRLVETATVPIFGVDSSGLINGWNAKIAELTGLQANVAIGKYLIDDVTHEDSHETFKALMCRALQGEEDRNVEVKLLKFGNHPTKEVVYLVVNACTSRDYKNDIIGVCFVGQDITPEKAVMDKFVRLQGDYEAIIQSLNPLIPPIFASDENACCSEWNAAMERLTGLVKCEVIGKRLPGEIFGGLCRLKGQDALTKFMILLYQGISGHDTEKLSFGFFDRKGNFIDVFITANKRTDERGNIIGCFCFLQTMAVDHPQISARDIEDDRECLSTLKEFAYIQQQMKNPLNGIRFTHKLLEGTVTSDHQKQFLETSEACEKQILSIIENMDSGGIVDGNRVELKTEEFVIGNVIDAVVSQVMIPLKEKNLQLLHDIPDQIKSLPIYGDQIKLQLVLSDFLLSIVRHAPSPDGWVEIRVSPGLKLIQDGNVFIHIQFRMTHPGQGLPSALIEDMVRGGTRWTTQEGVVLHLSQKLVRMMNGHVHYVREQQKCYFLIDLDFKTQKPRSRESSMDTKAD

SEQ ID NO: 14888 - protein, 1054 aa, Saccharomyces cerevisiae
MTIIVASLFLPYTPQFEADVTNSDTAKLVESSMIKVDCNNQELSNNKQERSSSVTSASSHYIGLPQEAQINGEPLQRANVGSPATGVNYHNEMEMLSSEQFLEELTANATHAANSGIPPANNPVSSGSTAQRPSVEEFFSAPSARVCSPSQEASASSISASRSSAHHNDLSSSLMKNPNLSFDSHLPRVRSSSKSAVITPVSKSVPDVDPAVVDVAKVREEFQQQASLPSMKRVSGSTAGDSSIASSSSNLRYSQQFQDNFIEDTDSEDDIDSDLETDATKKYNVPKFGGYSNNAKLRASLMRNSYELFKHLPWTIVDSDKGNGSLKNAVNIAVAEKTVKEPVSWVGTMGIPTDELPHEVCHKISKKLEQDFSSFPVVTDDITFKGAYKNYAKQILWPTLHYQIPDNPNSKAFEDHSWDYYQKVNQKFSDRIVSVYKPGDTIWIHDYHLMLVPQMVREKLPKAKIGFFLHVSFPSSEVFRCLANRERILEGIIGANFVGFQTKEYKRHFLQTCNRLLAADVSNDEVKYHCNIVSVMYAPIGIDYYHLTSQLRNGSVLEWRQLIKERWRNKKLIVCRDQFDRIRGLQKKMLAYERFLIENPEYIEKVVLIQICIGKSSDPEYERQIMVVVDRINSLSSNISISQPVVFLHQDLDFAQYLALNCEADVFLVDALREGMNLTCHEFIVSSFEKNAPLLLSEFTGSSSVLKEGAILINPWDINHVAQSIKRSLEMSPEEKRRRWKKLFKSVIEHDSDNWITKCFEYINDAWESNQETSTVFNLAPEKFCADYKASKKHLFIFKISEPPTSRMLSLLSELSSNNIVYVLSSFTKNTFEGLYNGVLNIGLIAENGAYVRVNGSWYNIVEELDWMKEVAKIFDEKVERLPGSYYKIADSMIRFHTENAEDQDRVPTVIGEAITHINTLFDDRDIHAYVHKDIVFVQQTGLALAAAEFLMKFYNSGVSPTDNSRISLSRTSSSMSVGNNKKHFQNQVDFVCVSGSTSPIIEPLFKLVKQEVEKNNLKFGYTILYGSSRSTYAKEHINGVNELFTILHDLTAA

SEQ ID NO: 14889 - protein, 277 aa, Nicotiana tabacum
MDSSSCSSHFFYPMNSDLSSDSSWEWSNLNSTSLPFNVNDSEEMLLFGVLTNTAQETTSETVTSYHVKEEEVSSKSKVIKEIEEKPAKEKSFRGVRRRPWGKFAAEIRDSTRNGVRVWLGTFDSPEAAALAYDQAAFLMRGTSAILNFPVETVQESLRDMKCHVDEECSPVVALKKRHSLRKKSLSSKKSNSSSNSKVVREVKMENVNVVVFEDLGPDYLEQLLSSSSSDHSSCNEAFYHVNQRFTQLCIYLFIYLYYFCLFSFRGREIGEFHLFVL

SEQ ID NO: 14890 - protein, 102 aa, Ricinus communis
MAMTKTKELVCSNAVVVFSKTYCPYCTSVKKLLDQLGAKYKVVELDTESDGSEIQTALAEWTGQRTVPNVFIGGKHIGGCDSTTAKHSQGQLVPLLTEAGAV

SEQ ID NO: 14891 - protein, 350 aa, Coptis japonica
MAFHGKDDVLDIKAQAHVWKIIYGFADSLVLRCAVELGIVDIIDNNNQPMALADLASKLPVSDVNCDNLYRILRYLVKMEILRVEKSDDGQKKYALEPIATLLSRNAKRSMVPMILGMTQKDFMTPWHSMKDGLSDNGTAFEKAMGMTIWEYLEGHPDQSQLFNEGMAGETRLLTSSLISGSRDMFQGIDSLVDVGGGNGTTVKAISDAFPHIKCTLFDLPHVIANSYDLPNIERIGGDMFKSVPSAQAIILKLILHDWNDEDSIKILKQCRNAVPKDGGKVIIVDVALDEESDHELSSTRLILDIDMLVNTGGKERTKEVWEKIVKSAGFSGCKIRHIAAIQSVIEVFP

SEQ ID NO: 14892 - protein, 347 aa, Coptis japonica
MEVKKDNLSSQAKLWNFIYGFAESLVLKCAVQLDLANIIHNSGTSMTLSELSSRLPSQPVNEDALYRVMRYLVHMKLFTKASIDGELRYGLAPPAKYLVKGWDKCMVGSILAITDKDFMAPWHYLKDGLSGESGTAFEKALGTNIWGYMAEHPEKNQLFNEAMANDSRLIMSALVKECGNIFNGITTLVDVGGGTGTAVRNIANAFPHIKCTVYDLPHVIADSPGYSEVHCVAGDMFKFIPKADAIMMKCILHDWDDKECIEILKRCKEAVPVKGGKVIIVDIVLNVQSEHPYTKMRLTLDLDMMLNTGGKERTEEEWKKLIHDAGYKGHKITQITAVQSVIEAYPY

SEQ ID NO: 14893 - protein, 428 aa, Medicago sativa
MAQILAPSIQCQTRITKTSPLATPISSKMWSSLVMKQNKKVARSAKFRVMAINSGTINRVEDLLNLDITPFTDSIIAEYIWIGGTGIDVRSKSRTISKPVEHPSELPKWNYDGSSTGQAPGEDSEVILYPQAIFKDPFRGGNNILVICDAYTPQGEPIPTNKRHKAAEIFSNPKVEAEIPWYGIEQEYTLLQTDVKWPLGWPVGGYPGPQGPYYCAAGADKSFGRDISDAHYKACLYAGINISGTNGEVMPGQWEYQVGPSVGIEAGDHIWASRYILERITEQAGVVLTLDPKPIEGDWNGAGCHTNYSTKSMREDGGFEVIKKAILNLSLRHKVHIEAYGEGNERRLTGKHETASINTFSWGVANRGCSIRVGRDTEKNGKGYLEDRRPASNMDPYVVTALLAESTLLWEPTLEAEALAAQKIALKV

SEQ ID NO: 14894 - protein, 181 aa, Antirrhinum majus
MAAKVSSDPLVIGRVIGDVVDHFTSTVKMSVIYNSNNSIKHVYNGHELFPSAVTSTPRVEVHGGDMRSFFTLIMTDPDVPGPSDPYLREHLHWIVTDIPGTTDSSFGKEVVSYEMPRPNIGIHRFVFLLFKQKKRGQAMLSPPVVCRDGFNTRKFTQENELGLPVAAVFFNCQRETAARRR

SEQ ID NO: 14895 - protein, 235 aa, Matricaria chamomilla
MIRNNAFDSDFALLESVRRHLLDDNAPPMSCRSNNFLFPHLSDSWGELPLQQNDSEDMLIAKFLNEALPLQQNDSEGIITPEMTSSSENIFFVKSEPETSSFQPKSLGSQKGKHYRGVRRRPWGKYAAEIRDPAKNGARVWLGTYETAEDAAVAYDMAAYRMRGSRALLNFPLRINSGEPEPVRITSKRKTTSPSEGLVVKKVKVELEMSTQAEFPLVYGCYYCVILGPFLVKCF

SEQ ID NO: 14896 - protein, 1518 aa, Clostridium saccharobutylicum
  misc_feature (40)..(40): Xaa can be any naturally occurring amino acid
  misc_feature (252)..(252): Xaa can be any naturally occurring amino acid
  misc_feature (371)..(371): Xaa can be any naturally occurring amino acid
  misc_feature (417)..(417): Xaa can be any naturally occurring amino acid
  misc_feature (466)..(466): Xaa can be any naturally occurring amino acid
  misc_feature (473)..(473): Xaa can be any naturally occurring amino acid
  misc_feature (475)..(475): Xaa can be any naturally occurring amino acid
  misc_feature (479)..(479): Xaa can be any naturally occurring amino acid
  misc_feature (485)..(485): Xaa can be any naturally occurring amino acid
  misc_feature (544)..(544): Xaa can be any naturally occurring amino acid
  unsure (1)..(1518): unsure at all Xaa locations
MENNIPNAQGLYDPSFEHDACGIGTIVNIDGENHMKFYQXCLTILEKLEHRGGTGADENTGDGAGILFNIPHKFFKEELQSKGITLEEEGDYAVAMMFLPQDEKARKEAVSLFEDISKEEGLELIGWREVQTNPSILGKASLEAMPYIMQAFVKRPNGTKKEKDFERKLYIVRRNIEKRAAWISKFLNETFYIASFSSKTIVYKGMLLSTQLRVFYKDLEDERVETSLALVHSRYSTNTFPSWERAHPNRFXIHNGEINTLRGNVNKVSRVLGKDVIRVLPIINKEGSDSAIFDNNLEFLYMNGMDLPRAVMMAIPEPWYKSKTMSKEKRDFYEYNATLMEPWDGPAAIVFTDGERVGAVLDRNGLRPSRXYITKDRRLILSSEVGALDVPAEIVEKKDRLMPGRMLLVDTVKKEVXSDEELKDTYAKENPYGEWLEQNLVTLDKMKESKKFKIEYDKETRKRLEXTFGYTYXGXKTTXLPMAKXGAEPLAAMGVDTPVAVLSKQSQPLFNYFKQLFAZVTNPPIECDYRRNSYKRLNVLSWAXEGIFLEISLQNCELIKLDSPIINNEELAKIKEYNKENLKPKVIDIVFDKGGSLEDALHEVFEKAQEAYEKGYTILILSDRNVCEAKVPIPSLLAVSALHQYLVQKGTRTSVAIILESGEPREVHHFATLIGFGASAVNPYMAYEALRGLREEGLLELDYDKAVYNYNKAVLKGIIKILSKMGISTIQSYQGAQIFEAIGIGKEVIEKYFTNTVSRIGGIGLKEIQREAEINHEKGFNDKTYAADFTLDSPGYEKLRSGENGAEEHLYNPLTIHKLQESTKTGNYELFKEYTSLIDKEEAEINLRGLLEFNYNSKEIPIEEVESVSEIVKRFKTGAMSYGSISKEAHEALAIAMNRIGGKSNTGEGGEDKERWTLDANGDSRRSSIKQIASGRFGVTSEYLVNADELQIKLAQGAKPGEGGQLPATKVYPWIAKTRHSTTGVGLISPPPHHDIYSIEDLAQLIYDLKNANTGARVSVKLVSECGVGTVAAGVAKGGAEVILISGYDGGTGASPKNSIKNAGLPWELGLAEAHQTLLLNDLRERVRVEVDGKLMSGRDVAVAALLGAEEFGFATAPLVTLGCVMMRVCNLDTCPVGVATQNEELRKRFKGNQNMLLTLCIYSTRIREIMAKLGFRKLDEMIGRVDKLKQKENIHGWKAKNVDLSAVLYTPDKYKGKVVKFDETKKYDFKLNKVIDEKIFLDKFKDAIENKIKTNFEIDVTNTDRALGTILGSEITRVNGTDGLPEDTISIKCNGAAGQSFGAFIPKGLTFEVEGDANDYFGKGLSGGKLIVYPPKKSTFIAEDNILIGNVALYGATSGKVFINGIAGERFCVRNSGATAVVEGVGAHGLEYMTGGKVVVLGKTGINFAAGMSGGVAYIYEEDPNFRINLNEEMILLEELNIDDEEELKALIEEHVKVTGSPKANKILYNFETEKVKFHKIIPKDYKKVLETVEKYKNLGSDEEEALIKTFQEIKGI

SEQ ID NO: 14897 - protein, 664 aa, Citrus unshiu
MVSSMFYNSVNLSTAVFSRTHFPVPVYKHSCIEFSRYDHCINYKFRTGTSGQSKNPTQMKAAVAESPTNNSDSENKKLRILVAGGGIGGLVFALAAKRKGFEVLVFEKDMSAIRGEGQYRGPIQIQSNALAALEAIDLDVAEEVMRAGCVTGDRINGLVDGISGSWYIKFDTFTPAAEKGLPVTRVISRMTLQQILAKAVGDEIILNESNVIDFKDHGDKVSVVLENGQCYAGDLLIGADGIWSKVRKNLFGPQEAIYSGYTCYTGIADFVPADIESVGYRVFLGHKQYFVSSDVGAGKMQWYAFHKEPAGGVDDPEGKKERLLKIFEGWCDNVVDLILATDEEAILRRDIYDRTPIFTWGRGRVTLLGDSVHAMQPNLGQGGCMAIEDGYQLAVELEKACKKSNESKTPIDIVSALKSYERARRLRVAVIHGLARSAAVMASTYKAYLGVGLGPLSFLTKFRIPHPGRVGGRFFIDLAMPLMLSWVLGGNSSKLEGRSPCCKLSDKASDNLRTWFRDDDALERAMNGEWFLVPSGSENVVSQPIYLSGSHENEPYLIGSESHEDFPRTSIVIPSAQVSKMHARISYKDGAFYLIDLQSEHGTYVTDNEGRRYRVSSNFPARFRPSDTIEFGSDKKAIFRVKVIGTPPNNNSERKEAGEILQAV

SEQ ID NO: 14898 - protein, 504 aa, Cucumis sativus
MDMNVPNYKLGKTLGIGSFGKVKIAEHALTGHKVAIKILNRRKIKNLDMEEKVRREIKILRLFMHPHIIRLYEVIETPSDIYVVMEYVKSGELFDYIVEKGRLQEDEARNFFQQIISGVEYCHRNMVVHRDLKPENLLLDSKCNVKIADFGLSNIMRDGHFLKTSCGSPNYAAPEVISGKLYAGPEVDVWSCGVILYALLCGTLPFDDENIPNLFKKIKGGIYTLPSHLSSGARELIPSMLVVDPMKRITIPEIRQHPWFQAHLPRYLAVPPPDTMQQAKKIDEDILQEVVKMGFDRNQLVESLRNRIQNEATVAYYLLLDNRFRVSSGYLGAEFQETMETGFNRMHPSDPTNPAVGHRLPGYMDYQGMGLRAQFPVERKWALGLQSRAHPREIMTEVLKALRELNVAWKKIGHYNMKCRWLPGIPGHHEGMINNPVHSNHYFGDKSTIIENDGVVKSPNVIKFEVQLYKTREEKYLLDLQRVQGPQFLFLDLCAAFLAQLRVL

SEQ ID NO: 14899 - protein, 246 aa, Solanum lycopersicum
MGRGRVELKRIENKINRQVTFAKRRNGLLKKAYELSVLCDAEVALLVFSNRGKLYEFCSTNNMLKTLDRYQKCSYGTLEVNRSIKDNEQSSYREYLKLKAKYESLQRYQRHLLGDELGPLTIDDLEHLEVQLDTSLKHIRSTRTQMMLDQLSDLQTKEKLWNEANKVLERKMEEIYAENNMQQAWGGGEQSLNYGQQQHPQSQGFFQPLECNSSLQIGYDPITTSSQITAVTNAQNVNGMIPGWML

SEQ ID NO: 14900 - protein, 152 aa, Casuarina glauca
MALTERQEALLKQSWEVLKQNIPGHSLRLFALIIEAAPESKYVFSFLKDSNEIPENNPKLKAHAAVIFKTICESATELRQKGQAVWDNNTLKRLGSIHLKNKITDPHFEVMKGALLGTIKEAVKENWSDEMGCAWTEAYNQLVATIKAEMKE

SEQ ID NO: 14901 - protein, 152 aa, Casuarina glauca
MALTEKQEALLKQSWEVLKQNIPAHSLRLFALIIEAAPESKYVFSFLKDSNEIPENNPKLKAHAAVIFKTICESATELRQKGHAVWDNNTLKRLGSIHLKNKITDPHFEVMKGALLGTIKEAIKENWSDEMGQAWTEAYNQLVATIKAEMKE

SEQ ID NO: 14902 - protein, 376 aa, Solanum tuberosum
HIITAVIGSGVLSLAWATAQLGWVAGPTVLLLFFFVTYYTSALLSDCYRTGDPVTGKRNYTYMDAVRANLGGFQVKICGVIQYANLFGVAIGYTIAASISMVAVNRSNCFHKQGHRAACNVSSTPYMIIFGVMEIIFSQIPDFDQISWLSIVAAVMSFTYSTIGLGLGVAQVAETGKIEGSLTGISIGTEVTEMQKIWRSFQALGAIAFAYSYSLILIEIQDTLKSPPAEAKTMKRATLISVAVTTVFYMLCGCFGYAAFGDQSPGNLLTGFGFYNPYWLLDIANVAIVVHLVGAYQVYCQPLFAFVEKTATEWYPDSKIITKEIDVPIPGFKPFKLNLFRLVWRTIFVIITTVISMLMPFFNDVVGILGAFGFWP

SEQ ID NO: 14903 - protein, 398 aa, Arabidopsis thaliana
MDSNFHYSIDLNEDQNHHEQPFFYPLGSSSSLHHHHHHHHHQVPSNSSSSSSSISSLSSYLPFLINSQEDQHVAYNNTYHADHLHLSQPLKAKMFVANGGSSACDHMVPKKETRLKLTIRKKDHEDQPHPLHQNPTKPDSDSDKWLMSPKMRLIKKTITNNKQLIDQTNNNNHKESDHYPLNHKTNFDEDHHEDLNFKNVLTRKTTAATTENRYNTINENGYSNNNGVIRVCSDCNTTKTPLWRSGPRGPKSLCNACGIRQRKARRAAMAAAAAAGDQEVAVAPRVQQLPLKKNLQNKKKRSNGGEKYNHSPPMVAKAKKCKIKEEEEKEMEAETVAGDSEISKSTTSSNSSISSNKFCFDDLTIMLSKSSAYQQVFPQDEKEAAVLLMALSYGMVHG

SEQ ID NO: 14904 - protein, 559 aa, Schizosaccharomyces pombe
LTMCGILAVHHVAEDIEAFKPKALHLSKQLRHRGPDWSGKAIRNQTILCHERLAIVGVESGAQPLVSDDGKLVLTVNGEIYNHLKLRENLKGNYKFKTYSDCEVILYLYREHGPACANMLDGMFSWVLYDQDKDKVVAARDPIGITTLYQGFSSDSPDTAYFASELKALHPVCDKIIAFPPGHYYDSETKQTVRYFKPSWWDENKIPSNPVDYKLLRETLEASVRKRLMAEVPYGVLLSGGLDSSLIASIAARETEKLANSTSQSEEARTITAWPKLHSFAIGLPGSPDLLAARKVADFLHTFHHEHTFTIDEVLMLFVTLFTILRHMMLPLSVQVPPCIYYLVKSRLKVLKWFCLVRDLTKSLVDTYISVMPPLVRPSIPSVCVVLRTCTYPNACVLTSQLWLGVLRLVFLSWIRTFWKLLLTLILRRKCILTVVKKNIFFAKALDTTHDSSLQPYLPQDILWRQKEQFSDGVGYSWIDALKDTAELCISDDEFALPRREWGDDIPTTKEAFWYRKLFDEIFPRQCADTVMRWVPKAEWGCPEDPSGRYQAGHVAALK

SEQ ID NO: 14905 - protein, 306 aa, Schizosaccharomyces pombe
KMATSSAAAAASTPVNANTITETKNSTFFFDFMMGGVSAAVSKTAAAPIERVKLLIQNQDEMIRAGRLSHRYKGIGECFKRTAAEEGVISLWRGNTANVLRYFPTQALNFAFKDKFKKMFGYKKERDGYAKWFAGNLASGGAAGAASLLFVYSLDYARTRLANDAKSAKKGGERQFNGLVDVYRKTYRSDGLRGLYRGFGPSVVGIVVYRGLYFGMYDTLKPVVLVGPLEGNFLASFLLGWAVTTGSGVASYPLDTIRRRMMMTSGEAVKYSSSFECGRQILAKEGARSFFKGAGANILRGVAGAG

SEQ ID NO: 14906 - protein, 361 aa, Schizosaccharomyces pombe
RLFVGRIPPQATREDMMDFFKGYGQILDCKLMNGFGFVEVEDARDARDIVNDFQGKEFMGSRIVVEPARGERRRRENFRESAASKYPRPRRTGFRLIVENLSEDVSWQDLKDVMRKAGEPTFTDAHRENPGAGVVEFSTEEDMRNALTSLNGEVIKGQAVTLREDPDAANEPLPEVPSRFRSRSPPARRRYRDDYRRGGDYRRDAYRPGRDDERRYAPRGEYRRNNRDEYRRGGRDEYRRNSRSDYRRPHDDEYRRPRGDEYRPGRDEYRRSRDDGRPSHDDEYRRDAYSRSPSPRRDREENRSPAYEGSKSYSAAPEASMESSAPTESYDKPAASEEQQPLQNHSDVGNGSAEGQVAAEW

SEQ ID NO: 14907 - protein, 395 aa, Schizosaccharomyces pombe
MVNTEVYIVSAVRTPMGSFGGSFASLPATKLGSIAIKGALERVNIKPSDVDEVFMGNVVSANLGQNPARQCALGAGLPRSIVCTTVNKVCASGMKATILGAQTIMTGNAEIVVAGGTESMSNAPYYAPKNRFGAKYGNVELVDGLLRDGLSDAYDGLPMGNAAELCAEEHSIDRASQDAFAISSYKRAQNAQATKAFEQEIVPVEVPVGRGKPNKLVTEDEEPKNLNEDKLKSVRAVFKSNGTVTAANASTLNDGASALVLMSAAKVKELGLKPLAKIIGWGEAAQDPERFTTSPSLAIPKALKHAGIEASQVDYYEINEAFSVVAVANTKILGLDPERVNINGGGVAMGHPLGSSGSRIICTLAYILAQKDAKIGVAAVCNGGGGPSSIVIERV

SEQ ID NO: 14908 - protein, 334 aa, Schizosaccharomyces pombe
MTLSGKPAALLVGTLKHAHKEWEALGKYAELKTYSDGTREDFLAKCKTEFQNVKAICRTYNSKFYMGIWDKEIIDNLPPSVKFICHLGAGYETVDVAACTARGIQVSHVPKAVDDATADVGIFLMLGALRGFNQGIFELHKNNWNANCKPSHDPEGKTLGILGLGGIGKTMAKRARAFDMKIVYHNRTPLPEEEAEGAEFVSFDDLLAKSDVLSLNLPLNAHTRHIIGKPEFQKMKRGIVIVNTARGAVMDEAALVEALDEGIVYSAGLDVFEEEPKIHPGLLENEKVILLPHLGTNSLETQYKMECAVLMNVKNGIVNDSLPNLVPEQRGDIE

SEQ ID NO: 14909 - protein, 313 aa, Schizosaccharomyces pombe
ERRKMIERESYKQVTTHTMQSWTSSLIRSLANKLAATKTDQRIPTLTPEHALSVYSKASKRLFMMDYDGTLTPIVRDPNAAVPSKKLLDNLATLAADPKNQVWIISGRDQQFLRNWMDDIKGLGLSAEHGSFVRKPHSTTWINLAELLDMSWKKEVRRIFQYYTDRTQGSSIEEKRCAMTWHYRKADPENGAFQALECEALLEELVCSKYDVEIMRGKANLEVRPSSINKGGIVKQILSSYPEDSLPSFIFCAGDDRTDEDMFRSLHKNTRINKETSFAVTIGSDKKLSIADWCIADPANVIDILADLANFTN

SEQ ID NO: 14910 - protein, 605 aa, Schizosaccharomyces pombe
MTKDAESTMTVGTYLAQRLVEIGIKNHFVVPGDYNLRLLDFLEYYPGLSEIGCCNELNCAFAAEGYARSNGIACAVVTYSVGALTAFDGIGGAYAENLPVILVSGSPNTNDLSSGHLLHHTLGTHDFEYQMEIAKKLTCAAVAIKRAEDAPVMIDHAIRQAILQHKPVYIEIPTNMANQPCAVPGPISAVISPEISDKESLEKATDIAAELISKKEKPILLAGPKLRAAGAESAFVKLAEALNCAAFIMPAAKGFYSEEHKNYAGVYWGEVSSSETTKAVYESSDLVIGAGVLFNDYSTVGWRAAPNPNILLNSDYTSVSIPGYVFSRVYMAEFLELLAKKVSKKPTTLEAYNKGRPQTVVSKAAEPKAALNRVEVMRQIQGLVDSNTTLYAETGDSWFNGLQMKLPAGAKFEVEMQWGHIGWSVPSAMGYAVAAPERRTIVMVGDGSFQLTGQEISQMIRHKLPVLIFLLNNRGYTIEIQIHDGPYNRIQNWDFAAFCESLNGETGKTKGLHAKTGEELTSAIKVALQNKEGSTLIECPIDEAACIQEWIAGYRTFTPRKIQLTFLDTQACMAAGLLSASEGTPYSESYFLSASEGICPYSESY

SEQ ID NO: 14911 - protein, 1482 aa, Pseudomonas aeruginosa PAO1
MKAGLYHPETFKDNCGFGLIAHMQGEPSHQLLQTAIEALTCMTHRGGINADGKTGDGCGLLIQKPDLFLRAVAREAFSVDLPEQYAVGMVFFNQDPVKAEAARENMNREIVAAGLELVGWRKVPIDTSVLGRLALERLPQIEQVFIGGAGLSDQDFAIKLFSARRRSSVANAADSDHYICSFSHKTIIYKGLMMPADLAAFYPDLGDERLQTAICVFHQRFSTNTLPKWPLAQPFRFLAHNGEINTITGNRNWAQARRTKFTNELIPDLEARELGPLVNRVGSDSSSMDNMLELMVTGGMDLFRGLRMIIPPAWQNVETMDADLRAFYEYNSLHMEPWDGPAGVVLTDGRYAVCLLDRNGLRPSRWVTTKNGYITLASEIGVWDYKPEDVIAKGRVGPGQILAVDTETGQVLHSDDIDNRLKSRHPYKQWLRQNALRIQATLDDDHGVASYDADQLKQFMKMFQVTFEERDQVLRPLGEQGQAVGSMGDDTPMAILSRRIRSPYDYFRQQFAQVTNPPIDPLREAIVMSLETCLGVEQNIFEEAPHHANQAILTTPVISPAKWRTIMTLDRPGFDRHFIDLNYDESMGLEAAVRNIADQAEEAVRGGKVLLILSDRHIAPGKLPVHAALAVGAVHHRLVQTGLRCDSNILVETATARDPHHFAVLIGFGASAVYPFLAYEVLADLIRTGEVLGDLYEVFKYYRKGISKGLMKILSKMGISTVASYRGAQLFEAVGLSDEVTDLCFTGVASRIQGARFVDIENEQKLLAAEAWSNRKPIQQGGLLKFVYGGEYHAYNPDVVNTLQAAVQQGDYEKFKEYTALVDQRPVSMIRDLLQVKTAAQPLALDEVEPLEAIFKRFDAAGISLGALSPEAHEALAEAMNTLGGRSNSGEGGEDPARYGTLKSSKIKQVATGRFGVTPEYLVNAEVLQIKVAQGAKPGEGGQLPGGKVNGLIARLRYAVPGVTLISPPPHHDIYSIEDLAQLIFDLKQVNPQALVSVKLVSEPGVGTIAAGVAKAYADLITISGYDGGTGASPITSIKYAGSPWELGLAETHQTLRGNDLRGKVRVQTDGGLKTGLDVIKAAILGAESFGFGTAPMIALGCKYLRICHLNNCATGVATQNDKLRKDHFIGTTAMVINFFTFIATETREWLARLGVRSLGELIGRTDLLEILPGETAKQQNLDLAPLLGSELIPADKPQFCEVEKNPPFDQGLLAEKMVELSKAAIEGLSGGEYELDICNCDRSIGARVSGEIARLHGNQGMAKAPVVFRFKGTAGQSFGVWNAGGLHLYLEGDANDYVGKGMTGGKLVITPPKGSPFKTQESAIVGNTCLYGATGGKLFAAGTAGERFAVRNSGSHAVVEGTGDHCCEYMTGGFVCVLGKTGYNFGSGMTGGFAYVLDMDNTFVDRVNHELVEIQRISGEAMEAYRSHLRKVLVEYVNETASEWGANILENLDDYLRRFWLVKPKAASLGSLLTSTRANPQ

SEQ ID NO: 14912 - protein, 561 aa, Citrobacter freundii
MASSGTTSEKMRFTGAQLVIHLLERPGDYDRCRHPGSCSILPIYDALSQSTQIRHVLARHEQGAGFIAQGMARTEGKPAVCMACSGPGATNLITAIADARLDSIPLVCITGQVPASMIGTDAFQEVDTYGISIPITKHNYLVRDIAELPQVMSDAFRIAQSGRPGPVWIDIPKDVQTATIELEVLPEPGARTAPPTFDSASVHDAAAMINAAKRPVLYLGGGVINAPEQVRSLAEKANLPTTMTLMALGMLPKAHAVAGMLGMHGARSTNFILQEADLLIVLGARFDDRAIGKTEQFCPNAKIIHVDIDRSELGKIKQPHVAIQGDVADVLAHDAAGRRQSRDEWRQLVADLQREFPSPIPQESDPLTHYGLINAVAACVNDEAIVTTDVGQHQMWVAQAYPLNRPRQWLTSGGLGTMGFGLPAAVGAALANPQRKVICFSGDGSLMMNIQEMATAAENQLDVKIILMNNEALGLVYQQQSLFYQQGVFAATYPGMINFMQIAAGFGLQTCDLNHEADPQAALQAIIDRPGPALIHVRIDAEEKVYPMVPPGAANTEMVGE

SEQ ID NO: 14913 - protein, 226 aa, Cyanothece sp. ATCC 51142
MELSVPQDKPLAAVFRRIGGGAYPPVVEAFDRGGKTIFFPGDPAERVYFLLKGAVKLSRVYEAGEEITVALLRENSVFGVLSLITGQRSDRFYHAVAFTPVELLSSPIEQVEQALKINPNLSILMLQGLSSRILQTEMMIETLAHRDMGSRLVSFLLILCRDFGVPTPEGIRIELKLSHQAIAEAIGSTRVTVTRLLGDLRQEEMISIHKKKITVHNPVALSQQFA

SEQ ID NO: 14914 - protein, 553 aa, Ralstonia solanacearum GMI1000
MDIKRTILWVIFSLSVVLLFDNWQRANGHQSMFFPTPQTVTTTAAAPGGTPAGDVPKAAAPAAAGSQAAPATGAVSQTPASEKIVVTTDVIRATVDTAGAIVTKLELLTQKDHDGNPMVLFDRSLERTYLARSGLIGGDFPNHTTVFTASAGPRDLGTGGEVSLTLTADKGGAKLAKTYVFKRGSYVIDTRFDVTNDGAAPINPTLYMELARDGGAVEQSRFYSTFTGPAVYTDTDHYHKITFADIDKSKAHVPAPTDSGWVAMVQHYFASAWIPAASAKREFYVDRIDTNFYRVGMQQALGTVAPGASVSATARLFAGPQEERMLEGITPGLELVKDYGWLTIIAKPLFWLLEKIHKLLGNWGWSIVALTVLVKLVFFPLSATSYRSMAKMKDLQPRMTAIRERHKGDPQKMNQEMMTLYRTEKVNPLGGCLPIVIQIPVFIALYWVLLSSVEMRGAPWLGWVHDLASPDPFYILPILMAVSMFVQTRLNPTPPDPVQAKMMMFMPIAFSVMFFFFPAGLVLYWVVNNCLSIAQQWSINRMLGTNKKAAAAK

SEQ ID NO: 14915 - protein, 299 aa, Ralstonia solanacearum GMI1000
MLFSARTRRLAMLAVPLAVSAFHAMASTPTLDRIRETGIIRLAYREDSVPFSYTDGGKPIGYSIDICSRVVDAIRTSLKRPELKVQYLPVTAANRMDTIASGKADLECGSTNNAPERREKVAFTIPHYITKGRMLVKVSSGLQQWDDLHGKTVVAARGSSASDVMHKLNDATGLGMRTVDTNDLKTAFAMLSTGKADAFAGDDVLLAGMRATSDNPSDYVVAGKTQLVSSYAMMMSKQDADFKKLVDQSMTRLIVDGEVQKLYKKWFQQPIPPNNLNLQIPMNHLLRDSFSIPTDSAGN

SEQ ID NO: 14916 - protein, 912 aa, Ralstonia solanacearum GMI1000
MDFPRRHSLSPLRFLTPSRSPQTERTPGASPAPGNTPRRASGPLSGLTKGFNALFKADPEKAALRQAFSMAEAGKAEPLAGLLQSHPHLVMAVNANGTTLLASAAKRGHLEVVRLILARPESAILINQINKRGETPLQRAVEAGRTAVVGALLQHAEIDPNRVDKHGQTPLHIAAGNRHADITRALVEHPRTEVNRPDRDGNTALHLAVRKRGLDAAGELLRHPHIDPNQPNAKHHTPLTMAIAKLHVDCVHALASHPGVQVNRPGTDGHPPVWQAVAQFVEHLESGSFARHRVRTGKELDCLFELARSPHIDLNVLGPGGHTPLTRLACAKPHRYVQAGRDTTFTEIQHKQRVVDAVRAFLQGSSEGRNGFNPNARNIDGQVAVQIALRNGHDALASRLLQDPRTDPGAAVTRLIDKPGRLSRLLNPGGPEPKTHGAGQAFLVEQLERSIRFRNPDGTANPWISLALCEYAARFEITAEAQRRASAESRSCRPDAASYAAQALEFSMAFQQAPIIKVAAQALIHHAPRHQAHFNLGGIDVSRSEIQAWAAGDVPEAVLNAHIEQYVRDGRINVHADALLTRGQQLLNAMKRLTPEDQRRSVEQSAADLRAVIGQRSDQLKQALKAEASEAALEALAAFEAFETVEAMEAMAAEQAEDAEEAREEEEVEDAQEDEAAQARAHTEAEHQKARLKGRIDDLRNAGKGIKHLLKMGPTKEDPDYAFHANVALADTWSYVQSRKDPELKDNLTAALLLRLADVGKDVPCNTGCIQRVAFASEGIDTSLHQGEPGRGAMYEEIVSIAKAVNERYKARYGEVEAFDPAAPGTSSAPSVTARDRQAILRYTKGAEIDDDVVTDVKRDMVRADVLADLVGRRGWTRATVEELLAPILDNVEYLDEFSVKASGSPDVHAGP

SEQ ID NO: 14917 - protein, 393 aa, Ralstonia solanacearum GMI1000
MSDRIIIASAARTPMGAFQGELASLTAPQLGATAIRAAVERAGLKPEQIEEVIMGCVLPAGQGQAPARQAALGAGLPLSVGCTTVNKMCGSGMRAAMNAYDALLAGSVDVVVAGGMESMTNAPYLIPKGRGGYRIGHGMIYDHMMLDGLEDAYDKGRAMGTFGEDCAEKYGFTREAQDAFAMDSVRRAQAATESGAFRWEIAPVTVPGKAGDTVVDTDEGPRRIKVDKIPSLKPAFKKDGTVTAASSSSINDGAAALVMMRESTARQLGIAPLAVMLGHTTHAQAPGWFTTAPVTAIDKLFKKLGWSADSVDLFEINEAFAVVPMAAMHDLRIPHEKVNVNGGACALGHPIGASGARLIATLLGALRHRGGKRGVASLCIGGGEATAVGIELL

SEQ ID NO: 14918 - protein, 420 aa, Ralstonia solanacearum GMI1000
MAAPSKTDTPINPKRRRVLATVAGGSAMALIDPLVRAGAWAAGSDAPEKTELKVGFIPLTDCASVVMAATLGLDKKYGIKIVPSKEASWAGVRDKLVSGDLDAAHVLYGLVYGVQLGIGGPKKDMAVLMTLNNNGQAITLSSKLKEAGVRDGASLKALMTREKRDYTFAQTFPTGTHAMWLYYWLAAHGIHPLQDAKAITVPPPQMVANMRVGNMDGYCVGEPWGARAIADGIGFTAETTQAIWKDHPEKVLGTTAEFAQKYPNTARALTAAVLEASKFIDASASNRRKTAETVAAKSYVNTDMDIILDRMLGRYTNGLGKTWDDADPMRFYHDGAVNFPYLSDGMWFLTQHKRWGLLKTHPDYLAIARQVNRVDIYKQAAAATGTPLPKSDLRTARLIDGVVWDAKNPAAYADSFKIKA

SEQ ID NO: 14919 - protein, 316 aa, Ralstonia solanacearum GMI1000
MSSEGLMVFTGNANPKLAEAVVKHLNIPLGKALVGRFSDGEVQVEIQENVRGKHVFILQSTCAPTNDNLMELMVMVDALKRASARRITAAIPYFGYARQDRRPRSARVAISAKVVANMLEVAGVERVLTMDLHADQIQGFFDIPVDNIYASPILLEDLRKKNYDNLLVVSPDVGGVVRARALAKQLGVDLAIIDKRRPKANVAEVMNIIGEVEGRNCVIMDDMIDTGGTLCKAAQVLKERGAKQVFSYCTHPVLSGGAAARIADSALDEVVVTDTIPLRDDAAQCGKIRQLSTAPLLAETFTRIVRGDSIMSLFAE

SEQ ID NO: 14920 - protein, 333 aa, Ralstonia solanacearum GMI1000
MLYFAAMIANFNPDRALALAQQTFDIEAQAVLGLKSQVSADFARAVEMVLRCTGRVVVSGIGKSGHIARKVAATLASTGTPAFFVHPAEASHGDLGMVTRDDVFIGFSNSGEVSELTAILPLVKRLGARLIAVTGNPQSSLAQHADVILNSRVEVEACPLNLAPTASTTAQMALGDALAVALLDARGFGADDFARSHPGGSLGRKLLTHVRDIMRQGDAVPRVTEDTPLSQALMEITRKGMAMTAVVDATGRAVGVFTDGDLRRLLETPRDWRTVPMHEVMHRNPHAVGPDQLAVEAVEVMETHRINQLLVVDAAGQLMGALHIHDLTRAKVI

SEQ ID NO: 14921 - protein, 399 aa, Ralstonia solanacearum GMI1000
MTKQLQDAYIVAATRSPIGKAPKGSFKNLRPDDLLATVLKSAVAQVPDLDPKLIEDAIVGCAIPEAQQGLNVARIGALLAGLPNTVGGVTVNRFCASGLTAVAMAADRIRVGESDVMIAAGVESMSMVPMMGNSPSMSPDIFTRDENIGIAYGMGLTAERVAQQWKITRDAQDAFSLASHQKALAAQQAGEFKDEITPIEIIEKFPNLGTGAIDLKTRTLSLDEGPRADTSLEGLAKLRAVFANKGSVTAGNSSQTSDGSGALILVSEKILRQFNLTPLARFVSFAVRGVPPEIMGIGPKEAIPAALRAAGLTQDQLDWIELNEAFAAQSLAVIQDLGLDTGKINPLGGAIALGHPLGATGAIRAATVVHGLRRRNLKYGMVTMCVGTGMGAAGIFERV

SEQ ID NO: 14922 - protein, 199 aa, Ralstonia solanacearum GMI1000
MPHIPKLVILDRDGVINLDSDQFIKSPDEWIAIEGSLEAIAELNQAGYQVVVATNQSGIGRGLFEAAALNAMHEKMYKALASQGGRVDAVFFCPHTAAEGCDCRKPKAGMFREIARRFDVDLAGVPVVGDSLRDLQAGAEVGAVPHLVLTGKGAKTLQAGNLPPGTHVHQDLRAFARALLSPAHHPPGAPSRAPTEPAP

SEQ ID NO: 14923 - protein, 540 aa, Ralstonia solanacearum GMI1000
MSFSELGLSDKLVRAVAELGYAEPTPIQRQAIPAILKGGDLLAGAQTGTGKTAGFTLPLLHRLSAVQPNKVQTPHGMRYPIRALVLTPTRELAAQVEESVRAYGKYLPLKSMVMFGGVGINPQIDALKRGVDIVVATPGRLLDHVGQRTIDLSHIELLVLDEADRMLDMGFIHDIRKILNILPPKRQNLLFSATFSDDIRALADRLLDQPALIEVARRNTTAETVEQRIYPVDRERKRELLAKLVSDNDWHQVLVFTRTKHGANRLAEQLTRDGIPALAIHGNKSQSARTRALSEFKAGTLRVLVATDIAARGIDIDQLPHVVNFDLPNVPEDYVHRIGRTGRAGAQGEAISLVCVDEHGLLRDIERLIKRELPRTVLAGFEPDPTIAPEPIPNGRNSARAPRQGGGRSQPPRQAAGNAAPREPRAPREPRRESGASGQGQGQGQGQGRNGGGRQRQAQGQRDGQAAPKPRGGQGSGNGNGQSHARGQRQGNGQGNGQGGQRRASNTQAAQPTKVAQPAPKQPFNGLFAKAAALLGGRKA

SEQ ID NO: 14924 - protein, 122 aa, Ralstonia solanacearum GMI1000
MAIKKILVVDDSPTEALFLSEILSKNGFKVSVAADSDQAMAKLEGEPFDLVLMDVVMPGQNGYQATRAIKKDDRFKDIPVIICTTKGLETDRVWGMRQGASDYIVKPVKAEELLEKIAKLPQ

SEQ ID NO: 14925 - protein, 394 aa, Ralstonia solanacearum GMI1000
MDAHRLHTAARLANIRAFHVMELAKQARELELAGRSIIHMGIGEPDFTAAEPVVRAAEAAMRRGVTQYTGALGIRPLREAIARYYHTVYGLDIAPERIIVTAGASAALLLACAVLVEIGGEVLMPDPSYPCNRHFVPAFDGVARLVPSGPQTRFQLSAEQVEANWTDRTQGVLLASPSNPTGTSILPDELRRIVETVRGRGGFSIVDEIYQGLSYDQAPVSALSFGDDVVTINSFSKYFNMTGWRLGWLVAPTELVPQFEKVAQNLFICASAVAQHAALACFEPEALAIYEGRKAEFHRRRDFIVPALESLGFQVPVKPDGAFYVYADCRGVNHPHAGDADALTQSMLNDAGVVLVPGLDFGPYTAHHYIRLSYATAMDHLEEAVARLARLFRR

SEQ ID NO: 14926 - protein, 580 aa, Ralstonia solanacearum GMI1000
MSQDNATGAAAASTSNFLRQIIDTDLEQGTYAGRQDTAGHALPPIITRFPPEPNGYLHIGHAKSIWVNFGLAKEYGGRCHLRFDDTNPVKEDTEYVDSIIDAVHWLGYSWQNGTGEHLYYASDYFEQLYGFAEVLIQRGAAYIDSQSAEQIAANRGDFTRPGTPSPFRDRSVEENLALFRDMRAGKYQDGQHVLRARIDMAAPNIVMRDPVLYRIRHAHHHRTGDAWCIYPMYDFTHCISDALENITHSLCTLEFENNRPLYDWVLDHLRDAGALPAPLPHQYEFARLHLTYAITSKRKLLQLVNEKRVDGWDDPRMPTLVGIRRRGYTPESIQLFCERVGVSKADSWIDMSILEAAVRDDLDARAPRSVAVLDPVKLILDNVPADFNEPCSAPVHPKQPELGRREFPLTRELWIEREDFTETPPKGYFRLFPGNKVRLRYGYVIECTGCDKDADGNITAVHANIIPDTKSGTPGADSVKVKGNIHWVSAAHALEAEVRLYDRLFTDPQPDSGDKNFLDALNPDAKRVVTAYLEPTLATAKPEDRFQFERHGYFVADRIDSQPGKPVFNRVVGLKDSWGK

SEQ ID NO: 14927 - protein, 202 aa, Ralstonia solanacearum GMI1000
MRLTPAFVRERLHAPPSWVPEHTDESRLIDTSLKLREAAVLVPLVQRSAGLTVLLTQRNATLSQHAGQISFPGGGRESSDRDAVDTALRETVEEVGIGAEHVEVVGRLPDYITGSGFHVSPVVGLLTPGFIARPDPSEVAEVFEVPLAFLMDPANHEVRELRWDDRVRCFYAMPYRRPGGGRYFIWGATAGMLRNLYHLLAA

SEQ ID NO: 14928 - protein, 608 aa, Ralstonia solanacearum GMI1000
MTQPQNGSGAIAHAESDTDTLIANAATQASAFAALGLDERIARALGELNYTQPTPVQAQAIPACLSGRDLLVTSQTGSGKTAAFMLPAIQRISEQPEPQRPRADGPQQRVKGRRPRPAPAKPSLLVLTPTRELALQVTTATAQYGRHLRRIVCASILGGMPYPKQLDMLARMPDIIIATPGRLLDHIDSGRIDLSALDMLVFDEADRMLDMGFADDIEAIVGATPASRQMLMFSATMDRRIEQLAERMMREPQRIEIAAARIDQSHIEERLHFTDDLSHKQQLLDHLLRDATLKQAIVFTATKRDADSLAERLTETGFSAGALHGDMHQGARNRTLTALRRGQLRVLVATDVAARGIDVPDITHVVNFDLPKQAEDYVHRIGRTGRAGRSGIAINLVNHGDTFQWRRIERFVDRRIDATVVEGLEPKRSPKPRSGGPRAGGDRGGYRGNGGGNWRGQRDGYAARTGNGGNGGNSEGRFQRSFGGDRESFAPRRDDRGDRGTGYQGGQQRDWGNRDNAAPRQSYGQQTRNGDRFDPRQPRSQEGRSDWQQRPARGGYGNSNGNGSSYGNRDGAPRRFGDDNSNGAPRRSYGNSNGNSYGSKGRSRDFDR

SEQ ID NO: 14929 - protein, 195 aa, Ralstonia solanacearum GMI1000
MPTLEPSVLDQLFHEARTHNVWLDNPVDDELLHTLYDTVKYGPTAANSTPARFVFVKSAAAKEQLVPCMSAGNQEKTRQAPVTVIVAYDTQFHEQLPKLFPHVDARSWYAGDQARINAAALMNSSLQGGYLVIAARALGLDCGPMGGFDADKVNATFFPDGQWKVNFICNLGYGDTSKVHPRNPRLTFEEACRVL

SEQ ID NO: 14930 - protein, 405 aa, Ralstonia solanacearum GMI1000
MSTPHLPIYMDYSATTPVDPRVVDKMIPYLREQFGNPASRSHAFGWEAEKAVETAREQVAALVNADPREIVWTSGATESDNLALKGAANFYGSKGKHIITVKTEHKAVLDTARELERQGFEVTYLDVQENGLIDIEQFKQALRPDTILASVMSVNNEIGVIQDIEQIGEICRDKGVIFHVDAAQATGKVELDLQKLKVDLMSFSAHKTYGPKGIGALYVRRKPRIRVEAQMHGGGHERGMRSGTLPTHQIVGMGEAFRIAREEMATENERIRMLRDRLHRGLTAMEEVYVNGDMERRVPHNLNISFNFVEGESLIMAIKDVAVSSGSACTSASLEPSYVLRALGRNDELAHSSIRFTVGRFTTEQEVDYVVELLKSKIGKLRDLSPLWEMYKDGVDLNSIQWAAH

SEQ ID NO: 14931 - protein, 334 aa, Ralstonia solanacearum GMI1000
MKPGILVTRAIFPEVLARLRETFDVADNQADAVHPPEALAERLQGRVGLLANAADAINADLIARVPTLRAVANMAVGYNNLDLPAMTRAGILATNTPDILTETTADFGWALLMAAARRVPESERWLRAGHWKRWTYDMFLGAEVHGSTLGILGMGRIGQALARRASGFSMRVIYHNRSRLSPEIERDTRATYVGKDELLAQADHLVLVLPYSSESHHAIGAAELARMKPTATLVNLARGGIVDDAALARALAEKRLFAAGLDVYEGEPAVHPALLEAEPVSLTPHIASATHGTRLGMANLAADNLIAALGFGPRAGQPPNLLNPEALSVRRASA

SEQ ID NO: 14932 - protein, 298 aa, Ralstonia solanacearum GMI1000
MPEGFRCGMVAIVGRPNVGKSTLMNALVGQKVSITSRKAQTTRHRITGIQTTDDAQFVFVDTPGFQTRHATALNRSLNRAVTSTLTSVDAVLFVVEAGRYGPDDAKVLSLLPRETPVILIVNKVDRLDAYTRAEMVAVFLQEMAQVFPFKEIVPMSAKNRDDILRLLGIVRPYLPEGEPMYDPEALTDRSERFLAAEIVREKVFRWTGDELPYSSTVVVDKFETEGRLRRVFVTILVDRDAHKAMIIGAKGAKLKQISTEARMDMEKLFDGKVYLEVWVKVKSGWADNEAGLRAYGYE

SEQ ID NO: 14933 - protein, 403 aa, Ralstonia solanacearum GMI1000
MHAMLSSKVSTLAPSPIQLMAARTREAREAGRDVVDLTLGEPDFATPEHICEAARRAIADGLTKYTPISGLARLREAVARKFRDENGIECTAAETLVGCGGKQVIYQAFVATIDPGDEVLIPAPYWSSYADIVTLCGGIVKPLPTTPESGYALQPQTLAAGISARTKWLVLNAPSNPSGTAYTAAQLEAFAEVLRRSGNPRLLILADDIYEHIVFDGLRFASFTAVAPDLRHRTLTVNGVSKAYAMTGWRVGYGCGPKPLIDAMANVQMQVNSHTASISQAAAIAALEGPQDELARRRAIFEQRRDSLLSRLGGIAGLRTPRPQGAFYLFPDAQAFIGRRTPEGCAIDDDQALAAYLLDSGVAVVPGSGFGMPGCLRLSYATSEARLELAATRLAGALRRLGD

SEQ ID NO: 14934 - protein, 416 aa, Ralstonia solanacearum GMI1000
MALIVHKYGGTSMGSVERIKNVAKRVAKWHRAGHQIVVVPSAMSGETNRLLGMAKEISAQPDPRELDMIASTGEQVSVGLLAIALHAEGIDAISYTGWQVPVQTDSAYTKARIQSIDDERVRADLEAGRVVVITGFQGIDGEGHITTLGRGGSDTSAVAVAAALEAEECLIYTDVDGVYTTDPRVVDDARRLDKITFEEMLEMASLGSKVLQIRSVEFAGKYRVKTRVLSSLTDPLMPLEVEMHSGTLITFEEDSNMEAAAISGIAFARDEAKITVIGVPDKPGIAYQILGPVADANIDVDMIIQNQSVDGKTDFTFTVPRGDYQRALGILNDSVKGHIGAANVSGDPKVSKVSVVGVGMRSHVGIASKMFRTLSEEGINIQMISTSEIKISVLIDEKYMELAVRALHKAFELDQA

SEQ ID NO: 14935 - protein, 413 aa, Ralstonia solanacearum GMI1000
MKTIQKSAKLNNVCYDIRGPVLEKAKQMEEEGHQIIKLNIGNLAPFGFDAPEEIQQDMIRNLPNSAGYSDSKGIFAARKAVMHYTQQQGIKNVTLDDIYLGNGASELIALATNALLDAGDELLLPAPDYPLWTAMTSLSGGTPVHYLCDESNGWMPDLDDIRAKITPNTKGIVVINPNNPTGALYSDALLHDIIAIAREHGLVIFADEVYDKVLFDDNRHTAMASLSEDVLTVTFNSLSKSYRSCGYRAGWMVVSGDKRPAKDYIEGLNMLSSMRLCANVPGQWAIQTALGGYQSINDLVAPGGRMRRQRDLAYELITAIPGVSCVKPKAALYMFPRLDPSVYPIDDDQTFIRQLLEEERVLLVQGTGFNWHSPDHFRIVFLPHEDDLREAIGRIARFLERYRQRHGTGIRAA

SEQ ID NO: 14936 - protein, 862 aa, Ralstonia solanacearum GMI1000
MRLDKLTTRFQEALADAQSLALGNDNPYIEPLHLLLAMLRQPDGATKNLLARAGVNAKGLEIALDNAIKRLPQVQGGEQVQVGRDLGSLLQATEKEGIKRGDQFIASELFLLAVADDKGEAGRVAREHGLARRALEAAIDAVRGGQTVGSAEAESQREALKKYTIDLTEQARIGKLDPVIGRDDEIRRAIQILQRRTKNNPVLIGEPGVGKTAIVEGLAQRIINGEVPESLKNKRVLVLDMAGLLAGAKYRGEFEERLKAVLNDIAKEEGQTILFIDEIHTMVGAGKAEGAIDAGNMLKPALARGELHCIGATTLDEYRKYIEKDAALERRFQKVLVDEPSVEATIAILRGLQEKYELHHGVEITDPAIVAAAELSHRYITDRFLPDKAIDLIDEAAARIKMEIDSKPEAMDKLDRRLIQLKIEREAVKKETDEASQKRLELIEQEIERLQKEYADLEEIWKAEKGAAQGAAAVKEEIDRVKLEIARLQREGKLDKVAELQYGRLPELEGKLKAATAAEASGQRPPNKLLRTQVGAEEIAEVVSRATGIPVSKMMQGERDKLLRMEDRLHERVVGQDEAVRLVSDAIRRSRAGIADENKPYGSFLFLGPTGVGKTELCKALAGFLFDSEEHLIRIDMSEFMEKHSVSRLIGAPPGYVGYEEGGYLTEAVRRKPYSVVLLDEVEKAHPDVFNILLQVLDDGRLTDGQGRTVDFKNTVIVMTSNLGSQLIQQMASESPDVIKGAVWQEVKTHFRPEFLNRIDEVVVFHALDQGHIESIARIQLQRLAARLAHMDLTLEISDPAVAKLASAGYDPVFGARPLKRAIQQQIENPVARMILEGRFTPKDVVPVDYHDGHFTFDRVVR

SEQ ID NO: 14937 - protein, 628 aa, Ralstonia solanacearum GMI1000
MNNNWFQKAAIWLVIALVLFTVFKQFDKPRAQEGVTYSQFMDDAKGGKIKRVEVQGRNLLVTPNEGGKYTIISPGDIWMVGDLMKYGVQVTGKAEEEQGVLLSALYYLGPTLLIIVFWFYMMRQMQGGGKGGAFSFGKSRARLIDENNNSVTFADVAGCDESKEEVVELVDFLKDPQKFQKLGGRIPRGVLLVGPPGTGKTLLARAIAGEAKVPFFSISGSDFVEMFVGVGAARVRDMFENAKKQAPCIVFIDEIDAVGRHRGAGMGGGNDEREQTLNQMLVEMDGFEANSGVIVIAATNRADVLDKALLRPGRFDRQVYVGLPDIRGREQILKVHMRKVPIGNDVDASVLARGTPGFSGADLANLVNEAALFAARRNKRVVDMQDFEDAKDKIYMGPERKSAVIREEERRATAYHESGHAVVAKLLPKADPVHKVTIMPRGWAGGLTWQLPEHDKHYAYKDTMLEEIAILFGGRAAEEVFLGAMSTGASNDFERATKMARDMVTRYGMSDSLGTMVYVDTEQDGFFGRMSSKTVSEATQQKVDSEIRRIVDEQYALAKRLLEENREKVEAMTAALLEWETIDADQVNDIMAGKPPRPPRYGSSGGGSTPPNGGTPAGVTPGNVPATA

SEQ ID NO: 14938 - protein, 476 aa, Ralstonia solanacearum GMI1000
MSLFRTKNLDHMIRTGQGDTGLKKVFGPLDLTFLGVGAIIGTGIFVLTGTGALTAGPALTLSFVVAALACGFAALCYAEFASTIPVSGSIYTYAYATLGELVAWIIGWDLMLEYGLATSAVSVGWSGYFQSLMAGFGLHLPAALMAAPGAIPGVQTLFNLPALLIMLIITAVLSLGVRESARFNNIMVAIKVAVVVLFIVVGARHVQPANWQPFMPFGMSGVFGAAALVFFAFIGFDAVTAAAEEVRNPERDLPIGIIGSLGVCTILYVVVAAIMTGIVPYTKFAGVDHPVSLALQMGGETWVAGFVDLGAIIGMTTVILVMGYGQTRVIFAMSRDGLLPKRLSRVHPRYATPFFNTWLVGIVFALIAAFVPLNVLAELINIGTLAAFSLIAIAVLVLRRKRPDLPRGFRCPGVPFVPAAAVVLCVFLMSQLQALTWIAFVVWMVIGLLVYFGYARSRSLLHAPDRAAVPGSEAAH

SEQ ID NO: 14939 - protein, 393 aa, Ralstonia solanacearum GMI1000
MTDVVIVSAVRTAVGKFGGSLAKIPAPELGAAVIREALSRAKVAPDQVSEVIMGQVLTAGSGQNPARQALIKAGLPDMVPGMTINKVCGSGLKAVMLAANAIVAGDADIVVAGGQENMSAAPHVLPGSRDGFRMGDTKLIDSMIVDGLWDVYNQYHMGITAENVAKQYGITREAQDAFAVASQNKAEAAQKSGRFNDEIVPILIPQRKGDPIAFAQDEFVRHGATLESMTGLKPAFDKAGTVTAANASGLNDGGAAVVVMSAARAKELGLTPLATIRAYANAGVDPKVMGMGPVPASKRCLSRAGWSVGDLDLMEINEAFAAQALAVHQQMGWDTAKVNVNGGAIAIGHPIGASGCRILVTLLHEMQKRDAKKGLASLCIGGGMGVALAVERP

SEQ ID NO: 14940 - protein, 394 aa, Ralstonia solanacearum GMI1000
MAREVVVVSGVRTAVGTFGGSLKDVAPCELGALVVREALARAQVGGEEVGHVVFGHVINTEPRDMYLSRVAALEGGVPAETPAFNVNRLCGSGLQAVVSAAQTILLGDVDVAIGGGAESMSRAPYLAPAARWGSRMGDAGLVDMMLGALHDPFQAIHMGVTAENVAREYGIGRELQDQTAVESHRRASRAIQAGYFKGQIVPVTIKSRKGDVQFDTDEHVRHDATLEDMAKLRPVFAKENGTVTAGNASGLNDAAAALVLMERSLAERRGLKPLARLVSYGHAGVDPKVMGIGPVPATRKALERAGLTVKDLDVVEANEAFAAQACAVTQQLGLDPARVNPNGSGISLGHPIGATGALITVKALHELQRIGGRYALVTMCIGGGQGIAAVFERI

SEQ ID NO: 14941 - protein, 509 aa, Ralstonia solanacearum GMI1000
MHTPITPTGLEGQSELRRRLRARHLTMIALGGAIGTGLFVASGASIAQAGPGGALFTYTLIGVMVYCLMTSLGELAVHLPVSGSFVTYSRLYVEEGFGFALGWNYWFALAVSVAVELAAAQLVMKYWFPGVSGMVWSAAFLLLMFVLNAFSVRGFGEAEYWFSMIKVVTIVVFLLIGLAMIFGIMKGGPQSGWHNFTVGDAPFVGGLPAMIGVAMIAGFSFQGVETIGVAAGEAENPARTIPRGIRQTFWRILLFYVLAILIIAVLLPYTDPNLLRNEATDIGVSPFALVFQHAGLAFAAGMMNAVVLTALLSSGTSSLYVSTRILYDLALEGQAPRWFARVSGNGVPHRALLATSAVGALCFFSSLFGDQVVYLWLLNTSAVTCFIAWFGIALAHYRFRKGFLHQGHTVDQLEYRSPFFPFGPILVAALCVIIILGQNTKALFAPIDNFGAFVATYCGVFLFVAIWLGYRWRYKTRFVRYEQMQFSPRHIRAAQAGDGGAALPGVAAD

SEQ ID NO: 14942 - protein, 577 aa, Ralstonia solanacearum GMI1000
MYIYDAIDQQLVDERVVQFSDQTRRFLSGQLTEDEFRVLRLQNGLYLQRHAPMLRVAIPYGMLASRQLRKLAGIARRWDRGYGHFSTRQNLQFNWPRLEDAPAILAELATVQMHAIQTSGNCIRNTTTDHFAGIAPDEIVNPLVWCEIIRQWSMLHPEFAFLPRKFKIAVSGALTDRAAVGIHDIGLQAVGQDGRIGFRVWVGGGMGRTPMVGKLIHPFVPWQDLLTYLQATLRVYNLHGRRDNKYKARIKILVKDLTPEVFRRQVDEQWRPIRGGPDTVTEAFVDSVAARFTVSPYDAQAANDPDDTAALAEANPSFRRWLRGNVHPHRVPGYVAVTASLKAPGRAPGDITAEQMETMADLADRYGFGELRVSHEQNLILADVRRSGLFALWQDLGAAGLATPNIGKITNIIACPGGDFCALANAVSIPLAQAIHARFDDLDHVHDIGELDLNISGCINACGHHHIGHIGILGVDKAGEAWYQITLGGRQNGAGGPEGSDSPAAIGRIIGPSFAQAQVPDVIERLIDTYLAHRDSDAERFVDVVGRIGIEPFQAAVYPDAAIAARRSHAEVAHGGA

SEQ ID NO: 14943 - protein, 399 aa, Ralstonia solanacearum GMI1000
MTTASAARPAPSADTLAPIAPPPSRLPKVGTTIFTVMSALAAEKQAVNLGQGFPDFDCDPRIVDAVSDAMRAGFNQYPPMTGVPALRQAIAAKIATLYGHAYDAEREITVTAGATQALLTAVLCCVHPGDEVIVFEPTYDSYLPSIELAGGKAVPITLEAPDYRIPFDKLAAAITPRTRLIMLNTPHNPTGTVWHADDMRRLAEIVAPTDVLLLSDEVYEHMVYDGVPHASVSRIPELARRAFVVSSFGKTYHVTGWKVGYVAAPAALSAEFRKVHQFNVFTVNTPVQHGLAAYMADPRPYLELPAFYQHKRDLFRAGLEHTRFKLLPCQGTYFQCVDYSALSDLPEAAFAKWLTSEIGVAAIPVSAFYSQPHESGVVRFCFAKKDETLRLALERLSRL

SEQ ID NO: 14944 - protein, 585 aa, Ralstonia solanacearum GMI1000
MNMPSAEFSHANSGSPAEMMGSDILVNALAAEGVEFVWGYPGGAVLYIYDAFYKQNKIEHILVRHEQAAVHAADGYARATGKVGVALVTSGPGVTNAVTGIATAYLDSIPMVIITGNVPTHAIGQDAFQECDTVGITRPIVKHNFLVKDVRNLASTIKKAFYIASTGRPGPVVVDIPKDVSRELCKYEYPKTIEMRSYNPVNKGHSGQIRKAVSLLLQAERPYIYTGGGVVLANASEELRQLAALTGYPVTNTLMGLGAFPGASKQFLGMLGMHGTYEANMAMQHCDVLIAVGARFDDRVIGSPAHFASQPRKIIHIDIDPSSISKRVKVDIPIVGNVKDVLQEMIAQIQAGEAKPNKTALAKWWEQIEQWRSVDCLKYDRTSEIIKPQYVVEKIWELTAGDAFVCSDVGQHQMWAAQFYKFNEPRRWINSGGLGTMGVGLPYAMGVKKAFPDKEVVTITGEGSIQMCIQELSTCLQYDTPVKICSLNNGYLGMVRQWQEIEYDNRYSHSYMQALPDFVKLAEAYGHVGMRIEKTADVEPALREAFRLKDRTVFLDFQTDPTENVWPMVQAGKGISEMLLGAEDL

SEQ ID NO: 14945 - protein, 267 aa, Ralstonia solanacearum GMI1000
MTRLLTRRTFIHAMLAASAVAALLPGRPAHADALANIQKAGVIRVAIPNDFPPFGSLGTDLKLQGYDIDMANLVAKELGVKAELVPVTSTNRIPFLTTGKVDVVISSLGKNAERAKVIDFTQAYAPFPKSVYGPKDVSIKTPADLAGKTIGVTRGSTEDLALTAVAPASATIKRYEDNNATAQSYLIGQVQLVTLGNIVANAVNERTRLRQLDVKFPVEDTPCYVGVAKGEPALLEKVNAAITKLKSDGRLNDLSQRWIKMPLPAKL

SEQ ID NO: 14946 - protein, 773 aa, Ralstonia solanacearum GMI1000
MNDKLHDASPDTLDKGAEAELRRAALEYHRSPTRGKIEVRSTKTLINQRDLSLAYSPGVAYACTEIERDPSLAAEYTSRANLVGVITNGTAVLGLGDIGPLAGKPVMEGKGCLFKKFAGVDVFDIELAERDPDKLVDIIASLEPTLGGINLEDIKAPECFYIEQKLRERLNIPVFHDDQHGTAIISSAALLNGMKVVGKQIGEVKVAVSGAGAAAIACLDLMVSLGVKRENVFVVDSKGVIYAGRDAKMEPNKARYAQDTAARTLADIVRDADVFLGCSAAGVLTADMVKTMAPNPIILALANPEPEIRPEIAKAARPDCIIATGRSDYPNQVNNVLCFPYIFRGALDCGATKITEAMKLACVKAIAELAEAETNDAVAQAYAGQELNFGPDYIIPKPFDSRLIEKIAPAVAKAAMESGVATRPIADLDAYRHQLNDFVYHTGMTMRPVFSAAKAAPKRVVYAEGEEERVLRAVQTVIDEGLAKPILVGRPHVIEMRIQKAGLRLKPGVDFELVNPEDDPRYHQYHTAYHELMGRNGVTPDMAKSALRRSNTLIGALLVRLGDADAMLCGTVGRFDAHLEHVRDVIGLAPNAKVFAAMNGLMLEKHTLFIADTFVNEDPTAEELAAITELAAEEVRRFGLEPKVAMLSHSMFGSSKSKSARKMRAAYDLLKTQAPSLQVEGEIQGDAALVEDIRHHFLPKSAFAGSANLLVMPTLDAANIAFNLLKITGGHGVTVGPILLGAAKPVHILNPAATSRRIVNMTALAVADVSATR

SEQ ID NO: 14947 - protein, 592 aa, Ralstonia solanacearum GMI1000
MAVTSSSSSQPPAASQPGHFKRLWAYLRPELSSFILAMVAMGVVAATEGIIPKVVKDLLDQGFGGEYAGKLWRVPAMLVGIAVVRGVAQFGATYFLSLVSNKVLLNLRMKMFERLLQAPAAFYQRNTAASLINAVIFEVNQVLQVLTGVFITLVRDSMTVLALLIFLFYTNWRLTLVVAVILPVIGFLMSRINRRLRSLNREHQNLTNEAAYVVEEAAGGYKVVKLHGGEAYESRRFNAMTNRLRGYAMRMAVAGGLNQPVTQFLAALALSVILAIAMVQAQANQTTVGGFTGFVMAMLLLISPLKHLTDVNQPMQRGLTAAEFIFGLIDTPIEPQDGGKHIDRARGDLRFEHVTFRYGPDGRAALDSIDLHVKAGEIVALVGPSGSGKTTLVNLLPRFFEPTSGRIVLDGDALADLSLQDLRRQIAFVSQDVVLFNDTIAANVAYGARDASEIDMARVRRALEAAYLTDVVDNLPDGVDTNIGDNGSKLSGGQRQRLAIARAVYKDAPILILDEATSALDSESERQVQAALEALMQGRTTLVIAHRLSTIENADRIVVLEHGQIVEAGTHRELLDRDGLYAGLHRIQFATQ

SEQ ID NO: 14948 - protein, 495 aa, Ralstonia solanacearum GMI1000
MNTETTSAAPSSDPVTFDTFGLHPDILRALAESGYTRATPIQAAAIPVVIAGRDVMGAAQTGTGKTAGFSLPIIQNLLPDANTSASPARHPVRALILTPTRELADQVYDNVAKYAKHTALRSAVVFGGVDMNPQTEQLRRGVEVLVATPGRLLDHVQQRSVNLSQVRMLVLDEADRMLDMGFLPDLQRIINLLPAHRQTLLFSATFSPEIKKLAASYLRHPQTIEVARSNATADNVRQVIYTVPDGHKQAALVHLLRQRAEQGLPSQCIVFSNSKIGCSRLARALEREKINANAIHGDKTQTERMQTLEAFKQGTVDVLVATDVAARGLDISQMPCVINFDLPFNAEDYVHRIGRTGRAGASGDALSLFAPGDERLLADIEKLIKRNLPRETLTDFDPTGEQARERERRERDERRNRTEIRRARERDERNGARVLDHTVVRPPFRPSEDPFFSRPYESNVPAEAAEAAKPAPAGGHPRSAKRPIAALLGGVPRKR

SEQ ID NO: 14949 - protein, 400 aa, Ralstonia solanacearum GMI1000
MTEAFICDAIRTPIGRYGGSLSAVRADDLGAVPLKALMARNPRVDWSAIDDVIFGCANQAGEDNRNVARMSALLAGLPDSVPGSTINRLCGSGMDATGTAARAIRAGETALMIAGGVESMSRAPFVMGKAASAFSRDAAMYDTTIGWRFVNPLMQAQYGVDSMPETAENVAADYRVSREDQDRFALRSQASAARAQADGTLAQEITPVTIAQKKGDPIVVDRDEHPRATTLEALARLKGVVRPAGTVTAGNASGVNDGACALLLANEEAAKRFGLTPRARIIGMATAGVPPRVMGIGPAPASQKVLGQLGLTIDQMDVIELNEAFAAQGLAVTRQLGLADDDARVNPNGGAIALGHPLGMSGARLVTTAMYQLQRTGGRYALCTMCIGVGQGIALVIERV

SEQ ID NO: 14950 - protein, 284 aa, Ralstonia solanacearum GMI1000
MKTIRPTRRLADLACAAIVAAVTLAAVPAKADQLADVKKKGELVCGVLGTDEPFSFLKDPMSREIVGYDVDMCNAVAKSLGVKPVLKQLAVAARIPELQQGRVDLLAASLTHNKEREAQIDFSVSTFVTGQKAMVRKDSGITSLAQLDGKKVLTVKGSTMEANIGKTIKNADIVSFDNSPQALLALQQGKGAAYVNDETTLVGNMAKLGAASRDYALLPQNLSTEHFALGLRKNEPAFREQVNKVLRGLEASGEAQTLYDKWFGPGTKMNFGPRSFKLSTDKID

SEQ ID NO: 14951 - protein, 308 aa, Ralstonia solanacearum GMI1000
MKTLHTTRRTLRCLTMAAAGALAMLSAGAQAQSNDTLAKIKQSGVISVGYRESSIPFSYEASSGNITGYSQEISNLIVDGVKKKLGLSGLQVKLTPITSQNRIPLLQNGTIDFECGSTTNNLERQKQVAFSNNIFIYGMLMLVKKDAGIKDFPDLKGKTVVTTAGTTEDRILQKMNGEAKDADKMNLILAKDHGQAFLTLESGRAVAFVMDEPLLYGERTKAKNQNDWVVVGTPLQTETYACMMRKDDPAFKKVADDVIADLMTSGRAGALYKKWFLSPIPPKGLNLNYPMTEGMKALYAHPNDKAIQ

SEQ ID NO: 14952 - protein, 553 aa, Ralstonia solanacearum GMI1000
MYQYDAYDHRLVADRVAQFRDQVRRRISGELTEEEFLPLRLQNGLYMQRHAYMLRVAIPYGHLRAKQLRMLSHIAAEHDRGYGHFSTRQNIQYNWIKLEDVPDILGKLASVEMHAIQTSGNCIRNITTDQFAGVAPDEFVDPRPLAEILRQWSTFIPEFAFLPRKFKIAVSATREDRAVTQLHDIGVYAYEKDGRTLLRVLAGGGMGRTPILGAIIKEDLPWQHMLSYIEAAIRVYNRYGRRDNKYKARIKILVKAIGAEEFARQVEEEWQHIKDGPSTIPQAEFDRVAKDFAPPAYEKLADTDAAYEKALLENKAFARWVSRNVHPHRVPGYAAVTLSLKPGVALPPGDATAEQMALVADWSERFGFGELRVAHEQNLILPDVKKHDLFALWQLAKEHGMATANIGLLTDIIACPGGDFCSLANAKSIPIAQAIQARFDNLDYVHDLGEISLNISGCINSCGHHHVGNIGILGVDKADEEWYQVSLGGAQGNDSALGKVIGPSFKAEEMPDVIERIIDTFVANRIEDERFIETYNRIGMTPFKERVYAREAA

SEQ ID NO: 14953 - protein, 378 aa, Ralstonia solanacearum GMI1000
MTETATEFKAPKKTRAALLGFFVLAIFAPFLVGAVGGNYWVRVLDFALLYIMLALGLNIVVGFAGLLDLGYIAFYAVGAYMMALLGSPHLTNQFEWIHQLFPNGLHLLIWWVIPLGAGLAALFGILLGAPTLKLRGDYLAIVTLGFGEIIRIFMNNLDRPVNITNGPKGVNLIEPVKLFGFDFSKRHDIFGIHFEPVHMYYYLFVLLAMGIITVCLRLQNSRIGRAWVAIREDEIAAKAMGINTRNIKLLAFAMGASFGGVSGAMFASFQGFVSPESFVLWESIYILAIVVLGGMGHIPGVILGGILLVGFQELLRALAEPIQNKLFGHVIVEAEVLRQLLFGLAMVGVMLYRPAGLWPSPRKEDRPQKARVGGLSRI

SEQ ID NO: 14954 - protein, 67 aa, Ralstonia solanacearum GMI1000
MANGTVKWFNDAKGFGFISPDEGGEELFAHFSAIQMNGFKTLKEGQRVAFDVTQGPKGKQATNIQAA

SEQ ID NO: 14955 - protein, 445 aa, Ralstonia solanacearum GMI1000
METILQHVPVGQKVGIAFSGGLDTSAALRWMKNKGALPYAYTANLGQPDEEDYDAIPRKALEYGAEKARLIDCRPQLANEGIAAIQAGAFHISTGGITYFNTTPLGRAVTGTMLVAAMKEDDVHIWGDGSTFKGNDIERFYRYGLLTNPALKIYKPWLDQTFIDELGGRAEMSAFMTKEGFGYKMSAEKAYSTDSNMLGATHEAKDLEHLNSGIRIVNPIMGVAFWKPEVEVKAEEVSITFDEGRPVAVNGREIADPVEMFLELNRIGGRHGLGMSDQIENRIIEAKSRGIYEAPGMALLHIAYERLVTGIHNEDTIEQYRINGLRLGRLLYQGRWFDPQAIMLRETAQRWVARAVTGTVTLELRRGNDYSILNTESPNLTYAPERLSMEKVEDAPFSPADRIGQLTMRNLDLMDTRDKLAIYSKAGLLSLGTSSALPQLGGDKK

SEQ ID NO: 14956 - protein, 688 aa, Ralstonia solanacearum GMI1000
MLNFSKIDLEKAGRHSHIRAKFVFSAVLRPDSRSKNMGKIIGIDLGTTNSCVSIMEGNTPKVIENAEGARTTPSIIAYMEDGEILVGAPAKRQAVTNPRNTLYAVKRLIGRKFEEKEVQKDIGLMPYTISKADNGDAWVEVRDKKMAPPQISAEVLRKMKKTAEDYLGEEVTEAVITVPAYFNDSQRQATKDAGRIAGLDVKRIINEPTAAALAFGLDKNEKGDRKIAVYDLGGGTFDISIIEIADVDGEKQFEVLSTNGDTFLGGEDFDQRIIDYIIGEFKKESGVDLSKDVLALQRLKDAAEKAKIELSSTQQTEINLPYITADASGPKHLNLKITRAKLEALVEDLIARTIEPCRTAIKDAGVKVSDIHDVILVGGMTRMPKVQEKVKEFFGKEARKDVNPDEAVAVGAAIQGQVLGGDRKDVLLLDVTPLSLGIETLGGVMTKMIGKNTTIPTKFSQTFSTADDNQPAVTIKVYQGEREMASGNKMLGEFNLEGIPPAPRGTPQIEVSFDIDANGILHVGAKDKATGKENKITIKASSGLSEAEIERMVKDAEANAEEDKKLRELVDSRNQGEALVHSTRKALGEYGDKLEAGEKDKIEAAIKDLEDVLKGSDKAAIDAKVEALATASQKLGEKVYADMQAKGGAEAGAEQAAAGAHAGAQAGHGAPQDDNVVDAEFKEVNDKK

SEQ ID NO: 14957 - protein, 379 aa, Ralstonia solanacearum GMI1000
MHIGIPRETRADETRVAATPETVKKYVAQGHQVTVQSGAGVAAAQPDEAYVAAGAGIGTAAQALGAQIVLKVRSPDAAELAQMQPGAVLVGMLNPFDDDNTARLAAANLSAFALEAAPRTTRAQSMDVLSSQANIAGYKAVMVAANHYPRFMPMLMTAAGTVKAARVLVLGAGVAGLQAIATAKRLGAVIEASDVRPAVKEQIESLGAKFLDVPLLTDEEREIAQGVGGYARPMPPDWMRRQAELVHERAKQADIVITTALIPGRRAPTLLPEDTVRAMKPGSVVVDLAAAQGGNCPLTEADRVVVKHGVTLVGHTNLPAMVAADASALYARNVLDFLKLIIDKDGGLAINRADDIVAACLLCQAGQLARAPAATSTAK

SEQ ID NO: 14958 - protein, 120 aa, Ralstonia solanacearum GMI1000
MQRNMLRAKLHRATVTQADLDYEGSCGIDEDLLDAADMREYEKIELYNVNNGERFSTYIIKGKRGSGEISLNGAAARRAHVGDKLIICTYAPMNEEEVANYKPKIVLLGDGNRIKEIKAV

SEQ ID NO: 14959 - protein, 781 aa, Ralstonia solanacearum GMI1000
MTTVDTQPQQPARTDEELKAQQRAALRKAALEYHEFPTPGKISVTPTKPLSNQRDLALAYSPGVAAACEEIVADVSNSFRYTARGNLVAVVTNGTAVLGLGDIGPEAAKPVMEGKAGLFKKFAGIDVFDIEINEKDPQKLVDIVASLEPTFGGINLEDIKAPECFFVERELRKRMKIPVFHDDQHGTAIVVGAGITNALKVVGKDIKQVKLVASGAGAAALACLDLLVDLGLPRENIWVTDLAGVVYEGRTELMDPDKAVFAQKTDKRTLAEVIDGADIFLGLSAAGVLKQDMVKRMADRPIIFALANPNPEIMPELAKEVRPDVIMGTGRTDYPNQVNNVLCFPFIFRGALDVGATTITREMEVAAVHAVAELARQEQSDIVATAYGIQDLSFGPEYLIPKPFDPRLIVKIAPAVAQAAMDSGVAQRPIEDMDAYRQHLQQFVYHSGTLMKPIFSTAKKVPMEHKRIVFAEGEEERVLRAVQVVVDEKLANPILIGRPGVIAHRIERFGLRLREGVDFTIVNPEHDQRFREYWETYYKLMARKGVTPQYAKLEVRRRSTLIGAVMIHKGEADGMICGTVSNTAAHLRYIDQVIGGTNCVYAAMNGLVLPGRQIFLTDTHVNIDPSAEQLAEITIMAAEELCRFGIKPKVALVSHSNFGSSEAPSAAKMRETLAILRERAPQLEVDGEMHGDAALDQKLRDSLVPDSTLTGEANLLVMPNIDAANIAYNLLKTAAGNNIAIGPILLGAKRPVHILTPSATVRRILNMTALTVVDAAAQAQR

SEQ ID NO: 14960 - protein, 366 aa, Ralstonia solanacearum GMI1000
MKFIDEARIEVIAGDGGNGSASMRREKFVPFGGPDGGDGGRGGSVWAVADRNINTLIDYRFAKKHLARNGENGRGSDCYGAAGEDITLRLPVGTAIYDADTDEQIADLTLDGQRLCLARGGEGGWGNIHFKSSTNRAPRQKTDGKPGERRNLRLELKVLADVGLLGMPNAGKSTLITAISNARPKIADYPFTTLHPNLGVVRTGPSKSFVVADIPGLIEGAAEGAGLGHQFLRHLQRTRVLLHVVDLAPFDEGIDPVAEAKAIVGELKKYDAELYDKPRWLVLNKLDMVPEDEREARVKDFIKRFKWKGPVHRISALTHDGCPGLIHAIQDYLDTLRAEEEAAAAAPDARLDPTLHNVDHDGSANA

SEQ ID NO: 14961 - protein, 103 aa, Ralstonia solanacearum GMI1000
MYAVVKTGGKQYKVAAGEKLKVEQIPADVGAEITLDQVLAVGAGDQLKVGAPLVSGAAVKATVISHGRHDKVKIFKMRRRKHYQKHQGHRQNYTELRIDSIVA

SEQ ID NO: 14962 - protein, 103 aa, Ralstonia solanacearum GMI1000
MSTTHEKIDQIVKSHPVVLFMKGTAQFPMCGFSGRAVQILKACGVDQPYTVNVLEDDEIRQGIKEYANWPTIPQLYVKGEFIGGSDIMMEMYQSGELQPLLAA

SEQ ID NO: 14963 - protein, 342 aa, Ralstonia solanacearum GMI1000
MPHHRLPSPTVMRILFFSSHRYDEDAFRAAQARGGHGFELVFQRAHLDVHTAPLAAGFEVVCPFVNDCLDAGVLAVLAAGGARLIALRSAGFNHVDLAAAQRLGLTVVRVPAYSPHAVAEHAVGMILTLNRRLHRACNRTREGDFSLDGLLGFDLAGKTVGVVGTGQIGQVFARIMAGFGCRLLAFDPFPQPALAALGVTYVPLPALLAQSDIVSLHCPLNADTHHLIDAGALASMKTGAMLINTSRGGLVDSPALIDALKSGQLGHLGLDVYEEEADLFFEDRSADVLQDDVLARLLTFPNVIVTAHQAFFTREALAGIADTTLANVAAWAAGAPANVVKA

SEQ ID NO: 14964 - protein, 67 aa, Ralstonia solanacearum GMI1000
METGTVKWFNESKGFGFITPDAGGNDLFAHFSEIQGSGFKTLQEGEKVRYVAGVGQKGPAATKIERI

SEQ ID NO: 14965 - protein, 303 aa, Ralstonia solanacearum GMI1000
MATSLNLGFIGLGIMGAPMAGHLRAAGHTLFVHDVNPAPAALVEAGVTVCTSAEEVAKRADIVFIMVPDTPHVEAVLFGEKGVAKALKDAGKAAAAGRIVVDMSSISPIATKDFAARVNKLGAQYLDAPVSGGEVGARAASLTIMVGGAQAAFERVLPLFQRMGKHITLVGGNGDGQTTKVANQIIVALNIQAVSEALLFASKAGADPARVREALMGGFAASRILEVHGDRMVKRTFDPGFRIELHQKDLNLALQGAKALGVALPNTATAQELFNTCAANGLGKQDHSALCRAIEIMSNHAIA

SEQ ID NO: 14966 - protein, 179 aa, Ralstonia solanacearum GMI1000
MPRSSAAAKDSDAHQPTPPEAAGLRRRDRIAVRESGVHGRGVYAVAAIAKGKKIIEYKGEHISWKEALRRHPHDPDDPNHTFYFSLEDGSVIDAKYGGNRARWINHACKPNCEAREKDGRVFIHALRDIDAGEELFYDYGLVIEGRQTKALKAQFACHCGAKKCRGTMLAPPEKKEKKQ

SEQ ID NO: 14967 - protein, 401 aa, Ralstonia solanacearum GMI1000
MLSEQSKPLIDASVPVLREHGLTITQTFYRNMFASHPELTNLFNMGNQANGSQQQSLASAVFAYAANHGNNAALAPVVGRIVHKHAAVGIRPSHYPIVGRHLLGAIAEVLGDAATPELLAAWDEAYWLLAAELIAAEARLYAHTQSGPDHRQPVRIIERHAQAEDVVSFTLEAVGGAKLADFLPGQYISVQVELAPGVLQQRQYSLSDAPNGRTWRISVKRDAGGSGRPAGTVSNWLHDNARPGEVLLVSQPYGDFVPQLATDSPIVLMSAGVGITPMIATLNALARRNTARKVVFSHAGQAASHVAHADDLERAAQVLPDFAAHVFLESGEAADFAARPARPGRMTVETFLDDGVADADFYLCGPLPFMQAQRAALLAGGVPAGRIHREVFGPDLLDDIL

SEQ ID NO: 14968 - protein, 67 aa, Ralstonia solanacearum GMI1000
MATGTVKWFNETKGFGFITPDGGGADLFAHFSEIQGSGFKTLKDGQKVSFEVKQGPKGLQASGIKPE

SEQ ID NO: 14969 - protein, 382 aa, Ralstonia solanacearum GMI1000
MMRDAGQLDLMDSRVTQLAFWSALPERWTSDAEETLVCCHVRQETHDVKSFFFRSPAGRTFLFEPGQFITLELDIEGETINRCYTLSSSPARPHTISITVKRVPGGKVSNWLHDNLQPGAAIRVLGPAGEFTCARHPARKYLFLSAGSGVTPLMSMSRAHHDLAEDRDIVFVHSARTPDDIIFARELELIASNHTNFRTSFVVERLGARTNWPGITGFLSLPLLKLIAPDFMEREIFTCGPAPYMKAVRGLLEEAGFDPARYHEESFSFESLTTGAAAEAIAPDAAPTANPDAAAPQFSISFAKTGREIACGAAQHVLDAARQAGVRLPASCTQGMCGTCKVKLVSGQVDMKHNGGIRQREIDQGMVLLCCSKPLSDLVIDK

SEQ ID NO: 14970 - protein, 389 aa, Ralstonia solanacearum GMI1000
MNADARPTGVIYLDHCATTPCLPEVVDAMRPYMDREFGNPASAHVMGRRARHAIENATQQVASLIGARPEEIVFTSGATEANNIALFCGFAHDERAPAGALLCPIDHKSTLDVGKELKRRGLAVDYLPVAANGRVRPADVMARLTAATRIVSIAHVNSELGTIQPVDEIARVTRQSGAWLHVDAVQSVGKLPVDARACGIDMLSLSAHKLRGPKGVGALFVDARVAPRLRPFIFGGGQNRLRSGTLPTPLIVGFGLACEIAQSALAQRHRKAMALRSHFIARLCQSVPDTVLNTDVACSSPYVVNVRFGDIASEALVSGLHQVAISTGSACNSAELQPSHALIGVGLSADQARASVRFCLDPDLDTETLDTAIGHFVFRLNSLRQEHYA

SEQ ID NO: 14971 - protein, 317 aa, Ralstonia solanacearum GMI1000
MQVILRDKADAAQDIATFELAAPDGGALPPFTAGAHIDVRVAGFVRQYSLCNSPAETHRYRIGVLRDAQSRGGSVAMHALAVGATLEISAPKNHFALVPGARHSILLAGGIGVTPLLAMAEQLAADGASFALHYAARAPERMAFRDRLAAAHLAPHARCYFDNAPAAERLDLAAVLSRPDEGTHLYACGPAGFIEAALAQAHALGWPEANLHREYFGAAPQTPAAGETGDAGAFRIRLAQRGETVEVGAGETAILALRRCGVDWPTSCEQGVCGTCLTRVLEGEPVHQDQYLTDEERASGCFLPCVSRAKGLLVLDM

SEQ ID NO: 14972 - protein, 344 aa, Ralstonia solanacearum GMI1000
MRGKAIGMAADRRAMIAGRRAASERRDTFPPLLTMQPTLLILIAMAADHLARIGQHFHVIYAPTRAERDAAVTRDGHAVRVVLTNGSTGLSAPEIAAMPALELACALGAGYENIDVQAARARGVVVANGAGTNDACVADHAIGLLLATVRGIPKLDRATRNGIWRDDIPLQPGVWGKRLGIVGLGTIGLQIARRAAGFDMQIGYHNRKPRENVPYRYFDAIGAMAEWADFLIVATPGGAQTRHLVNRDVLEALGPTGYVVNIARGSVVDTAALEAAIRAGRLGGAGLDVYESEPAPPAGLLDLEQVVLTPHIAGWSPESIAATVDRFLENARLHLAGEAVVSPV

SEQ ID NO: 14973 - protein, 363 aa, Ralstonia solanacearum GMI1000
MTPQFHPLRVAEVRGETADTISLRFDVPDDLREAYRFTQGQFLTLRVPAGAAGQGELRRSYSICCAVQDYDAHGELRVAVKRVDAGVFSNHLHDRIRVGQTLDVLPPDGRFYVPLAAESARHYVAFAAGSGITPVLSLIKTTLAAEPHSRFTLVYGNRTVDSIIFAEALEDLKDRYLDRFALYHVLSRQPQEIALFNGRLDGDKARAFLDTLIPPDDIDAAFICGPSTMIDAVEAALLARGVPRERVHAERFGVPVGDASARPRKPAAVAGDVALTVVLDGKSHHVPMAGDGKVLDSALAAGLDLPYACKGGVCCTCRAKVLEGRVEMEKNFTLEDWEIRQGFVLTCQARPLTQRVVVSYDER

SEQ ID NO: 14974 - protein, 557 aa, Ralstonia solanacearum GMI1000
MRPIISTPAGTSSLAIPDTPGADEAQRADPFQPASRPRSRHPQFERLPSPPVRTRSQELRAARLRRCASDVSATPEARPRLVVVSNRLIDPQRPAAGGLAVALGDMMRDTDGLWFGWSGKTVDEPDTACVRTEPFGRTTLAQVDLGRTDYEGYYAGFSNSVLWPIFHERVKWADLNPAYFKAYEAVNRILASHLRPMLRDSDILWVHDYHLIPFAQALRALGCTQRMGFFNHIPLPSPDVIRRIPQHRQLMRALASYDLVGMQSPRDVLNLQRYWDAENIAAQSERRHDSVHAFPIGIDVESLRALVPSPASQAVIDEVRGAAGRCVLMIGVDRLDYSKGIPTRLKAFRQLLQTHARMRSKVTLVQIAAPTRQSIPAYARLRDKTEQLVREINRRFGTGDWTPVMYFSESVDRTALPQLYRMSRVGVVTPVADGMNLVAKEYVAAQAARDPGVLVLSRGAGAASQLRDALLVPSKNRAATADAYAQALSMPLEERKARHAGLMRNIETEDLRWWRDNYLKALACAPWPAGPEGAEDTRPDAGGASVSGASDGGLTQA

SEQ ID NO: 14975 - protein, 905 aa, Ralstonia solanacearum GMI1000
MATPLKTLIAKLNATSRQAAERAASLCMARGNYEVDLEHLFLALLENRRSDFAVAARASGIDPAALQRDLEAEVGRFQTGNTRTPAFSPYLPKLFEHAWLIASLDSQITRIRSGHLLLALLTEPSLAALAERGSRLFGRFEVERLKHDFERMTTGSDEQEQAVDFADGTAVQTDDGRTAPAAALGATPALDQFTVDLTQAAREGRIDPVIGRDAEIRQVVDILMRRRQNNPILTGEAGVGKTAVVEGLALRVAANDVPPPLRGVTLRTLDMGLLQAGASVKGEFENRLKNVIDEVKKSPKPIILFIDEAHTIIGAGGQAGQNDAANLLKPALARGELRTIAATTWSEYKKYFEKDAALARRFQVVKVDEPSEPLAAAMLRGMAPLMERHFGVRVLDEAITEAVRLSHRYISGRQLPDKAVSVLDTACAKVALGQSATPGAIEDDQKLLERLLGEIAALQREQSAGAAHDARLEALQAKRAELEQRIAQNTERLARERALVARIQALREARESDAAQAGAQDAEPVAANSDVVALSPKRARAADAPDELATLLAELRALQGEAPMVPLQVDGHVVSEIVSAWTGIPLGRMVKDELRTVLNLKPLLAARVIGQDHALDAIAQRVRTASANLEDPNKPRGVFLFAGPSGVGKTETALALADILYGGERKLITINMSEYQEAHSVSGLKGSPPGYVGYGEGGVLTEAVRRNPYSVVLLDEVEKAHPDVLEMFFQVFDKGEMDDAEGRPIDFRNTIIILTSNVGSSAIMQACLNQPAEALPDADTLAETLRPVLYKAFKPAFLGRTKVVPYYPIADDVLAEIITLKLGRIRDRVAANHKATFQWDNALVESVLARCTEVDAGARAVDHILNGTLLPEIAEAVLTRMAEGGSVEKIKVSVGKTGEFKYRIN

SEQ ID NO: 14976 - protein, 395 aa, Ralstonia solanacearum GMI1000
MNASLPPALNHPVAARDAIRDLRASRIREVANAGLGLPDVLPFWFGESDRVTPEFIRDTAAQALARGNTFYTHNLGIAPLRSALADYVSRLHGRTAIDHVAVTSAGVNALMLAAQLVVGPGDRVVTVTPLWPNVVEIPKILGAHVETVPLDYGAHGWTLDVDRLLAALTPDTRLLAINSPNNPTGWVMSREAQQAVLAHCRRHGIWILADEVYERLYYGDRPAAPSFLDIAGRDERVICVNSFSKSWLMTGWRLGWMVLPAAVTDDLGKLIEYNTSCAPSFVQEAGVVAVRDGEDFIRGETARLRAARDHLVTALSALPGVDVRVPEGAMYAFFRIPGAQDSLALCKQLVREARLGLAPGSAFGPEGEGFVRWCYACDVARLAAGVERLREFLRV

SEQ ID NO: 14977 - protein, 402 aa, Ralstonia solanacearum GMI1000
MTTSRIAARVRRIKPSPSTSAADRANELRRQGKSIVNLVVGEPDFDTPQHIRQAAVQAIERGATRYTLMAGTVELRQAIVDKMARENDLHYAMNEIIATNGAKSAIYSALAITLEAADEVLIPAPYWVSYPDMVLACDGTPITLPCPEHDGFKLTPARLEAAITARTRWLILNSPSNPTGASYTLDEYRALADVLARHPHVLVMTDDIYEHIRFDTVRTPHLLNAAPELRDRTLVINGVSKTYAMTGWRLGWVAGPRDLIQALDTFLSQSAGNCCSISQAAAAAALNGDQRFVAESVAVYKQRRDTTLARLNAIPGLTCRSPDGAFYLYVNCAGLIGKKTPEGKTLDTDTDVVMYLLEREGVAIVAGTAYGLSPYFRMSIATALETLEEGCRRIERAVLALA

SEQ ID NO: 14978 - protein, 331 aa, Ralstonia solanacearum GMI1000
MRPSVLVTRATFPDIANRLREHFDVTDNPSDAILSPSELIARLQGKQGVMSTGSERIDAALLDACPQLKAVCNVGVGYNNIDVAACTARGVVVSNTPDVLTQTTADFGFALMLATARRITESERFVRRGEWQKTGIHDQMLGSDIYGATLGILGMGRIGQAIARRAALGFEMQVIYHNRSPLEAETEARAHARYVDKDTLLRESDHLILVLPYSPEAHHTIGAAELARMKPTATLTNIARGGIVDDAALAQALRQGTIAAAGLDVFEGEPRIHPDLLALDNIVLTPHIGSASVNTRRAMAALTVDNLIAALGYGPRAGQPPTPVNPQVLQQ

SEQ ID NO: 14979 - protein, 376 aa, Ralstonia solanacearum GMI1000
MFIGIPLQTAEGETRVALTPETAKKLKAQGHVLRVQTGAGRRASIPDPAYEAVGCEMTDAAGALGADLVLTVRPPAPEALALMKPDAVLVGMLDPHDKESLSRLAAARLTGFALEAAPRTTRAQSMDVLSSQANIAGYKAVMMAADRYQRFFPMLMTAAGTVKAARVVILGVGVAGLQSIATAKRLGAVVEASDVRPSVKEQVESLGAKFIDVPYESAEEKDAAEGVGGYARPMPVSWLERQKAEVAKRVAQADVVISTALIPGRAAPVLITNDMVQAMKPGSLIIDIAAGKGADGVSGNCALTEAGKTVVKHGVNIVGETNLPGLVAADASALYARNVLEFLKLIVNKDGALTIDENDDIVAACLVTRGGAVLRT

SEQ ID NO: 14980 - protein, 67 aa, Ralstonia solanacearum GMI1000
MATGTVKWFNDAKGFGFITPDEGGEDLFAHFSAINMQGFKTLKEGQRVSFEITQGPKGKQASNIQAA

SEQ ID NO: 14981 - protein, 465 aa, Ralstonia solanacearum GMI1000
MSRLIVVSNRVAPIAEGQASAGGLAVGVYDALRDTGGVWFGWSGEIAPGASGEPSIAAKGAITFATVGLSRRDYDQYYRGFANATLWPVFHYRVDLARYERQEYHGYRRVNTQFAHQLKALVQPDDILWVHDYHLIPFAAECRALGLRNRIGFFLHIPFPSPEILTTIPPHEELMRALCAYDLLGFQTETDRVAFYDYIEREARGYIENKEHNGPVHAYGNTLRAEVYPIGVHPDEIARQAVSSLARRNPFAREADASGGRPLKLIMSVDRLDYSKGLPERFRAFEQLLDDFPDHRRHVTFVQIAPTSRQDVQSYQQIRQRLEAESGRINGKHSELDWTPIRYINKQYDRRMLMALFRASHIGYVTPLRDGMNLVAKEYVAAQDPEAPGVLVLSRFAGAARELDAALIVNPYDTRGMAEALNRALTMPLEERKARHAHMMDRLRAADLTAWRERFLADLRGASAR

SEQ ID NO: 14982 - protein, 298 aa, Ralstonia solanacearum GMI1000
MLPRVRKLLPALLAFPLLNVNAVASSPTLDHIKATGAIRLAHRESSVPFSYLDANGKPIGYSMDLCMRLVDAIRDNLKRPDLKVQYLQVTPATRMDAIMSGKADLECASTNNARERREKVAFTIPHYIANGRMLVKTASGIHQLEDLRGKTVVSTRGSANGNLVRQLSEAGGLGITVVEAGDHGESFAMLAEGKAQAFAMDDVLLAGMKANAKNPADYAIVGKTQQVVPYAIMLSKNDPEFKKLIDAAMSRLMEDGEAERLYKKWFQQPIPPNNVNLGIPMSLLLRDSFRYPTDNAGN

SEQ ID NO: 14983 - protein, 404 aa, Ralstonia solanacearum GMI1000
MMSRHTELNRHLAAAQPSATYRVIDRVAARRASGAEVISLSAGEPDFDTPAHVREAGIEAIRAGMTRYTQVAGLRALREAVADKFRGENGLAVGWQDTIVCSGGKQVIYNALAATLNEGDEVVIPAPYWVSYPEIVQLCGARSVIVPCGAESGFKLTPGALEAALSARTRWLILNSPSNPTGAVYTAQELRALAEVLLAHPDVLVLSDDIYEHLIFDGARFHTLAQVEPRLQSRVLTMNGVSKAYAMTGWRIGFGAGPRWLLEAMEKLQGQQTSGACSISQHAAVAALRGPQDFIGASRAAFERRRDLVVGMINAVPGMRCETPAGAFYAFASCDGLIGKTTLDGTLLRSDEDVSNALLDERGIGVVPGSAFGLGPYLRIAYAIDDTALRTACTAIDTFARSLR

SEQ ID NO: 14984 - protein, 318 aa, Ralstonia solanacearum GMI1000
MSTYTTAPRTGHQTLLYAELDTDLDNLQADIAVLGMPFGTPYSAADFSNDQTNAPAAIRQATDRVARAPGHYDFDIDGPLLQGRDDIRFVDCGDIVPDLAQPPGEHYARAEAAVRRLANAGALPIVLGGDHGITTPILRGLDQKGPITLVHIDAHLDWRDSVNGVKEGLSSPMRRASEMPHVARIVQIGLRAQGSGRPEDLAAARAYGADLITAYELHDIGMDAVLARIPDGGNYYITIDADGLDPSTMPAVAGPAPGGLTFAQTRKLIHGLVRKGRVVGMDIVEIQPKKDINQISCITAGRLILNLIGTTIRAGYFD

SEQ ID NO: 14985 - protein, 138 aa, Nicotiana tabacum
MAFVSFLGRALFVSVFVLSAYQEFSEFGADGGPAAKALRPKFNIFSKHVATHTGFQVPHVEMKHLILGAIVMKGLGSLLFIFGSSLGAYILLLHQAIASPILYDFYNYDVDKKEFVQLFFKFSQNLAIAWCTPLLQLA

SEQ ID NO: 14986 - protein, 157 aa, Nicotiana tabacum
MAFVSFLGRALFVSVFVLSAYQEFSEFGADGGPAAKALRPKFNIFSKHVATHTGFQVPHVEMKHLILGAIVMKGLGSLLFIFGSSLGAYILLLHQAIASPILYDFYNYDVDKKEFVQLFFKFSQNLALLGALLFFIGMKNSMPRRSSKKKAPKSKTN

SEQ ID NO: 14987 - protein, 491 aa, Musa acuminata
GTRRDRERERERERERERERERERERERERERERERVHLLGSSSLHRSLWELSKKHGPLMHLKFGRVPVVVVSSPEMAKEVLKTHDLECCSRPSLLSFSKFSYGLSDVAFIPYGERWRQLRKLCTVELLSTRKINSFRDIRKEEMERVTKLICSHVRASSMVNLSELLLSLSCNMTCRSAFGSGFDDGGDIQLHDMLREAQEELSGLFLSDYLPLLGWVDRLSGMRSRLERAFLKLDSIYQRRIDYHQDRLRQQGKEDGDVLDALLRMQKDEEGLTEDHIKGVLMDIFIAGTDTSSATVEWAMAELIRQPELMKRAQDEVRRCVGSKGEVEESDLHQLHFFKCVIKETMRLHPPAPLLLPRETMQHFKLNGYDILPKTWMYVNAWAIGRDPNSWGRPHVFDPERFMHDSTEASGQDFKLIPFGEGRRICPGKNLGMLMVELVLANLLYSFDWHLPPGMVKEDISMEEAPGVPVHREYALCLMATKYDATTA

SEQ ID NO: 14988 - protein, 507 aa, Musa acuminata
MALPPLLLSPLPSLLVVLALLSSLLLAGRKARGGSATWKLPPGPPKLPVIGHLHLLGSSLLHRSLWELSKKHGPLMHLKFGRVPVVVVSSPEMAKEVLKTHDLECCSRPSLLSFSKFSYGLSDVAFIPYGERWRQLRKLCTVELLSTRKINSFRDIRKEEMERVTKLICSHVRASSMVNLSELLLSLSCNMTCRSAFGSGFDDGGDIQLHDMLREAQEELSGLFLSDYLPLLGWVDRLSGMRSRLERAFLKLDSIYQRRIDYHQDRLRQQGKEDGDVLDALLRMQKDEEGLTEDHIKGVLMDIFIAGTDTSSATVEWAMAELIRQPELMKRAQDEVRRCVGSKGEVEESDLHQLHFFKCVIKETMRLHPPAPLLLPRETMQHFKLNGYDILPKTWMYVNAWAIGRDPNSWGRPHVFDPERFMHDSTEASGQDFKLIPFGEGRRICPGKNLGMLMVELVLANLLYSFDWHLPPGMVKEDISMEEAPGVTVHREYALCLMATKYDATTA

SEQ ID NO: 14989 - protein, 586 aa, Vicia faba
MCGILAVLGCSDDSQAKRVRILELSRRLKHRGPDWSGLHQHGDNYLAHQRLAIVDPASGDQPLFNEDKSIIVTVNGEIYNHEELRKQLPNHTFRTQCDCDVIAHLYEEYGENFVDLLDGIFSFVLLDTRDNSFIVARDAIGVTSLYIGWGLDGSVWIASELKGLNDECEHFEVFPPGHLYSSKEREFRRWYNPPWFNEAIIPSTPYDPLVLRTAFEKAVIKRLMTDVPFGVLLSGGLDSSLVASVTARYLADTKAAKQWGAKLHSFCVGLKGAPDLKAGKEVADFLGTVHHEFQFTIQDGIDAIEDVIYHTETYDVTTIRAATPMFLMSRKIKSSGVKMLISGEGSDEIFGGYLYFHKAPNKEEFHQETCRKIKALHRYDCLRANKSTYAWGLEARVPFLDKDFIKAAMDIDPEFKMIKHDEGRIEKWILRKAFDDEENPYLPKHILYRQKEQFSDGVGYGWIDGIKDHAAKHVTDKMMFNASHIFPFNTPNTKEAYYYRMIFERFFPQNSARLTVPGGPSVACSTEKAIEWDASWSGNLDPSGRAALGVHVSAYENQINPITKGVEPEKIIPKIGVSPLGVAIQT

SEQ ID NO: 14990 - protein, 158 aa, Solanum lycopersicum
MDLRLLGIDNTPLFHTLHHMMEAAGEDSDKSVNAPSRNYVRDAKAMAATPADVKEYPNSYVFVVDMPGLKSGDIKVQVEEDNVLLISGERKREEEKEGAKFIRMERRVGKFMRKFSLPENANTDAISAVCQDGVLTVTVQKLPPPEPKKPKTIEVKVA

SEQ ID NO: 14991 - protein, 381 aa, Pinus taeda
MDSNMNGLAKSNGCEISRDGFFESEEEELQGQAEAWKCTFAFAESLAVKCVVLLGIPDMIAREGPRATLSLCEIVANLPTESPDAACLFRIMRFLVAKGIFPASKSARRRAFETRYGLTPASKWLVKGRELSMAPMLLMQNDETTLAPWHHFNECVLEGGVAFQKANGAEIWSYASDHPDFNNLFNNAMACNARIVMKAILSKYQGFHSLNSLVDVGGGTGTAVAEIVRAYPFIRGINYDLPHVVATASSLSGVQHVGGDMFETVPTADAIFMKWIMHDWNDEDCIKILKNCRKAIPDTGKVIIVDVVLDADQGDNTDKKRKKAVDPIVGTVFDLVMVAHSSGGKERTEKEWKRILLEGGFSRYNIIEIPALQSVIEAFPR

SEQ ID NO: 14992 - protein, 581 aa, Glycine max
MCGILAVLGCSDDSRAKRVRVLELSRRLKHRGPDWSGLHQHGDCFLAHQRLAIVDPASGDQPLFNEDKSVIVTVNGEIYNHEELRKQLPNHNFRTGSDCDVIAHLYEEHGEDFVDMLDGIFSFVLLDTRDNSFIVARDAIGVTSLYIGWGLDGSVWISSEMKGLNDDCEHFECFPPGHLYSSKERGFRRWYNPPWFSEAIPSAPYDPLVLRHAFEQAVIKRLMTDVPFGVLLSGGLDSSLVASITSRYLANTKAAEQWGSKLHSFCVGLEGSPDLKAAKEVADYLGTVHHEFTFTVQDGIDSIEDVIYHIETYDVTTIRASTPMFLMSRKIKSLGVKWVISGEGSDEIFGGYLYFHKAPNKEEFHRETCRKIKALHQYDCLRANKSTFAWGLEARVPFLDKAFINAAMSIDPEWKMIKRDEGRIEKWILRRAFDDEEHPYLPKHILYRQKEQFSDGVGYSWIDALKAHPPKHVTEKMMLNAGNIYPHNTPKTKEAYYYRMIFERFFPQNSARLTVPGGASAACSTAKAVEWDAAWSNNLDPSGRAALGVHISAYENQNNKGVEIEKIIPMDAAPLGVAIQG

SEQ ID NO: 14993 - protein, 470 aa, Escherichia coli
MPLNKKDTQGKGVKNASTVSEDTASNQEPTLHRGLHNRHIQLIALGGAIGTGLFLGIGPAIQMAGPAVLLGYGVAGIIAFLIMRQLGEMVVEEPVSGSFAHFAYKYWGPFAGFLSGWNYWVMFVLVGMAELTAAGIYMQYWFPDVPTWIWAAAFFIIINAVNLVNVRLYGETEFWFALIKVLAIIGMIGFGLWLLFSGHGGEKASIDNLWRYGGFFATGWNGLILSLAVIMFSFGGLELIGITAAEARDPEKSIPKAVNQVVYRILLFYIGSLVVLLALYPWVEVKSNSSPFVMIFHNLDSNVVASALNFVILVASLSVYNSGVYSNSRMLFGLSVQGNAPKFLTRVSRRGVPINSLMLSGAITSLVVLINYLLPQKAFGLLMALVVATLLLNWIMICLAHLRFRAAMRRQGRETQFKALLYPFGNYLCIAFLGMILLLMCTMDDMRLSAILLPVWIVFLFMAFKTLRRK

SEQ ID NO: 14994 - protein, 323 aa, Spinacia oleracea
MASNLVVGFLAIFSIILLLAGTSDAWLRKPHFYASSCPNVEQIVFNTMKQAVSKEPRMGASILRLFFHDCFVNGCDGSVLLDDTPTSQGEKMAFPNRNNSIRGFEVIDAIKSNVEAACSGTVSCADILALAARDGVQLLGGPTWNVKLGRRDARTANMTLANLNLPPGNAPLANLTELFARQNLNIREMTALSGGHTIGFARCTNFRDHIYNDSNIDPNFAATRKASCPRPTGTGDFNLAPMDIQTPNTFDNDYYKNLVAKRGLLHSDQELYNGGSQDSLVKMYSTNQALFFQDFAAAMIRMGDLKPLTGTNGEIRNNCRVIN

SEQ ID NO: 14995 - protein, 315 aa, Spinacia oleracea
GKLLFFFQLILFGLSLTVNGQLSPNFYSSTCPNALRIVKQGIAKRIKKEARVGASILRLHFHDCFVNGCDGSILLDDTSTFRGEKTAIPNKNSVRGFKAVDSIKASLEKACPGVVSCADILAIASRDAVVQYGGPTWQVRLGRRDSLTANRSAANAFIPAPSFNLRNLTSSFTTVGLSFKDMVVLSGAHTVGFARCTSFRPHIHNDTNINAAFAKSLQKKCPQSGNGKVLQPLDYQTKFRFDDKYYQNLLVKKGLLHSDQQLYSGNNNADAYVRKYASKQGEFFQEFGNSMIRMGNIKPLTGTHGQIRRNCRKSN

SEQ ID NO: 14996 - protein, 309 aa, Spinacia oleracea
IILAYLACLSNAQLSSKHYASSCPNLEKIVRKTMKQAVQKEQRMGASILRLFFHDCFVNGCDASLLLDDTSTFTGEKTAISNRNNSVRGFEVIDSIKTNVEASCKATVSCADILALAARDGVFLLGGPSWKVPLGRRDARTASLTAATNNLPPASSSLSNLTTLFNNKGLSPKDMTALSGAHTIGLARCVSFRHHIYNDTDIDANFEATRKVNCPLSNNTGNTNLAPLDLQSPTKFDNSYYKNLIAKRGLLHSDQELYNGGSQDALVTRYSKSNAAFAKDFVAAIIKMGNISPLTGSSGEIRKNCRFIN

SEQ ID NO: 14997 - protein, 491 aa, Rhizobium leguminosarum bv. viciae
MTTDINGTALAVFIFFFVLVTVMGFVASRWRKPETLAHIDEWGLGGRNFGTWITWFLVGGDFYTAYTVIAVPALVYTVGAYGFFALPYTIVVYPFVFMVMPVLWKRAKDFGYVTAGDVVHGQYGSRGLELAVAATGVIATMPYIALQLVGMTAVLKALGLHGELPLAIAFIVLALYTYSAGLRAPALIAFVKDIMIYIVVIAAVALIPSKLGGYANVFASADAAFQAKGSGNLLLGGNQYVAYATLALGSALAAFMYPHTLTGIFASNSGKTIRKNAIMLPAYTLLLGLLALLGYMGHAANLKLDSANDVVPTLFKTLFSGWFFRFAFAAIAIGALVPAAVMSIGAANLFTRNFWKAYVDPDVSDAGEAKVAKITSLVVKVGALLVIIFLPTQFALDLQLLGGIWILQTLPALVFGLYTNWFRAPGLLAGWFVGFGGGTFLVWDAGWKPLHLISLGGEPFTVYTGLLALAANIAVAVVVNALLPAKAPVRA

SEQ ID NO: 14998 - protein, 358 aa, Burkholderia kururiensis
MSHQLTIEPLGATIEVEEGQTILDAALRQGIYIPHACGHGLCGTCKVEILDGEADLGDANPFALMDFEREERKALACCATLTSDAVIEADVEEDPDAEVIPVKDFTAEVSRIVQLTPTIKAIYLRLDDAFHFQAGQYVQLEIPGLHQSRAFSVANAPADVAATGEIELNVRQVPGGVGTAYLHEQLAVGDRVTLSGPYGRFFVRKSAHVPMIFMAGGSGLSSPRSMILDLLQGGATEPITLVYGQRNAAELYYDDAFRELARQYPNFRYVPALSEGGAGAGMQTHGAVAHGFVHEAAKVHFDNNFAGHKAYLCGPPAMIDACITTLMQGRLFEGDIYHEKFISAADVQQVRSPLFRNV

SEQ ID NO: 14999 - protein, 560 aa, Oenococcus oeni
MTEKKPFWGRSVLESLLNHDVKYVFGIPGAKIDRLFEVIENNSNAPKLVITKHEQNAAFMAQAVGRLTGKPGVVLVTSGPGASNLATGILTAQTENDPVVAIAGQVQRQDLYRRTHQSTPSVLLFNGITKFTTEVQDAENLSEVIANAFDIASAAPQGASFISLPQDVDDSPVSSQALEKVENISAGPASPEQIEFLAGKIRQAKLPVILVGQRGSDEKTVKALHDFLHVTKLPVVETFQGAGVIDRSLVEQSFFGRVGLFANQTGDQLLKASDLVIALGYDAVEYEPRVWNKNNKLPIATIDSIHAQIDAHYNPKIQLVGDMPVTINLLAKQLNNYSLSKESNSLLNKYREQLKSRRGGPKFVAKVGLSHPLDVVHAIQKQVDDNMTVTLDVGSVYIWMSRFFRSYRPRHFLISDGMQTLGVALPWAIAAGLVRPNEKIVSVSGDGGFMFSSAELETAVRLKSNLVHIIFNDHGHYDMVKFQEEMKYGKSAGVDFGQVDFVKFAESFGAKGLRVDDPTKIDQVLTEAFNWDQGPVLVDIPVDYSHDTELYSELIEGGMD

SEQ ID NO: 15000 - protein, 568 aa, Saccharomyces cerevisiae
MPLLDKLYNIPNLRWAGNSNELNAAYAADGYSRLKGLGCLITTFGVGELSAINGVAGSYAEHVGILHIVGMPPTSAQTKQLLLHHTLGNGDFTVFHRIASDVACYTTLIIDSELCADEVDKCIKKAWIEQRPVYMGMPVNQVNLPIESARLNTPLDLQLHKNDPDVEKEVISRILSFIYKSQNPAIIVDACTSRQNLIEETKELCNRLKFPVFVTPMGKGTVNETDPQFGGVFTGSISAPEVREVVDFADFIIVIGCMLSEFSTSTFHFQYKTKNCALLYSTSVKLKNATYPDLSIKLLLQKILANLDESKLSYQPSEQPSMMVPRPYPAGNVLLRQEWVWNEISHWFQPGDIIITETGASAFGVNQTRFPVNTLGISQALWGSVGYTMGACLGAEFAVQEINKDKFPATKHRVILFMGDGAFQLTVQELSTIVKWGLTPYIFVMNNQGYSVDRFLHHRSDASYYDIQPWNYLGLLRVFGCTNYETKKIITVGEFRSMISDPNFATNDKIRMIEIMLPPRDVPQALLDRWVVEKEQSKQVQEENENSSAVNTPTPEFQPLLKKNQVGY

SEQ ID NO: 15001 - protein, 792 aa, Paracoccidioides brasiliensis
MLLKTTSLTHTITIMDKHLLHTLTGVQVNAIDKALAVGPDWVLLGLSEVGATKSLLNSIGVSADSLRQVILKIRGDEKVMSNNHEDQRDSLNKYTVDLTERALAGKLDPVIGRDDEIRRTVQVLSRRTKNNPVLIGEPGVGKTAIVEGLAQRIVNGEVPESLKGKRVLSLDLGSLLAGAKYRGEFEERLKAVLKDLAKHEGEIILFIDELHTLVGAGKGDGAMDAGNMLKPALARGELRCVGATTLDEYRQYIEKDAALERRFQKVLVDEPSVEDTIAILRGLKERYEVHHGVKILDSAIIAAAKMSHRYITDRQLPDKAIDLIDEAASRIKMELDSKPEALDKLERRLIQLKLQLEAVKKDEDAGSRAEVSHLEKQIEDVQKDYNDLEEVWKSEKTLVEGTKQIQAQLDQARIALQKAQRENDLGEMSRLQYGVIPELEKQLAQDELVEEKEEPKLLRNKVTDNEIAEVVSAATGIPVAKMLQGEREKLLQMESFLHQRVVGQDEAVIAVSNAVRRSRAGLSDPNRPSGSFLFLGPTGVGKTELTKALANFLFDSDDAMIRIDMSEFMEKHSVSRLVGAPPGYVGYEEGGVLTEAVRRKPYSVVLFDEVEKAHPDVFNILLQVLDDGRLTDSQGRVVDFKNTVIVMTSNLGSSDVRELGDNPSRDDVRNVVMAAVSEHFRPEFINRIDELVVFHALEKAQIRGIADIQLDRLRARLADRDIKLTVDDSAFDQLIEAGFDPVYGARPLKRAIQQQVENNLAQKILAGDFQPGDTIVITADAGQLDFQKLKLN

SEQ ID NO: 15002 - protein, 509 aa, Geobacillus kaustophilus HTA426
MSKIIGIDLGTTNSCVAVLEGGEVKVIPNPEGNRTTPSVVAFKNGERLVGEVAKRQAITNPNTIISIKRHMGTDYKVEIEGKQYTPQEISAIILQYLKSYAEDYLGEPVTRAVITVPAYFNDAQRQATKDAGRIAGLEVERIINEPTAAALAYGLDKEEDQTILVYDLGGGTFDVSILELGDGVFEVKATAGDNHLGGDDFDQVIIDYLVNQFKQEHGIDLSKDKMALQRLKDAAEKAKKELSGVTQTQISLPFISANENGPLHLEMTLTRAKFEELSAHLVERTMGPVRQALQDAGLTPADIDKVILVGGSTRIPAVQEAIKRELGKEPHKGVNPDEVVAIGAAIQGGVIAGEVKDVVLLDVTPLSLGIETMGGVFTKLIERNTTIPTSKSQVFTTAADNQTTVDIHVLQGERPMAADNKSLGRFQLTGIPPAPRGVPQIEVTFDIDANGIVHVRAKDLGTNKEQSITIKSSSGLSEEEIQRMIKEAEENAEADRKRKEAAELRNEAD

SEQ ID NO: 15003 - protein, 566 aa, Acetobacter pasteurianus
MTYTVGMYLAERLVQIGLKHHFAVAGDYNLVLLDQLLLNKDMKQIYCCNELNCGFSAEGYARSNGAAAAVVTFSVGAISAMNALGGAYAENLPVILISGAPNSNDQGTGHILHHTIGKTDYSYQLEMARQVTCAAESITDAHSAPAKIDHVIRTALRERKPAYLDIACNIASEPCVRPGPVSSLLSEPEIDHTSLKAAVDATVALLEKSASPVMLLGSKLRAANALAATETLADKLQCAVTIMAAAKGFFPEDHAGFRGLYWGEVSNPGVQELVETSDALLCIAPVFNDYSTVGWSAWPKGPNVILAEPDRVTVDGRAYDGFTLRAFLQALAEKAPARPASAQKSSVPTCSLTATSDEAGLTNDEIVRHINALLTSNTTLVAETGDSWFNAMRMTLPRGARVELEMQWGHIGWSVPSAFGNAMGSQDRQHVVMVGDGSFQLTAQEVAQMVRYELPVIIFLINNRGYVIEIAIHDGPYNYIKNWDYAGLMEVFNAGEGHGLGLKATTPKELTEAIARAKANTRGPTLIECQIDRTDCTDMLVQWGRKVASTNARKTTLALEHHHHHH

SEQ ID NO: 15004 - protein, 648 aa, Capsicum annuum
MFRSWGDDSQHIFGAASGVTDTADDENVTVSYPEGMPSYIAPLDVYKTARSMGPTAQVNLQYNLSWVFSVDPGFSYLVRLHFCEITRNISKVNQRVFVIFMNNQTAEPAADVIAWAGSNGVPFHKDYVVSVPSGASQQDLWLALHPNVASKSNWYDAILNGIEIFKVSDTNGNLAGPNPVPVAEPDHIDPLPSKKGQSKNNTSAIGGGIGGGIAAAILIGLIVCLVTRLRKRGKVQSPSDGPSGWLPLSLYGNSHTSGSAKTNTTGSYASSLPSNLCRHFSFAEIKAATNNFDEALLLGVGGFGKVYQGEIDGGTKVAIKRGNPLSEQGVHEFQTEIEMLSKLRHRHLVSLIGYCEENCEMILVYDYMAHGTLREHLYKTQKPPLPWKQRLEICIGAARGLHYLHTGAKHTIIHRDVKTTNILLDEKWVAKVSDFGLSKTGPTLDHTHVSTVVKGSFGYLDPEYFRRQQLTDKSDVYSFGVVLFEILCARPALNPTLPKEQVSLAEWAFHCYKKGTFDQIIDPYLNGKLAPECLKKFTETAVKCVSDVGADRPSMGDVLWNLEFALQLQESVEECCKGFGKMDIEEGFDVTCKGKKDLNAFPGYDESMTDSRSSGISMSIGGHSLASENSDGLTPSAVFSQIMNPKGR

SEQ ID NO: 15005 - protein, 408 aa, Methanosarcina mazei
MKVLVINAGSSSLKYQLIDMTNESALAIGLCERIGIDNSIITQKRFDGKKLEKQTDLPNHKIALEEVVKALTDSEFGVIKSMDEINAVGHRVVHGGEKFNSSALINEGVEQAIKDCFELAPLHNPPNMMGISSCQEIMPGVPMVAVFDTAFHHTIPPYAYMYALPYELYEKYGIRKYGFHGTSHFYVAKRAAAMLGKPEQDVKVITCHLGNGSSITAVKGGKSIETTMGFTPLEGVAMGTRCGSIDPAVVPFIMEKEGLSTREIDTLMNKKSGVLGVSSLSNDFRDLDEAASKGNQKAELALEIFAYKIKKVIGEYIAVLNGVDAIVFTAGIGENSATIRKRILADLDGIGIKIDEEKNKIRGQEIDISTPDATVRVLVIPTNEELTIARDTKEICETEVKLRSSVPI

SEQ ID NO: 15006 - protein, 402 aa, Silene conica
ALTGHENVVQFHNAFEDDNYVYIVMELCEGGELLDRILAKKDSRYTEKDAAVVVRQMLKVAAECHLHGLVHRDMKPENFLFKSPKEDSPLKATDFGLSDFINPSRKFTDIVGSAYYVAPEVLKRKSGPESDVWSIGVITYILLCGRRPFWDKTEDGIFKEVLRNKPDFRRKPWPSISNSAKDFVRKLLVKDPLVRLTAAQALSHQWVREGGNALDIPIDISVLHNMRQFVKYSRMKQFALRALASTLNDDELANLRDQFDAIDVDKSGTISLEEMRQALAKDLPWKLKDSRVMEIVEAMDSNTDGFVDFTEFVAATLHVHQLHELDNDKWQELSQRAFEKFDVDKDGYITPDELRMHTGLKGSMEPLLEEADIDKDGRISLAEFRRLLRSASMSSRIVASPS

SEQ ID NO: 15007 - protein, 402 aa, Silene noctiflora
ALTGHENVVQFYNAFEDDNYVYIVMELCEGGELLDRILAKKDSRYTEKDAAVVVRQMLKVAAECHLHGLVHRDMKPENFLFKSPKEDSPLKATDFGLSDFINPSRKFTDIVGSAYYVAPEVLKRKSGPESDVWSIGVITYILLCGRRPFWDKTEDGIFKEVLRNKPDFRRKPWPSISNSAKDFVRKLLVKDPFVRLTAAQALSHQWVREGGNALDIPIDISVLHNMRQFVKYSRMKQFALRALASTLNDDELANLRDQFDAIDVDKSGTISLEEMRQALAKDLPWKLKDSRVMEIVEAIDSNTDGFVDFTEFVAATLHVHQLHELDNEKWQELSQRAFEKFDVDKDGYITPDELRMHTGLKGSMEPLLEEADIDKDGRISLAEFRRLLRSASMSSRIVASPS

SEQ ID NO: 15008 - protein, 563 aa, Silene vulgaris
NKVSGSNSNNTASTSTAGKTKRNRRKPPSMPYTTSGVPSRTSGVPTTTITHYHNDKHRKTSKNNSNIIKLREKTSSRRQSSIPCGKRTDFGYDKDFDKRYIIGKLLGHGQFGYTYVATNKSNGDRVAVKKIDKNKMKLPIAVEDVKREVKILKALTGHENVVQFYNAFEDDNYVYIVMELCEGGELLDRILAKKDSRYTEKDAAVVVRQMLKVAAECHLHGLVHRDMKPENFLFKSPKEDSPLKATDFGLSDFINPSRKFTDIVGSAYYVAPEVLKRKSGPESDVWSIGVITYILLCGRRPFWDKTEDGIFKEVLRNKPDFRRKPWPTISNSAKDFVRKLLVKDPLVRLTAAQALSHQWVREGGSALDIPIDISVLHNMRQFVKYSRMKQFALRALASTLNDDELANLRDQFDAIDVDKSGTISLDEMRQALAKDLPWKLKDSRVMEIVEAIDSNTDGFVDFTEFVAATSHVHQLHELDNEKWQELSQRAFEKFDVDKDGYITPEELRMHTGLKGSMEPLLEEADIDKDGRISLAEFRRLLRSASVSSRIVASPSCARNSRRH

SEQ ID NO: 15009 - protein, 562 aa, Silene diclinis
NKVSGSNSNNNTTTTSTAAKTKKNRRKPSTTQLTTSGVPSRTSGVPTTTITHYHNDKHRKTSSNNNKNNSNIIKLGEKKSSRRQSSIPCGKRTDFGYDKDFDKRYIIGKLLGHGQFGYTYVATNKSNGDRVAVKKIEKSKMILPIAVEDVKREVKILKALTGHENVVQFYNAFEDDNYVYIVMELCEGGELLDRILAKKDSRYTEKDAAVVVRQMLKVAAECHLHGLVHRDMKPENFLFKSPKEDSPLKATDFGLSDFIKPSRKFTDIVGSAYYVAPEVLKRKSGPESDVWSIGVITYILLCGRRPFWDKTEDGIFKEVLRNKPDFRRKPWPSISNSAKDFVRKLLVKDPFVRPTAAQALSHQWVREGGSALDIPIDISVLHNMRQFVKYSRMKQFALRALASTLNDDELANLRDQFDAIDVDKSGTISLDEMRQALAKDLPWKLKDSRVMEIVEAIDSNTDGFVDFNEFVAATLHVHQLHELDNEKWQELSQRAFEKFDVDKDGYITPDELRMHTGLKGSMEPLLEEADIDKDGRISLAEFRRLLRSASMSSRIVASPSCA

SEQ ID NO: 15010 - protein, 562 aa, Silene latifolia
NKVSGSNSNNNTTTTSTAAKTKKNRRKPPTTQLTTSGVPSRTSGVPTTTITHYHNDKHRKTSSNNNKNNSNIIKLREKKSSRRQSSIPCGKRTDFGYDKDFDKRYIIGKLLGHGQFGYTYVATNKSNGDRVAVKKIDKSKMVLPIAVEDVKREVKILKALTGHENVVQFYNAFEDDNYVYIVMELCEGGELLDRILAKKDSRYTEKDAAVVVRQMLKVAAECHLHGLVHRDMKPENFLFKSPKEDSPLKATDFGLSDFIKPSRKFTDIVGSAYYVAPEVLKRKSGPESDVWSIGVITYILLCGRRPFWDKTEDGIFKEVLRNKPDFRRKPWPSISNSAKDFVRKLLVKDPFVRPTAAQALSHQWVREGGSALDIPIDVSVLHNMRQFVKYSRMKQFALRALASTLNDDELANLRDQFDAIDVDKGGTISLEEMRQALAKDLPWKLKDSRVMEIVEAIDSNTDGFVDFTEFVAATLHVHQLHELDNEKWQELSQRAFEKFDVDKDGYITPDELRMQTGLKGSMEPLLEEADIDKDGRISLAEFRRLLRSASMSSRIVASPSCA

SEQ ID NO: 15011 - protein, 314 aa, Burkholderia cepacia
MDMNRLRLILIGLFTLAWLVLPMQAERHLVDGLNFAALLAIGGLGVGMLLGQCGIVNLGQAAFYGIGAYATGYGTTVLGWHWLPSMLMGMALSGGVAALIGLPILRLSGFFLALATLAVGSIAGVLFFEWDWLTGGTLGVGGIPKLGLMGFELSDPTRFHYFIWPLVALLLWLASNLVNSRQGLAMRAMRDAAPAAEVLSVDMHRIKTVMFVLCAMLGALAGSLFAHYVSFVSVQSFTVERSILFLLVPVVAGARSVLGIVIGALFVALMPEALSTLGDMHQVLFGLALVLVVTLLPSGLTGLATRLVARKEGA

SEQ ID NO: 15012 - protein, 385 aa, Thermus thermophilus
MRGLSRRVQAMKPSATVAVNAKALELRRQGVDLVALTAGEPDFDTPEHVKEAARRALAQGKTKYAPPAGIPELREALAEKFRRENGLSVTPEETIVTVGGSQALFNLFQAILDPGDEVIVLSPYWVSYPEMVRFAGGVVVEVETLPEEGFVPDPERVRRAITPRTKALVVNSPNNPTGAVYPKEVLEALARLAVEHDFYLVSDEIYEHLLYEGEHFSPGRVAPEHTLTVNGAAKAFAMTGWRIGYACGPKEVIKAMASVSRQSTTSPDTIAQWATLEALTNQEASRAFVEMAREAYRRRRDLLLEGLTALGLKAVRPSGAFYVLMDTSPIAPDEVRAAERLLEAGVAVVPGTDFAAFGHVRLSYATSEENLRKALERFARVLGRA

SEQ ID NO: 15013 - protein, 295 aa, Anabaena sp.
DVPVNLYRPNAPFIGKVISNEPLVKEGGIGIVQHIKFDLTGGNLKYIEGQSIGIIPPGVDKNGKPEKLRLYSIASTRHGDDVDDKTISLCVRQLEYKHPESGETVYGVCSTYLTHIEPGSEVKITGPLGKEMLLPDDPEANVIMLATGTGIAPMRTYLWRMFKDAERAANPEYQFKGFSWLVFGVPTTPNILYKEELEEIQQKYPDNFRLTYAISREQKNPQGGRMYIQDRVAEHADQLWQLIKNQKTHTYICGLRGMEEGIDAALSAAAAKEGVTWSDYQKDLKKAGRWHVETY

SEQ ID NO: 15014 - protein, 455 aa, Escherichia coli
TTILKHLPVGQRIGIAFSGGLDTSAALLWMRQKGAVPYAYTANLGQPDEEDYDAIPRRAMEYGAENARLIDCRKQLVAEGIAAIQCGAFHNTTGGLTYFNTTPLGRAVTGTMLVAAMKEDGVNIWGDGSTYKGNDIERFYRYGLLTNAELQIYKPWLDTDFIDELGGRHEMSEFMIACGFDYKMSVEKAYSTDSNMLGATHEAKDLEYLNSSVKIVNPIMGVKFWDESVKIPAEEVTVRFEQGHPVALNGKTFSDDVEMMLEANRIGGRHGLGMSDQIENRIIEAKSRGIYEAPGMALLHIAYERLLTGIHNEDTIEQYHAHGRQLGRLLYQGRWFDSQALMLRDSLQRWVASQITGEVTLELRRGNDYSILNTVSENLTYKPERLTMEKGDSVFSPDDRIGQLTMRNLDITDTREKLFGYAKTGLLSSSAASGVPQVENLENKGQSVEHHHHHH

SEQ ID NO: 15015 - protein, 396 aa, endosymbiont of Riftia pachyptila
MIKPVGSDELKPLFVYDPEEHHKLSHEAESLPSVVISSQAAGNAVMMGAGYFSPLQGFMNVADAMGAAEKMTLSDGSFFPVPVLCLLENTDAIGDAKRIALRDPNVEGNPVLAVMDIEAIEEVSDEQMAVMTDKVYRTTDMDHIGVKTFNSQGRVAVSGPIQVLNFSYFQADFPDTFRTAVEIRNEIKEHGWSKVVAFQTRNPMHRAHEELCRMAMESLDADGVVVHMLLGKLKKGDIPAPVRDAAIRTMAEVYFPPNTVMVTGYGFDMLYAGPREAVLHAYFRQNMGATHFIIGRDHAGVGDYYGAFDAQTIFDDEVPEGAMEIEIFRADHTAYSKKLNKIVMMRDVPDHTKEDFVLLSGTKVREMLGQGIAPPPEFSRPEVAKILMDYYQSINS

SEQ ID NO: 15016 - protein, 223 aa, Arabidopsis thaliana
MGKKCDLCNGVARMYCESDQASLCWDCDGKVHGANFLLAKHTRCLLCSACQSLTPWKATGLRLGPTFSVCESCVALKNAGGGRGNRVLSENRGQEEVNSFESEEDRIREDHGDGDDAESYDDDEEEDEDEEYSDDEDEDDDEDGDDEEAENQVVPWSAAAQVPPVMSSSSSDGGSGGSVTKRTRARENSDLLCSDDEIGSSSAQGSNYSRPLKRSAFKSTVVV

SEQ ID NO: 15017 - protein, 50 aa, Lactobacillus crispatus
  misc_feature (2)..(2): Xaa can be any naturally occurring amino acid
  misc_feature (46)..(46): Xaa can be any naturally occurring amino acid
  unsure (1)..(50): unsure at all Xaa locations
GXGFITPDDGSKDVFVHFSAINGYKSLDEGQKVSFTIESGAKGPAXANVT

SEQ ID NO: 15018 - protein, 181 aa, Brucella melitensis 16M
MPQSGAKPIHQPTDKKTAHRLDANVAGNESRTEQPKGQQMFAVIKTGGKQYRVAANDLIKVEKVAGEAGDIVEFAEVLMVGSTIGAPTVAGALVTAEVVEQGRGRKVIAFKKRRRQNSKRTRGHRQELTTIRISEILTDGAKPSKKAAEKKAPKADAAEGEAAKPKKAAPKKAAAKAESAE

SEQ ID NO: 15019 - protein, 368 aa, Brucella melitensis 16M
MPACDEIESPFGLKSRLRSGHPRRLCSMKFLDQAKIYIRSGNGGAGAVSFRREKFLEFGGPDGGDGGRGGDVWVEAVDGLNTLIDYRYQQHFKAKTGMHGMGRNMTGGKGDDVVLRVPVGTQIFEEDNETLICDITEVGQRYRLAKGGNGGFGNLHFTTSTNRAPRRANPGQEGIERTIWLRLKLIADAGLVGLPNAGKSTFLASVTAAKPKIADYPFTTLHPNLGVARIDGREFVIADIPGLIEGASEGVGLGDRFLGHVERTRVLLHLVSAQEEDVAKAYQVIRGELEAYEHGLADKPEIVALSQVDTLDPETRKAKVKALKKACGCEPLLLSAVSHEGLNDTLRQLARIIDLSRAEEAGTAQAEE

SEQ ID NO: 15020 - protein, 588 aa, Brucella melitensis 16M
MFYLGPKTEAQREQARIEEQQRQAQQAAQNRQASSSTGDTPQMPANPDSIPGQGDTKAAGAPLTRDAAIAQSPRIEIDTPSLRGSINLTGARLDDLYLKKYHETVSDKSPEIELLAPSSLKQGYFVELGFTGNDATGAVPGPNTVWVVEGNNKLTPSTPVTLTYTNDKNLTFKRVISVDDAYMFTVDDTIINNGGSTVSLASYGRVTRFNQPEHASATYVLHEGLIGVMGQDGLQEIKYAKIEDNKDISFKDVIGGWVGITDKYWAATLIPPQDEKFTGRFSHFTNDRPRYQSDLLSAPLTVAPGQSQKIQNRVFAGAKVVNTIQNYETKYHIKQFDLLIDWGWFYFITKPMFYLIDWIYKFTGNFGVAILVVTVLLKALFFPLANKSYKSMARMKLMQPKMTEIREKYADDKMKQQQAMMELYKREKINPLAGCWPVLVQIPVFFALYKVLYVTIEMRHAPFFGWIQDLAAPDPTSIFNLFGLLPYTVPHFLMIGVWPIIMGIIMFLQMRMNPTPPDPTQAAIFTWMPIIFTFMLASFPAGLVIYWAWNNTLSIIQQSVIMKRQGVKIELFDNLKGLFRRKPKEANK

SEQ ID NO: 15021 - protein, 337 aa, Brucella melitensis 16M
MTDKLTSAPKHGHTSMLYSKVHTDLDTLDAHIAFLGIPYGSAYTIDEVTNDQTRAPTAVRQATDRAVRNLDRYDFDVDGPLYDGRAIKAVDCGDVVGDPKDPGAHYRNAEAAVRKILAAGVLPLIIGGDHGIPIPVLRAYDDQGPITLIQIDAHLDWRDHINGVHDGLSSPIRRASEMAHVKDIFQIGIRAQGTARPEEYEAARAYGSNIITAYELHDVGMDAILDRIPDGGRYYITIDADGIDPSVMPAVAGPAFGGVTYAQTRKLLHGLVKKGRVVGMDIVEITPSKDVNQLTAIAAGRFFVNLIGAAVRADYFGTKAELETAAGKTMKPAHAAA

SEQ ID NO: 15022 - protein, 423 aa, Brucella melitensis 16M
MARIVMKFGGTSVADLERIYNVARHVKREVEAGNQVAVVVSAMSGKTNELVDWVQNMPKVCGASSPFYDAREYDTIVASGEQVTSGLLAIALQSIGVDARSWQGWQIPIQTDNAHGAARIQEIDGSQIIRRMEMGQVAVVAGFQGIGPDNRVATLGRGGSDTSAVAVAAAVKADRCDIYTDVDGVYTTDPRIEPKARRLPKISFEEMLEMASLGAKVLQVRSVELAMVHKVRTFVRSSFTDPDAPGMGDPINPPGTLICDEEEIVEQQVVTGIAFAKDEAQISLRRVADRPGVSAAIFGPLAEEHINVDMIVQNVSEDGSKTDMTFTIPTGDIDKALKVLDKAKSEISFDNIQSETGLAKISVIGIGMRSHAGVAATAFKALAEKGINIRAITTSEIKISILIDGPYAELAVRTLHAVYGLDK

SEQ ID NO: 15023 - protein, 217 aa, Brucella melitensis 16M
MKFFVDTADVKEIRELNDLGLVDGVTTNPSLILKSGRDIIEVTKEICNIVKGPVSAEVAATEYEQMMKEAAVIARIADNICIKLPVTLDGLKACKALTSEGHKVNMTLCFSANQALLAAKAGATFISPFIGRLDDTGINGMELIAEIRTIYDNYDFRTEILAASVRTVNHVKEAALIGADVVTAPPATLKALVKHPLTYKGLETFLADWAKTGQKIA

SEQ ID NO: 15024 - protein, 504 aa, Brucella melitensis 16M
MLRHMLKEERMSDPKSIVIASAARTAVGAFNGAFANVPAHELGAVAIKAALERAGVDAADVDEVILGQVLTAGEGQNPARQAAMGAGCPKETTAFAINQLCGSGLRAVALGMQQIVSGDAKIIVAGGQESMSMAPHCAYLRSGVKMGDFKMIDTMLKDGLTDAFHGYHMGITAENIARQWQLSRSEQDEFALASQHKAEAAQKAGRFDEEIVPFTVKARKGDVVVSADEYIRPGTTMEVLAKLKPAFDKEGTVTAGNASGINDGAAAVVLMDAGEAARRGVKPLARIVSWATAGVDPSIMGTGPIPATRKALEKAGWSVGDLDLVEANEAFAAQSCAVVRDLGLNPEIVNVNGGAIAIGHPIGACGARVLTTLLYEMERRDAKRGLATLCISAAAWAWPFVSSGIDPVLERHLKPTANFGRVPEEGCFFPAKVNAEPKHAGESVLFRLRPMACDCGQIPDVVRTNTENPAISDSSLIRSRVVPYINRALPPHPSLGKASARIET

SEQ ID NO: 15025 - protein, 646 aa, Brucella melitensis 16M
MIFASLTVFKRKISVHALSCGFRKTAFSAVKARVEQPRSDRQSIEIDMNRELTAEEGRKRRSLKPLKRMMPFLAPYKVLVAGALFSLVLAAVTTLAVPVALRRMIDHGFTGSNAVFVNNYFGMLVLLAFALALASGLRYFFVISLGERVLADLRNAVFSHVTALSPEFFDRSQSGEIVSRLSSDTTQIKSVVGATASVALRNMILGIGALAMMVVTSPKLSALVIAAIPIIVIPLIAFGRSVRRRSRMTQDMLARANAYASEQIGAMRTLQAFTNESMVVGSFAHAVEKAYQAARSSIQARAILTAFAIFLVFSSIVAVLWFGSRDVLAGTMSAGTLGQFVLYAVFAGSSFGALSEVGGELAQAAGATERLVEILDEKPGITAPAHPVALPKPPRGEIAFENVYFSYPTRPDAPSLNGLGFTVKPGETVAIVGPSGAGKSTIFSLVMRYYDPQSGRVLMDGVALPNADPHDVRSRIAMVPQDVAIFATTIRENIGFGKPGASDAEIIAAAKAALAHEFIMALDNGYDTEVGERGITLSGGQCQRIAIARALLRDAPILLLDEATSALDAESEMLVQKALDGLMADRTTLVVAHRLATVLKADRILVLDHGRIVEEGTHESLVAKGGIYARLAKLQFEAGAGAFAAQ

SEQ ID NO: 15026 - protein, 651 aa, Brucella melitensis 16M
MVSIGPDMNPNYRNFALWAIIALLLIALFNLFQSPGQRTNSREISYSQFIDDVSNGRVKSVTITGQRISGTLADNGSTFQTYSPGDTGLVSRLEDKGVAITARPESDGSSSLIGILLSWLPMILILGVWIFFMRQMQGGPRGAMGFGKSKAKLLTEAHGRVTFQDVAGVDEAKQDLEEIVEFLRDPQKFQRLGGKIPRGVLLVGPPGTGKTLLARSVAGEANVPFFTISGSDFVEMFVGVGASRVRDMFEQAKKNAPCIIFIDEIDAVGRHRGAGLGGGNDEREQTLNQLLVEMDGFEANESIILIAATNRPDVLDPALLRPGRFDRQVVVPNPDIVGREQILKVHVRNVPLAPNVDLKVVARGTPGFSGADLANLVNEAALMAARRNKRLVTMQEFEDSKDKIMMGAERRSAMTPEEKTNTAYHEAGHAIVALNVPKADPVHKATIIPRGRALGMVMQLPEGDRYSATYTWMVSRLAIMMGGRVAEELKFGKENITSGASSDIQQATKLARSMVTQWGYSDKLGRVAYGDNQEEVFLGHSVSRTQNISEETAQIIDAEVRRLIDEAYAEATRILTKKKKDWIALAEGLLEYETLTGDEINELIAGNKPSRDQGNDTPSRGSGVPKAGSSRKRKGSEPGGEPGMEPKPQPQ

SEQ ID NO: 15027 - protein, 538 aa, Brucella melitensis 16M
MKEASMAPRVLVSDKLSPTAVQIFKDRGVDVDYLPDLGKDKEKLLEVIGEYDGLAIRSATKVTEKLIAAAKKLKVVGRAGIGVDNVDIPAASRRGIIVMNTPFGNSITTAEHAIALMFAVARQLPEADTSTRAGKWEKNRFMGVEITGKTLGVVGCGNIGSIVATRGIGLKMHVVAFDPFLSDARAQELGVEKVELDELLARADFITLHTPLIDKTRNIINAQTLAKMKPGVRIVNCARGGLIVEKDLIAALKSGHVAGAGIDVYETEPATENELFSLPNVVCTPHLGASTSEAQENVALQVAEQMSDYLVKGAVSNAINMPSITAEEAPRLKPFVKLADVLGAFVGQVTDEPIQEVEVLFDGSTASMNTRALLSAALAGLIRSQVADVNMVSAPIMVKERGIIVSEVKRDKSGIFDGYIKLTVKTTVRERSIAGTCFSDGKPRFIQIKGINLDAEVGPHMLYVTNKDVPGMIGLLGTICGKHDVNIANFALGRDHPGGDAIAMLYVDEQIPQAALDELMAQEAIRAATPLEFNVGEV

SEQ ID NO: 15028 - protein, 207 aa, Brucella melitensis 16M
MSGFPAFSAGDFAERVRQWRPDHEELTGDHALNPDVSQAMVTARMRDAAVLVPVVDRGAEATLLLTRRTDTLRKHSGQIAFPGGAIDPEDGTTERAALREANEEIGLAADRAEIIGNLPRYLTGSGFSITPVLAVVKTPFDVHPNPDEVADIFEVPLSFLMNPANHRRESRLFNGKERFYYAMPYHERFIWGATAGIIRGLYERLYV

SEQ ID NO: 15029 - protein, 328 aa, Brucella melitensis 16M
MRQNQTANRYRIGVRGKRMKLFAGNSNRVLAESVAQYLNIPLGKASVRRFADQEIFVEIQENVRGEDVFVLQSTSYPANDHLMELLIMIDAFRRSSARRITAVLPYFGYARQDRKPGPRTPISAKLVANLITEAGASRVLTLDLHAGQIQGFFDIPTDNLYAVPVIARDVKANYATGNCMVVSPDVGGVVRARSLAKRIDAQLAIVDKRRERPGESEVMNVIGDVSGKDCLLFDDIVDSGGTLCNAAEALLNKGANSVTAYITHGVLSGGAVARIASSKLKELVITDSIQPTTAINDAPNIRVLSISDLIGEAIARTAAEESVSSLFD

SEQ ID NO: 15030 - protein, 83 aa, Brucella melitensis 16M
MKRRRQGKGTDPMAQTGQVKFFNTEKGFGFIKPDDGGADIFVHISAVQASGLPGLADNQKVSYETEPDRRGKGPKAVNITITG

SEQ ID NO: 15031 - protein, 421 aa, Brucella melitensis 16M
MRKTGPRPVTVNRACHLWRSIMAFLADALSRVKPSATIAVSQKARELKAKGKDVIVLGAGEPDFDTPENIKQAAIAAINRGETKYTPVSGIPQLRQAIVSKFKRENGLDYKPEQTIVGTGGKQILFNAFMATLNPGDEVIIAAPYWVSYPEMVAINGGTPVFVDTKIEDNFKLTAADLEKAITPKTKWLIFNSPSNPTGAAYTQAELKSLTDVLVRHPHVWILTDDMYEHLVYGDFVFTTPAQVEPSLYDRTLTMNGVSKAYAMTGWRIGYAAGPIELIKAMDMIQGQQTSGACSIAQWAAVEALNGTQDFIPANKKIFQARRDLVVSMLNQATGLQCPTPEGAFYVYPSCAGLIGKKTEAGKVIETDKDFVTELLETEGVAVVHGSAFGLGPNFRISYATSDELLEKACIRIQRFCASLR

SEQ ID NO: 15032 - protein, 101 aa, Brucella melitensis 16M
MLPDDLLSINSIHRDVCEACGLNSYYVTKDIPMATGTVKWFNTTKGFGFIQPDQGGTDVFVHISAVQRAGLTTLDEGQKVSYEIVQDRRSGRSSADNLVAA

SEQ ID NO: 15033 - protein, 378 aa, Brucella melitensis 16M
MRSEKAMQPLKYLDEMLPWNDRLQMLECISAIEEAPDVMTFSFKTTEDNWFRYTPGQFVTLELPLERADGLGPVLRTYTLSSTPSRPYHISVTVKARIGSIGTRWMLDNLRPPMKIKAYGPNGDFSLANHPGDKYLFISAGSGITPMMSMTRWLFDCAPATDVSFINCARTPDDIIFRKELELLSGRMEAMRLAFIVEQSSARHVWPGLHGRIDRARLELLAPDFLQREIFCCGPEPFMNGVRGLLEQAGFNMANYHQESFQPASEISAVPVPSPLPETGNTAAPSMPPAVAAASVVFSQSGVEVECTENDTILLAARNGGLKIPSACEFGICGTCKVKCLSGETEMNHNGGIRDDEIAEGYILACCSRPRGRVEIDA

SEQ ID NO: 15034 - protein, 607 aa, Brucella melitensis 16M
MNAGKHEAEANAGQAQDAGHPREMTGAEMVIQALIDQGVESIFGYPGGAVLPIYDGLFQQDQIQHVLVRHEQGAGHAAEGYARSTGKVGVMLVTSGPGATNAVTPLQDALMDSIPLVCISGQVPTTLIGSDAFQECDTIGITRPCTKHNWLVKDVNDLSRVLHEAFHVASTGRPGPVVVDIPKDIQFAKGIYTPPETAPRTSYRPVLDGNAEAISEAVRLLANARKPVIYSGGGVINSGPAASRLLRELVEISNFPITSTLMGLGAYPASGKNWLGMLGMHGTYEANMTMHDCDVMLCVGARFDDRITGRLNAFSPNSKKIHIDIDPSSINKNVRVDVPIIGDVAHVLEDIVRQFRAFDRKPDRQALTEWWGQIDRWRARNSLAYTPNKDVIMPQYAIERLYELTRNRNTYITTEVGQHQMWAAQFFGFEQPNRWLTSGGLGTMGYGLPAALGVQIAHPDALVIDIAGDASIQMCIQEMSAAIQHNAPIKIFILNNQYMGMVRQWQQLLHGNRLSHSYTEAMPDFVKLAEAYGAHGIRCEKPGDLDAAIQEMIDIDKPVIFDCRVANLANCFPMIPSGKAHNEMLLPDEATDEAVANAIDAKGRALV

SEQ ID NO: 15035 - protein, 456 aa, Brucella melitensis 16M
MRNAPFPCSYGGAVASASAKAYKTPMLNQQTIQNQSDRRSACPGLSRMVMAKDGAIARIKLRLGRLSTQQAFALADIAEHSGARAIELSIRSNVQLRGIAPARWDEVVTAFYEAGLGADNPAADDIRNVMVSPTAGIDPGQICDVTGLASDLLAMLQAEKAFHALSPKFSLQVDGGEDCAMISHPGDIWLSATEEGKAYVFGLASSPDRQALGTIAANNVPPFIDALLRCFLRNGAARMKQLTSEREFVKTVRESLPFAIEPAYGWKRKATVAHAHLGQHRQLDSNHYIGAMPLLGRLTPLQLRELARLAQEELRLTPWQGILLPNIAPGETDRIKRALHATGLETSPKSAHARLRACSGATGCASALADTQADGNFLAARLESGSDPVHLTGCAKSCAALAPLPHTLLARSAGRYDLYAQDRFSQNGAGPSRFGQLLASDITLEEAAHILNARHQ

SEQ ID NO: 15036 - protein, 774 aa, Brucella melitensis 16M
MTKKPSSPSTRSDFDEAALFFHRYPKPGKLEIQATKPLGNQRDLALAYSPGVAAPCLAIHDDPATAAEYTARGNLVAVVSNGTAVLGLGNIGALASKPVMEGKAVLFKKFADIDVFDIEIDAHEINRIVDVVSALEPTFGGINLEDIKAPECFEVEEQLRERMNIPVFHDDQHGTAIIVASAVLNGLELAGKKIEEAKIVTSGAGAAALACLNLLVNLGAKRENIWVCDIEGVVYDGRNTLMDRWKEVYAQKTDARTLADVIGGADVFLGLSAAGVLKPELLKQMAEKPLIMALANPKPEIMPEEARAARADAMICTGRSDFPNQVNNVLCFPYIFRGALDVGATVINEEMKLAAVRAIASLAREEPSDVAARAYSGDTPTFGPDYIIPSPFDQRLILRIAPAVAKAAMETGVATRPIEDMEAYLDRLNRFVFRSGLIMKPVFAAARTQGAPMRVIYADGEDERVLRAAQVVIEERIAAPILVGRPQVVETRLRRYGLKIRPGTDFELINPEDDPRYRDYVDLYLSYTGRQGVTPEAARTIVRTNSTAIAALAVMRDEADAMICGLEGRFERHLRVVRQIIGKVPGIRDYSALSLLISQRGALFLTDTYVNAEPDANEIAEMAVLAAREISRFGIEPKAALVSHSNFGSKESASAEKMRQAAAILAEKAPDLESDGEMHGDAALSQTLRDRVFPNSRLKGEANLLVFPNLDAANITLNVVKAVTDALHVGPILLGATRPAHILTPSVTSRGVVNMTALAVVEALQKNASNRRQN

SEQ ID NO: 15037 - protein, 291 aa, Brucella melitensis 16M
MTNVKVAFLGLGVMGYPMAGHLKAKGGHDVTVYNRTAAKAAKWAEQFGGNYAATPADAVKNADFVFACIGNDDDLRSVTVGADGAFSTMKKDAIFIDNTTASAEVARELDKEAQKRGFHFMDAPVSGGQAGAENGVLTVMVGASEPVFERAKPVIEAYARSVGLMGPVGSGQLAKMVNQICIAGLVQGLAEGIHFGKKAGLDIEKLIAVISKGAAGSWQMENRSSTMNQGKYDFGFAVDWMRKDLGICLDEANRNGALLPVTALVDQFYKEVQKIGGGRWDTSSLLARLEQ

SEQ ID NO: 15038 - protein, 280 aa, Brucella melitensis 16M
MRAASVKSRIHRSDFSGQPFPGIRARFKFMLEIKNLHAKIADTDTEIIRGLNLTVNKGEVAAIMGPNGSGKSTLSYILAGRDDYEVTEGDILYNGESILELDPAERAAKGIFLAFQYPMEIPGVATMEFLKVAMNSQRKARGEPELNIPEFIKRVKDAAGGLNIDMNMLKRPLNVGFSGGEKKRAEILQMQLLEPSLCVLDETDSGLDIDALKIVSEGVNALRSPDRAVIVITHYQRLLEHIVPDSVHVLYKGQVIKSGDKSLALHLEENGYADVIGEAA

SEQ ID NO: 15039 - protein, 392 aa, Brucella melitensis 16M
MVGSGKRLYLDYNASAPLLDEARDAIIAALGITGNPSSVHREGRAARALVESARRSVATLVNARPEHVFFTSGATEAASTLLTPNYMMGRSPVRLSHLYVSATEHPCMIAGGQFSPDDITVLPVDANGILRLDILRGLLAAHDRSKGLPLVAVQAANNETGVIQPVAEIAAIVKAAGGIYIVDAVQAAGRIKLDITDNCGDYLIISSHKIGGPKGVGAVIAISDLMMPRALVRGGGQEKGHRAGTEALPLIAGFGAAADVAKARIDGEGWSSLMRDRLERGLAEIAPAAIVHGSAVPRLPNTTFFSLQGQKAETVQIAFDLAGIALSAGSACSSGKVGPSHVLAAMGQEDGPGAIRVSLATDAGEETVDRFLEALRKIVERHQRTKHELGAV

SEQ ID NO: 15040 - protein, 130 aa, Brucella melitensis 16M
MGDILPSCAGIWAGILKGNQMTGINDIIDNEVKNNDVVLFMKGTPGFPQCGFSGQVVQILDYLGVNYKGVNVLASDELRQGIKEYSSWPTIPQLYVKGEFVGGCDIVREMFQSKELQALFNEKGIATKAA

SEQ ID NO: 15041 - protein, 316 aa, Brucella melitensis 16M
MPSKTIDHAITARSLTSAATDPTHAGVLSFMRRTYSKSLKGAEAVVWGIPFDAAVSNRPGARFGPQAIRRASAIFDNDPQYPFERDLFENLAVIDYGDCLLNYGNHTKTPSTIEREAAKILKSDAFLLTLGGDHFITWPLLKAHTAKYGPLALVQFDAHQDTWFDDGRRIDHGSFVARTARDGIIDPDLSIQIGIRTHAPEDCGIRIIYGHEVEDMPAAAIADAILKRTNGRKAYLTFDIDCLDPAFAPGTGTPVAGGPSSAKMLSVLRKLTALDFVGADVVEVAPAYDHADITAIAGATIAMYYLGLLGERKERR

SEQ ID NO: 15042 - protein, 395 aa, Brucella melitensis 16M
MIAGAGVAGLSAALELAARGWRVQIFEKAQELSEVGAGLQLAPNAMRHLERLGVADRLSGTGVTPKALYLMDGRKARPLLAMQLGDTARNRWHHPYIVCHRADLQSALLDACRNAPGIEINLGAEMTDQRMTGNSITATIKRENSVETVEAAYLVACDGVWSMQRAKAGYSKARFSGHIAWRTTLAADALPASFLGAMPEHKAVSAWLGNKAHFIAYPVKGGNFFNFVAITGGENPGEVWSKTGDHAHLQSIYADWSKPVHEILAATRDWTYWPLFEMADAQFVGPDRTIFLGDASHAVTPFAAQGAAMAIEDAAALAQALDSDDQAAGLKRFDSVRKERIAAVAKRGQLNRFAYHATGIFALGRNMLFAVRSPETFLKDLDWLYGYDAALAVRN

SEQ ID NO: 15043 - protein, 343 aa, Brucella melitensis 16M
MKKTLMTGVLGAAALFGIASGASADTLSDVKAKGFLQCGVNTGLLGFASPNDKGEWSGFDVDYCRAVASAIFGDPTKVKFTPLNAKERFTAFQSGEVDVLIRNTTWTISRDTSLGLDFAGINYYDGQGFMINSKKLAGINSALQLSGASICVQAGTTTELNMADYFRANKMEYNPVVFEKIEEANAAYDSGRCDAYTTDQSSLYGVRLALANPDDHVILPEIISKEPFGLTVRQGDARWADVVRWTHNALLNAEEYGITQANVEEMKKSDNPDIKRLLGAEADTKIGTDLGLDKDWVVKIIKGVGNYGEIFERNIGSGSPLKIARGLNAQWNKGGLQYGIPVR

SEQ ID NO: 15044 - protein, 311 aa, Brucella melitensis 16M
MNNGTSPAGGETEATQTRSGFVALIGAPNAGKSTLVNQLVGTKVSIVTHKVQTTRALVRGIFIEGPAQIVLVDTPGIFRPKRRLDRAMVTTAWGGAKDADIILVIIDAQGGFNENAEALLESMKDVRQKKVLVLNKVDRVDPPVLLSLAQKANGLVPFDRTFMISALNGSGCKDLAKYLAESVPNGPWYYPEDQISDMPMRQLAAEITREKLYLRLHEELPYASTVETERWEERKDGSVRIEQVIYVERESQKKIVLGHKGETVKAIGQAARKEISEILEQTVHQFLFVKVRENWGNDPERYREMGLDFPT

SEQ ID NO: 15045 - protein, 69 aa, Brucella melitensis 16M
MANGTVKFFNSTKGFGFIQPDDGSSDVFVHISAVERAGLHSLVEGQKVGYEVVADRRSGKSAAANLESL

SEQ ID NO: 15046 - protein, 587 aa, Brucella melitensis 16M
MYRYDEFDRDFVAARVAQFKDQVARRLSGELTEDQFKPLRLMNGLYLQLHAYMLRVAIPYGTLSSRQLRKLGSIARTYDRGFGHFTTRQNIQYNWPALKDVPQILAELAEVEMHSIQTSGNCIRNVTADHFAGAAADEVTDPRPLAEILRQWSSLHPEFSYLPRKFKIAIVGSEHDRAAIQVHDIGLQLKKNEAGELGLAVYVGGGQGRTPMVAKKIRDFLPIEDMLTYVTAIVRVYNLHGRRDNKFKARIKILVHETGIEQLTREIDAEWEEIRHGELKLPQRDIDVIESYFRMPDLPQRPEGWEILAVAQKADAEFASWVARNVTAHKHPDYAVVTISLKPVGGIPGDASAEQMELVADVAQTCSFDEIRVSHEQNLVLPHVAKADLPAVYDRLQSGGLVTPHAGLITDIIACPGLDYCALANARSIPVAQRISERFADLDRQLEIGDLKIKISGCINACGHHHVGHIGILGVEKKGEELYQITLGGSADENSAIGEITHRARFLVGRGGRCHRNHCRYLSGPARKCGGNFPCRLSPGGNGAFQTRSLWGDKKCCLTPTLPMRMSAVPRKPGFSKQATAHPRRTK

SEQ ID NO: 15047 - protein, 371 aa, Brucella melitensis 16M
MPFDPRLLASVSAAVAKAAMETGVAGRAIADIEGYKRELLARRDPIASTLRGIYERVRRQPKRIVFAEGEEEQVMRAAVSYVNQGLGTAILVGREEHVEETARAAGLDLNRPGIEVINARLSSRNAAYADYLYEKLQRRGYLARDCLRLINNDRNHFAACMVALGDADGMVTGVTRNYATGLDDVRRVIDSKPGHRMVGVSIALCRGRTVFIADTAVHEMPTAAELADIAVEAAGMARRMGYVPRVALTAFSTFGHMGGERSARIQEAVRILATRHVDFEFDGEMSTDVALNPKLMEQYPFIRLSGPANVIVTPDNHSASIAADMLQELGGATIIGPLLVGLDKPAQIVTIGAKDSDIVNMAAITAYNATN

SEQ ID NO: 15048 - protein, 406 aa, Brucella melitensis 16M
MSKWKDVKKVVLAYSGGLDTSIILKWLQTELGAEVVTFTADLGQGEELEPARKKAEMLGIKEIFIEDVREEFVRDFVFPMFRANAVYEGVYLLGTSIARPLISKHLIDIAKKTGADAIAHGATGKGNDQVRFELSAYALNPDIKIIAPWRDWSFKSRTQLLEFAEQHQIPVAKDKKGEAPFSVDANLLHSSSEGKVLEDPSQEAPEYVHMRTISPETAPDKATIIKIGFEKGDAVSINGERLSPATLLAKLNDYGRDNGIGRLDLVENRFVGMKSRGVYETPGGTILLAAHRAIESITLDRGAAHLKDELMPRYAELIYYGFWFSPEREMLQAAIDHSQRHVEGEVTLKLYKGNVMVIGRESAKSLYSDKLVTFEDDQGAYDQKDAAGFIKLNALRLRTLAARDRK

SEQ ID NO: 15049 - protein, 360 aa, Brucella melitensis 16M
MCRKLSGRPFGHCGGVLKAFSNDGVEMSNKKKPMVVLTRKLPDPVETRMRELFDARLNIDDHRMSQPEIIAALKEADVLVPCITDVIDAAVIEQAGPNLKLIANFGNGVDNIDVAAAARRGITVTNTPNVLTEDTADMTLALLLSVPRRLVEGANVINERHGQWPGWSPTWMLGRRIWGKRLGIVGMGRIGTAVARRAKAFGLSIHYHNRKRVSPQVEEELEATYWDSLDQMLARMDIISVNCPSTPATFHLLSARHIALMQPTAYLVNTARGQIIDENALIDLIEEGRLAGAGLDVFEHEPAVNPRLLALAEKGKVVLLPHMGSATIEGRIDMGDKVIINIRAFVDGHRSPDRVLPNRV

SEQ ID NO: 15050 - protein, 641 aa, Brucella melitensis 16M
MERNMAKVIGIDMGTTNSCVAVMDGKNAKVIENAEGARTTPSIIAFTDGDERLAGQPAKRQAVTNPEGTLFAVKRLIGRRYDDPMVTKDKDLVPYKIVKGDNGDAWVEVHGKKYSPSQISAMILQKMKETAESYLGETVTQAVITVPAYFNDAQRQATKDAGKIAGLEVLRIINEPTAAALAYGLDKSEGKTIAVYDLGGGTFDVSVLEIGDGVFEVKSTNGDTFLGGEDFDIRLVEYLVAEFKKESGIDLKNDKLALQRLKEAAEKAKIELSSSQQTEINLPFITADQTGPKHLAIKLSRAKFESLVDDLVQRTVEPCKAALKDAGLKAGEIDEVVLVGGMTRMPKIQEVVKAFFGKEPHKGVNPDEVVAMGAAIQGGVLQGDVKDVLLLDVTPLSLGIETLGGVFTRLIERNTTIPTKKSQTFSTAEDNQSAVTIRVFQGEREMAADNKLLGQFDLVGIPPAPRGVPQIEVTFDIDANGIVNVSAKDKGTGKEHQIRIQASGGLSDADIEKMVKDAEANAEADKKRRESVEAKNQAESLVHSTEKSLAEYGDKVSADDKKAIEDAIAALKTSLEGEDAEDIKAKTQALAEVSMKLGQAMYEAAQAAEGAGAEGGEQASSSKDDVVDADYEEIDDNKKSS

SEQ ID NO: 15051 - protein, 359 aa, Brucella melitensis 16M
MPSPVRVKKRATFVGQAAKKRLTLCAMEKLDITQKLADAEAAITSALRTIKTENAGLVALEEALNNGLSGPFVEAVERIVASRGRLVVTGVGKSGHIGSKLAATFASTGTSAFFVHSGEANHGDLGMIGLEDVILAISWSGETVELKGIVNYSQRFRIPLIAITSRQDSALGRAADVVLLLPKATEACPHGLAPTTSTMMQLAIGDALAIALLEARGFTPSDFKTFHPGGSLGASLIHIRDIMHRGNRLPLVKTGTPMPDAMKVLAQKSFGCVVVTDDAGELAGIVTDGDISRNLSRNLSALAVDDIMTRSPRTIDQNMLASAALKTINENHIGALIVVEANRPIGLVHFHDLLRIGAA

SEQ ID NO: 15052 - protein, 497 aa, Brucella melitensis 16M
MCLKRHIGEGAATRIRAQCDYAFTNIRGACMNTISKPSVDLHREEEPHLARNLSNRHLQLIAIGGTIGTGLFMGSGKAVSLAGPSILLIYAITGFMLFFVMRALGEILLSNLQYRSFADFAGDYLGPCAQFFTGWTYWLCWIVTAVAEVVAVPGYVSFWFPHLAPWIPALGLITILLILNLPTVRNFGEIEFWFALIKIITIIGLIITGIYMLMTGFVLPNGTQASIAHLWNHGGFFPNGSLGFIAGFQISVFAFVGIELVGTAAAEAENPMRNLPKAINNIPIRIVLFYIGALFVIITVTPWNQVDPNSSPFVAMFSLAGIGIAAHFINFVVLTSASSSSNSGIYSTSRMVYGLATVGLAPKAFSKLSNRKVPVHALIFSCIFLLSSVVLLYAGQSMIQVFTLVTTISALLFIFIWSIILVSYLQYRRKHPERHEKSTFKMPGGRASVVMVFIFFAFVLWALTQEPDTLAAMKVTPLWFVLLGIAYWVMKLKQKQS

SEQ ID NO: 15053 - protein, 251 aa, Brucella melitensis 16M
MMTKDILVLDQLNKSFGPAHIIRGVNLAVRDGERHAVIGPNGAGKSTLFHLISGNFTPSSGSIRFQGEEIGGLTPAAVNRKGLARSFQITNIFPGLTVFENIRLAVMRRYKVQFTFWRPVSSMRKVTAEVESLLEQVRLTARAYTLASQLSYSEQRSLEIGMTLASDPRLIILDEPMAGMSQEETDYTVGLIREITQNRTLMIVEHDMYVVFTLADRISVLVYGEIIATGTPKEIRENARVREAYLGEEAH

SEQ ID NO: 15054 - protein, 234 aa, Brucella melitensis 16M
MTTFSVKALQVDRASIPVIRGVDVEVRSGEISVLLGSNGAGKTTFLESLSGIIPARAGTIRLDETELARLRPGARTKAGLSHVEQGRTVFPDMTTDENIRVALHPDADPGEAYGLFPELLQRRDVKAGMLSGGEQQMVVIARSIVNRPKVMLIDEMSSGLAPVIVNRLMRAVRQLADNGMAIVLVEQFAALALSIGNRAYVLRRGQIVYDGNSEALAHDPARLHQLYLGDAAAI

SEQ ID NO: 15055 - protein, 172 aa, Brucella melitensis 16M
MTRAAIWPNAFQPHMEIISSAPTKKARRLSSIGLLSVVRYRAVHAKTVEDIVALDIALPRNTLDWFERLPAEIEKKIDVTMYCGHFFCHVLHQEYLVKKGEDCEALKKAILALLEERGAKYPAEHNVGHLYEAEESLKKFYRDLDPTNAFNPGLGQTSYLLNWQTPGYHSDQ

SEQ ID NO: 15056 - protein, 324 aa, Brucella melitensis 16M
MTKRDTTILVLGNFDDYAVQRLSDEFNVQRMARGDTALLGSDWVKDVKGIASMSKVSADLIDALPNLEIIGNFGVGYDAVDARHAGANNVMVTNTPDVLTEEVADTTIGLLIDTVRELSKAQEFLRRGEWGKQVRYPLSKLSLRGRKVGIFGLGRIGKAVARRIEAFGLPIAYHNRRKAADVAYDYYPSLKELAGAVDTLILVAPGGAETTRAVNMEVLQALGPEGVLINIGRGSVVDEEALAQALKDGTIAAAGLDVFANEPHVPQALLDAPNTVLLPHIGSASVKTRRAMADLVVDNLIAWFDSGTAITPVPETVGVKAVRQ

SEQ ID NO: 15057 - protein, 429 aa, Brucella melitensis 16M
MAQTLYIPKESDPNETRVAGSAETVKKFIALGFDVVVEKGAGEKSRIPDAEFAAAGARIGTAVDAKTADVILKVRRPGDAELKAYKSGAALFAMLDPYGHEDAVAALARAGISAFTMEFIPRITRAQVMDVLSSQANLAGYQAVIDAAEVYDRAMPMMMTAAGTVPAAKVFVMGAGVAGLQAIATARRLGAVVTATDVRPAAKEQVASLGAKFIAVEDDEFKAAETAGGYAKEMSKDYQAKQAALVADHIAKQDIVITTALIPGRPAPRLVSKEMVASMRPGSVLVDLAVERGGNVEGAVPGEIADVNGVKIVGYLNVPGRIAASASQLYARNLIAFVETLVDKESKVLKIDPEEELVKATLLTHQGRILHPAFAKAETAPAAVTEKAEKPKAAPKAPPKAAAKPAKKAPAKAAKKPSSPKSPVDGGEA

SEQ ID NO: 15058 - protein, 272 aa, Brucella melitensis 16M
MMNTASGAIPVLHEAGPGTSQTASGIVLSARGLGKSFGGFHAVKNVDLDVEHARVHALIGPNGAGKTTVFNLLTKFLQPTSGEITLLGETITKTDPARVARKGLVRSFQISATFPHLTVLENVKVALQRPNGLATQFWRSLSALDWLDAQAVELLERVGLADARHALAADLSYGRKRALEIATTLALDPKVLLLDEPLAGMGHEDVHTIAALITDVAKDRAVLMVEHNLKVVADIAHHVTVLQRGEILASGDYATVSKDERVRTAYMGTEHE

SEQ ID NO: 15059 - protein, 331 aa, Brucella melitensis 16M
MLAAGFALSAQGGAAADTLSTVKERGKVNCGVSQGVAGFSSPDDQGKWTGFDIDFCRAVSAAVFGDPDKVSFIPLSTKERFTALQSGTVDLLSRQTTWTLSRDAGMGIHFVGTAYYDGQGFMIRKDLGVDSALKLDGASICTEQGTTTEQNVADYFGAHNIKYEPVVIDSADGILKAFETGRCDVYTTDASALYAQRLKLAEPDAYMVLPEVISKEPLGPAVRQGDDKWFNIVRWTLFALLEAEELGITQKTVAADLDSRKPDIRRFLGSEGDNGQQLGLEPKWAYNIVASVGNYGEMFERTIGEGSLLKINRGINALWNKGGLMYAPPVK

SEQ ID NO: 15060 - protein, 331 aa, Brucella melitensis 16M
MPIRLVHIAKHKWSILIQILEGIQFMHCKILGLPVQEGTGRKGCNMGPDSYRAAGIADAIRELGHECTDLGNLAPAAQRPLQHPNHAIKALPYAVAWIEAISEAAYRESAEGFPIFLGGDHLLAAGTVPGIARRAAEKGRKQFVLWLDAHTDFHTLETTTSGNLHGTPVAYYTGQKGFEGYFPKLAAPIDPHNVCMLGIRSVDPAEREAVKKTEVIVYDMRLIDEHGVAALLRRFLERVKAEDGLLHVSLDVDFLDPSIAPAVGTTVPGGATFREAHLIMEMLHDSGLVTSLDLVELNPFLDERGRTAAVMVDLMASLLGRSVMDRPTISY

SEQ ID NO: 15061 - protein, 412 aa, Brucella melitensis 16M
MTERLSLSRDRINVLLLEGISQTAVEYFKSSGYTNVTHLPKALDKADLIKAISSAHIIGIRSRTQLTEEIFAAADRLIAVGCFSVGTNQVELKAARKRGIPVFNAPFSNTRSVAELVIGEIIMLMRRIFPRSVSAHAGGWEKTAIGSREVRGKTLGIVGYGNIGSQVGNLAESLGMTVRYYDTSDKLQYGNVKPAASLDELLKTSDVVSLHVPSSKSTSKLITEAKLRKMKKGAFLINNARGSVVDLEALAKVLQEGHLAGAAIDVFPVEPASNGERFSTPLQGLENVILTPHIGGSTEEAQERIGTEVTRKLVEYSDVGSTVSAVNFPQVQLPPRPTGTRFMHVHENRPGILNSLMNVFSHHHINIASQFLQTDGEVGYLVMEADGVGEASDAVLQEIREIPGTIRARLLY

SEQ ID NO: 15062 - protein, 396 aa, Brucella melitensis 16M
MSKSDPIVIVGASRTPMGGFQGDFTNAQATDLGASAIGGALAGAGLAPEAVEEVIMGCVLPAGQGQAPARQASLKAGLPLGTGATTVNKMCGSGMKAAMLAHDLILAGSADVIVAGGMESMTNAPYLLPKARGGYRMGHGQVLDHMFLDGLEDAYDKGRLMGTFAEDCAEAYQFTREAQYAFAISSLTRAQNAIKDGLFAAEITPVKVKSGRAEVEVTIDEQPGKAKLDKIPTLRPAFREGGTVTAANSSSISDGAAALLLMRASEAEKRGLTPRAVITGHATYADKPNLFSTAPIGAIRKLSEKTGWDLKDVDLFEINEAFAVVAMAAMRDLDLPHDKVNIHGGACALGHPIGASGARILVTLLAALETHGLKRGIAGICLGGGEATAMGIERII

SEQ ID NO: 15063 - protein, 401 aa, Brucella melitensis 16M
MKKQLVTFNAGSSTVKIGVFECDENAVRKVSKGDIDLTGSPLRFRLRGENGNLDIVLSASGADEITTILGELFDKLAEHIDPSRILAVGHRVVFGGDDFAQAVLIDDDNLEAIERLSIFAPLHQPKSLALIKAVRKIFPHLAQTASFDTAFHQTIPDTVRRFAIPQELHDRGIKRFGFHGLSYKSVIGNFSQRAPELAEGKIIAAHLGSGASLCAMHKRKSLDTSMSFSTLDGIPMATRCGALDPGVLLHLLQQEKMEADALADLLYHRSGLLGLSGLSGDTRDLLESDAPQAHTALDIFALRIAGEICRLASTLNGLDAVIFTAGIGEHQPAIRAAICQRLAWQGVELDPAANDENAFCITSRTSRTAAFVLPTDEEQIIASETFEIIRQMPATARSAFA

SEQ ID NO: 15064 - protein, 231 aa, Brucella melitensis 16M
MAMIDRGLVRKLSLFAKMRDDELDRLVSYATSRRVPQGESIFEQGDEASCFYLLLHGRLKVNQVTPDGQQIIVRMVHPGDLFGFARALQRNDYPGTATAVMESIVLAWPTELWDYFVEQNPGLAMNAIQTIGKRLEEAHTRIREMSTEEVERRVAHAVLRLSRQAGKKEETGIRIDFPISRQDIAEMTGTTLHTVSRILSNWETKGLVQGGRQKLLVLDSAGLRRLAEGED

SEQ ID NO: 15065 - protein, 395 aa, Sphingomonas sp.
MNIAIIGAGIGGLALALALRERGIDARIYEQASELAEIGAAIALSANATRELRRFGLMDGLLEVALEPTELIYRDGLSGERVAAHSMSLGNQYQTRFGAPYLGIHRADLQKVMGGAVGAAAIALDHRLLDIAPLADGVELRFAGRDPVIADVVIGADGVRSVIRDFVTGGRAALYSGTSAFRGIVPVDRLPSLPDPQAIQFWMGKNAHMLHYAIGRDGDAVNFFAVVEGPQPWLDETRWVAPATLGEALGEFDGWHPAIGEMLQAAAVDKRWGLFVTPPLSCWHKGPAVLIGDAAHAMLPHHGQGANTSIEDACVLASLLAGMNTGNRDERLVQYEALRRPRTRKIQRSAWDANTALHAMGAGQIAKRQATIDGFPERFGWIHEFDVAQSIAVPA

SEQ ID NO: 15066 - protein, 1353 aa, Venturia inaequalis
MSLGDVKNGSAVNVKDGSKTSRGSSETEEIEKDNARTQMGQAPVPGMDTDPSGGLKELKNMRKLDSNVIEVKDQNDDPFRHLPEHEQEILRRQTFIPDVKVGYFTLYRYASRWDWAAWWLSVFCSIVSGAAMPLMTVVFGGLTGLFADYFKNVITYKQFNSELSHFVLYFLYLAIGTFVTTYIMTVGFIYVGERCTGKIRERYLKAMLRQNIAFFDKLGAGEVTTRITADTNLIQDGISEKFGLTLNALATFISAFVIAFIKYWKLTLILTSTVFAITLVMGVGSSFVVRWTVRSQTEYAKGGTIAEEVLSSVRNAIAFNTQDKLAKVYDSYLVIAETNGRKLQMSLGAMIASMMTLIYLNYGLSFWQGSRFLVQGDMTVSQVLTVLFAVMIGAFSLGNVAPNFKAFTSAVAAGQKIFAAIDRTSPMDPDSPDGKVLEKMSGPIELRNVKHIYPSRPEVVVMNGVDLIIPAGKQTALVGAFGSGKSPIVGLVERFYEPVGGEMFLDGHDIREINLHWLRQNISLVQQEPVLFATTIYENIRFGLLGTEFEKVDPERQRDLIEGAAKMANAHDFIMVLSEGYQTHVGERGFLLSGGQKQRIAIARAVVSDPKILLLDEATSALDTKSEGVVQAALDKAAQGRTTIVIAHRLSTIKNADNIVVMSRGAIVEQGRHSELLERKSAYFNLVEAQRIAAEIKNDNPEEVEILQEVDGQKLHRAATNEKGEPIDPDDEDPVGRLKRMQSGKSISSVELGKRGTEQTPEYSLLQLLGVVWSFNKTEWPIMLLGFICSVIAGGGNPVQAIFFAKAVSALSLPPAQYAELRSEINFWSLMYLMLAGTQLISNFGQATAFGYCSERLIHRARDQAFRHMLRQDIEFFDREENNAGSLTSFLSTSSTQLSGLSGSTLGTILQVSTTLVVAMTISLAIGWKLALVCISAIPVLLACGFFRFWMLARFQARTKAAYVNSAGFACEATSAIRTVASLTREEDVFEKYHAQLEAQAKSSLVSILKSSALYAASQSFIFFCIALGFWYGGTLIAKREYSQFQFFVCFMSIIFGAQSAGTIFSFAPDMGKAKHAAAELQTLFDRKPKIDCWSEEGDRLTSVEGHVEFRDVHFRYPTRPEQPVLRGLNLSIKPGQYVALVGASGCGKSTTIALLERFYDPLSGGVYVDGQEVSKLNVNDYRSYLALVSQEPTLYQGTIRENVLLGADREGVPEDEIIRACKDANIYDFIMSLPDGFNTVCGQKGGLLSGGQKQRIAIARALLRNPKILLLDEATSALDSESEQIVQLALDKAAKGRTTIAVAHRLSTIQKADVIYVIDGGRVVEEGSHNYLLSKNGRYAELVMMQSLEKAG

SEQ ID NO: 15067 - protein, 282 aa, Craterostigma plantagineum
LGLSLGSFGPSSSGGSHPPPALPLPSNLFRPSLQEIDRTQRSIGAFLQAPTAAAVCREPASAFRGIDVNRPPTIVDCGEENNNPIASPSPNSTVCSSSGKRTSGEREEKEDGDRAASSSFEVEDDDGGGGDASARKKLRLSKEQAVVLEETFKEHSTLNPKEKIALAKQLNLMPRQVEVWFQNRRARTKLKQTEVDCEYLRRCCENLTEENRRLQKEVNELRALKLSPQFYMSPPTTLTMCPQCERVAAQPSSAAAIRPPSHHQRPAAGMNSWAAMISPRPS

SEQ ID NO: 15068 - protein, 282 aa, Craterostigma plantagineum
MKTQNTSETLGALISICPNTTDEERVSNVETSAMFGLDDECFASEKKRRLSNEQVKALEKYFEVENKLEPERKVKLAQELGLQPRQVAVWFQNRRARSKTKNLERDYGVLKSNYNALKHDFETLKRDNESLLKEIHELKSKLNEDDDSKSVEEEPFVEALELDANSDDVEPDSNQLFGSSDSDSSAILNEDNNNSRSSFLDDHRRKLSKIHGGSSPPSSAKIASEKNGSDESCKRAAAYKPQFVKIEEQHNLFREEDESCTTTFFSDEQAPTLNWYTPDEWN

SEQ ID NO: 15069 - protein, 285 aa, Craterostigma plantagineum
MNSARIFFDPSSHGNMLQFLGNAGGDSSVFRGTRSSSVLNMEESSLKRQIFSGGGGDEFYDEEYYDEQLLPEKKRRLTAEQVHLLEKSFEAENKLEPERKAELAKKLGLQPRQVAIWFQNRRARWKTKQLERDYDKLKSSYDSLLSTYDSIRQENDKLKAELLSLNEKLQPKDDDDPSAEIGRNLSSSSPPVDAAEPPCLKLTVKVEDRLSTGSNGSAVMDGDGPQQLLDDSGDSYFENDEEYDCAAASLAAAKEDDGSDEGGCYFTEALAAEEEEAPFAWCIWS

SEQ ID NO: 15070 - protein, 314 aa, Craterostigma plantagineum
MNMEPICGAYDEDDDFLIKNEDDDDPLWLSPQDSSSPTSFHCLQGGSSSSSSMANLPLLPKAGKVRISSGDISSAAAAKKIRRLSADQVRYLEKTFDQDNKLEPERKAKLAKDLGLQPRQVAIWFQNRRARYKTKLLQKDCDVLKSSYDRLKRDYDALFSQNEKLKIEIDSLMGKLQGKEKGRDQLIMKENLEPLGGEDDVKKQSKTSSAKSDVVDCSDSSPRHGDSSHDVFEAAAADAISDYYYGEEEDNDESLGKSSLLLQASSSCFPKIEVGDDDESSCYEENDYYCLQPNSCSNLLGFPVQDHGTWFWQV

SEQ ID NO: 15071 - protein, 309 aa, Craterostigma plantagineum
MDSCSVYGDDHPHLKNALLKNEASEDLDSLWPHDSSNPSFHGSASPAMVNFEDVRGEDSPSPQKPIFPKIGNNAGKTRNSEELILDAFSSQKKRRLSSDQVRFLDKSFEVDNKLEPERKVQLAKELGLQPRQVAIWFQNRRARYKTKLLEKDYDALKSNYDRLKEDFDALYSENEKLKTEVNTLAEKLLGKADHGDHRPIKEEPPFDDDVNKQTKASSAKSDVLDYSDADGGNQRSPTMLELEHGDSSHVVGAISDYEDDDSLGRSLLLEAGNCLTKIEESFYDDLQPNSNCNLGFPVQNNHGTWFWQV

SEQ ID NO: 15072 - protein, 386 aa, Nicotiana tabacum
MDNEKIQDLKQFVELCKTNPSILQNPSLSFFKNVLESLGARVPPSVKSEKGGGEHSDELDEDIIESDVELDNTDTVEPDNDPPQKMGDYSGEVTEENRDAAQASKAKALDAISEGKLNEAINHLTEAILLNPNSAILYATRGSVFNKLKKPNAAIRDADAALKINSDSAKAYKVRGMARAMLGLWKEAASDLHVASTIDFDEEIAEILKKVEPNARKIEEHCRKYERLRQEKKQRKIERERQRRQAEAKAAYEKDEKKEQQSQHKASDPDSASVLNGGKIIGIHSVSELETKLNVASRASRLAILYFTATWCGPCRFISPVFTSLAEKYPKAAFLKADIDEARDAASRWNVSSVPAFFFIKNGKEVDRVVGADKNLLEKKIVQYAG

SEQ ID NO: 15073 - protein, 607 aa, Myxococcus xanthus DK 1622
MGKVIGIDLGTTNSCVAVMEGGEPVVIPNSEGSRTTPSMVGFTDSGERLVGQIAKRQAITNPENTVFAAKRLIGRKFDSPEGKKAIGVSPFKVASSPNGDAWVEIRGKGYSPPEVSAIVLMKMKQTAEDYLGEQVSEAVITVPAYFNDSQRQATKDAGRIAGLSVLRIINEPTAAALAYGLDKVQDGGTERIAVYDLGGGTFDISILELNAGVFEVKSTNGDTFLGGEDFDQRLIDYLAKRFAESNNGLDLRKDRMALQRLKEAAERAKHELSSAPETEVNLPFITADASGPKHLTETVDRATFEALVTDLIDRTIEPCRIALKDAGIPAQQINQVLLVGGMTRMPRVQQKVNEFFGREPHKGINPDEVVAVGAAIQGGVLKGEVKDVLLLDVTPLSLGVETAGGVFTKIIDKNTTIPCKKSQVFSTAVDNQPLVSVHVLQGEREMAADNKTLARFELVGIPPAPRGVPQIEVSFDIDANGIVHVSAKDLGTGKVQQVRVVSNSGLSEAEIQAMISDAQSHASDDKKKKELAELRNNADGLIYTTEKSLEEYASLLSEKDREEIKADLERLKEVLNTSDAAVLKESFQRLEGSAYRIADAIYTGQAS

SEQ ID NO: 15074 - protein, 95 aa, Oxalis flagellata
LYAGINISGTNGEVMPGQWEYQVGPSVGIEAGDHIWASRYILERITEQAGVVLTLDPKPIDGDWNGAGCHTNYSTKSMRDEGGFEVIKKAILNLS

SEQ ID NO: 15075 - protein, 48 aa, Antirrhinum majus
AVYVGENEKKRFVIPLSHLNERLFQDVLCRADEEFGFHHPMGGLTIPC

SEQ ID NO: 15076 - protein, 497 aa, Vibrio vulnificus
MIESSFAITGTFIAYLILMVAIGVYAYKKTSSSSDYFLGGRSLGPWPAALSAGASDMSGWLLLGLPGYAYAAGIESFWLAGGLLVGTWANWLVSAKRLRTYSIQTDALTLPEFLSRRFDDKSKLIQTISAFFILLFFLFYTSSGLVAGGKLFETVFGLDYSTAVIIGTLCVVSYTLFGGFLAVSWTDLVQGLLMAAALMIVPIAVMEGGFGQLATDMHNINPELLTLWNDAKGEPLSAIAIISLVAWGLGYFGQPHILARFKASRTNRELGTARRIAVGWTALSMAGAILVGLVGLVWVNGHSGTELARRRKNFMLLVNTVFHPVIAGILLAAILAAVMSTADSQLLVSSSALAEDFYKQVIKPDASSQEIVMVGRIGVVVISIIALILAMTPDSSVLGLVSYAWAGFGAAFGPAVVLSLYWKGMNRNGALAGILIGGITIVVWKQLTGGWFDVYEIVPGIIFSTIAIVGVSKLTGGADNTVLEQHREFEKKLVELE

SEQ ID NO: 15077 - protein, 237 aa, Beta vulgaris
HFHDCFVNGCDASILLNDTSTFTGEQTAGANAGSLRGYTVVDSIKSQVESVCPGVVSCADILAVAARDSVVSLGGPTWQVQLGRRDSTTASLSTANSDIPSPTMDLSGLLSSFSDKGLTAKEMVALAGAHTIGQARCVVFRNRVYNESNIDASFVTSVKANCPSSGGDNNLTPLDSTTPVAFDNGYFKDLASNKGLMHSDQQLFNNGSTDSQVTSYSKDSKSFQKDFASAMNSMGDI

SEQ ID NO: 15078 - protein, 120 aa, Listeria grayi
KRRPRPNVAEVMNIVGNVEGKVCILIDDIIDTAGTITLAANALKNAGATQVYACCTHPVLSGPAMERIDQSPIEKLVVTNSIALPEEKWIDKMEQLSVAPLLGEAIVRVHENASVSSLFE

SEQ ID NO: 15079 - protein, 180 aa, Listeria innocua
QIQGFFDIPIDHLNAVRLLSDYFSERHLGDDLVVVSPDHGGVTRARKMADRLKAPIAIIDKRRPRPNVAEVMNIVGNVEGKVCIIIDDIIDTAGTITLAAKALREAGATKVYACCSHPVLSGPAMKRIEDSPIEKLVVTNSIALPEEKWIDKMEQLSVAALLGEAIVRVHENASVSSLFE

SEQ ID NO: 15080 - protein, 200 aa, Listeria ivanovii
TSNPVNQNLMELLIMIDALKRASAATINIVMPYYGYARQDRKARSREPITAKLVANLIETAGATRMITLDMHAPQIQGFFDIPIDHLNAVRLLSNYFGERHLGDDLVVVSPDHGGVTRARKMADRLKAPIAIIDKRRPRPNVAEVMNIVGNVEGKVCIIIDDIIDTAGTITLAAKALREAGATKVYACCSHPVLSGPAMK

SEQ ID NO: 15081 - protein, 168 aa, Listeria seeligeri
TSNPVNQNLMELLIMIDALKRASAATINIVMPYYGYARQDRKARSREPITAKLVANLIETAGATRMITLDMHAPQIQGFFDIPIDHLNAVRLLSDYFGERHLGDDLVVVSPDHGGVTRARKMADRLKAPIAIIDKRRPRPNVAEVMNIVGNVEGKVCIIIDDIIDTAG

SEQ ID NO: 15082 - protein, 120 aa, Listeria welshimeri
KRRPRPNVAEVMNIVGNVEGKVCIIIDDIIDTAGTITLAAKALREAGATKVYACCSHPVLSGPAMKRIEDSPTEKLIVTNSIALPEEKWIDKMEQLSVAPLLGEAIVRVHENASVSSLFE

SEQ ID NO: 15083 - protein, 595 aa, Arabidopsis thaliana
MGQCYGKVNQSKQNGEEEANTATYVVSGDGNQIQPLTPVNYGRAKNTPARSSNPSPWPSPFPHGSASPLPSGVSPSPARTSTPRRFFRRPFPPPSPAKHIKASLIKRLGVKPKEGPIPEERGTEPEQSLDKSFGYGKNFGAKYELGKEVGRGHFGHTCSGRGKKGDIKDHPIAVKIISKAKMTTAIAIEDVRREVKLLKSLSGHKYLIKYYDACEDANNVYIVMELCDGGELLDRILARGGKYPEDDAKAIVVQILTVVSFCHLQGVVHRDLKPENFLFTSSREDSDLKLIDFGLSDFIRPDERLNDIVGSAYYVAPEVLHRSYSLEADIWSIGVITYILLCGSRPFWARTESGIFRTVLRTEPNYDDVPWPSCSSEGKDFVKRLLNKDYRKRMSAVQALTHPWLRDDSRVIPLDILIYKLVKAYLHATPLRRAALKALAKALTENELVYLRAQFMLLGPNKDGSVSLENFKTALMQNATDAMRESRVPEILHTMESLAYRKMYFEEFCAAAISIHQLEAVDAWEEIATAGFQHFETEGNRVITIEELARELNVGASAYGHLRDWVRSSDGKLSYLGFTKFLHGVTLRAAHARPR

SEQ ID NO: 15084 - protein, 141 aa, Canavalia gladiata
MPKVKADAKAADNRLKRKGAGAGRKQSKKAAKDPNKPKRPPSAFFVFMSEFREQYKKEHPTNKSVAVVGKAGGDKWKSLSDAEKAPFVARAEKKKEEYDKSILAYNRKLEGKNPSEEEKSDKSKSEVNDEDEDEEEDQDDE

SEQ ID NO: 15085 - protein, 383 aa, Campylobacter jejuni
MQSIILIGKPNVGKSSLFNRMARQRIAITSDISGTTRDTNKTQIHIHSKKAMLIDSGGLDESDELFKNVKKNTLKVAKESDIILYLVDGKLAPDDEDRQFFYSLKKLGKPIALVVNKVDNKKDEERAWEFANFGVKEIFNLSVTHNVGLDELYEWLEKFLHEEFLIPDEEENLEDFLEHYEEGKEFQFKEVDQNHIRVGIVGRVNVGKSSLLNALVKQERSVVSSIAGTTIDPVNESVVHKDKVIEFVDTAGIRKRGKIQGLERFALNRTEKILSHSQIALLVLDAHEGFNELDERIAGLVAKHYLGVIIVLNKWDKSEMDFDKTVKELHLDRFKFLAYAPVISVSALSGKRVHVLLDKILQIFENFTQKIQTSKLMKISFIL

SEQ ID NO: 15086 - protein, 631 aa, Thermomicrobium roseum
MGRVIGIDLGTTNSVMAVIEGGEPVVIPTAEGERLTPSVVAITRGERLVGRFAKRQAITNPENTIYSIKRFMGRRFDDPEVQRTIKLVPYQVRRAQNGGVAVKMGERSYTPQEISAMILQKLKQDAEAYLGETVDKAVITVPAYFDDSQRNATKDAGRIAGLEVRRIINEPTASALAYGLDKKGRGEGGVYDLGGGTYDISILDISEGVFQVLATNGYTHTPLVHFDQAIIDLALHEFKRETGIDLRQDRIVQRLKEAAEKAKIELSSVQQTEINLPFITADATGPKHLTVKLTRARLQAELVADLVEKTIPPMEQALKDAGLSPRDVDEVVLVGGQTRMPLIQRKVQEFFGKEPHKGINPDEVVAIGAAIQAGVLAGEVKEVLLLDVTPLTLAIETLGGVATPIIPRNTTIPTRKSQIFTTASDNQTQVEIHVVQGERPMAADNKTLGRFILDGIPPAPRGVPKIEVTFDIDANGILTVSARDLATGREQKITITASTGLTEEEIQRMIREAEEHAEEDRAKREAIDVRNQAEALLYQAEKTLNEFSDRIPSELKLELENKMQAVREIVERDPMNTARLRGLRRAGADPLPGRRPHVRAGPAPTASTGPDGGRTSGAPGEETVEGEYREV

SEQ ID NO: 15087 - protein, 279 aa, Campylobacter jejuni
MKKMLLSIFTTFVAVFLAACGGNSDSGASNSLERIKQDGVVRIGVFGDKPPFGYVDEKGVNQGYDIVLAKRIAKELLGDENKVQFVLVEAANRVEFLKSNKVDIILANFTQTPERAEQVDFCLPYMKVALGVAVPQDSNISSIEDLKDKTLLLNKGTTADAYFTKEYPDIKTLKYDQNTETFAALIDQRGDALSHDNTLLFAWVKEHPEFKMAIKELGNKDVIAPAVKKGDKELKEFIDNLITKLGEEQFFHKAYDETLKSHFGDDVKADDVVIEGGKI

SEQ ID NO: 15088 - protein, 1299 aa, Ceratodon purpureus
SSTTSAKSKHSVRVAQTTADAALEAVYEMSGDSGDSFDYSKSVGQSAESVPAGAVTAYLQRMQRGGLIQNFGCMVAVEEPNFCVIAYSENASEFLDLIPQAVPSMGEMDVLGIGTDIRTLFTPSSSAALEKAAATQDISLLNPITVHCRRSGKPLYAIAHRIDIGIVIDFEAVKMIDVPVSAAAGALQSHKLAARAITRLQALPGGDIELLCDTIVEEVRELTGYDRVMAFKFHEDEHGEVVAEIRRMDLEPYMGLHYPATDIPQASRFLLMKNRVRLIADCYASPVKLIQDLDIRQPVSLAGSTLRAPHGCHAQYMGNMGSIASLVMAVIINDNEEYSRGAIQRGRKLWGLVVCQHTSPRTVPFPLRSVCEFLMQVFGMQLNLHVELGAQLREKHILRTQTLLCDMLLRDAPIGIVSQTPNIMDLVKCDGAALYYGKRVWLLGTTPTENQIKEIADWLLEHHNDSTGLSTDSLADANYPGAHLLGDAVCGMAAAKITAKDFLFWFRSHTATEVKWGGAKHDPDEKDDGRKMHPRSSFKAFLEVVNKRSPPWEDVEMDAIHSLQLILRGSFRDIADSDTKTMIHARLNDLKLQGVEERNALANEMSRVLETAAAPILAVDSRGMINAWNAKIAQVTGLPVEEAMHCSLTKDLVLDESVVVVERLLSLALQGEEEQNVEIKLKTFGTQTTERAVILIVNACCSRDASDTVVGVFFVGQDVTEQRMFMDRFTRIQGGEKTTVQDPHPLMRPSFDGDEFGRTFKRNSALGGLKDHATGSVERLDLYLRRAEECMEVMETIPSPKFNNKQCQYLAGKLKAVLQSASLFLRISHHEHHELGASIDMGRHVEIFKLLLALAKEIESFIQGCCKDEWIKAAMTLTNVSEYVSSMGFNLELCKIAFCKSCAASGSLTLDQIEVICKDEAEVVKRNATIDVDTLFAKVIYDLTEKTLSSDQNDLAIYLLQRLKRAKPILPSFSSRPSWWNFYDDWSFSEKFFQWIQITGSLGSGSSATVEKAVWLGTPVAKKTFYGRDNEDFKREVEILAELCHPNITSMFCSPLYRRKCSIIMELMDGDLLALMQRRLDGNEDHDSPPFSTLEVVDIILQTGEGMNYLHEKGIIHRDLKSMNILVKSVKVTKSEIGYVHVKVADFGLSKTKDSSTRYSNQTWNRGTNRWMAPEVINLGYESTEGEISFDGKVPKYPLKSDVYSFGMVCYEVLTGDVPFPEEKNPNNVKRMVLEGVRPDLPAHCPIELKALITDCWNQDPLKRPSFAVICQKLKYLKYLLMTGFSSYQDSYPSTEELS

SEQ ID NO: 15089 - protein, 275 aa, Wolbachia endosymbiont of Onchocerca volvulus
MSLIKLSPTIAVTDKVNRLKSQGKEICVLAAGEPDFDTPGHIKKAAIQAINEGKTKYTAVDGTRELKGAIIDKLKRDNDLEYMPSQICVSAGAKQVLFNLLMATINPEDEAVIPAPCWVSYVDMVSFFGGLPVIAECKDNFKLTSELLRSKITEKTKWLILNSPNNPAGVVYTYDELKKIAQILLEYPHVNIITDDIYEHIVYDGKFFTIAQVEPRLYDRVFVVNGVSKAYAMAGWRIGYVAGRSDVVKAISILQSQSTSNPNSIAQAAAVEALN

SEQ ID NO: 15090 - protein, 377 aa, Wolbachia endosymbiont of Brugia malayi
MSDLAKRMSLIKPSPTIAVTDKANRLKDEGKKICILAAGEPDFDTPDHIKKVAIQAIDEGKTKYTAVDGTRELKEAIISKLKRDNNLEYALSQVCVGAGAKQVLFNLFMATVNPGDEAIIPAPYWVSYVDMVSLFGGLPVVIECGQGLKLTPELLKNKVTKKTKWLILNSPNNPAGVVYTYDELKAIAQVLLEYPHVNIITDDIYEHIYDEKFFTIAQVEPKLYNRVFVVNGVSKAYAMTGWRIGYIAGRSDVVKAISTLQSQSTSNPNSIAQAAAVEALNGDHSFLKERMGIFKSRRDFVIEKLNSAPGLLASIPQGAFYLFVSCKDLLGKSTKSGKVINNDLDFAEYLLEDHLVAVIPGIAFGLKNFIRISYATS

SEQ ID NO: 15091 - protein, 647 aa, Staphylococcus hominis
MRYIGSKSLLLKEIDSLIEKHKLGDEKIFLDLFAGTNTVARYFKSKYQVITNDILYFSYINSKATIVNNKVPQFSKLKFNPFEYLNNEINIAFFNESEYYSQNYTPLGKAMYLSIENGKRLDFMRYSIEKWKDLNLLEEYEYFYLLSCLIEAIPYVSNITGTYGAFLKHWDKRALQDLTIRPLEVINNNHTNIAYNMNANELIKNITSDICYIDIPYNNRQYASNYHLLENVARNNHPELQGKTKIFDWSYLKSDYSVKKKAYLALEDLIANINASHILLSYNDEGIITYTEILNLLKKYSSDNNVDIVTIPYRKYQSKIPSSKLNLNEYIFYIKKSNIKKIDKNIATNIKTNNNYIKSPLNYIGGKYKLLNQILPLFPSNISTFLDLFSGGANVGINVDAKTHVFVDMNSKVNEMFRFFASQNPNQLIEKIEKRISEFELSKTNNNAYLKFRDLYNSNPNPLDLFILIAYSYNHQIRFNNNMKFNNPFGKNRSHFSLKMKKNLSQFISRLQYMNYDFIDAYFDEVDLSFLDENSLVYLDPPYLITTGSYNDGNRGFKNWGIKEEAKMYKLLNELTENNIRYALSNVLEHKNTTHTMLNDFINSNNVEVNYLNYTYDNSSYNTKRAKSVEVLITNYDTKTYKLLKKR

SEQ ID NO: 15092 - protein, 730 aa, Trametes versicolor
MAIASSSDIIVLALGVVLAAAYLFRDQLFAASKPKPVPVSSSKGSNGGGNPRDFVAKMKEGKKRIVIFYGSQTGTAEEYAIRLAKEAKQKFGLASLVCDPEEYDFENLDQLPEDSCVFFVMATYGEGEPTDNAVTLCQNLSDDSFEFSNGEHKLPGLKYVIFGLGNKTYEHYNLIGRNVDSDLAKMGGIRIGERGEGDDDKSMEEDYLEWKDGMWEEFGRVMGVEEGQGGDSPDFAVTEVSDHPQEKVYLGELSARALTRSKGIHDAKNPYPAPITVARELFAEGSDRNCIHVELNTENSGITYQHGDHVGVWPSNAEVEVERLLCALGLHDKKDAVINIESLDPALAKVPFPVPTTYVTVLRHYIDISAVAGRQILGVLSKFAPTPEAEAFMKNLNTNKEEYNTVVHNGCLKLGEVLQLAASNDLHGVPTPENTTSWKIPFDIIVSSIPRLQPRYYSISSSPKLHPHSIHVTCVVLKYESVENHQVKARWVYGVGSNFLLNLKFAAEGVEAPMIDTADEPAKVKYPKYAIEGPRGAYKQETIYKVPIHVRRSTFRLPTNPKSPVIMVGPGTGVAPFRGFVQERVAMARRTIEKNGPEGLADWGSIRLYYGCRSSTSDFLYKDEWPAYAEELHGKFTLRCAFSRETFRPDGSKIYVQDLLWEDRETVADAILNGKGYVYICGDARNMSKAVEETLCRVLGEAKGGSAEVEGAAEVKLLKERSRFLTDVWS

SEQ ID NO: 15093 - protein, 458 aa, Allium cepa
MSTLSNSFLAPNTPSKLTQKFQNRLILKCPTHHRISCSLIEPDGGSLKNLVVPAGPARDTRVKEAATAGQALPRVRLKRVDLEWVHVLSEGWASPLGGFMRESEFLQTLHFNSIRLDDGSFVNMSVPIVLAIDDEKKNEIGERKRVLLVDQNDKAVAFLNDIEIYKHNKEERIARTWGTTARGLPYVEEAIINAGNWLVGGDLEVIEPIKYNDGLDQYRLSPSQLRDEFSRRNADAVFAFQLRNPVHNGHALLMTDTRRRLLEMGYKNPILLLHPLGGYTKADDVPLSWRMKQHEKVLEEGVLNPETTVVAIFPSPMHYAGPTEVQWHAKARINAGANFYIVGRDPAGMGHPIEKRDLYDADHGKKVLSMAPGLEKLNILPFRVAAYDKTQGKMDFFDQSRPEDFVFISGTKMRSLAKNKENPPDGFMCPGGWKVLVEYYEGIAAVQSKKKIGVPASV

SEQ ID NO: 15094 - protein, 336 aa, Pseudomonas putida
MTHKVATDFEDGVTRFIDANTGETVADAAYRQGINLPLDCRDGACGACKCFAESGRYSLGEEYIEDALSEAEAEQGYVLTCQMRAESDCVIRVPAASDVCKTQQAGYQAAISNVRQLSESTIALSIKSASLNQLAFLPGQYVNLQVPGSDQTRAYSFSSLQKDGEVSFLIRKLPGGLMSSFLTSLAKVGDSVSLAGPLGAFYLREIKRPLLLLAGGTGLAPFTAMLEKIAEQGGEHPLHLIYGVTHDHDLVEMDKLEAFAARIPNFSYSACVASPDSAYPQKGYVTQYIEPKQLNGGEVDIYLCGPPPMVEAVSQYIRAQGIQPANFYYEKFAASA

SEQ ID NO: 15095 - protein, 350 aa, Pseudomonas putida
MNEFFKKISGLFVPPPESTVSVRGQGFQFKVPRGQTILESALHQGIAFPHDCKVGSCGTCKYKLISGRVNELTSSAMGLSGDLYQSGYRLGCQCIPKEDLEIELDTVLGQALVPIETSALISKQKRLAHDIVEMEVVPDKQIAFYPGQYADVECAECSAVRSYSFSAPPQPDGSLSFHVRLVPGGVFSGWLFGGDRTGATLTLRAPYGQFGLHESNATMVCVAGGTGLAPIKCVLQSMTQAQRERDVLLFFGARQQRDLYCLDEIEALQLDWGGRFELIPVLSEESSTSSWKGKRGMVTEYFKEYLTGQPYEGYLCGPPPMVDAAETELVRLGVARELVFADRFYNRPPC

SEQ ID NO: 15096 - protein, 443 aa, Escherichia coli
MHYLKKRFSLIELNVFIPAILFIAVIILCLTIYPQDTSRYINKIHHFLTWEMGGIFLVMTFLVVLCCLWLAFSRYGDILLGQSGEKPDFSLLTWLGLIFTSGTGGSLLYLASVEWIWIIQQPPFGATAGSAQAARWASVYGMFHWGPSAWAWYLICAVPIGWFMHVKKTNSLKVSDLCRGCLGARADGFCGHCVNFFYMFGLLGGAVTSLALGTPMISAVFCHVFHLDPAGQFINVMVIFIWTLVPLFILFFGLKKGVAWASNWNIRADILMLLAILICGPTAFILNQSIDGLGLMLQNFVAMSLSTDAIGRSGFPQMWTVFYFSWWVVYAIPFGLFIARISKGRTIRQLIVCGTLAGSLGCMVFYMVLANFGLSLQTTHVIDFVPILNEQGRGVVVSRLLEQLPASQVFLVAFGAIALISYITGHCTVGYALGFATQKRPDK

SEQ ID NO: 15097 - protein, 295 aa, Escherichia coli
MNIGFIGTGIMGKPMAYNLQQAGHTLYFSAHFEPAPQEFIGERGIVCSTPREVAQECEVIITMLPDTPHVEDVLFHPNYGVIHGLSHGKIVIDMSSISPVATKAFAQRIIAVGAEYIDAPVSGGEVGAKAGTLSIMVGGCEEVYLQIKPILELMGKNITLVGNVGDGQTCKVANQIIVALNIEAVAEALLFASKSGADPARVREALMGGLASSRVLEVHGERMIKGTFEPGFRISLHQKDLNLALENARLLNTPLPNTATTQQLFSACAALGGKEWDHSALIRALETQANFTIRK

SEQ ID NO: 15098 - protein, 537 aa, Pichia angusta
MSILALVATSIGSAQAAAIKKDTAGQHPLGMNSNFGDVFVEKGKSLLDRVSEVVSESSKNISPELRDIWNEMEAKFPDTLRNMKLKSEPAVKITKKPADFWDFNVLNEKFSNYKLRVKKTDPGALGLDHTRQYSGYLDVEDEDKHFFYWMFESRNDPVNDPVILWLNGGPGCSSLTGMLFELGSASIGPDLKPINNPYSWNSNATVIFLDQPVNVGFSYSSKSVSNTVAAGKDVYAFLELFYQQFPHLLKNDFHIAGESYGGHYIPVFASEILTHADRSFNLTSVLIGNGLTDPLNQYPFYERMACSTDGGYEPTLDESECEGMLETLPRCLSLIESCYSSQSVFSCVPASIYCNNAQLGPFQKTGRNVYDVRKMCEGTLCYKDMEYIDQYLNQDFVKEKVGAEVDTYESCNFDVNRNFLFAGDWMKPYHKNVINLLEQGLPVLIYAGDKDFICNWLGNQAWSNELPWSGHDEFESAELYNLTLKDGTKVGEVKNAGKFTFARMFDGGHMVPYDQPESSLAMVNRWIAGDYSLGTKK

SEQ ID NO: 15099 - protein, 488 aa, Retama raetam
MVEPSPTTGSFSKLLQTVHGSMPSAASATFPVTTACFNTNTVEERKSNIFEFKPHNKSNMVPADFKNHVSEQSIQAEGPGKAQSFASSPLIECEIDVPSNELSLSSPVQMVSSGASTPVEVDSDELNHKGNTITVLQASQVEEVKGSGLPVAPERASDDGYNWRKYGQKLVKGSEFPRSYYKCTHPNCEVKKLLECSHDGQITEIVYKGMHDHPKPQPSRRYSVSMQEERSGKASLAGRDAEPNSTPDLSSVATNDDSREGADRTNDEVDDDDPFSKRRKMELGFADITHVVKPIREPRVVVKTLSEVDILDDGYRWRKYGQKVVRGNPNPRSYYKCTNAGCPVRKHVERASHDPKAVITTYEGKHNHDVPAARNSSHDMAGPAGVVGGQTRIKLEESDSISLDRGMGISSAAENRSNGQGKMLLSEFGNSQTQTSNSNFKFVHTTAGPVYFGVNPYGSIENRSDGPSLNHASSYPCSQNIGRILTGP

SEQ ID NO: 15100 - protein, 255 aa, Phaseolus vulgaris
MKCLVFFVAAVLVASQCHGASFRSFPLSMTTGYGHGASDTEVRCASWRLAVEAQNIFGFETIPQQCVDATANYIEGGQYRSDSKTVNQQIYFFARDRHVHENDVILFNIDGTALSNIPYYSQHGYGSEKFDSERYDEEFVNKGEAPALPETLKNYNKLVSLGYKIIFLSGRLKDKRAVTEANLKKAGYNTWEKLILKDPSNSAENVVEYKTAERAKLVQEGYRIVGNIGDQWNDLKGENRAIRSFKLPNPMYYTK

SEQ ID NO: 15101 - protein, 268 aa, Pseudomonas cichorii
MKKLTAITALSLAVLSGLAHADRLEDIKKSGVLRVAAFDSNPPFGFVGAKSKQIEGLDVDYAKAIADKLGVKLQLQPTNPANRVPLLVANKVDLVLANFTITPERAEQVNFSIPYFSSGQQFIVKKGTLKNQDDLNKWRVGVDKGTVNEGVLREKFPGAKVIAYDDTPFAFTALRNGNVQAITQDGPKLIGLLANVPDKDKYEVPPFTISNDLIGVGIPKGETALTEFVNQTLVELESKGQAQKIYDTWFGPDTPTLLARLFKIGDKS

SEQ ID NO: 15102 - protein, 670 aa, Dunaliella salina
MLNTSFKQTMKGTPVASRQVAGRRMPMSRRGAVAVRAEKVVGIDLGTTNSAVAAMEGGKPTIITNAEGSRTTPSVVAFTKGGDRLVGQIAKRQAVVNPENTFFSVKRFIGRKAGEVGEETKQVPYRVVEGSDRNVKIFSSHAGKEFAPEEISSQVLRKLTADASKFLNDKVEKAVITVPAYFNDSQRQATKDAGKIAGLDVLRIINEPTAASLAYGFDKKANESILVFDLGGGTFDVSVLEVGDGVFEVLSTSGDTHLGGDDFDKRIVDYMADEFNKNEGIDLRKDRQALQRLTEAAEKAKCELSNLTQTSINLPFITATPEGPKHIDTQLSRVKFEELCSDLLSRAKIPVENALRDAKLTMADINEVTLVGGSTRIPSVINVVRTMCGKEPCASVNPDEVVALGAAVQAGVLSGEVSDIVLLDVTPLSLGLETLGGVATKLITRNTTLPTSKSEVFSTAADGQTSVEINVLQGEREFARDNKSLGTFRLDGIPPAPRGMPQIEVKFDIDANGILSVTATDKGSGKKQDIKITGASTLGKDDVERMVADAERFAGEDKKKREAVDTKNQAESMIYQTEKQLDEFKEKVPEDVKSSIQNRVKELRESAGADDVEGMKKGIEALQQEVMKMGQAMYGQPGGDAGAAGAQPGSGEPPKDGDGGVIDAEYTDKK

SEQ ID NO: 15103 - protein, 189 aa, Allium cepa
DFMACMGAFFGVVFVSVEIGLLIAVAISIARILFHVTRPRTALLGNLPRTKLYRNIDQYPDARKVPGVVIVRVDSAIYFTNSNYIKDRILRWLRDEEETLETEGLPRTDFLIVELSPVTDIDTSGLHALEDLFKALKKRDIELLLANPGPVVIEKLRTSKFTEIIGQEKIFLTVDEAVMFCAPKAKEEA

SEQ ID NO: 15104 - protein, 506 aa, Pyrus communis
MSPPEIAILILVFLTFLWSLLRLINVSSRQSRTLPPGPAALPIIGNLHMLGDLPHRSLQNLAKKYGPIMSMRLGSVPTIVVSSPKTAKLFLKTHDTIFASRPKLQASEYMAYGTKAMAFTEYGPYWRHIRKLCTLQLLCPSKIESFAPLRREEVGLLVQSLKVAAEAGEVVDFSEKVGELVEGITYRMVLGRKNDDMFDLKGIIEEALFLTGAFNISDYVPFLSPLDLQGLTKRMKRVSKTVDQLFEKIIQDHEQVSRSEQGNHHKDFVDVLLSSIHQTLKPNDEEVYMLERTNAKATLLDMIAGAFDTSATAIIWTLAELLRHPKVMKRLQEELQSVIGMDRMVEESDLPKLDYLSMVVKESFRLHPVAPLLVPHQSMEDITVDGYHTPKKSRIFINIWTIGRDPKSWDNAEEFYPERFMNRNVDLRGHDFQLIPFGSGRRGCPAMQLGLTTVRLALGNLLHCSNWELPSGMLPKDLDMTEKFGLSLSKAKHLLATPTCRLYNES

SEQ ID NO: 15105 - protein, 219 aa, Pyrus communis
GKLRSNFLGTKFTIFDGQPSHSGARIAKSRSTRLVNLKQETPRVPAGNYPVAQIQYELNMLGSRGPRRMQCTMDSIPSSSIEPGGVAPTQAEFSHNNAELFPSLSFNRSKSNRMESFLSGPLARQKDGVLVLRNKSPRWHEQLQCWCLNFHGRVTVASVRLSVGGFSGNGPPGPEHEKIILQFGKVGKDQFTMDYRYPISAFQAFSICLSSFDTKIACE

SEQ ID NO: 15106 - protein, 430 aa, Lotus japonicus
  misc_feature (263)..(263): Xaa can be any naturally occurring amino acid
  misc_feature (284)..(284): Xaa can be any naturally occurring amino acid
  unsure (1)..(430): unsure at all Xaa locations
MAQILAPSTQWQTRITKTSPNASPITSNMWSSLLWKQNKKVARASKFRVLAIKSDGSTINRLEGLLNLDVTPYTDKFIAEYIWIGGTGVDVRSKSRTISKPVSHPSELPKWNYDGSSTGQAPGDDSEVILYPQAIFRDPFRGGNNILVICDAYTPQGEPIPTNKRHRAAEIFSNPKVQAEIPWYGIEQEYTLLQTDVKWPLGWPVGGYPGPQGPYYCAAGADKSFGRDISDAHYKACLYAGINISGTNGEVMPGQWEYQVGPXVGIEAGDHIWASRYLLERITXQAGVVLTLDPKPIEGDWNGAGAHTNYSTKSMREEGGFEVIKKAILNLSLRHQDHIRAYGEGNERRLTGKHETADINTFSWGVANRGCSIRVGRDTEKEGKGYLEDRRPASNMDPYVVTALLAETTLLWEPTLEAEALAAQKIQLKV

SEQ ID NO: 15107 - protein, 153 aa, Narcissus pseudonarcissus
MCGGAIISDFIPPSRSRKLTADYLWPNLNKGKDKKKSFGFEDDFEADFNEFEDESEEGESEAVDVKPFKFGAKAGFSREGSTYLKPIELNGAAERSSKRKRKNQYRGIRQRPWGKWAAEIRDPNKGVRVWLGTFNTAEEAARAYDDEARRIRG

SEQ ID NO: 15108 - protein, 317 aa, Aspergillus fumigatus
MSAGGEHLKDEGTRRQVVLSGGIAGLVSRFCVAPLDVVKIRLQLQIHSLSDPASHHDVVGPIYKGTLSTMRTIIKQEGITGLWKGNIPAELMYVCYGALQFTAYRTTTQILAQLDPHRLPPALESFVSGAVAGGLATASTYPLDLLRTRFAAQGTERIYTSLLASVRDIARSEGPAGFFRGCSAAVGQIVPYMGLFFATYESLRPVLSGLENMPFGSGDAAAGVIASVLAKSGVFPLDLVRKRLQVQGPTRTLYVHRNIPEYRGVFSTIAMIVRTQGVRGLYRGLTVSLIKAAPASAITMWTYERSLKLLRDFRVAE

SEQ ID NO: 15109 - protein, 738 aa, Schizosaccharomyces pombe
  misc_feature (133)..(137): Xaa can be any naturally occurring amino acid
  misc_feature (227)..(227): Xaa can be any naturally occurring amino acid
  misc_feature (242)..(242): Xaa can be any naturally occurring amino acid
  misc_feature (260)..(260): Xaa can be any naturally occurring amino acid
  misc_feature (273)..(273): Xaa can be any naturally occurring amino acid
  misc_feature (348)..(348): Xaa can be any naturally occurring amino acid
  misc_feature (360)..(360): Xaa can be any naturally occurring amino acid
  misc_feature (375)..(377): Xaa can be any naturally occurring amino acid
  misc_feature (610)..(610): Xaa can be any naturally occurring amino acid
  misc_feature (656)..(657): Xaa can be any naturally occurring amino acid
  misc_feature (664)..(664): Xaa can be any naturally occurring amino acid
  misc_feature (687)..(687): Xaa can be any naturally occurring amino acid
  misc_feature (691)..(693): Xaa can be any naturally occurring amino acid
  misc_feature (701)..(701): Xaa can be any naturally occurring amino acid
  misc_feature (711)..(711): Xaa can be any naturally occurring amino acid
  misc_feature (726)..(726): Xaa can be any naturally occurring amino acid
  unsure (1)..(738): unsure at all Xaa locations
MVHELNYPLIEQFPVYGSYALQAAQFPHCSLFLHLDDPSMPCNTIRMWTIGLIYSTVGAAVNMFFSLRNPTVTLSVLISELLAYPALQIWDLIFPDREFRIGRLKFNFKPGPFNVKEHALIVVMSSVSFGNAXXXXXILAQRVHYKQRFGFGYEICLTLATQLIGYGLAGLSRRLLVRPASMLWPVNLVQCTLNKTLHRKDLRNAVANGWRIPPFRFFLYGFIASFXWNWFPSYIFQALSLXAWVTWIRPNSPTVNQIFXESTGISILPMTFXWNQISAYILSPLMAPADALMNILVGVILFLWIVTPALNFTNTWYGDYLPISSSGIIDHFGNSYNVTRILTKDATXDLDAYQNYSPIXMSTTYALAFGLSFAXXXSVIFHVILYHGKEIYDRLRDPPAPDIHEKLMKAYDEVPFYWYLSVFLAFFGMMMGTIYGWKTETPWWVIIVGVIFSAVWFIPIGIAQAITNIQLGLNVFTEFIVGYMYPGRPLAMMIYKTVGYITMTQGLAFAADLKFGHYMKLPPRIMFYTQMIATIWSCFVQIGVLDWALGNIDNVCQADQPDNYTCPNATVFFNSSVIWGVIGPKRMFSGKNTYTGLQYFWLAGVLGTIXFWALWKKWPQKWWGQLNGPLICGGTGYIPPATPVNYLAWSGIGLFXXYYLKKIXADWWQKYNFTLSAALDTGTQLSXIILXXXLQLPMVNXPDWWGNDGAXNTLDATGAAVRKLVXESAGEFFGPAEW

SEQ ID NO: 15110 - protein, 558 aa, Coprinopsis cinerea
MASPTVLCRPFTAFHNDSPIIVDDNAHTTEADQLIFGPLDLDDNLHLANSNNISLQWDPYSVHDIDTKSPFAFDAAAVMPMSAYEYGPPEVSPTGSYYDSGTNFYSSEPVKNSPSLEDNLYLANWINDPELSAPSPSSPISIPSPSDMHTSTAASSFSAFGDHTQFSANDPVFSPSSFAALHPLPSSVSPPSSFEDPQPIRQRVNSLNPADMSLSKPSWASHLWDTPANSLRSPSIIRPSVRHSPLSDGTMRQRVPMRRGSHSSSQTFQSSSAPSLTEPRAPSMTRAYSRRSESVVSNGEDRDATIRRKKRSPPVEDYGSSAEKSSEPPSKSLLKPPKLAPSAWQLYFTDWIQKQQRLGTRKLNVAQAAKEAGQEYASLSPEEKEPYKRRSQAAKEAREREHEAYMRTLTPDDIKRENAFRAAQRKAGKSRKGNIKDPNAPKKPLSAYFMFLQRIRADPKLVKEIFGDETETTKQSVLAAAKWRSMTDAERQPFLAQAEQEKMEYEAARRLYEEGTTGYGTNINFSILQSPAFPTIKLESSESESESLVQDDSEKPSV

SEQ ID NO: 15111 - protein, 258 aa, Torenia fournieri
MGRGKVQLRRIENKINRQVTFSKRRGGLLKKAHEISVLCDAEVALIVFSHKGKLFEYATDSCMDRILEKYERYSFAERQLIATDQPNSTTNWTFEYSKLKARIELLQRNHRHYMGDDLETMSLKDLQNLEQQLDSGLKTIRNRKNQLIQDSISELQRKEKAIQEQNSLLAKRIKEKEKELREQALWQQQNNGHISPPLPPLPPPQPPPHYLMPPPHQLPNVNSIGDTYEHQAAEARISNELDLTLDSLYSCHLGCFAA

SEQ ID NO: 15112 - protein, 301 aa, Clostridium perfringens str. 13
MLRILLNDGLDKKAISNLEFLGFDVDTNHYDIEDLKEKIKKVDCIVIRSATKIRRELIDEAIKGGKLKLIIRGGVGVDNIDVQYAEQNGIKVRNTPNASSSSVAEIILAHMFSLARFLNQSNITMKAGLWKKKDYVGVELEGKTLGIIGMGRIGSELAKKCTALGMKIIYFDLMDIKNIDNNYRKVEFDELLRESDFISINISGTKSIIGSEELKKVKKGVFIINTSRGKALDEEAIITSLNDGTLGGVGLDVFLEEPSKNLELINHPKVSLTPHIGASTKEAQMKIGEEVINIIKEEMYN

SEQ ID NO: 15113 - protein, 440 aa, Clostridium perfringens str. 13
MGKPKLKKEIGLFTATALVVGNMMGSGIFMLPASLASVSGPGSTIMAWLLTGLGSLVLALTFANLGSKIPKTGGTYEYSRLAYGNFMGFMTAWLYWNGSWIGNATIFIVITTYLGEVITSLTNSPIIGFLFCSSILWICTYINIRGTKLAGRVASVITVFKVLLFIFFIVVGLIYFDPSNLTPMFPDGKGVSTIPVAASLTLWAFMGLETASVAGGEIKDPEKNVKRSTILGMLISTVLYILISVVAMGAMSQSELASSTAPISDIIVKVLNLKSLNFLNIAIAISILGTAMGWLLSTARVGYAAGEDGIFPSVFAKVHPKYNTPHVALIIGSIFINIIFLMNFTKGLAGAYSFIVVLATLSYLPIYAISTIAEIILMVKEEKKPTFKKHLGLIIRCLIGFAFAIWAIYASGAEIVMYGFILILLGVPIYGYMSIKKHFR

SEQ ID NO: 15114 - protein, 529 aa, Clostridium perfringens str. 13
MFIFLSFAIFLVAVFAIAWYKAKGTDNTETATGYFLAGRGLSGPVIAATMILTNLSTEQIIGLNGQSYATNMGPMAWEVTSCVALITLALIFLPRYLKGGITTIPDYLEERFDSTTKRIVSILFLVSYVVTYIPTVLYSGGLVLNQIFGISDLLGISTFQAVALTGFLLGVVGAIYTVLGGMKLAAFSDTVNGLGLLIGGLLVPILGILLLGNGDFVGGFEIIIATPEKLNAINPANAQSPLIPWPVLFTGLLFNNLFYWCTNQSIVQKALGASSLKEAQKGAILAGLIKVLTPAILVFPGIIAFAKYGDALPNADMAYPTLLLDVLPKPLLGIFAAILFGAAMSSLNGAMNSSSTLFTLDLYKPIINPEASDKQLVKVGQKFIIVVSVISVIVAPFILYAPSGLYNFLQECNGYFNVPILACVIVGFFTKRVPSLAAKVVFVVHIVLYTLSKFFLSDIHFLYVLGVLLPIGVIVMLIIGKIKPRETDFVQADKALIDMTPWKYAKPASLAVVLVMAFIYLLFSPIGLA

SEQ ID NO: 15115 - protein, 252 aa, Clostridium perfringens str. 13
MQKKDINLISDMAVNKFKFADRAPIKYFLRAVVAGFFLVVAIILSYTTGAVLNNSYPEMARIMVAATFSLALGLIAFIGGELFTGNNLVMAIGIYNNECTLTMALKVWFMSYLGNFIGSILLGFLFVKSGASMDLIKDYAKGIVDIKLNLPALELFLRGMLCNFMVCIAFLSTIKMKSETGKLIIMFWCIFAFVIAGFEHSIANMGIFSITYFASGDVSLPLVFRNLFWVTLGNMVGGGVLLALPLKFMSME

SEQ ID NO: 15116 - protein, 376 aa, Clostridium perfringens str. 13
MRKAFICPTKYVQGENELLNLGYFVETYGKSALLIAHPEDIKRVKDKLDATAKKFNIEFVEGGFKGECSRQEVKRLQDLAKEMKCDCTVGLGGGKALDTAKCVAEGEKLIVVPTIAATDAPTSHSAVLYTEDGSFDDYAYFKASPSVVLVDTEVIAKAPTRFLVAGMGDALSTYFEARATSSSFTKVNAGLPCGVREEKCRPAIGTNASLALAKLCYETLLEDGKKAKDACDCNCVTKSLENIVETNILLSGLGFESGGLAAAHAIHDGLTILEGTHGYFHGEKVAFGIIAQLVLENAPKEELYEVLDFCLEIGLPVCLEDIGVTEVSDEELFEVAEKACIPEESIYSMPFGIEVSEVVSAIKLADKIGKDYKNRK

SEQ ID NO: 15117 - protein, 478 aa, Clostridium perfringens str. 13
MAEQHNEPKKLGFAQLAALIVGSMIGGGAFNLPSDMARGAGTGAVIIGWIITGIGMIALAFVYQSLANRKPELTGGVYSYAKAGFGEYIGFNSAWGYWLSAWIGNVSYSVLLFGAVGYFLPMFGAGNNVASIIGASVLLWAFTLLILNGVSGAALINLITTIAKLVPIFLFIVISLFMFNFDKFTFQFWGTSDLGGIVTQVKSTMLVTLWCFIGIEGAVVVSGRAKKQSDVGKATVLGLIGTLIIYMLITLMALGVMDRVKLSGLENPSMAYVLEFAVGKWGAVLINLGLIISLFGSLLGWALLAAEIPYVAAKDGVLPKVFAKLNKKGTPSGSLIITNLLVQAFLILTLVASSTYQALYSVASTAILVPYLLSAMYGFKLALTGETYDKNPTGRTRDKIFGGIATVYAIWLCYAAGLKYLLLCFILYAVGIIFFYIGKKQNNKDAEVFVGKEKILAIIVLVIAIIAIVMLFNGTITI

SEQ ID NO: 15118 - protein, 398 aa, Clostridium perfringens str. 13
MKILIINCGSSSLKYKLIDMANEKDIIEGIVERIGLDQSRLVQKNELREKYILEKEIKDHKEAIDIVLNTLVDPKVGVIESIDEITAVGHRVVHGGERYSSSIIINEEVIKYLEECSKLAPLHNPANIIGIRACQSLMPNKEMVAVFDTAFHGTLPEKAYIYAIDYALYKDHKIRKYGFHGTSHKYVSHKVAETMGKDIKDLKIITCHLGNGASISAIKGGECIDTTMGFTPLAGIPMGTRSGNIDPSIIPFLVEECGYTIEEVSESLNKKSGVLGISGVSSDFRDIEDAASKVDKRAQLALDIFHYRIRAEIGSFIVNMGGVDVIVFTAGVGENSPETREECLKDLEFLGLTLDKEKNKVRGKLAEISQADSKIKAYVVPTNEELMIAKETVELIGK

SEQ ID NO: 15119 - protein, 460 aa, Clostridium perfringens str. 13
MEIFKKQSLKRILSEANENKERTLSALDLTLMSVGSVIGTGVMVLTGIVAAKQSGPATSIAFIGGGIAAAIIVLCYAEFSSSIPSAGGSYSFTYVSLGEIIAYISGLCIVIGYTLSTATVASGWGAYLLSLLDILGIKLPKTFTAIPSEGGIVNLPAMISILFIVFVISLGTKESKKVNDIMVFIKIVVIALFIGVGAFHVNTSNWHPFAPFGVKGIVTGTASLFFAYCGFDATASAAEEVKNPQKSLPLGLISSLVICTIIYIAVSLVLTGVTSYTNLNVGDALSYALKLVGQRGVAFVVSLGTVIGILAVIFAGNFTTSHILLAMSRDGLLPKFFSKVDKKDVPYTALWTVGIIGALLAGFFNLGQLANFANIAFLLTYTLVCISLIAFRKKYPHVKRGFKTPLVPFIPLLGAFSCLFLMSNLSEETWKIFIVVLVLLITSYLVYGRKHSLINKNNDN

SEQ ID NO: 15120 - protein, 593 aa, Clostridium perfringens str. 13
MNKFKSVVKKISPFVGKYKWAFLGAILFIISAAVFTAIAPRTEGLIITQLTKDFEGIIRGVSGASVNFNYIFKVLILLFLVYAGGTGSTLIASFLLTNAIQNTMKNIRNEVEKKINRLPIRYFDGNSYGDVLSRITNDVDTISNALQQSFVQVINAFLSVGLALIMMYSINIKLALIATLIIPLSILITKIIVSKSQKLFNSQQKALGNLNGKVQEMYTGFNELKLYGKEDDALNEFVKVNEELRETGFKAQFISGIMSPLISLVTYLGIAVVGVVGSIIAIAGGITVGNLQAFIRYIWQINQPLSQVTQLSSAIQSAVAAANRVFEFLEEEEEVKDPNNAIKIEKPKGDVTFDHVKFGYKEDKPLIKDLSVDVKSGQMVAIVGKTGAGKTTLINLLMRFYDVQGGSIKIDGVDIRDMKREDLRAMFGMVLQDTWLFNGTIYDNIRYGRFDATKEEIIEAAKVANVHHFIKTLPGGYNMLLNEEASNVSQGEKQLLTIARAILKDPAILILDEATSSVDTRLELLLQKAMRNIMKDRTSFVIAHRLSTIRSADLILVMNDGNIIEQGTHEELMKQGGYYESLYNSQFASKEAN

SEQ ID NO: 15121 - protein, 287 aa, Clostridium perfringens str. 13
MKKIGFIGVGIMGKSMVRNLMKNDFEVSIFARNKDKVLDVISEGANFYPTIKECVSGCDAVITIVGFPKDVEEVYFGENGILENVKEGTYVIDMTTSSPKLAVEIFEKAKEKGVKALDAPVTGGDIGAKNGTLTILVGGEEEDYKACLPILKAMGTNIHYEGKAGFGQHTKLANQIMIAGAISGVCEAMAYAKDKGLDVKKMLDSVSTGAAGSKQLELVSPKILEEDFAPGFFIKHFIKDMKLAKEEALAYNVNLDILSKVLENYEELEREGFGDLGTQALIKHYNK

SEQ ID NO: 15122 - protein, 618 aa, Clostridium perfringens str. 13
MSKERKGGMGGPMGRMGGGPRAVEKAKDFKGTMKKLGVYLKPYSLSIAIVILFAIGSAAFSIVGPKILGKATTKIFEGLVQKITGVPDASIDFGYIGNIAMILVALYLVSSLFGIIQSFIMSGVAQKVSYNLRKQISEKMDTLPLNYFDTRTNGEVLSRITNDVDTVNQTLNQSLSQIITSVVTLIGVLIMMFSISWIMTLATFIILPVSMVLISLVVKKSQKYFKSQQEYLGHLNGQVEEVYGGHNIMKAFNREEASTKDFDELNNTLYKSAWKSQFLSGMMMPIMSFVGNLGYVLVSILGGWLTIKSVITVGDIQAFIQYVRSFNQPIAQMAQVANIMQSTAAAAERVFEFLDEEDEVKDPVNSVDPSEIRGEVEFEDVHFGYNEDKIIINDFSVDVKPGQKVAIVGPTGAGKTTIVKLLMRFYDINSGSIKIDGHDIRDFKRADLRNLFGMVLQDTWLFNGTIMENLRYGRLDATDAEVKEAAKAAHVDHFVKTLPDGYNMVLNEEASNISQGQKQLLTIARAFLKDPKLLILDEATSSVDTRTELLIQKAMEKLMEGRTSFIIAHRLSTIRDADLILVMKDGDIVEQGNHEELLEKGGFYSSLYNSQFEQSSAS

SEQ ID NO: 15123 - protein, 516 aa, Clostridium perfringens str. 13
MNTLNDILSKEIEEFREKGHKFLNKEMTVGEFKKASGGMGVYAHRGGKEFMVRLRVPSGVAGLSLLEEAYNWAKKYNLEKIHLTTREAIQLHGISIDAVCDIMQEGLNKGIYTRGGGGNFPRNVALNPLSGVQIGETFDVTPYALASNAHYMSKIYTYNLPRKIKTAFSNTEEDSAHCTVTDLGFLAVENNGKRAFKLYIGGGLGRNPRTSVEFDELIDEKDVLYCLEAMTNLFVAEGDYKNHGKARIRYIVERMGEEEFKNCFRKHLEEVKAKGGLDLKVEDIKYSKKGEKTNIKHERLIPQKQEGLYTVLFHPVGGQLSLDVLKELIEKIEKIEEVEVRLGMDENLYVRNLNGKEAEAILDFTQGKGGETLAERSVACIGTPTCQMGVLESQKTLREFVELLKENSIKEGLLPRVRFSGCPNSCGMHEIGDIGFAGKKKKVGDVLSNVFELHFGGKLGIGETRLGDYYGDILQDKVPEFLIKVAKAVEAKNSTFEEWIKDNSEEFKAIVEEYNV

SEQ ID NO: 15124 - protein, 484 aa, Clostridium perfringens str. 13
MKRLSQENAPIYEALKWYKNQRIVPFDVPGHKQGRGNTELREFLGEDCVSVDVNSMKPLDNLCHPTSVIKDAEELAAEAFGADKAFFMVNGTTSAVQAMIMSVCKDGDKIIMPRNVHRSAINSLIITGVTPVYINPGIHGRLGISLGMAMEDIKKAIKENPDAKAIFVNNPTYYGICSNLREIVKLAHENNMYVLVDEAHGTHFYFDKRLPVSAMEAGADMAAVSIHKTGGSLTQSSMLLMKCNRIKPDYVRTIINLTQTTSGSYLLLSSLDIARRNLALNGEKIFEEVVGIAEYAREEINKIGGYYAFSKEINNGDDIYDFDVTKLTINTLETGLAGIEVYDILRDDYGIQIELGDVANILAIISVGDTRYNIERLVSALSEIKRIHEKDKKDIFDHEYIDPIVKVKPKEAFYADKKKVLLRESEGLISGEFVMCYPPGIPILAPGELITKETIDYIEYSKKKGSLVTGPEDMEIEYINVLDC

SEQ ID NO: 15125 - protein, 285 aa, Clostridium perfringens str. 13
MLMNRNVSTFIGCEAEYDESSIVVFGAPFDSTTSFRPGTRFASQVMRGESWGLESYSPYQDLDLYDFNIFDGGEIELPFGNSEGALALIEDFSTKVVEDGKIPAMIGGEHLVTLGAFKGVFKKYPDVHVIHFDAHADLREDYLGQKLSHATVIHRVWDLVGDNKIFQFGIRSGEKEEFLWAKDHVYTNKFNCDTLDYALERVKDKPVYVTIDLDVLDPSVFPGTGTPEPGGIQFNELLNSILKLRGLNIVGFDINELSPQYDQTGASTAVACKVLREMLLVANNK

SEQ ID NO: 15126 - protein, 552 aa, Clostridium perfringens str. 13
MSNAEHSSNFIRNIIIDDLDSKKHDTIITRFPPEPNGYLHIGHAKSIVLNFELGKEFNGRTNLRFDDTNPTKEDTEYVESIKEDVHWLGYNWSELHFASNYFDEMYKRALLLIKKGKAYVCDLTPEEIKEYRGTLTEPGKESPYRNRSIEENLDLFERMRKGEFEDGSKVLRAKIDMSSPNINFRDPIIYRIAHASHHNTGDKWCIYPMYDFAHPLEDAIEGITHSICTLEFADHRPLYDWFVKECEMESVPRQIEFARLNITNTVMSKRKLKQLVDEGIVDGWDDPRMPTVAGLRRRGYTPKSIRNFCKAIGVAKADSTVDSQMLEHFIREDLQETAPRAMAVINPLKLVITNYPEGESEILEIENNPKDESAGKRAVTFSREVYIEREDFMENPPKKYFRLFPGNEVRLKGAYFVKCNEVIKDENGEVTEIHCTYDPETKSGTGFTGRKVKGTIHWVDANNCIPAEFRLYEPLILDDCEENEGKHFLEQINPNSLTICKGFIEPSAKDAKPQDKYQLFRHGYFNVDPNFTSDDNLVFNRIVSLKSSFKLK

SEQ ID NO: 15127 - protein, 405 aa, Clostridium perfringens str. 13
MYMKKFNKVILAYSGGLDTSIIIPWLKENYGCEVIAVVGNVGQSDELVGLKEKAIKTGASKIYIEDLTKEFVEDYIFPTIQAGAKYEGKYLLGTSFARPIIAKRLVEIAKLEGADAICHGCTGKGNDQVRFELAIKTFNPEMQIIAPWRTWEIKSREEEIQYAIDNEVPINITYETNYSKDKNLWHLSHEGLDLEFPENEPKYDKILELCNTLEKAPNEAEYITLGFEKGIATSLNGEKLDGVTLLQELNKIGGKHGIGVIDMVENRLVGMKSRGVYETPGGSILYKAHKDLEELCLDKETSHYKEIVSLKFADLVYNGQWFTPLREALSAFISKTQETVTGEIKLKLYKGNIINAGMTSPYSLYSEEYATFGEDGIYNQKDAEGFINLFSLPSIVQAKMAQKLN

SEQ ID NO: 15128 - protein, 215 aa, Clostridium perfringens str. 13
MKIFIDTANVEEIRKASKLGVLAGVTTNPSLIAKEGRDIKEVIEEICSIVDGPISAEVMALECDEMVREGRELAKIHKNIVIKIPMCEEGLKAVKVLASEGIRTNVTLIFSPLQALLAARAGASFVSPFLGRLDDIGNPGIEIVTQIAEMFALHGIDTEIISASVRNPMHVLDSAMAGSHIATIPYNVILQMVKHPLTDAGMKKFIEDYNKAFNK

SEQ ID NO: 15129 - protein, 392 aa, Clostridium perfringens str. 13
MILENMILDNVKNMPPSGIRKYFDLINEMEDVISLGVGEPDFVTPWNVREAGIYSLEQGHTHYSSNAGFIELREEISKYLNRRFSLRYNPKDEILVTVGGSEGIDLALRALVGPGDEVIIPEPSFVAYKGCTAFTGATAKTIDLRACDDFKLTPELLEEAITEKTKVVIIPFPNNPTGAIMNKEELQKIVDVLKDKDVIIISDEIYAELSYDEDHVSIASFQEVKEKTIVINGFSKAYAMTGWRLGYVCAHKVLIDAMKKIHQYAIMCSPTTAQYAAIEALKNGDESVFEMAREYNRRRRVLVDGFRSMGLDCFEPLGALYVFPCIKSTGMSSDEFCEKLLLEEKVLAVPGNAFGECGEGFIRACYAASMEDIMEAIKRIRRFVERNNMQGK

SEQ ID NO: 15130 - protein, 233 aa, Clostridium perfringens str. 13
MEKTCTCGSCKEPCAKNISIFSTLSTEELLKIVNMTEHKSFKENDVLCREGEKSDKLFLIREGRVKICKITKEGKEQIVYVLSKGDFFGENNLFTSNNISNFSAYAITDAKLCILKKENLEKILIKNPEISLKIIQEMADRINSAENLAQTLATRDVEARLATVLIEFMNKYGQKKEEGIYINLPLNREQIANYCGITRETVSRRLSKFDKLGIIKLQGNKGLIIKDKKLYLV

SEQ ID NO: 15131 - protein, 248 aa, Clostridium perfringens str. 13
MENVWNGFRQLEIFKIEEEAKDIKSFYLRATDGKPLKEYKCGQFLPLKIETDDEVIKKEMRRYSLSGDPKKNYYRLTIKRVPNGKVSGYFHESINVGDTILAMPPFGNFTLTEDSNKPLVLLSGGIGITPILSMLYGAKEQSRDIYFVEAVLNSDNLALNSDVQGIKKVKNFKEIKIFSEPLESDIKGKDFDEEGFITKEWIKNNLPLNGEFFFCGPTLFMKSIRNSLKDLGVKEDNINFEFFGKEEF

SEQ ID NO: 15132 - protein, 236 aa, Clostridium perfringens str. 13
MIRLCNCASDKGPCARNIAIFSSLSDEELFKIVHMTEHKEFDENDTLCREGEISDKLFLIREGEVKICKITKEGKEQIVYLLSKGDFFGENNLFVNSNISNFSAYAITSGKMCVLNKKSLDKILLENPEISIKIIEEMANRINLAENLAQNLATKDVEVRIASVLVEFMNRYGIEKEEGIYVKLPLNREQMANYCGVTRETVSRKLSKFDKTGIINLHGNKAIIIKDIEALLDLAE

SEQ ID NO: 15133 - protein, 236 aa, Clostridium perfringens str. 13
MKKCDCKGYKSCLCNKELTIFKDLTEEEFNKLATGMTCFHFNKGEYICYEGEKLSKLFLISKGSVKTSKLTKGGKEQIMHIFSVGDYFGETSLFNNEGGISFNAIALNDVIVCAVDKDKVDSVLEENPRIAIVVLKSLTNRLKDTEEFAHKLVTNDVRVRIAYMLKEFKRKYGKIENGEIFIDLPINREDMANYCGITRETMSRKLSIFEHEGLIEIRGNKSLIIKDIERLNKIIS

SEQ ID NO: 15134 - protein, 69 aa, Clostridium perfringens str. 13
MSSRTGIVKWFNQEKGYGFISCDEGDDVFVHISQVKEKGPEKDLHEGESVSFDISEGEKGPMATNVQKL

SEQ ID NO: 15135 - protein, 381 aa, Clostridium perfringens str. 13
MEVYFDNSATTKPLKEVRDEVYYAMDEFWGNPSSLHKLGVKMQRKIEELQESIAKKINASKEEIIFTSGGSESNNMIIKGLARENNHIITTTFEHSSVLNTYMELEKQGVSVTYLKVNNKGFIDLKELEEAINKNTVLVSIMQVNNEVGSIQRIKEIGRLIKEKSKRAKFHVDGVQGFGKFEIDVKACNIDFYSVSAHKFHGPKGVGFMYMRKGLNLKSLITGGEQQRGLRAGTENTPSYMGMVKAMDIAYDALEDSYNHVKNLKEYFIEKLSKIENVVINSPSSEEYSPYILNVSFLGTRSEVLLHILEEDNIFVSTGSACSSKTAVSKGSYVLNAMGLEPKCIQGAIRFSFSRYNTLEEVDYTIASLEKVLKFLRRIKI

SEQ ID NO: 15136 - protein, 265 aa, Clostridium perfringens str. 13
MFREEFSNVISAGRGKIDLLNNSKGRYLVYAMLAGLYISFGIMLAFTIGGILDSANSPSTKIIMGASFGVALSLVVFAGSELFTGNNFVMTIGILNKEVTFKECGKVWGLAYAGNFLGSIIAALGFIGAGLTTGSVSDFMIKTAEIKISLPPEQLFIRGIFCNILVCLAVWCTFRLKTETSKLIMIFWCLFAFVTSGFEHSIANMSLLVIGVILTKGATITVAGSLYNLFFVTLGNILGGVLLGVTYHYIANKKVENKKLVHIQK

SEQ ID NO: 15137 - protein, 589 aa, Clostridium perfringens str. 13
MEEINEKKTHKWKTIKRLLKYVAPYKWKTIGIILMLLLIMSCNTLNPYLMKVSIDKFVSAKDVNGLLGIGAVLLLLNIIAMILSKIRMLSMSKITNQILVNIRHELYTHIQTLSFSFFDNRPVGKILSRVVGDVNALNNLLNHSIVNLIPNLFTILLVIFMMFLMDPSLTLVCLTVLPFLFAGMFFIEIKSNKRWRVFRENRSALLGYTHEAFSGMKVVQGFNREEYSREKFENHLEGHAGGFLHAVRLQDYFWPTVDICRGFGIAIVLFAGYKLTRGGNLSLGTLMAFIMYIEMLWRPIMNLSAFYNAFVTNLSAAERIFDIMDTKNDMVNNKEEERLPKIKGEIHFEDVTFSYDNDGNHALKDVTFTLNPGEKIALVGETGAGKTTITNLISRFYEPTKGKIFIDGIDISTVDVESLRSQMGIMLQDSFLFASSIKENICYGKLDATDEEIIQAAKAVNAHNFIEKLEEGYNTNVNERGSRLSLGQRQLIAFARALISDPRILILDEATANIDTETERLVQEGIKKLMEGRTSIVIAHRLSTIRDCDKIFVLSHGKIVEEGTHEELLNRKGYYYNLYCAQYSFLKEA

SEQ ID NO: 15138 - protein, 573 aa, Clostridium perfringens str. 13
MGIFKDYISKRMVFLIVPIVAMIIVLGIDSFFPYLQKIFVDDILLESDKSKLGLFFGVFLGLSLLRGILGYIKEFLFDKFSLNVSKEIRIDLFKKIQSFEFSFFDSTNTGELMSRISEDVDIVWETISYGLRLLIEGIILFIISVTIMMSMSPSLTIICLVILLPVGVLAILVNKKFHRNYSKISDKVADINLMAQQDIAGIRLVKAFAREKYETEKFLKVNKDYYDLNITQARILSNFLPVIDLLTNLTPVAMIIYGGYLVIKGNITMGTLLAFSSYILNLSFCVKNIGGLVNMMSQNRASMDKIFNILKRKPQITSMENSYNPDKVKGEIEFKNVSFRYNEEEVLKKINLKIPAGSTVAIMGETGCGKSSILSLIGRHYDVSSGEVLIDGVNVKKWNLDSLRENMAVVFQDTFLFSDSIKDNIDFGGNKSEDEIIEAAKDSCAYDFIKEMPEGFETEVGERGLGLSGGQKQRLAIARALVRKTPILILDDATSALDMETEFNVLKNLSKKQDKATTFIIAHRISGVKNADIILFMKDGEIVEMGDHESLLNKKGYYYSVYCHQFQDLEFIQ

SEQ ID NO: 15139 - protein, 397 aa, Clostridium perfringens str. 13
MILSRKAQNIGASLTLALTAKAGELKKEGIDVVSFGVGEPDFNTPKNIIEAATRAMEEGKTKYTATSGIVELKEAIARKLHDDNGLNYGTKNIIISTGAKQSLANVFMAILNPGDEVIIPVPYWVSYPELVKLSDGVPVFIETKKENDFKVTYDELKSVLSENTKAIVINSPNNPTGTVYSKKDLEVIAKFAEENDLIIISDEIYEKLIYGKEEHISIASLSEDAFKRTVVINGFSKAYAMTGWRIGYAACYNEELIKVMNNVQSHMTSNTNSIAQFAALEALNGDQETIKNMVKEFSLRRELMIELISEIEDLTFIEPKGAFYVMIDVSKVLKKANIKGSMEFANLLLKEENVVVIPGIAFGEDNFIRLSYATSKEEIIKGLKRIKEFVNKLMNRD

SEQ ID NO: 15140 - protein, 398 aa, Clostridium perfringens str. 13
MKIVVQKFGGTSVSTKERRTMVVEKVKGAINKGYLPVVVVSAMGRKGEPYATDTLLGLVSEEFKKENKLATDLLMGCGEIISTVVMSDELREAEIEAVPLTGGNAGILTDDNYSSADFIDINPKLILEVLKEGKVPVVAGFQGVDRNGFLTTLGRGGSDTTAAVLGVALKAEEIEIYTDVDGIMTADPRIVGDAELINKISYNEVFQLADQGAKVIHPRAVEIAMKGNVTLVIKNTMSTCIGTMIDSLGDVDNNKFITGITHQGNRIQVSIKSDDNKDNINYKTILESLANNKISLDLINIFPKEKVFTIDAGVKELFEDIMRKNNLKYSLVEDLSTIAIVGSRMRGIPGVMAKIVGALDNENIEVLQTADSHMTIWCLVESKNVREAIKALHRVFMK

SEQ ID NO: 15141 - protein, 398 aa, Clostridium perfringens str. 13
MNVLVINCGSSSLKYQLIDMDTENALATGLVERIGLEGANLTQKSEGKDKYEIVEPMKDHQDAIRLVLGALIDEKHGVIKSLDEINAIGHRVVHGGEKYAESALVTEEVMKDLEECAKLAPLHNPANIIGINACKALMPNVPMVVVFDTAFHQTMPEKAFVYALPYELYEKEHIRKYGFHGTSHKYVSAKIAEAMGKNIEDLKIITCHLGNGASIAAIKNGKCVDTTMGFTPLEGLVMGTRCGNIDPAVVTYLIDELGYTSQEVNTLMNKKSGIFGVSGVSSDFRDVEAAADKGSKEAQIALDLFRNSVKKYIGAYIAEMNGCDVIVFTAGVGENSIIERGAICRDLEFLGIELDEERNNIRAKVAEISKEGSRIKLFVVPTNEELMIAQDTVSIVSK

SEQ ID NO: 15142 - protein, 335 aa, Clostridium perfringens str. 13
MNMELMKQIWESAKNNRKKIVLPEGDEERTLVASQRIKEEGLADVYLVGSEQVIREKAEALGVNLEGVNIVDPETSDKLDTYINEFYELRKAKGMTVEKAGKIVRDPLYFGTMMVKMGDADGMVSGAVHTTGDLLRPGLQIIKTAPGVSVVSSFFIMMVPGSQYGEGGMLLFSDCAVNPNPNADQLAAIAIATADTAKNLCKMDPKVAMLSFSTMGSADHDLVTKVRVATEKAKELRPDLDIDGELQLDAAIVGKVASQKAPNSKVAGNANVLVFPDLQAGNIGYKLVQRFANAEAIGPVCQGFAKPINDLSRGCSSEDIVNVVAITAVQAQATK

SEQ ID NO: 15143 - protein, 398 aa, Clostridium perfringens str. 13
MNNRVVYMDYSATTYVKPEVLEEMLPYFTNKFGNPSAFYGVSRESRMAVDTARERVAKVLNADTNEIYFTGGGSEADNWAIKGIAFAHKNKGNHIITTKIEHHAVLHTCQWLEKQGFKVTYLDVNEEGFVDLEELKNAITDKTILVSVMFANNEIGTIEPVKEIGKICRERKVIFHTDAVQAVGNVKIDVKDMNIDLLSLAGHKVYGPKGIGALYIRKGIRIDNLIHGGGQERARRAGTENIPAIVGLGKAMEIAGENLDEHIAKISKLRDKLIKGLLEVPFTRLNGPKDGSKRLPGNVNVCFEFIEGEGILLSLDFEGICGSSGSACTSGSLDPSHVLLAIGLPHEIAHGSLRLSLGEGTTEEDVDYVLEKVPPIIARLRSMSPLWKNHLREVEGEN

SEQ ID NO: 15144 - protein, 380 aa, Clostridium perfringens str. 13
MNKNVIGIEISGIRKFYNEVVKFPEAISLTLGQPDFPVPEKVKEAMIRAIEEGKTTYTANAGIVELREEISSLLKNNFDIDFSKDEIIITVGGSEGLYAAMTALLNPGEKVLVPSIAYPAYESISKIIGCEVINYDLNEDFSVNIESLKEGIKEGGKLLVLSYPCNPTGALLSKKSRDELIEIIKENDILVLTDEIYSSLCFEEEYYSVAQCKDIKEKIIYVSGFSKMFSMTGLRIGYVACPKKIYDQIIKVHQYNSSCATSISQWGALEGLKSCMNDVENMKESFKERMNFTYKRLKSMGLEVEKPKGAFYIYPNISKFGLTSEEFCHRLLKEGKVACVPGDAFGKGGEGYIRISYCYSKDELERALDKLEAFVKTLKK

SEQ ID NO: 15145 - protein, 144 aa, Clostridium perfringens str. 13
MLDQKTIDIIKSTVPVLKSNGLEITKTFYKNMFEQNPEVKPLFNMNKQESEEQPKALAMAILAVAQNIDNLEAIKPVVNRIGVIHCNAKVQPEHYPIVGKHLLGAIKEVLGDGATEDIINAWAKTYGVIAEVFINNEKEMYASR

SEQ ID NO: 15146 - protein, 336 aa, Clostridium perfringens str. 13
MEKLFIPKGYKPLLSLRETEVAIKELKDFFEDSLAKNLNLTRVSAPLFVNKGSGLNDDLNGIERPVSFDMKAMPEFNIQIVHSLAKWKRLALHRYEFEHGEGLYTDMNAIRRDEDLDNIHSIYVDQWDWEKIIDKEERNLETLKETVKSIYGTFKATEDFIVAKYPHIEKILPEDITFITSQELEDRYPDLTSKERETAICKEFGAVFIIGIGGKLASGEKHDDRSPDYDDWTLNGDLLFYYPLFDEAVELSSMGIRVDEESLLKQLKIAECEERKELPFHQMLLEGKLPYTIGGGIGQSRICMFFLRKAHIGEVQASMWDEDMIRTCEENNIHLL

SEQ ID NO: 15147 - protein, 296 aa, Clostridium perfringens str. 13
MFKSGFITIVGRPNVGKSTLTNLLMGEKLSIVSNKPQTTRNNIQTILTGDDYQMIFVDTPGIHKPKHKLGEYMVNSATDSIKDVDLVLFLSNPCEEVGRGDKFIVEQLKNQKAPVIFVLNKVDESSPEKVAKTLELFSKEYDFAEMIPISAMKAKNTDKLLELMVKYLPEGPKYYPDDMITDVQERFVVAEIVREKALKNLSQEVPHGIAVDVIQMKQDDNGKYNIEVDLICEKASHKGIIIGKNGQTLKKIGSTARYELERFLRAKVNIKIWVKVRKEWRDNTSLLKELGYKKLK

SEQ ID NO: 15148 - protein, 619 aa, Clostridium perfringens str. 13
MSKIIGIDLGTTNSCVAVMEGGEPVVITNSEGARTTPSVVSFQANGERLVGQVAKRQAITNPDKTIMSIKRHMGTDYKVNIDGKDYTPQEISAMILQKLKADAEAYLGEKVTEAVITVPAYFNDAERQATKDAGRIAGLDVKRIINEPTAASLAYGLDKMDSAHKILVYDLGGGTFDVSILDLGDGVFEVVSTNGDARLGGDDFDQRIIDYIAEDFKAQNGIDLRQDKMALQRLKEAAEKAKIELSSSTQTLINLPFITADATGPKHIDMTLTRAKFNELTHDLVERTINIMKEALKSGNVSLNDIDKVILVGGSTRIPAVQEAVKNFTGKEPSKGVNPDECVAMGAAIQAGVLTGDVKDVLLLDVTPLTLGIETLGGVATPLIERNTTIPARKSQIFSTAADNQTSVEIHVVQGERQMAADNKTLGRFTLSGIAPAPRGIPQIEVAFDIDANGIVKVSATDKATGKEANITITASTNLSDAEIDKAVKEAEQFAEEDKKRKEAIEVKNNAEQTVYQTEKTLNELGDKVSAEEKSEIEAKIEEVKKVKDGDDIEAIKKAMEDLTQAFYKVSEKLYQQNGGAQGQGFDPNNMGGANAGAGATNNNDDNVVDADFEVQDDK

SEQ ID NO: 15149 - protein, 428 aa, Clostridium perfringens str. 13
MFIDTAKIFVKSGDGGHGSVSFRREKYVPLGGPDGGDGGKGGDVTFVVDPGMTTLLDFKYKRKFVAGRGQDGQGSKCYGRDGENLTIKVPMGTIIRDVETNKVMADLSHRDDTYTICRGGKGGKGNCKFCTPTRQAPTFAEPGMPGEERWVALELKLLADVGLLGFPNVGKSTLLSVVTKAKPKIANYHFTTLKPNLGVVAVPGIEPFVMADVPGIIEGASEGVGLGLDFLRHIERTRLLIHVVDISGVEGRDAVEDFKRINEELKNYSVKLWDRPQIVVANKCDMLFDEEIFENFKAEVNKMGFDKVFKMSAATSQGVEEVIKEAARMLKDIPVTDLEIPEDERFIPEDKKFTYTINPIEEDGLKVYVVEGSFVDRLLLAVNVNDPDSLRYFHKVLNNKGIFHELREMGIEDGDMVRLNDFEFEYLL

SEQ ID NO: 15150 - protein, 103 aa, Clostridium perfringens str. 13
MYAVLTTGGKQYRVQEGDVLFVEKLNAEVDSTVELTEVLAVAKDGEIKVGAPVVEGAKVVAKVLAQGKAKKVVVFKYKRKKDYRRKNGHRQPYTKIVIEKIEA

SEQ ID NO: 15151 - protein, 392 aa, Clostridium perfringens str. 13
MREVVIASAVRTALGSFGGSLKDVPAVDLGALVIKEALNKAGVKPECVDEVLMGNVIQAGLGQNPARQAAVKAGLPVEIPSMTINKVCGSGLRCVALAAQMIKAGDADVIVAGGMENMSQGPYVLRTARFGQRMGDGKMVDAMVNDALTDAFNGYHMGITAENIAEQWGLTREMQDEFAANSQIKAEAAIKAGKFKDEIVPVVIPQRKGDPIVFDTDEFPRFGTTAEKLAKLRPAFKKDGTVTAGNASGINDGAAALVVMSAEKAKELGVTPICKIVSYGSKGLDPSIMGYGPFYATKKALEGTGLTVADLDLIEANEAFAAQSLAVAKDLEFDMSKVNVNGGAIALGHPVGASGARILVTLLHEMMKRDAKRGLATLCIGGGMGTALIVER

SEQ ID NO: 15152 - protein, 356 aa, Clostridium perfringens str. 13
MAYKLLIINPGSTSTKIGVYEGEKEVLEETLRHSAEEILKYATIFDQLDFRKEVILKVLKEKGIDINELDAVVGRGGMLKPIEGGTYEVNEAMVEDLKIGVQGPHASNLGGILSNEIAKEIGKRAFIVDPVVVDEMEDVARLSGVPELPRKSKFHALNQKAVAKRYAKEHNTSYEDVNLIVVHMGGGVSVGAHRKGRVIDVNNALDGDGPFSPERAGGVPSGELLEMCFSGKYSKEEVYKKLVGKGGFVAYANTNDARDLIKLSQEGDEKGSLIFNAFIYQIAKEIGSMAVVLDGEVDAIVLTGGIAYSDYVTNAINKKVKWIAPMVVYGGEDELLALAQGAIRVLDGVEEAKIYK

SEQ ID NO: 15153 - protein, 476 aa, Clostridium perfringens str. 13
MRNIPIINGISMYLREEIVPFSMPGHKNGRGFKGFEEILLKGDLTEVEGLDNLQHPEGIIKEAEDKLSNLYKSKKSYFLVNGSTCGNLIMIFSLFKEGDKVLVERNCHKSIMNGIIMRKLKPVFINNIFHSKLKAPVGIDLNHLKEQISLNKDLKGIILTYPNYYGVGVNIDETIKIAREANLKVGIDSAHGAHFGFNKLLPESVQELKADIVVMSAHKTLPSLTQTAWMHVNNEDFIEEIEFYKNIFMSTSPSYMFMMSLDYSRNFLEEHGEEAYNNLFKIIEDFKNHIKDLSYFKILDKEFLINGLEKNIKINDIKIDNSRIVLNLRENLNGNKLLDYLRSKNIQCEMSDNKNVVLIPSPFNTEEDFKILKDALKSCDINCLKDEEIDFYLTDLPEKKLEPFEVLDLEYERININDAVGKIVAESIVPYPPGVPMIIMGEVIEERHIKLLNEYMKSKVDLIGIKDKKVKVIKNK

SEQ ID NO: 15154 - protein, 601 aa, Clostridium perfringens str. 13
MKKLQSMITYIAIFAVVLMFAFAFYRNGTQGKVISYTEFKEAYVENKIETMTIKEDKMSVDGVFKDGKRFTSYVSNKMLDNLLQETQGVETVIKYTPPNNMGIWISFLPTILIIGVIFFGLFMFTQQAQNSGGNRGVMNFGKSKAKMANLDGKKVTFKDVAGADEEKGELEEIVDFLKQPKRYIEMGARIPKGVLLVGPPGTGKTLLAKAIAGEAGVPFFSISGSDFVEMFVGVGASRVRDLFEQAKKNAPCIIFIDEIDAVGRQRGAGLGGGHDEREQTLNQLLVEMDGFGVNEGIIMIAATNRPDILDPALLRPGRFDRRILVGAPDVKGREEVLKVHTRNKHLSEDVDLKVLAKMTPGFSGADLENLTNEAALLAVRGGKSSIDMADIEEAITRVIAGPEKKSRVVSEYDRRITAVHESGHAVVSNVLEYADPVHEISIIQRGMAAGYTMNLPEEDRTHTSKKQLKDKMVELLGGRVAEKLVIGDISAGAKNDIDRASHIARSMVMEYGMSDVIGPISFGNSDGGEVFLGRDIGKSSNISEETSAKIDEEIKKLIDEAYNRAESILRENISKLNAVTDVLLQKEKIDGDEFREIFKNS

SEQ ID NO: 15155 - protein, 319 aa, Clostridium perfringens str. 13
MENHSKNIKIFTGNSHPELAREIAKALNIPLGKAEVGTFSDGEISVNIKETVRGCDVFIVQSTCSPVNNNLMELLIMIDAFKRASAGRINAVIPYYGYARQDRKAKSRDPITAKLVADLLTAAGADRVLTMDLHAAQIQGYFNIPVDHLLGSPILAKYFVEKGLADRDDVVVVSPDLGSVTRARKFADKLNAPIAIIDKRRPKANVSEIMNIIGDVKDKVCILIDDMIDTAGTITNAANALKDLGAKNVYACCTHGVLSGPAFERINNSAIEELVMLNTIALPEGEGLNKFKSLSVAPIMADAINRIYDDEPLSGLFQD

SEQ ID NO: 15156 - protein, 252 aa, Clostridium perfringens str. 13
MSENKFMKKYDVLYYDSDVNENIRMVPLMKIFGDVSAIHEEELAYEGIKYLKDHELSWIIYSYSIDIKKPIPYKSSINVETYLEGIKKFYACRVYKVYNEKNELVAEGKIIFLLIDLEKRRAVRIPKEYCELINMSDTGEVELKSTKVEKLIREDLESNISVRRSDIDFNKHVNNTKYLEWTMEATPECILDEYSLISAKIKYEKEVRLGDDVNIICQWDEIEEGYKCLYKIVNNRLGEVSASIETIWKKEF

SEQ ID NO: 15157 - protein, 246 aa, Clostridium perfringens str. 13
MGKAYEKVYEVTYGETDGRKDCRITSMMNFFSDCCLSQEEKNSMNYADNSSETTWVFFDYEIIVNRYPRYREKIKVKTYVESIRKFYSNRVFEAYDMDGALVARADVLAFLINKKTRRPARISDEEYEIHGLSKESSKLLRKKLNFEKFDKEDLDMKFHIRYLDIDLNMHVSNIKYVEWILETVPVDIVLNYKMKKIKIKFEKEITYGHNVIIKSKIIKGEDEVKVLHKVENEEGESITLAETYWY

SEQ ID NO: 15158 - protein, 386 aa, Clostridium perfringens str. 13
MNKIYFDNAATTFPKPDSVIKAMFDYMSFEGGSANRGSSSTALQSSRAVYECRYEIAKFFNFPKSENVIFTNNITTSLNMLLLGIIKSDWHIITTSMEHNSVLRPLVKISEELPNVELDIVQCNNEGLVSVEKIKEKLKSNTKLIILSHASNLVGTIQPIKEIGKLCKENNIFFILDSAQTAGVIPIDMTELNLNALAFTGHKALLGPQGIGGFIIDDKLNSICKNIFSGGTGSNSSLIEHPQELPDKFEYGTLNTPGIIGLLEGIKFIEKEGIENIKAKEEVLCQKAMDLLSEIPEVKIYGPMDAKKKTSTISFNIEGMDPEFTGFLLDSEFNITCRTGIHCTPLAHKTVGSYPAGSIRISLGYFNTIEEVYRFVEVIKELISRR

SEQ ID NO: 15159 - protein, 238 aa, Clostridium perfringens str. 13
MQSILKPITNLFTMIFQAIHGFVASLDIFGVGAGYVITIFLLTLLVRLILLPLNIKQTRSQQKMQEIQPEIAKLQKKYKNNPEKAQQEMMKLYKENNVNPMSGCLPLLIQMPILFALYYVFTGLTELQGVSFLWLGDLWAPDRTFILPILSAATTYLSSLLMTKFTQSQAGGAPGGMNMNTMNIVMAGMMGVMSIQFPSMLVLYWVIGNLIQMVQTYFIVVLPSKKRAKEKEQYKDIK

SEQ ID NO: 15160 - protein, 731 aa, Pyrobaculum aerophilum str. IM2
MSDWIELRVQESKARDANRPVVRIDPEVMERAGIVVGDVVEIVGRRRTAAKVWNGLPEDRGKGVIRMNSILRKNADVSLNETVKVRRVEPKPAAFVKLAPVSMTIAVDANFLQYIKQRLREYVLVEGDMLQIHVLSQPLTFQVVQTKPSNTVLIITEDTQIQIFEKPVSGVKIPHVTWEDIGDLEDAKQKIRELVELPLRHPELFKHLGIEPPKGILLIGPPGTGKTLLAKAVANEANAYFVAINGPEIMSKYYGESEARLREIFEEAKKNAPAIIFIDEIDAIAPKREEVTGEVEKRVVAQLLTLMDGLQERGQVIVIGATNRPDAVDPALRRPGRFDREIWINPPDFKGRYEILLIHTRNMPLAPDVDLRKLAEMTHGFSGADLAALAREAAMSALRRAIQSGLIDLNQPSIPPEVFEKIKVTMTDFTSALREIVPSALREIHIEVPRVRWEDVGGLENVKQELREAVEWPLKYPDKFKKFGLRPPKGILLFGPPGTGKTLLAKAVATESGANFIAVRGPEIFSKWVGESEKMVREIFRKARMAAPAVVFIDEIDALATARGLGGDSLVTERVVAQLLAEMDGIKALENVVVIAATNRPDLVDPALLRPGRFDRIIYVPPPDFKARLDILLIHTRSTPLAKDVDLEELARRTEGYSGADLELLVREATFLALREDINAKEVSMRHFEEAMKKVRPSITPDMLKFYESWLEKARQLTVSAKAKATPPLYL

SEQ ID NO: 15161 - protein, 323 aa, Pyrobaculum aerophilum str. IM2
MPCIFVSREGFPESMYKKLEEVGRVEVYRHGGSPWSTRGVPKEVLIDAARRCEALVIFIGDVIDKEVLDAGEKLKIVSTASVGVDHIDVEYAKRKGVVVAHTPYVLVDAVADLAVGLLIAVTRKIALGDRLIRSGAADAVWGSLMGVNLRGKRAGIVGLGNIGVAIARRLKAFDIEVAYWSRRRKPEVEFALGIEYMELDSLLSSSDFIFLTMALTPETRWFFNRERFAKVKRGAYFINVARGGLVDTDALIEALEAGVLAGAALDVFDVEPLPARHKLASMDNVVLTPHIGSATVETRRRMAELAAENVVSFFRTGRPIYAV

SEQ ID NO: 15162 - protein, 394 aa, Pyrobaculum aerophilum str. IM2
MGVVIVGYVRTPIGKFGGSLKDVKSPHLAAFTIRKLLDRVGLSGKEVEEVIFGSTLQGGMGQNLSRYAALLAGLPVEVSAYTVNRVCSSGMQAIIEAYREIAMGDASVVIAGGVDSMSTQPICLPDGVRWGLRHFIGRREELRDLMVYDGLVDPTNGLLMGEEAEMVAREHKMTREELDWVAYESHMRAWRATENKWFDDLEPIEGELGGVYVKLERDEGIRPDTTMEKLAKLKPAFRPDGVLTAGNSSQLSDGAAAVLLMSEEKAREMGVKPIARILGYSWHMVEPWRFTEAPVYAIQKLLKKLGTEIDSFDYFEANEAFAVVNVLVHRILGVPYEKLNVFGGAIALGHPLGASGARIVTTLISVLRNKGGRRGIAALCHGTGGGTAIALELI

SEQ ID NO: 15163 - protein, 737 aa, Pyrobaculum aerophilum str. IM2
MRLIIVSNRLPVVLTVGERGMEIREAVGGLATAVKSFIKATENGKALGFSEVVWAGWSGIKAEQESEDLKSRLREMGLLPVSLTAEEVNFFYEGFCNSTLWPLFHGFTVYTVFESKYWEAYVKVNQKYAETVASVANTGDFVWIHDYHLMLMPAMLREMSPDVSIGFFLHIPFPPAEMYQLMPPPWRTALLDGVLASDLVGFHIHEYVNNFVRAVSKFLGYRTEAGVIYAGRRKVHVGAFPIGIDFDFFYNSSLDPEVAGQIEELRQKLRGLKIIFSIDRLDYTKGVINRVHAWERFLKEHPQWRGKASFILIVVPSRIGVPQYDAMKREIEREVGRINGELGDVNWTPIVYISRFIPTPTLLALYNIADVALITPLRDGMNLVSKEYVATKRDCKGVLILSETAGASHELLEALIVNPNDESGVVEAIAKALTMEPEEQCRRIKAMQEKLRQQNVVKWAVDFLHSLMLAYRENTESFTTSSKLLDREAIEEIVKIFHGARSRLLLLDYDGTLVPHYPYAYQAVPDGELKRLLNSLAFQPNTYVAVVSGRGRDFLEAWLGDLPIYIVAEHGAFIRDPGGNWSQLFPFDTSWKISVRKIMEEFTRLTPGSYIEEKEISLAWHYRNVEPEIGEKAANRLADALTGLLESSPANIIRGVKVVEVRAAGVNKGVAAKLLYDKLRPELVIIAGDDYTDEEMMKALPEAITIKVGKGETSAKYMAPSYRRIRELLQALLTAQR

SEQ ID NO: 15164 - protein, 320 aa, Pyrobaculum aerophilum str. IM2
MRPYLPLGTYLLLMLLAFAFPEYSKLIASIAFYMALGQAVNIFVGLTGYVDFGYVAFLAMGAYGVGVAITYWHYLGLFALPAGLLLGVLLAASLAAAVGAIALRLRGAYFAIATIGVNEGIKHLIVGANIWGGGAGLILGANMIKAFGRDTALFIANIGSTIMILLTGLLAVIAMYVIQASKAGYALAAIRQDEDAAKVMGINPTKYKLMAFITSATLSSLLGASYFSLGNMQVFPENVFFVEYILDGLAVMFLGGAGTVTGPIVGGLVYFGVRYLVGLAAPGMQALITALIVFLIVILMPKGIVGTLREKRASIRRWVP

SEQ ID NO: 15165 - protein, 256 aa, Pyrobaculum aerophilum str. IM2
MHRLQVENLRVAVSGKEILRGVTLSISTGEVVVLMGPNGSGKSTLFQAIAGNPKYEIIDGDILLDGESIKDLPPEERFARGIYVGFQSPIAVPEVRFAFLLQAMMNIRAGKKLTDPNPQVLAQAQKIAAELGLRPDVFNRGVGAGFSGGEFKRAEVLQALLLNPKFAILDEPDSGLDIDGISAVGKAVMRLASSGSGILISTHYARVLKFIKPTKVYVMAEGRVVLEGDENVIKRIEEVGYQSYFNEIKQAFGASL

SEQ ID NO: 15166 - protein, 361 aa, Pyrobaculum aerophilum str. IM2
MRRYAGVLAYIASVLVVWATGRDVNSYMLTTAVDISIYVLITLSLNLEAGIAGIPNFGRVLTVAFGAYIAGGVLGRIALWALGLNYDYVADNPTAVSALSKTLTPPMAALLLLAGLFLAGIVGAAIGVASSFPARRLTADYLAITLLAFGDVAYYIGLNYEPLVGGTLGVSAPPIYEGIFGGGVMRAVGAALVSASVATATYALFTRLDKSPFGRILRVHREDPELVSMLGRDPAALRGWAMAIGGAASAVAGLLYALYVGAVHPRGFERINFTFYPWLIMVMGGMGSNRGVLEGVFIFIVIYRLLDIYKYEVGNVVGFDPVWLGYILFGALAMLVIVTMPRGVVPEEAKPLIEIKRRGEE

SEQ ID NO: 15167 - protein, 282 aa, Pyrobaculum aerophilum str. IM2
MKSLALTVIALIIGLVIGYFLGIYSTPQPAATTTTPQTTQTPQCRVSVDAIKKRGKLIVGTDATWPPWEWVMGNQIVGWDVDIAREIANALGVQLELRDMRFAGLLEAVRNGDVDLAISAITWTTEREKVLEFSMPYYLESIVVVTKASRTDINKVEDLYGKTVGVQIGTTHEEWAATNLEKPGKASVRRYDKVYPYMVEVLRRGDVDAIILDRSIATALVRKFPDLKIAFELPGSAGYISVAMPKCAQDLKLVVNQVIENLIQTGKLDQIMQKNFELFLQS

SEQ ID NO: 15168 - protein, 397 aa, Pyrobaculum aerophilum str. IM2
MGGSMRGFSPRIGALRESPTRKIDELREKLRRENRDVILLSTGQPSIPPPREVREALGELLKVDTMELYGYTPSQGIYEVRQAISEDLRRLGGLEVPPEQIVLTAGGQAAMFSTLATLIEPGDEVVVTDPTYFGYKPLLEYFGAVVKPVRTRLEDGFQPNPEALKDSVSRKTKALILVSPDNPTGRALKEEAAKAVVDLAEDYDFWIITDEAYKTLIYEGSHIYLYKLAPDRTISINTFSKDPAIPGWRLGYVYGPPEVMPKIKLVNEEMVYCPPSFAQRLVAIYLRSEARMRYIREVVEIYRQKRDVAVAALRKYVPEARFIVPAGSMFIFVDLSRYISDGESFARELLERYGVAVVPGSYFSEIYRAAVRISFVTEPPHRLEEGIRRIGEALKAT

SEQ ID NO: 15169 - protein, 267 aa, Pyrobaculum aerophilum str. IM2
MLKNKCGEKDVKLLGAPMEDTLSFRPGARFAPQKIRQILPYLEYTTLFGNVAEPICDLGDVELLQGRPEENLARIEAKLKRVGPPFIMIGGEHTATLAALNVVRPDVYVHIDAHFDLRNEWPPGQRLSHATFARRAHEELGFYAIYIGVRAYDDEEREYAENAGFFVVEGRDFTRQVVADALSTASGRAYVSLDIDVLDPAEAPGVGTPEAGGLSFKKLEYLLTDVLMTLKPVAVDIMEYSPPNDVSDITATKVVRILMHMASLLKI

SEQ ID NO: 15170 - protein, 534 aa, Pyrobaculum aerophilum str. IM2
MSWEEVYKKNLIEKIKRDKHPFKLLEELETLARRHYSDIPEEEFIRLYWLGVVHDRPRTGYLMLRLRIPGGILKPHQLRRIGELSYKYGKNYAEITVRQDIQLHWIELKYLPEVLAQLKDVGILTIGTEGDTVRNITTCPLAGLTVNELFDVRDDVYKIDKAFLLDPIYADLPRKFKITITACPYMCSVPEIQDLALIGVTKDGKYGYTVLIGGGLSLAPRVGRHMPVFVPREMVIEFVKAVLDVWREEPRYRLSRVRARIKFMIDDLGVDKFRELVENRLGQRLEDYPSKPESLGKTDHIGVERLKDGTYAVGVAIPAGIVTGEFLIKLADLAEAVGVKEVRLTQRQNLILAGVPEDKVEIVKEFCQKWGYAVEQTPLVAMSVACTGDPYCNYSISDTKGLLLELIKSLKERFGEIQDLPPIHIVGCPHACAWYWIGNIGLMATTAKMPDGRFVKAYDVLVGGDYGKRTAIGKVLFKKVPADKIKDCITYLVEYYINKRAPGEDFPTFIARIDLRELADYISGKLGVQLALGK

SEQ ID NO: 15171 - protein, 455 aa, Pyrobaculum aerophilum str. IM2
MPMPAPLEPHGGRLVYNVIEDRDKAAAMIQGLPSIEIEPTLGPDGSPIRNPYREIMSIAYGFFSPVEGFMTRNEVESILKERRLLNGWLFPFPLIYDVDEEKIKGIKEGDSVLLKLKGKPLAVLNVEEIWRLPDRKELADAVFGTPERNKEVVKKRFDEKHPGWLIYRSMRPMALAGKITVVNPPRFKEPYSRFWMPPRVSREYVEKKGWRIVVAHQTRNVPHIGHEMLMKRAMFVAGGERPGDAVLVNAIIGAKRPGDYVDEAILEGHEALNKAGYFHPDRHVVTMTLWDMRYGNPLESLLHGIIRQNMGATHHMFGRDHAATGDYYDPYATQYLWTRGLPSYGLNEPPHMTDKGLRIKPVNLGEFAYCPKCGEYTYLGMSYEGYKEVALCGHTPERISGSLLRGIIIEGLRPPKVVMRPEVYDVIVKWWRVYGYPYVTDKYLRIKEQELEVEL

SEQ ID NO: 15172 - protein, 331 aa, Pyrobaculum aerophilum str. IM2
MKPVVKIGGSLLRSAADFVQAAHFVAAYSEPPVVVVSAVKGVTDLLLQLEKTRSYLLYEELAHRHISIARGLGVEERIAPLLKELEYALRLPHAPWSADYFASFGERLSATMLHAVLEKMGIEAKLFIAPMLTDSNYGNAEPIALEHKEEMSRPDAVAVVTGFIGRDKEGRFTTVGRGGSDYTATYIGKELGARKVSLVTDSPGVMTADPREVQEAYVLPLLSVQEAVEAAKVGAKNFHPRTFIPVVEAGRMAVEVRSYYSRGTLIAHIYPPPPYKIVVRCGQGSCVVGLAAYELTKLGGTPLGQYSVKLNIPPRQVHEHLILPYIKYINT

SEQ ID NO: 15173 - protein, 316 aa, Pyrobaculum aerophilum str. IM2
MYEGVYPLGTALARPLIAAKVVEVARRLGADAVAHGSTSKGNDQVRFDVTVKALAPDLKIIAPARIWGMTRAEEIEYAKRHGLPVGEEHKKYSIDDNLWSRSIEGGPIDDPLAEPPEDAFKWTVSPDKAPHDPTYLTIEFEKGLPVAVNGEKMSLASIISLLNHVGGANGVGRIDHIENRLVGFKSREVYEAPAAVILYHAHRDLEKMVLTPRELRFKHYVLDPQWADLVYQGLWVEPLRNALEKAAEEMERWVSGEVRVKLYKGSLWVVGRESPYGGYSKELADYSAGWYPSDEEARGFIEMWSLHSLTALRRRK

SEQ ID NO: 15174 - protein, 570 aa, Pyrobaculum aerophilum str. IM2
MNVEEIAFKYALANAVKYGGKADVKAVMAKLMAEVPELRARAREVKQIVDAVVARVNSMPLEEQRRILRERWPELLEERRAEQRRPGLEGLPELPNVRGGVVVRFAPNPDFVLHLGSARPAILNYAYRIKYGGKFILRFEDTDPRIKSPLVTEEVNAYESIREDLRWLGVRWDEEYIQSQRMEIYYEHAKKLLEMGAAYVDLCKPEEWRRLRNEKKACPHREQPPEVNLELWDKMLEGRFKEGEAVLRIKTDLTHPDPSVRDWVAFRIIDTSKTPHPLTGDKYIVWPTYNFAVSIDDHLMGVTHVLRAQEHSVNTIKQSYVFRHFGWEQPVTIHFGRLRIEGATLSKSKLKAMRIKYDDLTLPTLAGLRNRGIVPEAIWDLILSVGIKPSDSTVALANLFAFNRKHIEPIADRYMYVADPVKLVFEADKELTAHVPFHPSFKERGERTYRLGPGRVEVYIQRRDAVAGKVVRLMELANVEIVRVEGDVAYGRIHSYSLDEAKKIGAPIIQWVWDPVEITVIKPAGVGRKEVEVGLGEGWLERVEVGKYVQFFRYGYLKKRGPREFVFLHD

SEQ ID NO: 15175 - protein, 478 aa, Pyrobaculum aerophilum str. IM2
MNVFLKEIHKVFSDGTHALKGVSLDIRPGEVLALLGENGAGKTTLMKILAGIYKPTSGEIYIDGKKVRFKNAREAQKAGIAMVHQHFSLIPGLTAIENIAVAEGASLKYITRDVRERAEKIAAELGFEVDWDRDVEELPLGVRQRVEIVKALYLGANLLILDEPTTVLSPPEVKSLFQVVRRLKEQGKSVVYITHKIPEVVEIADRVAVLRRGVKVAEFTPPYEPKKLVEAMVGELKVESVARAGQPGERQVLEVRDLWVYEGERPVVQGVSLTVREREILAIVGVEGNGQEHLVDAIVGVRKYKGYVRIYGGYAYIPDDRHQKALLLERNLIENAVLGRESYFSKYGFILWKKAEGFTLKLVEEFGIVTPSPWAAVRQLSGGNQQKLVVARELARGARLIIAHQPTRGLDVATTEYVQRLLIKARNEGSGILLVTSDLDEAYKLADTIAVMYRGRIVALGPVEEMNIDTVGRKMAGL

SEQ ID NO: 15176 - protein, 738 aa, Pyrobaculum aerophilum str. IM2
MSTEVILKVAEARSRDVGRSIVRLPVRIMKKLGIEPGDYVEIIGRKSAYAQVWPAYPEDEDKEVIRMDGIIRQNAGVGIGDTVKVRKAVLKPAQRVVLTPTEPVRVDSEYLKKQILLGKPVARGQAIDVPFYGGAIRFVVVQVQPGPAAYVSIDTEVTVREEPVKEAELTIPRVTWEDIGDLEDAKQKIRELVELPLRHPELFKHLGIEPPKGILLIGPPGTGKTLLAKAVANEANAYFVAINGPEIMSKYYGESEARLREIFEEAKKNAPAIIFIDEIDAIAPKREEVTGEVEKRVVAQLLTLMDGLQERGQVIVIGATNRPDAVDPALRRPGRFDREIHIPMPDKRARREILAVHTRNMPLCTKADVETKICNPGDEVDLDRIAEMTHGYTGADLAALAKEAAMTALRKAMNKGMINIEQDIIPQEVLSKLKVGMSDFLEAMKFVHPTVLREVIIEVPEVHWDDIGGYDTIKQELREIVEWPMKYKHYFDELGVEPPKGILLFGPPGVGKTLFAKAVATESGANFIAVRGPELLSKWVGESEKAIREVFKKARMAAPCVIFFDEIDSIAPARGSRLGDSGVTDRMVNQLLAEMDGIGTLKNVVVMAATNRPDILDPALLRPGRFDRVIYVPPPDLKARIEIFKVHTKRVKLADDVNLEELAKRTEGYTGADIAALVREAAMLALRETIREKTVKAKPVSMKHFEEALKRIPPSLTPEDIRRYEEIAKRLRRAIAGL

SEQ ID NO: 15177 - protein, 307 aa, Pyrobaculum aerophilum str. IM2
MSALIVDKVDETLKERLERIGIKVDLAPGISKDDLIKIIKNYNILIFRGRLKIDKDIMDAGQNLKILARYGVGLDNVDVEYAVKKGIAVVSAPNAPSQSVAELTIGLLFSVARRIPLLNAKVKAGEWPKGKYIGIEIAGKTMGIVGFGRIGRFVAQMAKSLGMNILASDVIDVSKEVAKIGGRQVPLEELLRQSDVVTIHVPLTPETYHLLNAERLSLLKDGAIIINTSRGEVIDHEALLKHLDRLWGVGLDVLPEEPPKSHYLRQLIAHEKVVVTPHVGSETKEAMMRLAEELAANIEEVIQRIKL

SEQ ID NO: 15178 - protein, 132 aa, Pyrobaculum aerophilum str. IM2
MSTKYVEAGELKEGSYVVIDGEPCRVVEIEKSKTGKHGSAKARIVAVGVFDGGKRTLSLPVDAQVEVPIIEKFTAQILSVSGDVIQLMDMRDYKTIEVPMKYVEEEAKGRLAPGAEVEVWQILDRYKIIRVK

SEQ ID NO: 15179 - protein, 363 aa, Pyrobaculum aerophilum str. IM2
MILQIDLNTLLVLFRETSIIVAIYGIYVLSLNLEVGYMGLPQFGKVMFLALGAIAVGGIATKVALLIYSHVISSQLNISPLSDLDTYCSAYQYSAIGIINNIFSNSPLSGLAFFFMSITLAAILGGVFGVLMAGPALRLREDYLGILLLVSAETVRVISTYTPQVACGVFGAVIPDPFAWLREGRQWGYLAVTLIFLLLSFVILERLGNSPFGRALRAIRDAEVAARVFGKDIVKFRVRVLATASALAGVAGALLAFYNNFVLMGQFVPLETFKGWAMLIIGGTGNNIGALLGVVVYYVIDRVLSLYKEGIRQIINVDPIFFQYIIFGIIIILVLMFRPQGIISERPVKTLKRHILAKLRAEA

SEQ ID NO: 15180 - protein, 689 aa, Pyrobaculum aerophilum str. IM2
MIGRSVVVKSYIEVARHVVPEFWEPSRVLAIRKMAQSSMPVIDRFEPERYGRLLDRMAFKDLRRRDLEEAYAKADKIDIDIGIKLGGAELQMPIYVGDMSFGALSGNPNIAIAKAVTEAGAVAGIGEGGLHPEVAKYRNIVVQWASARFGMDMNLLTAGIAVNIKIGQGAKPGIGGHLPGRKVVDIIAKLRKIPVGSEAISPAPHHDIYSIEDLAQRVKALRDLTKKPILVKVAAVNKIHYVSVGVARSTANGIIIDGAGAGTGATPIVARDHLGIPIDIAVPVVDQWIRKDGTRDGFLMIAGGMLYSPLDVAKIIALGADMANLGTAALLAMGCIMCHACHTGGCPTALTNMIGSGKELDIEWGSALLRNYLLAVSRGLKAVLYALGMSSIKELVGRRDFLQIRHVDEELASVIGVELAEPGETAWLDKNRRVIFPREYYEGVHIPIIGMGGVVPGYTTPARRLLDVLRIEAVQVTRPSVDPYREDVDVSVKFGRLVLDTPVVVPAIDEAAEDAAYIMGAAVLGDNCKYEEYCLGSFKPAITPPGEIDIDSGVIIIDERMGGEKPLEAAVARLHRKLMETGRRRETLIVAVGDLYNGADIYKLAALGADLVAPLSAFQQVVQRVKDLPKGERRRRYENLIANLTAELKVLMGAGGVTSYMHTLVGNLDLLRSLDGRVGEILGVEIAGR

SEQ ID NO: 15181 - protein, 237 aa, Hordeum vulgare
MSQPRYFCKACRRYWTHGGSLRNVPIGGGCRKPKRPGTSDAHKLGMASSSEPTGVVPPSNCTGMNFANVLPTFMSGGFDIQSSLSLTTFGSSSSSNPTALMSPGGTTSFLDVLRGGAGGLLDGSLGPNNGYYYGGHANGSSIGMLMTPPTVSFGIPSPMQQHGGLVVGGNGIGGTTSSTFQGSAGEEGDDGTGSIMGLQWQPHVGNGGGGVVGLGGAHHLGTGNNVTMGNNNNNNNH

SEQ ID NO: 15182 - protein, 176 aa, Oncidium Gower Ramsey
MNRERDSLIVGRVIGDVLDPFTRSVSLRVTYTTRCITNGLELKPSVVVEQPRVEVGGNDLRTFYTLVMVDPDAPSPSNPQLREYLHWLVTDIPATTAATFGSEIVCYESPRPSLGIHRFVFVLFHQLGRQTVYAPGWRQNFNTRDFAELYNLGSPVAAVYFNCQREAGSGGRRMQD

SEQ ID NO: 15183 - protein, 842 aa, Petunia x hybrida
MMVINMVSRLVMWNVLLVLLSSCVFSGLASVSYDHKAIIVNGQRRILISGSIHYPRSTPEMWPDLIQKAKEGGVDVIQTYVFWNGHEPEQGKYYFEERYDLVKFIKLVHQAGLYVNLRVGPYACAEWNFGGFPVWLKYVPGISFRTDNEPFKAAMQKFTTKIVNMMKAERLYESQGGPIILSQIENEYGPLEVRFGEQGKSYAEWAAKMALDLGTGVPWLMCKQDDAPDPVINTCNGFYCDYFYPNKAYKPKIWTEAWTAWFTEFGSPVPYRPVEDLAFGVANFIQTGGSFINYYMYHGGTNFGRTAGGPFVATSYDYDAPLDEFGLLRQPKWGHLKDLHRAIKLCEPALVSGDPTVTALGNYQKAHVFRSTSGACAAFLANNDPNSFATVAFGNKHYNLPPWSISILPDCKHTVYNTARVGAQSALMKMTPANEGYSWQSYNDQTAFYDDNAFTVVGLLEQLNTTRDVSDYLWYMTDVKIDPSEGFLRSGNWPWLTVSSAGDALHVFVNGQLAGTVYGSLKKQKITFSKAVNLRAGVNKISLLSIAVGLPNIGPHFETWNTGVLGPVSLSGLDEGKRDLTWQKWSYKVGLKGEALNLHSLSGSSSVEWVEGSLVAQRQPLTWYKTTFNAPAGNEPLALDMNSMGKGQVWINGQSIGRYWPGYKASGTCDACNYAGPFNEKKCLSNCGDASQRWYHVPRSWLHPTGNLLVVFEEWGGDPNGISLVKRELASVCADINEWQPQLVNWQLQASGKVDKPLRPKAHLSCTSGQKITSIKFASFGTPQGVCGSFSEGSCHAHHSYDAFEKYCIGQESCTVPVTPEIFGGDPCPSVMKKLSVEAVCS

SEQ ID NO: 15184 - protein, 1118 aa, Vitis vinifera
MSSKSTNKTNCSRSSSARSKHGARVVAQTPIDAQLHVNFEESERHFDYSASVDFNISSSTSDVPSSTVSAYLQKMQRGNLIQPFGCMIAVDEQNLTVLAYSENAPEMLDLAPHAVPSIEQQEALAIGTDVRTLFRSSGAAALQKAANFGEVNLLNPILVHCRNSGKPFYAILHRIDVGLIIDLEPVNPADVPVTAAGALKSYKLAAKAISRLQSLPSGNISLLCDVLVKEASELTGYDRVMVYKFHEDEHGEVIAECRKPDLEPYLGLHYPATDIPQASRFLFMKNKVRMICDCLAPPVKVIQNKRLAQPLSLCGSTLRSPHGCHAQYMANMGSVASLVMSVTINEEDDDTESKQQKGRKLWGLVVCHNTSPRFVPFPLRYACEFLVQVFGVQISKEMELAAQMKEKHILQTQTVLCDMLLRDAPVGIVTQSPNVMDLVRCDGAALYYQKKFWLLGVTPTEAQIRDIVEWLLEHHSGSTGLSTDSLMEAGYPAASVLGDAVCGIAAVKINSNDFLFWFRSHTAKEIKWGGAKHDPDDKDDGRKMHPRSSFKAFLEVVKRRSLPWEDVEMDAIHSLQLILRGSLQDKSADDSKMIVNVPSVDASIKMADDLRIVTNEMVRLIETASVPILAVDAAGCINGWNNKAAELTGLIMQQAIGMPLINLVENDSADMVKKMLSMALQGIEEQNVEIKLKTFGPQENNGPVILVVNACCSRDIKDNVVGVCFVGQDITGQKMVMDKYTRIQGDYVGIVRNPSALIPPIFMMDEHGRCLEWNDAMQNLSGLKREEATDRMLLGEVFTVNNFGCQVKDHDTLTKLRILLNGAIAGQDAQKLLFGFFDQHGKYIEALLSANKRTDAEGKITGVLCFLHVASPELQHAMQVQRISEQAAADSLKKLAYIRQQIRKPINGIMFIQNLMDSSELSQDQKKFLRTSMMCQEQLTKIVDDTDLESIEECYMELNSGEFNLGEVLEVVISQAMILSRERRVEIIYDSPAEVSSMLLYGDNLRLQQVLSDFLTNALLFTPAFEGSSVALRVIPRRESIGTKVHIVHLEFRIAHPAPGIPEDLIQQMFHHSQGVSREGLGLYINQKLVKIMNGTVQYLREAQGSSFIILIEFPLAH

SEQ ID NO: 15185 - protein, 1124 aa, Vitis riparia
MSSSRPTQSSSTSGRSKHSARIIAQTTVDAKLHADFEESGSSFDYSSSVRFTPAGGDQQPRSDKVTTAYLHHIQKGKLIQPFGSLLALDDKTFKVIAYSENAPEMLTMVSHAVPSVGEHPVLGIGTDVRTIFSGPSASALHKALGFGEVSLLNPILVHCKTSGKPFYAIIHRVTGSLIIDFEPVKPYEVPMTAAGALQSYKLAAKAITRLQSLPSGSLERLCDTMVQEVFELTGYDRVMAYKFHDDDHGEVVSEITKPGLEPYLGLHYPATDIPQAARFLFMKNKVRMICDCRAKHIQVLQDEKLPFDLTLCGSTLRAPHSCHVQYMENMNSIASLVMAVVVNDGDEEGESSNSGQPQKRKRLWGLVVCHHTTPRFVPFPLRYACEFLAQVFAIHVNKELELESQILEKNILRTQTLLCDMLMRDAPLGIVSQSPNVMDLVKCDGAALLYKNKVWRLGITPSDFQLHDICSWLSEYHMDSTGLSTDSLYDAGYPGALALGDAVCGMAAVKITSKDTLFWFRSHTAAEVRWGGAKHEPGEKDDGRKMHPRSSFKAFLEVVKTRSLPWKDYEMDAIHSLQLILRNAFKDSEAMDVNTNAIHTKLNDLKIEGMQELEAVTSEMVRLIETASVPILAVDVDGLVNGWNTKISELTSLPVDKAIGMHLLTLVEDSSADTVKKMLHLALQGQEEQNVQFEIKTHGSKRDSGPISLVVNACASRDLDENVVGVCFVAQDITSQKTVMDKFTRIEGDYKAIVQNPNPLIPPIFGTDEFGWCSEWNPAMVKLSGWNREEVMDKMLLGEVFGTHMACCRLKNREAFVGLGIVLNSVMTGRESEKVSFGFFSKSGKYVECLLSVSKKLDREGAVTGVFCFLQLASQELQQALHIQRLSEQTALKRLKALAYIKRQIKNPLSGIIFSRKMMEDTDLGEEQQQILHTSAQCQRQLSKILDDHDLDSIIEGYLDLEMVEFTLREVLVASISQVMIKSNGKGIQIVNDAEEGIMTETLYGDGLRLQQVLADFLLISVNFTPGGGQLSVAASLIKDRLGESVHLVHLELRITHAGNGVPEQLLNQMFGNNGDASEEGISLLISRKLVKLMNGDVQYLREAGKSTFIISIELAAARKKPQA

SEQ ID NO: 15186 - protein, 1123 aa, Vitis riparia
MSSKSTNKTNCSRSSSARSKHGARVVAQTPIDAQLHVNFEESERHFDYSASIDFNISSSTGDVPSSTVSAYLQKMQRGNLIQPFGCMIAVDEQNLTVLAYSENAPEMLDLAPHAVPSIEQQEALAIGTDVRTLFRSSGAAALQKAANFGEVNLLNPILVHCRNSGKPFYAILHRIDVGLIIDLEPVNPADVPITAAGALKSYKLAAKAISRLQSLPSGNISLLCDVLVKEASELTGYDRVMVYKFHEDEHGEVIAECRKPDLEPYLGLHYPATDIPQASRFLFMKNKVRMICDCLAPPVKVIQNKRLAQPLSLCGSTLRSPHGCHAQYMANMGSVASLVMSVTINEEDDDTESEQQKGRKLWGLVVCHNTSPRFVPFPLRYACEFLVQVFGVQISKEMELAAQMKEKHILQTQTVLCDMLLRDAPVGIVTQSPNVMDLVRCDGAALYYQKKFWLLGVTPTEAQIRDIVEWLLEYHSGSTGLSTDSLMEAGYPAALVLGDAVCGIAAVKINSNDFLFWFRSHTAKEIKWGGAKHDPDDKDDGRKMHPRSSFKAFLEVVKRRSLPWEDVEMDAIHSLQLILRGSLQDKSADDSKMIVNVPSVDASIKMADDLRIVTNEMVRLIETASVPILAVDAAGCINGWNNKAAELTGLIMQQAIGMPLIDLVENDSADMVKKMLSMALQGIEEQNVEIKLKTFGPQENNGPVILVVNACCSRDIKDNVVGVCFVGQDITGQKMVMDKYTRIQGDYVGIVRNPSALIPPIFMMDEHGRCLEWNDAMQNLSGLKREEATDRMLLGEVFTVNNFGCQVKDHDTLTKLRILLNGAIAGQDAQKLLFGFFDQHGKYIEALLSANKRTDAEGKITGVLCFLHVASPELQHAMQVQRISEQAAADSLKKLAYIRQQIRKPLNGIMFIQNLMDSSELSQDQKKFLRTSMMCQEQLTKIVDDTDLESIEECYMELNSAEFNLGEVLEVVISQAMILSRERRVEIIYDSPAEVSSMFLYGDNLRLQQVLSDFLTNALLFTPAFEGSSVALRVIPRRESIGTKVHIVHLEFRIAHPAPGIPEDLIQQMFHHRQGVSREGLGLYINQKLVKIMNGTVQYLREAQGSSFIILIEFPLAHQNSSQ

SEQ ID NO: 15187 - protein, 1124 aa, Vitis riparia
MGLGSRGGERRATHRTPTFSSSAASNMNNPNSRNNTIAQYNADARLLAEFEQSGESGKSFNYSRSVMNAPESVPEDQIIAYLSRIQRGGLVQPFGCMLAIEEPTFRIISYSENSMDFLGLNTLSETTQLKSLIGVDVRTLFTPPSSASLAKAAMSREISLLNPIWVHSRSAQKTFYAILHRIDVGIVIDLEPTRSGDPALSLAGAVQSQKLAVRAISRLQSLPGGDIGVLCDTVVEDVQKLTGYDRVMVYKFHDDDHGEVVSEIRRSDLEPYLGLHYPATDIPQAARFLFKQNRVRIICDCNAKAVRVIQSEELKQPLCLVNSTLRSPHGCHLQYMVNMGCIASLAMAVVINGNDATKLWGLVVCHHTSPRYVPFPLRYACEFLMQAFGLQLYMELQLASQLAEKKILRMQTLLCDMLLREAPLGIVTHSPSIMDLLKCDGAALHYGGRCWLLGVTPTESQVKDIAEWLLTEHGDSTGLSTDSLADAGYPGAALLGDAVCGMATARITSKDFLFWFRSHTAKEVKWGGAKHHPEDKDDGGRMHPRSSFKAFLEVVKSRSLPWEVSEINAIHSLQLIMRDSFQDIEDSSGKVMVHAQKYDSEMQGLNELSSVACEMVKLIETATAPIFGVDSSGCINGWNAKIAELTELQAKEAMGKSLVDEIVHEDLRGAVDNLLCRALQGKEDKNVELKLKKFGLNQQDSALYIVVNACTSRDYTNDIVGVCFVGQDITSEKIVMDKFIRLQGDYKAIVQSLNPLIPPIFASDGNACCSEWNTSLEKLTGWMRHEVIRKMLPGEVFGGLCPLKSQDTLTRFTILLYQAISGQDTEKFPFGFFDKSGKLVEVLLTANKRTDANGNVIGCFCFLQIDTPDKHQGLGDGPEYRECFSKFKELAYIRQEMKNPLNGIRFTHKLLETTATSVYQKQFLETSEACERQMMSIIADIDMGIIEEGSMELNVEEFLLGNVLDAVVSQVMMLLKEKKLQLVCEIPEEIKTLPLSGDQIKLQQVLSDFLHNIVHHAPSSDGWIEIKISTGLKMIQDFNEFIHLQFRMTHIGQGLPPDLIQDMFEGGDQWNTQEGLGLNLSRKLLSAMNGRVQYVREHGKCYFLVEIDLKNRRAREKGKQIQVR

SEQ ID NO: 15188 - protein, 365 aa, Rhodotorula glutinis
MATTVPCQYKTGRTLGQGTYAVVKECVHIKTGKYYACKVINKRLMAGREHMIRNEISVLKAISQGHKNIVTLWDYFETQNNLYLVTDLCQGGELFDRICAKSYFLEEDAAKLVRTVMGAVDYLHSHGIVHRDIKPENLLYRSKDEESDLLLADFGLSKVMDDQQFSALTTTCGTPGYMAPEIFKKLGHGKPVDIWAMGVVTYFLLCGYTPFDRDNQVDEIQAICNADFAFEPEEYWVGVSDTARDFIRRCLVIDQTQRLTAAQALAHPWLAQGAPSTNQPQRPDLLPSLRKNFNAKGTWRRAIMGVRAASALKLGGEHRRATLMAGAGVGEEEQARVREEAERAKRDAEEEAAHVDESASVYAYN

SEQ ID NO: 15189 - protein, 67 aa, Desulfotignum balticum
MANGTVKWFNDAKGFGFIEQEDGGKDVFVHHSGINAMGFKSLNEGDRVSFDISEGQRGPAATNVTVV

SEQ ID NO: 15190 - protein, 356 aa, Medicago truncatula
MSLLSDLINLNLSESSEKIIAEYIWVGGSGMDLRSKARTLPGPVSDPSKLPKWNYDGSSTNQAPGQDSEVILYPQAIFKDPFRQGNNILVICDVYTPAGEPLPTNKRYNAAKIFSHPDVAAEVPWYGIEQEYTLLQKDTNWPLGWPIGGYPGPQGPYYCGIGADKAYGRDIVDAHYKACLYAGINISGINGEVMPGQWEFQVGPSVGISAGDEIWAARYILERITEIAGVVVSFDPKPIPGDWNGAGAHTNYSTKSMRENGGYEIIKKAIEKLGLRHKEHIAAYGEGNERRLTGKHETADINTFSWGVANRGASVRVGRDTEKDGKGYFEDRRPSSNMDPYVVTSMIAETTLLWKP

SEQ ID NO: 15191 - protein, 356 aa, Medicago truncatula
MSLLSDLINLDLSETTEKIIAEYIWIGGSGLDLRSKARTLPGPVTDPSQLPKWNYDGSSTGQAPGEDSEVIIYPQAIFKDPFRRGNNIFVMCDAYTPAGEPIPTNKRHAAAKVFSHPDVVAEVPWYGIEQEYTLLQKDINWPLGWPVGGFPGPQGPYYCGAGADKAFGRDIVDSHYKACLYAGINISGINGEVMPGQWEFQVGPSVGISAGDEIWVARYILERITEIADVVLSFDPKPIKGDWNGAGAHTNYSTKSMREDGGYEVILKAIEKLGKKHKEHIAAYGEGNERRLTGRHETADINTFLWGVANRGASIRVGRDTEKAGKGYFEDRRPSSNMDPYVVTSMIADTTILWKP

SEQ ID NO: 15192 - protein, 902 aa, Papaver rhoeas
MMELILSCSYILCFLLLHIQTTLAQEGFLSINCCSSSNAITNDPSTNISWISDNDSFRNGNGKCKSINYNQNARIFENEFGSKWCYNLTTTKGKDYLIRGTFLHGPLLRSSNDTFFNISIDATSIAQVNSSIDSVEVESIFRATNKHINFCLVRGKGNAYISKLELRPLSNDLVYLRSDPSKVLNVVKRVDLGSKHGVRFPTDPNDRIWIVDEAQKDGTPISSNAQVRNNAETSIPLQVLQTALADDKRLQFGFDNIDDTGKNEYMIALYFLELDDSVSVGQRVFDIYINGELKFENFDILGGEAGSNYREIVLRFTANEFLNVNLIKVSNGSEFGPICNAYEVLQVRSWVQGTLQEDFDAITEVKDELVAQNPENELWGSWTGDPCLPLPWEGLFCIPNNQGSLIITNLDLSWSNLQGSLPSAVTKLSNLEKLDVSHNEFVGSIPESFSSMPHLTRLYFGCNPQFKNDLPSSLMDRSNLTTDSGKCAQASKRSLYFIGTVAGGAVFFSVAFGALFLCFYKKRRKSRSRVEEEIQITNDVVFSIASMDSLFVKSIFIEPFSLDSIETATSKYKTMIGEGGFGSVYHGTLRNGQEVAVKVLSATSTQGTREFENELNLLSSIQHENLVPLLGYCCEKDQQILVYPFMSNGSLQDRLYGEAAKRKTLDWQTRLSVALGAARGLLYLHTFSGRAIIHRDVKSSNILLDHTMTAKVADFGFSKYAPQEGDSNASLEVRGTAGYLDPEYYSTQHLSAKSDVFSFGVVLLEIITGREPLNIHRPRSEWSLVEWAKPLVQESRIEDLVDPSIKAGYNAEAMWRVVEVAITCLEPFSAYRPCMSVIARELEDALIIEINASEYMKSIDSFGGSHRWSFADKKIVLPAPTTPSTTEPSPIISQALAPPEPR

SEQ ID NO: 15193 - protein, 934 aa, Datisca glomerata
MMMEGLHNWVLRLFECLVILCFFTLFGSASAQEGFVSLACCTDSNFTNTNTNISWTPDYNWFSDRTNCTNITKLTVNNADDERSRIFEIDSGKRCYNLTTLKDQEYLIRGTFLGSYSNSSEVTSFTVYVGVTPLDLVHLSLEVEGVFVAKKNYIDFCLEKRNGAPYISYLELRPLHALDYFQGFSSDVLKLISRVNLGNTSLAIRYPDDPSDRIWKPLSNPDPTISSISSPNINVLNYNATVDIPLPVLQTALTHSTQLVFLHSDIETEAYEYRVFFYFLELDETVKPGQRVFDIYINDEKQASGFDILANGSNYKQSVFTVLANGSLNLTFVKSSDGSPLGPTCNAYEILQVRPWIQETNEKDVEVSLNSRDELLAYNKVNEVLKSWSGDPCLPLPWDGLACESINGSSVITKLDLSDHKFEGLFPFSITELPYLKTLNLSYNDFAGKVPSFPASSMLQSVDLSHNKFIGVLPESLASLPYLKTLNFGCNQFGDGNELPPNFNSSRIKTDFGKCDHRGSPRSIQAIIIGTVTCGSFLFTVMVGIIYVCFCRQKFKPRAVFDSSRPVFMKNFIISLSSIDDHVSEPINPKDFPLEFIEDITQKYSTLIGEGGFGSVYRGTLPDGQEVAVKVRSATSTQGTREFENERKLLSLFRNENLVPLLGYCSENDQQILVYPFMSNGSLQDRLYGELSKRKPLDWPTRISIALGAARGLTYLHTYVGGCVIHRDVKSSNILLDQSMCAKVADFGFSKGAPQEGDVASLEVRGTAGYLDPEYYTSHSLSAKSDVFSFGVVLLEIICGREPINVRMPRSEWSLVEWAKPYIRQSRIDEIVDPSIKGGYHAEAMWRVVEVAVACIEPFSAYRPCMADIVRELEDALIIENNASEYMRSIDSMYSLGGSNRFSVGNDKKMGLPPTPCPTEPSPITHDLAPPEPR

SEQ ID NO: 15194 - protein, 933 aa, Populus trichocarpa
MMGRMHVWMLTASVGSFIVSLIHVIHLTCAEKGFVSIACCAESSTFTDNTTISWISDEGWFPIENTGCENITRQAENDANYDRVRIFYIEPGRRICYNFSTTKNQNYLIRATFLFDDSLGASFDVSIGFTPTSNVKLSKDLEVERVFTATHHDVDFCLMNHYGYPYISKLELRPLGDLKYLQGKASGVLKLVSRVDAGNTGNSIRYPDDSFDRIWRRPDPKTVSLSEPTNSTTYIHDVKKTVPAKVLQTALTHTDRLEFLHNELDTQDSNYTVFLYFFELNQSIKTGQRVFDIYINNEIKLGKFDIWAYGSAYREAALNVTASRSLNLTLVKVENASDLGPILNAYEILQWIQGTNQQDVEVIMKVRNELMLNNKENELLQSWSGDPCFPPWKGLKCQNISGSLPVITGLNISSSQFQGPIPASITELSYLKELNLSYNGFTGKIPEFPKSSVLTSVDLSFNDLSGSVPDSLASLTNLKTLYFGCNPLSSTELPSNSSRLITDSGKCSRQGSTKKTLGIVIGAITGGSFLFTLAVGMFCSCFCRNKSRTRRNFDRKSNPMTKNAVFSVASTVSKSINIQSFPLDYLENVTHKYKTLIGEGGFGSVYRGTLPDGQEVAVKVRSSTSTQGTREFDNELTLLSALRHENLVPLLGYCCENDQQILVYPFMSNGSLQDRLYGEAAKRKTLDWPTRLSIALGAARGLTYLHTFSGRCIIHRDVKSSNILLDHSMNAKVTDFGFSKYAPQEGDSGASLEVRGTAGYLDPEYYSTQHLSAKSDVFSFGVVLLEIVSGREPLNIHRPRNEWSLVEWAKPYIRESRIDEIVDPGIKGGYHAEAMWRVVEVALVCIEPFSAYRPCMTDIVRELEDALIIENNASEYMKSIDSLGGYSLGGSNRFGSNRFSISTDKKIALSPPVPTPPDPSPINTQALAPLEPR

SEQ ID NO: 15195 - protein, 507 aa, Solenostemon scutellarioides
MASPLLILFSLPLAVVLYHLFYRLRYRIPPGPRPWPVVGNLYDVKPVRFRCFAEWAQLFGPTFSVWFGSTLNVIVSSSELAKEVLKEKDGQLADRHRSRSAVKLSRDGKDLIWADYGPHYVKVRKVCTVVLFSPKRLELLRPIREDEITVMVESIYQDSAASGKSVVIKKYLASMAFHNITRLVFGKRFVNSEGEVDKQGQEFKAIAINGLKLGASLAVSEHIPWLRWMFPLDEDAFTQHGVRMERLTREIMQEHTLARQKTGGAKQHFFDALLTLKDEYDLSEDTIIALLWDMIAAGMDTPAISVEWAMAELVRNPRVQEKVQEELDRVIGHERIMTELDIPNLPYLQCVVKESLRLHPPTPLMLPHRSNADVKIGGYDIPKGSNVHVNVWAIARDPKSWKDPLEFRPERFLEEDVDIKGHDFRLLPFGAGRRVCPGAQLGIDLATSMIGHLLHHFRWTPPAGVRAEDIDMGENPGTVTYMRTPVEAVPTPRLPADLYKRVAVVDI

SEQ ID NO: 15196 - protein, 1266 aa, Neurospora crassa
MSRSPSPNPGARSVLAEMTVYQPHGGGAWGQQHKYRTPQGKIDEFWTKFTARVPGKRKLTNPAATTVLPKNEYAERLAKRNSAKEVGGGTNAQASFEEAAAICRAKVEKIVQECRRVNQKYRDPHFDLEYDLKTGRRDCLESLSNENIIDFSSSDSDSDYNHLPRPRSHSRRRRRDNGDGDRDQSTQVESQIKTNKTKIDKRDGVSQLSPQGRMPGSKFRPASVKRVGEIFDDPKFYIDGPTANDVRQGRDGDCWLMAALCTMSNKPGLIERICVAHDQDIGVYGFVFHRDGEWFSEIIDDKCENPNETWLPLLEKAYAKAHGDYAAIEGGFTGEGIEDLTGGVTSGLYTADILDKEHFWKEELMKVNEQFLFGCSTGVWGRGYGDRKGIMEQHAYSVMKAVDLDGERLLLLKNPWGKGEWTGPWSDGSKEWTPEWLQKLGHRFGDDGAFWISYRDFLRKFQAFDRTRLFGPDWKVTSIWTTLSVPWTLEYHDTKFAFTLAKPGPVVIVLSQLDDRYFRGLEGQYRFELNFRVHRAGEDDYLVRTQHSSRMNRSINVELDLDAGEYLVLVKIDATRNEWVLPTEDVVRNNARHHREKLLRIGLSYDLAHSKAKIKESPEEKAAREAHEQRKKDKQRESLRKAIMEEKEMNFYSRMKSYQRQKRRADKNKERMKRKTEKRKAKMEKKKAKREEAERKQTEETCRDPLGKQRKEGKDCGFSLDAALHPAGERMAPLAVDTAASTDAGQPTPSVSSTGATEVDVTDRLPEPVLSISLEKNCKAPEGPSTNILTPQSAPTQQQGCRLSAEDDKPSSEQPNEASAQDPIEVRPGLSMDIHKTLEAVPQHSQSPRPTCGESGRGDDRTRAIENKLQAAVNLFSNLKQELELMLTNGVSDNSIKQGQGQKPHNVDNKGQPPPPSPTLRPPAEQRTLQPPRPSSPRPFHPPHPQDQRWRRPLSQLRDRSPRHPLVDPGPSPRRFQQRYGGRPPQRREVFIDDDHQIPPDPRFVDESFSESSSSSADTDDTYSISSISDISDRELDMHIREDARRNGRLLDQGSRNQAILPPLQPQPGPPQSMQPGPIGPGPHPRIRGRDPRGRHGGRGRDGHRNELVDPNAEFEKNPWNAVAVVGLRVYYRVDLDDAATIGDKDAAGVEGGEEKTEMVKLKVIRPNPWETGSDDEKDTKKKKNEERGSKWTRGLKKNRKSKTTEEEKKEKGDGGVETGGNADGAGCDAELKKEEVEKVLDVDDSAKDATLEGEEREKTVAEGQV

SEQ ID NO: 15197 - protein, 572 aa, Neurospora crassa
MSDIEKGSAGSHDKETRVDAATLPAYEAGSVAEAQQEDFMTRNGLNLASFKPRRFHTGDGTEIERTMKSRHLHMIAIGGSIGAGFFVGSGKALHNGGPASLLIDFAIIGVMMFNVVYALGELAVMFPVTGGFYTYSTRFIDPSWGFAMGWNYVFQWAIVLPLELTVCGFTVGYWNQDITVWITIFLVAIIIINVFGTLGYAEEEFWASAFKLGATIVFLIICLVMVLGGGPKGSRYDHYTGAALWYSPGAFANGFRGFCSCFVTAAFAFSGTELVGLAAAEAKNPVKSLPGAIKQVFWRITLFYILGLFFVGLLIPYDDENLLGANPFINVNASPFVLVGKYANLTGFDSFMNVVILVSVLSLGVSCVYGGSRTLTALAQQGYAPKIFTYVDRSNRPLFSVLLIIAFGPLAYVNLAAAGPTVFDWLLSLSGLAALFTWGSICLSHIRFRKAWALKGHSVEEIPFRAAGGVWGSWLGLVLVVLVLIAQFYVAICPPGGGFNTVEGFFVQYLALPVVIVFWIGGFIWKRTSWLRVDQIDVDTGRREHDWESINAYQAELAAMPAWKRWFHKLFV

SEQ ID NO: 15198 - protein, 669 aa, Dunaliella salina
MLNTSFKQTMKGTPVASRQVAGRRMPMTRRGAVAVRAEKVVGIDLGTTNSAVAAMEGGKPTIIANAEGSRTTPSVVAFTKGGDRLVGQIAKRQAVVNPENTFFSVKRFIGRKAGEVGEETKQVPYRVVEGSDRNVKIFSSHAGKEFAPEEISSQVLRKLTADASKFLNDKVEKAVITVPAYFNDSQRQATKDAGKIAGLDVLRIINEPTAASLAYGFDKKANESILVFDLGGGTFDVSVLEVGDGVFEVLSTSGDTHLGGDDFDKRIVDYMADEFNKNEGIDLRKDRQALQRLTEAAEKAKCELSNLTQTSINLPFITATPEGPKHIDTQLSRVKFEELCSDLLSRAKIPVENALRDAKLTMADINEVTLVGGSTRIPSVINVVRTMCGKEPCASVNPDEVVALGAAVQAGVLSGEVSDIVLLDVTPLSLGLETLGGVATKLITRNTTLPTSKSEVFSTAADGQTSVEINVLQGEREFARDNKSLGTFRLDGIPPAPRGMPQIEVKFDIDANGILSVTATDKGSGKKQDIKITGASTLGKDDVERMVAEAERFAGEDKKKREAVDTKNQAESMIYQTEKQLDEFKEKVPEDVKSSIQNRVKELRDSAGADDVEGMKKGIESLQQEVMKMGQAMYGQPSGDAGAAGGQPGPEPPKDSDGGVIDAEYTDKK

SEQ ID NO: 15199 - protein, 440 aa, Arabidopsis thaliana
MYLDINGVMIKQFSFKASLLPFSSNFRQSSAKIHRPIGATMTTVSTQNESTQKPVQVAKRLEKFKTTIFTQMSILAVKHGAINLGQGFPNFDGPDFVKEAAIQAIKDGKNQYARGYGIPQLNSAIAARFREDTGLVVDPEKEVTVTSGCTEAIAAAMLGLINPGDEVILFAPFYDSYEATLSMAGAKVKGITLRPPDFSIPLEELKAAVTNKTRAILMNTPHNPTGKMFTREELETIASLCIENDVLVFSDEVYDKLAFEMDHISIASLPGMYERTVTMNSLGKTFSLTGWKIGWAIAPPHLTWGVRQAHSYLTFATSTPAQWAAVAALKAPESYFKELKRDYNVKKETLVKGLKEVGFTVFPSSGTYFVVADHTPFGMENDVAFCEYLIEEVGVVAIPTSVFYLNPGEGKNLVRFAFCKDEETLRGAIERMKQKLKRKV

SEQ ID NO: 15200 - protein, 549 aa, Arabidopsis thaliana
DDNWQWTDSPPRVDGWDSDPADVDLYDRDDVDWDGQYSSGRKRRSGRDFVMSVDSFARRHRKPRMETQEDINQRMRSVELAVKEALSARGDKQFTDQEFPPNDRSLFVDTQNPPSKLQVVSEWMRPDSIVKENGSDSRPCLFSGDANPSDVCQGRLGDCWFLSAVAVLTEVSRISEVIITPEYNEEGIYTVRFCIQGEWVPVVIDDWIPCESPGKPAFATSRKLNELWVSMVEKAYAKLHGSYEALEGGLVQDALVDLTGGAGEEIDLRSAQAQIDLASGRLWSQLLRFKQEGFLLGAGSPSGSDVHVSSSGIVQGHAYSVLQVREVDGHRLVQIRNPWANEVEWNGPWSDSSPEWTDRMKHKLKHVPQSKEGIFWMSWQDFQIHFRSIYVCRVYPREMRYSVNGQWRGYSAGGCQDYSSWHQNPQFRLRATGSDASLPIHVFITLTQGVGFSRTTPGFRNYQSSHDSQLFYIGLRILKTRGRRAAYNIFLHESVGGTDYVNSREISCEMVLDPDPKGYTIVPTTIHPGEEAPFVLSVFTKASIVLEAL

SEQ ID NO: 15201 - protein, 444 aa, Solanum lycopersicum
MAQSNSKPPMSSQNFGVGAVSHVRSLSQSSIFSNSCLPPLSPFPPSEPGMVSGRSSLKDISMEEADVNSQGVGVVSSFTRDGLPPRKGHRRSNSDVPLGFSAMIQSSPQLMPISGQKVLGRAVSLGDSNGKIDERKPKGEVTDELLFSYMNLENIETLNGSGTKDRDKDSIVSGTKVTGSESSNNEAESVMKGNNVSIQPTNLREGTKRSADANIAPAARHFRSLSMDSAIGNFHYGDESPNLPTSLMMRSGQLSPSNSGNESSSKHNLDFGNSEFSEAEMKKIMADERLAEIAVLDPKRAKRILANRLSAARSKERKTRYISELEHKVQKLQTETTTLSTQVTILQKNFVEISSLNSELKFRIQAMEQQAQLRDALHEALTAEVQRLKLAAGEHREEGRLPNNMTQQTPVKHNIFQMQRQQPSQMQQLSVGKASAASATPASA

SEQ ID NO: 15202 - protein, 556 aa, Arabidopsis thaliana
MERKQSNAHSTFADINEVEDEAEQELQQQENNNNKRFSGNRGPNRGKQRPFRGFSRQVSLETGFSVLNRESRERDDKKSLPRSGRSFGGFESGGIINGGDGRKTDFSMFRTKSTLSKQKSLLPSIIRERDIENSLRTEDGETKDDSINENVSAGRYFAALRGPELDEVKDNEDILLPKEEQWPFLLRFPIGCFGICLGLSSQAVLWLALAKSPATNFLHITPLINLVVWLFSLVVLVSVSFTYILKCIFYFEAVKREYFHPVRVNFFFAPWVVCMFLAISVPPMFSPNRKYLHPAIWCVFMGPYFFLELKIYGQWLSGGKRRLCKVANPSSHLSVVGNFVGAILASKVGWDEVAKFLWAVGFAHYLVVFVTLYQRLPTSEALPKELHPVYSMFIAAPSAASIAWNTIYGQFDGCSRTCFFIALFLYISLVARINFFTGFKFSVAWWSYTFPMTTASVATIKYAEAVPGYPSRALALTLSFISTAMVCVLFVSTLLHAFVWQTLFPNDLAIAITKRKLTREKKPFKRAYDLKRWTKQALAKKISAEKDFEAEEESHH

SEQ ID NO: 15203 - protein, 384 aa, Arabidopsis thaliana
MENTDELVSIELPAPASWKKLFYPKRAGTPRKTEIVFVAPTGEEISSRKQLEQYLKAHPGNPVISEFEWTTGETPRRSSRISQKVKATTPTPDKEPLLKKRRSSLTKKDNKEAAEKNEEAAVKENMDVDKDGKTENAEAEKEKEKEGVTEIAEAEKENNEGEKTEAEKVNKEGEKTEAGKEGQTEIAEAEKEKEGEKAEAENKEAEVVRDKKESMEVDTSELEKKAGSGEGAEEPSKVEGLKDTEMKEAQEVVTEADVEKKPAEEKTENKGSVTTEANGEQNVTLGEPNLDADAEADKGKESKEYDEKTTEAEANKENDTQESDEKKTEAAANKENETQESDVKKTEAAVAEEKSNDMKAEDTNRSLEANQVQQQQGAAASVSC

SEQ ID NO: 15204 - protein, 529 aa, Vitis thunbergii
MAQNDTSSFSSKVVAPSRPTIALPPRSSMDAFFFAATSPGPMTLVSSFFSDNYPDSDCRSFSQLLAGAMASPGARPTLLSGNSTNHEGSGDGAEKSSLGFRQNRPLSLAVARSPMFSIPPGLSPSGLLNSPGFFSPLQSPFGMSHQQALAQVTAQAALSQSHMFIQAEYQPSSLEAPVESLAQDPSFITDATTHQQVPPLPSDPKSSMMESSEVSHSDRKSQPPSLVVDKPGDDGYNWRKYGQKQVKGSEYPRSYYKCTHLNCPVKKKVERSHDGQITEIIYKGQHNHEVPKPNKRAKDGNDLNGHANSQSKPELGSQGQMGSLNRPNETVPANSVPGMDQETTQAMPLQVNGSSDSEEVGDAETRVKEDDDDDEPNPKRRNTEVAAPAEVVSSHKTVTEPRIIVQTRSEVDLLDDGYRWRKYGQKVVKGNPHPRSYYKCTSLGCNVRKHVERASTDPKAVITTYEGKHNHDVPAARNSSHNTANSNATQLKQHNVVAEKRALLKEMGFRNKDKKPVALLQLKEEQIAV

SEQ ID NO: 15205 - protein, 603 aa, Vitis thunbergii
MGSSSGSLETSANSHPLFSFSSFMSTSYSDLLTSADEDTVTTTTGDKGAVGRGLSDRIAERTGSGVPKFKSIPPPSLPISPPPISPSSYFSIPAGLSPAELLDSPVLLSTSNILPSPTTGTFPSQGFNWRSNSNSNQQDVKREDKNYLDFSFQPQARPSTTSASMFQPSTTTITTEQALRGQQPAWSFQEPTKQDSFSSEKTTVKSEFGSYQSFSPEIATIQTNTQSNGNGNNGFQSDYGSYHASSQSIREQRRSEDGYNWRKYGQKQVKGSENPRSYYKCTYPNCPTKKKVERSLEGQVTEIVYKGTHNHPKPQSTRRSSLSSSQTIQASNPPNNEVPDQPFVAHGTGQMDSVATPENSSISMGDDDFEQSSQKSKSGGDDFDEDEPEAKRWKKESENEGISAPGSRTVREPRVVVQTTSDIDILDDGYRWRKYGQKVVKGNPNPRSYYKCTNPGCPVRKHVERASHDLRAVITTYEGKHNHDVPAARGSGSHSVNRPLPLPDTTAAATTNNNMPMAIRPSTMTHLPNNSTTNPLRHVRHPTSEAQAAPFTLEMLQSPDGFGFSNFGNSMATYMNQPQHQDNVFSRTKEEPRDDMLFESLLC

SEQ ID NO: 15206 - protein, 365 aa, Mycobacterium marinum M
MFTQTLTQTLAKRVLGSGLVDLLTGPHGIDRYTELVEPTWTLGEARAKLIDVRRTTPRSVTLTLAPNDTFRSAMAAGTGPMAGQYVNLTVDIDGRRHTRCYSPANAEGSETLELTIGRHDGGLVSTYLCDHARRGMVVGLAGVGGDFVLPQRRPRRILFVSGGSGITPVLAMLRTLVAQHHLHIHGAEIAFIHYARNPAEACYRAELAALPGVRVLHGYTQSGGGDLVGRFGPDHLAAAMDAPDAVFVCGPTTLVDAVRENCENVFTESFVPAPIEAPAQPSGGRVRFADSGIDVVDDGRSLLEQAESAGLAPENGCRMGICHTCTRRKTSGTVRNLVTGAVSVAPDEDVQVCVSVPVGDVDLSL

SEQ ID NO: 15207 - protein, 362 aa, Mycobacterium marinum M
MTDPQTTVGVVAESTPDERRVALVPKAVGSLVNSGVAVVVESGAGERALLPDDLYTEAGATIGDAWAADVVVKVAPPSADEVGKLRSGQTLIGFLAPRNADNSIGALKQAGVQAFALEAIPRISRAQVMDALSSQANVAGYKAVLLAASESTRFFPMLTTAAGTVKPATVLVLGVGVAGLQALATAKRLGARTTGYDVRPEVADQVRSVGAQWLNIGIDAAGEGGYARELTDEERAQQQKALETAISGFDVVITTALVPGRPAPRLVTAAAVEAMKPGSVVVDLAGETGGNCELTEPGRVVVKHDVTIASPLNLPATMPEHASELYSKNITALLDLLLTDGKLAPDFDDEVIADSCVTRGDD

SEQ ID NO: 15208 - protein, 320 aa, Mycobacterium marinum M
MNQPLRVLAHFVPGEKVLEFVAAQRDWLDIRWCAEDDDSGFYRELDHAEVIWHVLRPLSGADLQRAPRLRLVQKLGAGVNTIDVATATKHGIAVANMPGANAPSVAEGTVLLMLAALRRLPELDAATRQGRGWPTDPQLGESVRDIGSCTVGLIGYGNIAKRVATIVSAMGATVLHTSTRDDGRPGWRPLPELLATSDIVSLHLPLTPHTDRLLDADALAQMKPNSLLINTSRGAVIDEDALVDALRSGSLAAAGLDVFAVEPVVPENPLLRLDNVVLTPHVTWYTVDTMRRYLTEAVDNCRRLRDGLSLANVVNCQADC

SEQ ID NO: 15209 - protein, 476 aa, Mycobacterium marinum M
MPPLDTAATARLTREDRGYHKSLKNRQLQMIALGGAIGTGLFLGAGGRLASAGPGLFLVYGICGFFVFLILRALGELVLHRPSSGSFVSYAREFFGEKVAFVAGWMYFLNWAMTGVVDTTAIAHYCHYWKALQFVPQWTLALVALVSVLLMNLISVKLFGELEFWAALIKVIALVIFLIIGSIFLAGRYHVDGQETGLGLWRSHGGFLPTGLVPLVLVTSGVVFAYAAIELVGTAAGEAAEPEKIMPRAINSVVFRIGLFYIGSTVLLALLLPYTAYREHVSPFVTFFSKVGIEGAGSVMNLVVLTAALSSLNAGLYSTGRILRSMAINGSGPKFTAPMSKNGVPYGGILLTAGIGTLGIVLNAVKPSQAFEIVLHIAATGVIAAWATIVACQLRFHRLTISGVLQRPSFRMPWSPYSGWITLAFLASVLILMLFDEVYGRWMLAAILVGVPALIGGWYLVRNRVQVAARDTVASE

SEQ ID NO: 15210 - protein, 622 aa, Mycobacterium marinum M
MARAVGIDLGTTNSVVAVLEGGDPVVVANSEGSRTTPSVVAFARNGEVLVGQPAKNQAVTNVDRTIRSVKRHMGGDWSIEIDDKKYTAPEISARVLMKLKRDAEAYLGEDIADAVITVPAYFNDAQRQATKDAGQIAGLNVLRIVNEPTAAALAYGLDKGEKEQTILVFDLGGGTFDVSLLEIGEGVVEVRATSGDNHLGGDDWDDRVVEWLVDKFKGTSGIDLTKDKMAMQRLREAAEKAKIELSSSQSTSINLPYITVDADKNPLFLDEQLTRAEFQRITQDLLDRTRKPFQSVIADTGISVSDIDHVVLVGGSTRMPAVTELVKELTGGKEPNKGVNPDEVVAVGAALQAGVLKGEVKDVLLLDVTPLSLGIETKGGVMTKLIERNTTIPTKRSETFTTADDNQPSVQIQVYQGEREIAAHNKLLGSFELTGIPPAPRGVPQIEVTFDIDANGIVHVTAKDKGTGKENTIRIQEGSGLSKDEIDRMIKDAEAHAAEDHKRREEADVRNQAETLVYQTEKFVKEQREAEGGSKVPEDTLNKVDAAVAEAKSALAGTDIAAIKSAMEKLGEESQALGQAIYEATQADAAAAGAPGGQPGGAEPGADDVVDAEVVDDDQESK

SEQ ID NO: 15211 - protein, 393 aa, Mycobacterium marinum M
MGLEDRDALRVLRDAFAPQPDLDHKTQSSELVRSFYTNWFSLDSSVRDLFPPEMSGQRAAFTRALHWVYSELVAQRAEEPIAFLAQLGRDHRKYGVQPTQYETLRRALQTTLRSHLGSSWTDSVARAAEQSLNLIVGVMSGAADSEDGPAWWDATVIEHIPASRDLAVIRLQLDHPMPYHPGQYVNVQVPQCPRRWRYLSPAIPADLEGRIEFHVRVVPGGLVSTAMVNETRTGDRWRLASPHGGLHVDRTGGDVLMVAGSTGLAPLRALILDMGRFVENPRVHLFFGARYFCELYDLRTLWQVAAHNPWLSVSPVAEYKLDPSWATDYPDVSPPRGLHVRQTGRLAEVVTNYGNWGDRQILICGGPAMVRTTKAALIAKGAPRERIQHDPLP

SEQ ID NO: 15212 - protein, 848 aa, Mycobacterium marinum M
MDSFNPTTKTQAALTSALQAASAAGNPEIRPAHLLMALLTQADGIAAPLLEAVGVDPATIRTEAQRLVDRLPQASGASTQPQLSRESLAAITTAQQLATEMDDEYVSTEHVLVGLATGDSEVAKLLTGHGASPQALREAFVKVRGSARVTSPEPEATYQALEKYSTDLTARAREGKLDPVIGRDNEIRRVVQVLSRRTKNNPVLIGEPGVGKTAIVEGLAQRIVAGDVPESLRDKTIVALDLGSMVAGSKYRGEFEERLKAVLDDIKNSAGQIITFIDELHTIVGAGATGEGAMDAGNMIKPMLARGELRLVGATTLDEYRKHIEKDAALERRFQQVYVGEPSAEDTIGILRGLKDRYEVHHGVRITDSALVAAATLSDRYITARFLPDKAIDLVDEAASRLRMEIDSRPVEIDEVERLVRRLEIEEMALSKEEDDASKDRLEKLRAELADKKEELAELTTRWQNEKNSIEIVRELKEQLDALRGESERAERDGDLAKAAELRYGRIPEMEKKLDAAVPHAQAREQVMLKEEVGPDDIAEVVSAWTGIPAGRMLEGETAKLLRMEDELGHRVIGQKKAVQAVSDAVRRSRAGVADPNRPTGSFMFLGPTGVGKTELAKALAEFLFDDERAMVRIDMSEYGEKHSVARLVGAPPGYIGYDQGGQLTEAVRRRPYTVILFDEIEKAHPDVFDVLLQVLDEGRLTDGQGRTVDFRNTILILTSNLGSGGTPDQVMAAVRAAFKPEFINRLDDVLIFDALNPDELVQIVDIQLQQLDKRLAQRRLQLEVSLPAKEWLAQRGFDPVYGARPLRRLVQQAIGDQLAKMLLAGQVHDGDTVPVNVSADGESLVLG

SEQ ID NO: 15213 - protein, 162 aa, Mycobacterium marinum M
MSRIRLLRAKLHQVRVTHRERDYVGSIAVDVDLMEQVGMLPLEEVEVVNLENGNRWSTYLIPADRGSSRICPNGGGALLCEPGDRLIIFSYATVRSGALRRRPHVARVLLSDADNRVESLFEQVLEQDDDRLRYSVRGCYGDIPAQPDLLLRAETQLLDGPH

SEQ ID NO: 15214 - protein, 694 aa, Mycobacterium marinum M
MSTGSGATGIYIAAPEPESGKSTIALGILHRLAATVAKVGVFRPITRRGERRDYILELLLEQTTAGLSYEQCVGVTYQQLHDDLEAAIADIVAAYHAMADACDAVVIVGSDYTDVTTPTELSVNARIAVNLGAPVLLAVSAKGRDADQVSGVVAVCLAELAAQHAHTAAVVANRCEPAQLAAVGDALRAFAPPSYVLPEEQLLSAPTVSELEKSVNGTPISGDASLWGREVTSLLVAGMTADHVLERLRDGMAVITPGDRSDVVLAVASAHAAEGFPSLSCIVLNGGFELHPSIASLVAGLRLRLPIIGTDLGTFDTASAAATARGRVKATSQRKIDTALGLMDRYVDIEDLLAKLAIPIPTVTTPQMFMYRVQQQARSDRQRIVLPEGEDDRILKSAGRLLQRNVADLTILGDEAEIRLRAAELGVSLDSATVIDPRTSSLCNEFADQYAQLRKAKGITHEQAREIMNDATYFGTMLVYNGMADGMVSGAAHTTAHTVRPALQIIRTVPGVSTVSSIFLMCLPDRVLAYGDCAIIPNPTVEELADIAVCSARTAAQFGVEPRVAMLSYSTGASGSGADVDKVRAATELVRERDPQLMVEGPIQYDAAVDLSVAATKMRDSAVAGRATVLIFPDLNTGNNTYKAVQRSAGAVAIGPVLQGLRKPVNDLSRGALVEDIVNTVAITAIQAQGVHER

SEQ ID NO: 15215 - protein, 388 aa, Mycobacterium marinum M
MSASRPNRVVLVLNSGSSSLKFQLVEPDSGMSRATGNIERIGEESSSVPDHDAALRRVFEILAEDDIDLQSCGLVAVGHRVVHGGKDFYEPTLLNDAVIGKLDELSPLAPLHNPPAVLCIRVARALLPDVPHIAVFDTAFFHQLPPAAATYAIDRELADVWKIRRYGFHGTSHEYVSQQAAEFLGKPIGDLNQIVLHLGNGASASAVAGGRPVETSMGLTPLEGLVMGTRSGDLDPGVIGYLWRTAKLGVDEIESMLNHRSGMLGLAGERDFRRLRAMIDDGDPAAELAYDVFIHRLRKYVGAYLAVLGHTDVVSFTAGIGEHDAAVRRDTLAGMAELGISLDERRNACPSGGARRISADDSPVTVLVIPTNEELAIARHCCSVLVAV

SEQ ID NO: 15216 - protein, 445 aa, Mycobacterium marinum M
MAVTTGARSELQKALGQRSAVLFGLAYMTPIIVLGIFGVIAERSKGASAGSYLLATVAMLFTAQSYGVMARHFPVAGSAYTYVRKALDARVGFMVGWAVLLDYLFLPLVIWLIGGSYLQDRFPTVPFWTWIVGFAALTTVLNLIGLKVADRANFILMTFQLLILAFFVALTIGYLVGDSRSLLSLTPFTGNGGFTAITAGAAVAAYSFLGFDAVSTLTEETHDAERTIPRAIVLIALIGGAIFVTVAYVVSLVAPGSSFPDADSLSEGVARTIGGNLFAAVFLAALIIGQFTSGLAAQAAVSRLLYAMGRDGVLPRRVFGVVSAKFHTPMFNIMLTGAVGMAAILLSVATSTSFINFGAFTAFTLVNVSVVVYFVRERGAGLPRWRYLVLPVIGAAVDIYLLAHLASDALIVGLSWAAIGFLYLLWLTRGLTRQPPDLAGAAERG

SEQ ID NO: 15217 - protein, 294 aa, Mycobacterium marinum M
MTKSCQIAFLGLGHMGAPMSANLIGAGHTVRGFDPVPAAASAAAAKGATMFDSAAEAVAGADVVITMLPNGAVVKRCYAEVLPAARSGALFIDSSTISVNDAREVHALAESHGMAQLDAPVSGGVKGAVAGTLAFMVGGDQSALAQARPVLEPMAGKIIHCGAAGAGQAAKVCNNMVLAVQQIAIGEAFVLAENLGLDAQSLFDVITGATGNCWAVHTNCPVPGPVPTSPANNDFKPGFATALMNKDLGLAMDAVTSTGSAAPLGSHAAEIYAKFAADHADQDFSAVIEMLRGS

SEQ ID NO: 15218 - protein, 514 aa, Mycobacterium marinum M
MKPRSVAAVLGGGMAGVAGWDLWQRRHAILRNFPIIGHLRFLLEAVGPELRQYIVTDNNEERPFSRDQRRWVYTSSKLTNRYFGFGTDNDLERAHNYPIIKHAAFPVSAPDGEPAHPDPAVALPAAKVLGGARGRAKAFRPSSLVNISGMSYGALGGAAISALNQGAAIAGALHTTGEGAVSPYHLNGGDLVWQIGTGYFGCRNDDGTFSLSRLIDRVAATPSIRAIEIKLSQGAKPGLGGMLPGAKVTADIAAIRGIPVGVDCKSPAGHSAFADIDGMLELVETIADATGLPVGIKSAVGEGLFWPQLAARMARTGRGVDFVTVDGGEGGTGAAPLVFSDHVALPFKWAFPRVFRAFAEEDLHHDVVFIGSAKLGIPENALLALTMGVDMINVGRTAMFAIGCIQAQRCHTGRCPSGVATQSAWLQHGLDPALKAVRCANYLATLRFELLSLARACGYVHPALVPLQAIELLDVDLQTVQVDDLFGYQPGWGIPSPADVAAITALMTKASPPR

SEQ ID NO: 15219 - protein, 494 aa, Mycobacterium marinum M
MAGRLRTKSVEQSIADTDEPETRLRKDLTWRDLVVFGVSVVIGAGIFTVTASTAGDITGPAIWISFLIAAGTCALAALCYAEFASTLPVAGSAYTFSYATFGEFLAWVIGWNLVLELAIGAAVVAKGWSSYLGTVFGFSGGTADFGSIRLDWGALLIVSIVSLLVAYGTKLSSRFSAVVTTIKVAVVILVVVVGAFYVKAANYSPFIPEPEAGPEGRGADQSLLSLLTGAPGSHYGWYGVLAGASIVFFAFIGFDIVATMAEETKHPQRDVPRGILVSLGVVTLLYVAVSIVLSGMVSYTQLRTVSGGGHANLATAFKANGVYWASGIISVGALAGLTTVVMVLMLGQCRVLFAMARDGLLPRQLAKTGARGTPVRITVLVAVVVGATASVFPITKLEEMVNVGTLFAFVLVSAGVIVLRKKRPDLERGFRAPWVPVLPIASLCACLWLMLNLTALTWIRFGVWLLVGTVIYVGYGRKHSMVGRRQLAEAAMDK

SEQ ID NO: 15220 - protein, 384 aa, Mycobacterium marinum M
MVKKNAALSAQIIDTKRPNIVGADKHPGWHALRKIASRITTPLLPDDYLQLANPLWSARELRGRILEVRRETEDSATLVIKPGWGFSFDYQPGQYIGIGLLVDGRWRWRSYSLTSSPVGGKSGPGSARTVTITVKAMPEGFLSTHLVAGVAPGTIVRLVAPQGNFVLPDPAPPSMLFLTAGSGITPVMSMLRTLLRRNQITDITHLHSVPTEADVMFGDELAGVAAQHPGYRLSVRATRSQGRLDLSRIGEQVPDWRERQTWACGPESMLNQAEKVWSAAGIGDRLHLERFAVSKAAPAGAGGTVTFARSGRSVDVDAATSVMDAGERAGVQMPFGCRMGICQSCVVDLVQGHVRDLRTGQEHDPGSRVQTCVTAASGDCVIDV

SEQ ID NO: 15221 - protein, 393 aa, Mycobacterium marinum M
MSQSRDAVIVGAVRTPIGKGKANGALHQVLPADLLAHSLRELAARTGVDPVQVDDVIAGAVTQVGDQAVNIARNALLGAGFPESVPGVTIDRQCGSSQQAISFAAQGVLAGAYDLVIAGGVESMSRVPMGTSVLPGSNPFGADMNNRYPDGLVPQGISAELIAARWGLSRTQLDEFSAASHDKAARATKDGLFDNELIPIAGLTHDEIIRPGTTVDTLAALRPAFYSDAIKERFPQINWSITPGNSSPLSDGSAAVMITSSDVARKLGLRPLARIHTTTVVGSDPLYMLTGVIAATEKALRRAGLALRDIDLFEVNEAFAPVVLAWAKDTGADLAKTNVNGGAIAIGHPLGASGARIMTTLVNALEQRGGRYGLQTMCEGGGMANATIIERLG

SEQ ID NO: 15222 - protein, 517 aa, Mycobacterium marinum M
MTALKSTTETTPKTFAELGVRDEIVRALGERDIECPFAIQELTLPLALAGDDLIGQARTGMGKTFAFGVPLLQRVSSGTGVRPLTGAPRALVVVPTRELCLQVTEDLAVAAKYLTATTETGDQRPLSVVSIYGGRAYEPQIEALRAGADVVVGTPGRLLDLSQQGHLQLGGLSVLVLDEADEMLDLGFLPDIERILRQIPADRQSMLFSATMPDPIITLARTFMIQPTHIRAEAPHSLAVHDTTEQFVYRAHALDKVELVTRVLQARERGATMIFTRTKRTAQKVADELNERGFAVGAVHGDLGQVAREKALKSFRSGSVNVLVATDVAARGIDIDDVTHVINYQCPEDEKMYVHRIGRTGRAGRTGVAVTLVDWDELPRWTMIDKALGLGSPDPAETYSSSPHLYTELSIPTDAAGTVGPPSKSGSKPRTTEKQDDQQGEKSGRARSDAGRRRRTRGGKPVTGHPATTPVASGETATETGSGSGASSPSGNAGATRRRRRRRKPAGVQDNAAASAN

SEQ ID NO: 15223 - protein, 413 aa, Mycobacterium marinum M
MAVTEDPVIRELSAAVERSPEVVELRLHLAALLADRGRHAEALGHCSAVLAKDAANAEALSLLQRCSAALAAPAEVVPAQQQQQAPDTAGFDWSKAEKQVADIIEPAFVEAPPDVVGEGDFDVVQRSQVRLADIAGMADAKQQLELSLLGPLRNPELMKAYKVSARGGLLLYGPPGCGKSYLAKAVSGELGASFYQVGIADVLHRWFGDSERSIRAVFDNARRNAPCVLFFDEVDALGHRRSALSGSAGLRTVVNSILEELDSAASSNDGVYVLGATNAPWDVDPALRRPGRFDRMIFVGLPDAEARAGIVRLHLRDRPVAGIDPRAIANRTEGFSGADLAHICDSATQIAMAESMRAGQVRPVTMTDIDAAAAQIRPSTGPWFETARNVVEFANNDGTYDDLAKYLRRRKIR

SEQ ID NO: 15224 - protein, 393 aa, Mycobacterium marinum M
MVYLDHAATTPMHPTAIEAMMAVLATVGNASSLHTTGRAARRRLEESRELIAAKLGARPSEVIFTAGGTESDNLAVKGMYWARRDAQPARRRIVTTRVEHHAVLDTVDWLVEHEGAEVTWLPTDADGSVSASALRDALESHDDVALVSVMWANNEVGTIMPIAELAGVAAEFGVPMHSDAVQAVGQVPVDFGACGLAAMSVTAHKFGGPPGAGALLMRRDVSCVPLLHGGGQERDIRSGTPDVASAVGMAAAARIAVDGLEANSARLQTLRDRLVAGVLAEIDDVRLNGARDPLRLPGNAHFTFRGCEGDALLMLLDANGIECSTGSACTAGVAQPSHVLIAMGADPASARGSLRLSLGHTTVEADVDAALQVLPAAVARARSAAVAAAGAAW

SEQ ID NO: 15225 - protein, 618 aa, Mycobacterium marinum M
MSAPTKRHSPTSEPQPRGVAAGVNSSPVHSKHVAPEQLTGAQSVIRSLEELDVEIIFGIPGGAVLPVYDPLFDSQKLRHVLVRHEQGAGHAASGYAHATGKVGVCMATSGPGATNLVTPLADAQMDSIPVVAITGQVGRGLIGTDAFQEADISGITMPITKHNFLVRTGDDIPRVLAEAFHIAASGRPGAVLVDIPKDVLQAQCTFSWPPQMDLPGYKPNTKPHNRQIREAAKLIGAARKPVLYVGGGVIRGEATEQLAELAELTGIPVVTTLMARGAFPDSHRQNMGMPGMHGTVAAVAALQRSDLLIALGTRFDDRVTGKLDSFAPEAKVIHADIDPAEIGKNRNADVPIVGDVQAVITELIAMLRHYDIPGNIEMSEWLAYLEGVRATYPLSYGPQSDGSLGPEYVIEKLGEIAGPDAIYVAGVGQHQMWAAQFIKYEKPRTWLNSGGLGTMGFAIPAAMGAKIALPDTEVWAIDGDGCFQMTNQELATCAIEGIPIKVALINNGNLGMVRQWQNLFYEERYSQTDLATHSHRIPDFVKLAEALGCVGLRCEREEDVADVINQAREISDRPVVIDFIVGADAQVWPMVAAGTSNDEIQAARGIRPLFDDESEGHA

SEQ ID NO: 15226 - protein, 528 aa, Mycobacterium marinum M
MNLPVVLIADKLAQSTVAALGDQVEVRWVDGPDREKLLAAVPEADALLVRSATTVDAEVLAAATKLKIVARAGVGLDNVDVDAATTRGVLVVNAPTSNIHSAAEHAMALLLAAARQIPAADASLREHTWKRSSFSGAEIFGKTVGVVGLGRIGQLVAQRVEAFGAHVVAYDPYVSPARAAQLGIELLPLDDLLARADFISVHLPKTPETAGLLGKEALAKTKPGVIIVNAARGGLIDESALAEAITSGHVRGAGLDVFATEPCTDSPLFELPQVVVTPHLGASTAEAQDRAGTDVAASVKLALAGEFVPDAVNIAGGAVNEEVAPWLDLACKLGVLAAALSDEPPVSLSVQARGELASEDVEVLKLSALRGLFSAVVEGPVTFVNAPALAAERGVSVEISKASESPNHRSVVDVRVVGADGSVVSVSGTLYGAQLTHKIVQINGRHFDLRAEGTNLIVNYVDQPGALGKIGTLLGAAGVNIHAAQLSEDVEGPGATVLLRLDQDVPEDVRSAIAAAVGANRLEVVDLS

SEQ ID NO: 15227 - protein, 477 aa, Mycobacterium marinum M
MSDFPIMGVPDTGDTAWMLASSALVLLMTPGLAFFYGGMVRAKSVLNMIMMSISAMGVVTVLWVLYGYSVAFGNDMGGVAGNPTEYLGLKGLIGGNGAPADPATQTAAVDIPLAGSLPMTVFVAFQLMFAIITVALISGAVADRLKFGAWLLFAGLWATFVYFPVAHWVFSFDGVTAATGGWIANKLHAIDFAGGTAVHINAGVAGLVLALVLGKRRGWPTTLFRPHNLPFVMLGAGLLWFGWYGFNAGSATSSNGTAATTFVTTTVATAAAMLAWLLTERIRDGKATTLGAASGIVAGLVAITPSCSSVNVLGALVVGAVAGVLCALAVGLKFRLGFDDSLDVVGVHLVGGLAGTLLVGLMAAPESPAINGVEGVSKGLFYGGGFDQLVRQAVGASSVLIYSGVVTFILALILKYTIGLRLGPEQESAGIDEAEHAENGYDFAVASGSVLPRPGIVADSRNGLEERVGEKVEAEPK

SEQ ID NO: 15228 - protein, 371 aa, Mycobacterium marinum M
MRVGIPTETKDNEFRVAITPAGVAALTKRGHEVLIQAGAGEGSAISDSDFKAAGAQLISTADQVWADADLLLKVKEPIESEYGRLRRGQTLFTYLHLAASRPCTDALLKSGTTSIAYETVQTADGALPLLAPMSEVAGRLSAQAGAYHLMRTHGGRGVLMGGVPGVKPADVVVIGAGTAGYNAARVANGMGAMVTVLDVNINKLRQIDAEFGGRVRTRYSSTLDLEDAAVNADLLIGAVLVPGAKAPKLIPNSLVARMKKGAVLVDISIDQGGCFEDSRPTTHTSPTFTVHDTVFYCVANMPGAAPRTSTYALTNATMPYVLKLADLGWQAACLSDSALAKGLSTHEGALLADHVAADLDLPFTDPANVLG

SEQ ID NO: 15229 - protein, 360 aa, Mycobacterium marinum M
MAVSESSWTSRPADLYGRSHRDRFATALWGVRTMFGGFARFSRWNPSRVTPVGRTHRARVVERELVAPDVVALTLADPDGGLLPSWSPGGHIDVQLPSGRRRQYSLCGPPGRRTDYRIAVRRIADGGGGSIEMHAAYQPGDILVFEGPRNAFYLGAAEHDMLFVIGGIGVTPILPMVALAHQRGVNWRAMYAGRSREYMPLLDELVAMAPERVSVWADDEHGRFAQVEDLVAGAGPKTAVYVCGPPPMLEAVRAARAEYPCAPLHYERFSPPPVVDGVPFELELARTGEVLSIPANRTALDVMLDRDPTTAYSCQQGFCGTCKVKVLAGQVDHRGRAAQGDDEMLVCVSRGHSARVVIDA

SEQ ID NO: 15230 - protein, 462 aa, Mycobacterium marinum M
MSQPTGEPRLRRALGVAGLVAFGLAYIDPLAMFDTFGVVSQTTHGHVPTAYVVTFVAMLFTAASYAVLVHAYPSAGSAYTFARRSFGGNVGFLTGWALMLDYLLLPLVNYLLIGIYLNAQFPAVPAPVFCLAAIALVTTVNIVGVVIMNRLNFALVGLQLAFVLVFITVSLLYLRDHPDASLLQPLYSAGFRGGDILGGAAVVALSFVGFDAVSTMAEEARNPRRTVPLAIILTVLIGGATFLSVSYCATLVEPDYRAITTPNSAALQIVVSAGGHSLQTFFIIAYMCACSAAALSSQVSVTRILYAMGRDGVLPRAVFGRISRRFRTPIGAALVVSAVSTLALIADLETMASIVSFGALAAFTLVHLAVTKHFLIDQRRRGWRSWALYAAMPAVGVVLTGWLWTSLSVGAFAIGFAWLGIGTSYLAVLTRGFRKPAPAVDFDADAAPIQTEIDLTKEGTLQ

SEQ ID NO: 15231 - protein, 260 aa, Mycobacterium marinum M
MTTLIIKDLHVSVENPNAAEGEREIPILKGVDLTVKSGETHALMGPNGSGKSTLSYAIAGHPKYQVTSGSITLDGADVLEMSVDERARAGLFLAMQYPVEVPGVSVSNFLRSAATAIRGEAPKLRHWVKEVKAAMAALEIDPVFAERSVNEGFSGGEKKRHEILQLELLKPKIAILDETDSGLDVDALRVVSEGVNRYAEAEHGGILLITHYTRILRYIRPEFVHVFVGGRIAESGGPELADELEQNGYVRFTQAAAAGA

SEQ ID NO: 15232 - protein, 497 aa, Mycobacterium marinum M
MAAPTIGLIQQMLRRRPVIGAPVAHGASDQLKRSIGTFQLTLFGVGATVGTGIFFVLSEAVPEAGPGVVASFVIAGIAAGLAAVCYAELASAVPVSGSTYSYAYTTLGELVAMGVAACLLLEYGVSTAAVAVGWSQYVNKLLDNFFGHHLPQALSAAPWGDASPGIINLPAVVLVGLCAVLLIRGASESAKVNTIMVLIKLSVLVMFAVIALTAFDADRFAEFAPFGVAGIGAAAGTIFFSYIGLDAVSTAGDEVKNPQKTMPLAIMAALVTVTTVYVVVTVAALGAQPWRDFEGQQAGLATVLDRVVSGHYWGSVLAAGAVISIFSVTLVVLYGQTRILFAMGRDGLLPPVFAKVRPPNMTPVYNTIIVAVVICILAGFVPLSYLADVVSIGTLVAFIVVSVGVVILRVREPDLPRGFKVPLYPVTPVLSVLACGYILFSLPWYTWLAFSIWVSVVLVFYFVWGRHHSALNDGGDGVIGAMPADAGDSDVLAQRDH

SEQ ID NO: 15233 - protein, 398 aa, Mycobacterium marinum M
MSERVILAYSGGLDTSVAISWIGKETGREVVAVAIDLGQGGEDMEVVRQRALDCGAVEAVVVDARDEFAEGYCLPTILNNALYMDRYPLVSAISRPLIVKHLVEAAREHGGGIVAHGCTGKGNDQVRFEVGFASLAPDLEVLAPVRDYAWTREKAIAFAEENAIPINVTKRSPFSIDQNVWGRAVETGFLEHLWNAPTKDVYSYTEDPTVNWNTPDEVIVGFERGMPVSIDGNAVTMLQAIEELNRRAGAQGVGRLDVVEDRLVGIKSREIYEAPGAMVLITAHAELEHVTLERELARFKRHTDQRWAELVYDGLWYSPLKTALESFVAKTQEHVSGEIRLVLHGGHIAVNGRRSAESLYDFNLATYDEGDTFDQSAAKGFVYVHGLSSKLSARRDLQ

SEQ ID NO: 15234 - protein, 428 aa, Mycobacterium marinum M
MKTVWRNWAGEQYCAPSEIVRPASEAELAELVAKAGQRGERVRAVGSGHSFTDCACTDGVMVDMAGMQRIVNVDPEAGLATVEGGAKLRPLFSQLAEHGLALENQGDIDKQSITGATATATHGTGARFANVSAQIVALRLVTASGEVLELSEGDDYLAARVSIGALGVISQLTLKVVPLFTLHRDDELKPLAETLERLDEHVDNNDHFEFFVFPYAETALTRTTRRSEEPPMPVPEWRRRVGDQFENVGLGLVCRTGRQFPSTAPKLNRLLTSLMSPSSVQDRGWKVYPSPRNVKFTEMEYAIPRENAREAVRRVIEVVRRRDLPIMYPLEVRFSAPDDAFLSTAYERDTCYIAVHQYTGMEFETYFRAVEAIMDEYGGRPHWGKRHYQRAASLRERYPAWDRFTAVRDRLDPNRVFLNDYTRRVLGA

SEQ ID NO: 15235 - protein, 598 aa, Mycobacterium marinum M
MALPDLPDSDSGRPNVVAEAWRSIKPSVFIPASLVIVTMIVVSVVYAQTAANAFVKLNAAITAGVGWWYILVATAFVVFALYCGISQIGTIRLGSDDEVPEYGFWAWLAMLFSAGMGIGLVFYGVAEPLSHYAHPPQSRGVPALTDAAANQAMALTLFHWGLHAWAIYVVVGLGMAYMTYRRGRPLSVRWLLEPVLGRRRVEGVLGHAVDVVAIVGTLFGVATSLGFGITQIASGLEYLGWIKTNNWWIIAMIGAITAAATASVVSGVSKGLKWLSNINMALAALLALFVLLLGPTLFLLQSWVQNLGGYAQSLPQFMLRTAPFSHDSWLGNWTIFYWGWWISWAPFVGMFIARISRGRTIREFIGAVLLVPTVIASLWFTIFGDAALLRQRNDGDMLVNGAVDTNTSLFRLLGDLPIGVITSVLAVVVIVFFFITSSDSGSLVIDILSAGGELDPPKLTRVYWAVLEGTAAAILLLVGGSGSLTALQTASIATALPFSIVMVVACYAMLKAFRFDLLTTPRLLHVTVPDVVSDNGRQRRDISATLAGLIAVRDVDSGTYSVHPDTGALTVTTPPDPLGGHMFDTSEQDGQRNTTSSA

SEQ ID NO: 15236 - protein, 149 aa, Mycobacterium marinum M
MQRTVLGGKIHRATVTQADLNYVGSITLDADLMAASGIVEGEQVHVLDITNGARLVTYAIAGPGGSGVVGINGAAAHLIAPGDLVIIMSYLIVGEEERCGHSAKVVHVDAVNSIVGLGSDPAQPVPGALAESVSGPISGRDLFGAADAL

SEQ ID NO: 15237 - protein, 664 aa, Mycobacterium marinum M
MCGLLAFVAAPAGAAETQGTDTQLAQADQAALAARADSAIAGASHLMRHRGPDEPGTWADPDADGSVVFGFNRLSIIDIEHSHQPLRWGPPEAPDRYVLVFNGEIYNYLELREELRAEHGATFATDGDGEAIVAGYHHWGADVLRRLRGMFAFALWDTVTRELFCARDPFGIKPLFMATGPGGTALASEKKCLLDLVDLVGFDTEIDHRALQHYTVLQYVPEPETLHRGVRRLESGCYARIRPGCNPVVTRYFVPRFAATPITSATERARYDEITAVLEDSVAKHMRADVTVGSFLSGGIDSTAIAALAIRHNPRLITFTTGFEREGFSELDVAVASAEAIGARHIAKVVSAEEFVAALPEIVWYLDEPVADPALVPLFFVAREARKHVKVVLSGEGADELFGGYTIYREPLSLKPFDYLPRPLRRSMGKVSKPLPEGMRGKSLLHRGSLTLEERYYGNARSFSDAQLQDVLPGFRPQWTHTDVTAAVYAGSAGWDPVARMQHIDLFTWLRGDILVKADKMTMANSLELRVPFLDPEVFAVAARLPLQAKITRTTTKYALRRALEPIVPAHVLHRPKLGFPVPIRHWLRAGELLEWAYAMVTTSQAGHLIDLAAVNRMLDEHRTGASDHSRRLWTLLIFMLWHAIFIERSITPQISEPQYPVEL

SEQ ID NO: 15238 - protein, 558 aa, Mycobacterium marinum M
MAPSNTSEQIVAALAAEGVEYVFGIPGDENLHFMEALRNDGRIKFILFRHEQAAGFAAAAYGRLTGKLAVAMSTLGAGAMNLTTPVAHAYLTAMPMLVITGQKAVRDNRMGQYQIVDVVDVMRHITKFAAKIPSGRMAGSLLRQAMMSALGERQGPAHLELPDDVARETELGPLVPCWHGDIPVATQDSIETAARLIRDARRPLIMVGGGTRANRPAVAAAVRALIEKTQIPFVATMMGKGVANEDDPRYLGCSIMPGDYPNCAITTADVILNVGHDVLEKPTFFMQPDDGRTVIHLNPFAAQGDNSYFPQAQVVGDMADALHRLTEQLCPNPAWDHDGFHRLAKAMQDSIKRASTDTSFPAKQGYLIATLRDFMADDDILSLDNGIHMMWATRNFNARQPNTMLIDHALGSMGISLPAAIAAKLVHPDRKVVVVTGDGGFAMNSQDLETAVRLGLDLIIVVFNDNGLGMIALKQMSDGFGRYGVDFTNPDFVGFAHSYGATGHRLDDPARFREVLDQAAAAGGVHIIDAPVDPQQNMALMMEMRSVDCEKLLAGSQQ

SEQ ID NO: 15239 - protein, 555 aa, Mycobacterium marinum M
MTTARPAKTRNEGQWALGQLDPLNDTEQIKHDDGPLNVRDRILNKYAKEGFDSIEKTDLRLRFKWMGLYTQREQGYDGSWTGDENIDKLEAKYFMMRVRSDGKPMSAQTVRVLGQISSEFGRDTADIGDRENVQFHWLRIEDVPEIWRRLESVGLSSIEACGDCPRGIHGSPLAGDSLDEVLDPSPAIDEIIRRFLGNPDYANLPRKYKSAISGLQDVSHETHDVAFVGVNHPEHGPGMDLWVGGGLSTNPMMAQRVGVWVPLDEVPDVWEAVTQVFRDYGYRRLRAKARIKFLVKDWGVEKFREVMETEYLKRKLIDGPAPEPIKHPIDHVGVQKIKNGLNAVGVAAIAGRVTGTTLQAVADLMERVGSDRARFSPFQKLIILDVPDDKVDELVTGLDKLGLPSKPSGWRKNTMACTGIEFCKLSFAETRVRAQSLVPELEERMADVESKIDVPITLHINGCPNSCARIQVADIGFKGQWIDDGEGNSVEGFQVHLGGGLGEQSGFGRKLRQHKVTSDELGDYIDRVTRKFLDQREEGERFANWALRADEADLR

SEQ ID NO: 15240 - protein, 489 aa, Mycobacterium marinum M
MPATSIRLREQMLRRRPVGGAPVAEGAAGSLKRSFGTFELTMFGVGSTVGTGIFFVLAEAVPEAGPAVIVSFIIAGVAAGLAAICYAELASAVPVSGSSYSYAYATLGEAVAMGVASCLLLEYGVATAAVAVGWSGYVNKLLHNVFGFQLPQALSEAPWDERPGEAAGYLNLPAIILIGLCALLLIRGVSESAKVNAIMVLIKLGVLGMFVILALTAYDTNHLKDFAPFGVAGVGAAAGTIFFSFIGLDAVSTAGEEVRNPQQSVPRALIAALFVVTGVYVLVAFAALGTQPWQMFAGQEEAGLATILDNVTHSAWASTVLAMGAVISIFTVTLVTMYGQTRILFAMGRDGLLPARFAAVHPRFQTPVSNTVVVAIAAAVLAALVPLNRLADMVSIGTLTAFIVVSVGVIILRVREPALPRGFWVPGYPVTPILSILACGYLLYSLHWYTWIAFGGWVGIALIFYLFWGRHHSRLNAPALHDNPTGEER

SEQ ID NO: 15241 - protein, 300 aa, Mycobacterium marinum M
MTSEFHSGFVCLVGRPNTGKSTLTNALVGTKVAITSMRPQTTRHTIRGIVHRESFQIILVDTPGLHRPRTLLGKRLNDLVRDTYSEVDVIGLCIPADESIGPGDRWIIEQIAATAPKVKLVVIVTKIDKVPKDQVAAQLVAVSELVTNSAEIVPVSAVTGAQVEVLIDVLARTLPQGPAYYPDGELTDEPEEVLMAELIREAALEGVHDELPHSLAVVIDEVSPREGREDLIDVHAVLYVERDSQKGIIIGKGGARLREVGTAARSQIEKLLGTKIYLDLRVKVAKNWQRDPKQLGRLGF

SEQ ID NO: 15242 - protein, 555 aa, Mycobacterium marinum M
MTTARPAKPRNEGQWALGNREPLNANEELKKAGNPLDVRERIENIYAKAGFDSIDKSDLRGLFRWWGLYTQREQGYDGSWTGDENIDKLEAKYFMLRVRCDGGALSAAALRTLGAISTEFARDTADISDRENLQYHWIEVEKVPEIWRRLDEVGLHTTEACGDCPRVVLGSPLAGESLDEVLDPTWAIDEIVRRYIGKPDFADLPRKYKTAISGLQDVVHEVNDVAFIGVNHPEHGPGLDLWVGGGLSTNPMLAKRVGAWVPLEEVPEVWAAVTSVFRDYGYRRLRSKARLKFLIKDWGIEKFREVLETEYLKRPLIDGPAPEPAKHPIDHVGVQRLKNGHNAVGVSPIAGRVSGTILTAVAELAERAGSDRIRFTPYQKLVILDIPDDKLDETIAGLQALGLRAQPSHWRRNLMACSGIEFCKLSFAETRVRAQSLVPELEERLDDLNSTLDVPVTVNINGCPNSCARIQVADIGFKGQMVDDGAGGQVEGFQVHLGGSLGLDSGFGRKLRQHKVTSDELGDYIDRVVRNFVKNRAAGERFAQWAIRAEEDDLR

SEQ ID NO: 15243 - protein, 479 aa, Mycobacterium marinum M
MPRFVDRVVIHTRAGSGGNGCASVHREKFKPLGGPDGGNGGRGGSVVFVVDPQVHTLLDFHFRPHVTAASGKQGMGSNRDGAAGADLEVKVPDGTVVLDDNGRLLADLVGAGTRFEAAAGGRGGLGNAALASRARKAPGFALLGEPGQARDLTLELKTVADVGLVGFPSAGKSSLVSVISAAKPKIADYPFTTLVPNLGVVAAGGHSFIVADVPGLIPGASQGRGLGLDFLRHIERCAVLVHVVDCATAEPGRDPISDIDALEAELAAYQPTLQGDAVLDDLAERPRAVVLNKIDVPEARELAEFVEDELAQRGWPVFLVSTVTRENLQPLIFGLWQMVSEYNAARPQAAPRRPVIRPVPVDDSGFDVQADGHGGFVVTGARPERWIGQTNFDNDEAVGYLADRLARLGVEEELLRLGAKPGCAVTIGEMTFDWEPQTPAGGHVAMSGRGTDVRLERSDRVGAAERKAARRQRRERDDD

SEQ ID NO: 15244 - protein, 407 aa, Mycobacterium marinum M
MSAAMRQAVICEPVRTPIGRYGGMFKSHSAVDLGVVALRGLLDRTGLAPAAVGDVILGHCYPSSEAPAIGRVVALDAGLPVTVPGMQVDRRCGSGLQAVIQACQQVSSGDSDLVVAGGCESMSNVTFYSTDMRWGGARGGIRVHDGLARGRVTAGGRHYPVPGGMLETAENLRRQYGISRLEQDELAVTSHQRAVAAQKDGIFAEETIAVPVRTRQGEELIDTDEHPRADTSVEALSGLKPILHQDDPEATVTAGNASGQNDAASVCVVTTPEKADEYGLRPLVRLVSWGLAGVAPDVMGIGPVPATEAALAKAALRLADIDLIELNEAFAAQALAVMREWNFGAADRDRTNVHGSGISLGHPVGATGARMLATLARELTRRQARYGLETMCIGGGQGLAAIFERVG

SEQ ID NO: 15245 - protein, 393 aa, Mycobacterium marinum M
MTTSVIVAGARTPIGRLMGSLKDFSASDLGAIAIKAALEKGNVPASLVEYVIMGQVLTAGAGQMPARQAAVAAGIGWDVPALTINKMCLSGIDAIALADQLIRAGEFEVVVAGGQESMTKAPHLLMDSRSGYKYGDVTVLDHMAYDGLHDAFTDQPMGALTEQRNDVDGFTRRQQDEYSAASHQKAAAAWKDGVFADEVVPVSVPQRKGDPLQFSEDEGIRANTTADSLACLKPAFRKDGTVTAGSSSQISDGAAAVVVMSKEKAQELGLTWLVEIGAHGVAAGPDSTLQSQPANAIKKALDKEGITADQLDVVEINEAFAAVALASTKELGLDPEIVNVNGGAIAFGHPIGMSGARITLHVALELARRGSGYGVAALCGGGGQGDALILRAG

SEQ ID NO: 15246 - protein, 571 aa, Mycobacterium marinum M
MANPENPPAVPPATFADLQIHPSVMRAIADVGYESPTGIQAATIPALMAGSDVVGLAQTGTGKTAAFAIPILSKIDTTSTATQALVLAPTRELALQVAEAFSRYGAHLSRLNVLPVYGGSSYAIQLAGLRRGAQVVVGTPGRVIDHLERRTLDLSRVDYLVLDEADEMLTMGFAEDVERILSETPEYKQVALFSATMPPAIRKITTRYLHDPLEVKSEAKTATAENISQRYIQVAGPRKMDALTRVLEVEPFEAMIVFVRTKQATEEVAEKLRARGFSAAAINGDIPQGQRERTITALRDGGIDILVATDVAARGLDVERISHVLNYDIPHDTESYVHRIGRTGRAGRSGAALLFVSPRERHLLKLIEKATRQTLTEAELPTVEDVNAQRVAKFADSITHALSNTGIELFRRLVEDYEREHNVPMADIAAALALQSRDGEEFLLAPDPPPDQRERHPRNERKERPERRRSGGAFSTYRISVGKRHKVGPGAIVGAIANEGGLHRSDFGHITIGPDFSLVELPVKLPRETLKKLEQTRISGVLINLRPDRPADKAYKARRNDGGKPRRKRLG

SEQ ID NO: 15247 - protein, 421 aa, Mycobacterium marinum M
MDYVGHNGHPLVDRVETENVAGRIEGLVRIPISKATAHEVISISYGFFTPLSGFMGRREVDETLDNMQLPDGTLWSIPIVFDLSAADIDSYGLKEGGSAVLEYLGAPMAIFDITEIYEYDLDQMAEKTYGTTDLRHPGVKKTKAYKDRFIGGGITLINEPVFNAPFSNFWLTPRQHRDALRKKGWKNVVAHQTRNVPHTGHEALMKQAWFAANEDQSVDTLKTGILVNAIIGQKRVGDYIDEAILLAQDALRTNGYFRENVHMVSFTLWDMRYAGPREAIFHAILRTNLGCTHHMFGRDHAGVGDFYDPYDAQNLLKQHRDELSIKPVFLRENWYCPECMEVTNSALCGHDSKAQSFSGSVIRSILTDEVKPTQRVMRHEVFEVVMDCAAKHGQGSPFVSESYLNDRMPVFELEQLEEFDA

SEQ ID NO: 15248 - protein, 382 aa, Mycobacterium marinum M
MAEAVIVEAVRSPVGKRNGALSGVHPADLSAQVLNGLADKAGIDPEIVDDVIWGCVMQAGEQALDIARTSLLTAGWPETVPGVTVDRQCGSSQQSVHFAAAGVVAGHYDVVVAGGVESMSRTPMGSSLANGGRPYSQTFLERYDGRIPNQGLGAEMIAEQWGLSRTMLDEFSLMSHEKAAAAQDSGAFDDQIVGIKDQDGNPVLKDEGIRRGTPMEKMAALKPAFKEDGVIHAGNSSQISDGSAALLFMSAEKAKSLGMKPIARVHTAVLAGADPVIMLTAPIPATQKVLKRSGLSIGDIGAYEVNEAFAPVPLAWLRDIGADENRLNPNGGAIALGHPLGGSGARLMTTLLYHMRDNGIRYGLQTMCEGGGQANATVLELL

SEQ ID NO: 15249 - protein, 410 aa, Mycobacterium marinum M
MEGAVMPEAVIVSTARSPIGRAMKGSLVSMRPDDLAVQMVRAALDKVPALNPHQIDDLIMGCGLPGGESGFNIGRVVAVALGYDFLPGTTVNRYCSSSLQTTRMAFHAIKAGEGDAFISAGVETVSRFGKGNSDSLPDTKNPLFDEAQERTAAAAAGAEEWHDPRADGNLPDVYIAMGQTAENVAIISGISREDQDHWGVRSQNRAEEAIKSGFFEREISPVTLPDGTTVSTDDGPRAGTTYEKVSQLKPVFRPNGTVTAGNACPLNDGAAAVVITSDTKAKELGLTPLARIVSTGVSGLSPEIMGLGPIEACKKALQRAGMSISDIDLVEINEAFAVQVLGSARELGIDEDKLNVSGGAIALGHPFGMTGARITTTLLNNLQTHDKTFGLETMCVGGGQGMAMVIERLS

SEQ ID NO: 15250 - protein, 326 aa, Mycobacterium marinum M
MSHDWTDNRKNLMLFSGRAHPELAEQVAKELDVHVTAQTAREFANGEIFVRFQESVRGCDAFVLQSCPAPVNTWLMEQLIMIDALKRGSAKRITAVMPFYPYARQDKKHRGREPISARLVADLLKTAGADRIVTVDLHTDQIQGFFDGPVDHMRGQNLLTGYIRDNYSDNNMVVVSPDSGRVRIAEKWADALGGVPLAFIHKTRDPRVPNQVVSNRVVGDVAGRTCVLIDDMIDTGGTIAGAVQLLRNDGAGDVIIAATHGVLSDPAAERLAACGAREVIVTNTLPITEAKRFPQLTVLSIAPLLASTIRAVFENGSVTGLFDGDA

SEQ ID NO: 15251 - protein, 566 aa, Mycobacterium marinum M
MTLLENDAATDPVYTVGDYLLDRLAELGVSEIFGVPGDYNLEFLDHIVAHPTIRWVGSANELNAGYAADGYGRLRGMSAVVTTFGVGELSATNAIAGSYAEHVPVVHIVGGPSKDAQGARRALHHSLGDGDFEHFFRISREITCAQANLMPATACREIDRVLCEVREQKRPGYLLLSTDVARFPTEPPGAPLPPLAGGTSPRALSLFTRAAADLIGDHQLTVLADLLVHRLQAVKELEAVLSADVVPHATLMWGKSLLDESSANFLGIYAGAASAEPVRTAIECAPVLVTAGVVFTDMVSGFFSQRIDPARTIDIGQYQSSVADQVFAPLEMGAALQAVATILTKRGINSPPVAVPPAEPGPPTPGRDEPLNQEMLWNRLCEALTPGNVVLADQGTSFYGMADHRLPQGVTFIGQPLWGSIGYTLPAALGAAVAHPDRRTVLLIGDGAAQLTVQELGIFSREGLSPVIVVVNNDGYTVERAIHGETATYNDIVSWRWTDVPGALGVTNHLAMRAENYGELDDALTAAAEQQDRMVVVEAVLPRLDVPPLLDELVGSLSPPECGGRS

SEQ ID NO: 15252 - protein, 386 aa, Mycobacterium marinum M
MGGTGRETVIVEAVRTAVGKRNGGLSGMHAADLSAVVLNELLERAGVGPEIVDDVIWGCVSQVGDQSSNIGRYAVLAAGWPETIPGTTVNRACGSSQQALDFAVQAVMSGQQDVVVAGGVEVMSRVPLGAARATGMPYGPKVLARYDNFSFNQGLSAELIAKKWGFSRDRLDEYSALSHQRAAAAQDRGAFTDQIVPVFPAAATVVDTDEGVRRGTTVEKLAGLKPAFVEDGLIHAGNSSQISDGSAALLVTTSEMALELGLTPIVRYRAGAVTGADPVLMLTGPIPATEKVLGKSGVSLDEVGVFEVNEAFAPVPLAWLAETGADPGRLNPLGGAIALGHPLGASGAVLMTRMVHHMRDNGIRYGLQTMCEGGGTANATLVELLS

SEQ ID NO: 15253 - protein, 494 aa, Mycobacterium marinum M
MRTPSSPTHPDDIALASEDAGYHKSLKPRQLQMIAIGGAIGTGLFLGAGGRLASAGPALFLVYAVCGVFAFLILRALGELVLHRPSSGSFVSYAREFFGEKAAYVAGWMYFLNWAMTSIVDSTAIATYFHFWRVFEGIPQWALALFALGIALSMNLISVTLFGEIEFWAALIKVVSLLTFLVVGTIFLAGRYPVDGHSTGLGLLAHGGGLFPYGLLPLVVVTSGVVFAYAAVELVGTAAGETAEPEKVMPRAINSVIARIALFYVGSLFLLGLLLPYTDYKAGESPFVTFFDKIGVTGAGSIMNVVVMTAAFSSLNAGLYSTGRILRSMAMNGSAPSFTARMSQRGVPYGGICLTAAIGLIGVLLNGVVPEMAFEIVLNIAALGILASWATIVCCQIQLFRWSKQGIVYRPSFRMWGAPYTGYLTLVFLFAVLVLMGFSYPIGTWTVATLGLIIPMLIGGWFLVRDRVLEIARRRIGYTGEFPVVANPGPMDKK

SEQ ID NO: 15254 - protein, 67 aa, Mycobacterium marinum M
MAQGTVKWFNGEKGFGFITPDDGTKDLFVHYSEIQGSGYRSLEENQRVQFEVEQGTKGPQAVGVSAV

SEQ ID NO: 15255 - protein, 524 aa, Mycobacterium marinum M
MLLTTLTVAFDGQHVVKRFFTPRARPAFGADAGAVRISAIDFAHRQFRHLVLTERAYLAAHSAEPILKDIKLTTGTTFADLGVGESLIEVLAARGISHPFPIQIETLPDTLGGRDVLGRGKTGSGKTLAFSLPMVSRLAGRPRRPARPTGLVLAPTRELASQITATLQPLAAVNGLRVTTIFGGVPQGRQVTALNSGVDIVVACPGRLEDLMKQRLISLDSIEITVIDEADHMADLGFLPGVTRILAATPSGGQRLLFSATLDNGVDKLVNRFLHDAVLHSVDSSDSPVPQMVHHVFHVSGAAAKKDLVHRLASGTGRRILFMRTKHQARKLAKQLTESGVPAVDLHGNLSQPARDRNLAAFSKGEARVLVATDIAARGVHVDGIELVVHIDPPAEHKAYLHRSGRTARAGNAGDVVTVVLPEQRKDTHALMRRAGIRVTPQEVTADSAAVHELVGDIAPYQAPAPKQVAAPKKAGAPKKGAAPKKGAAPRNGAAPHGSPRPRSAGSGGRRRGPRPGRMRQETS

SEQ ID NO: 15256 - protein, 288 aa, Mycobacterium marinum M
MSEHPKLGYIGLGNQGAPMAKRLLDWPGGLVVYDVRAEAMTPLAEAGASAAASVAEVAGADIISVTVLNDAQVREVITGANGLAAHARAGTIIAIHSTISDTTAEELARELRPRGIHVIDAPVSGGAGAASKGQLATMVGAGDDVFARVKEPFSCWASLVVHAGPPGAGTRMKLARNMLTFTIYAAVGEAWKLAEASGVNLQDLGNVVRHTDKLTSGAGSIMFRDNTKDLEPGHFLYDGFVHARDLGEKDLGLALALGEALSVDLPLARLALERLAPGLGVPHTQKDA

SEQ ID NO: 15257 - protein, 388 aa, Mycobacterium marinum M
MKAVIIGAGIGGMSAAIALRQIGIDTEVYERVTENKPVGAAISVWSNGVKCLNYLGLEQQTARLGGIVETMSYAEAHSGETMCRISMQPLIEQVGQRPYPIARAELQQMLMEAYGIDEIHFGMKMVEVANRDGAATATFADGTIASADILIGADGANSITREYVLGGPVTRRYAGYVNYNGLVEVDEAISPANEWTMYVGDGKRVSAMPVADDRFYFFFDVVEPEGLPFEKGTAREVLREQFAGWAPGVQALIDKLDPTTTNRVEILDLDPFHTWVKGRVAVLGDAAHNTTPDIGQGGCSAMEDAVALQWALKDNPTDVAAALAAYQASRTERAGDLVLRARKRCDVIHAKDPDTTAAWYEELRNEDGTNIIRGLVANIMGGPLTPLS

SEQ ID NO: 15258 - protein, 500 aa, Mycobacterium marinum M
MGPGGRQSAEPASTEVFGDSDFVVVANRLPVDQERLPDGTIAWKRSPGGLVTALEPLLRRRRGAWVGWAGVVENDVDVQDEPIVQDELQLQPVRLSADDVAQYYEGFSNATLWPLYHDVIVRPIYHREWWDRYVDVNRRFAEATARAAARGGTVWVQDYQLQLVPKMLRAMRPDLTIGFFLHIPFPPVELFMQLPWRTEIIQGLLGADLVGFHLPGGAQNFLILSRRLVGADTSRGTVGVRSRFGEVILGSRTIRVGAFPISIDSGALDQTARDRNIRRRSREIRAELGNPRKILLGVDRLDYTKGIDVRLKAFSELLAEGRVKRDDTVLVQLATPSRERVESYQTLRNDIERQVGHINGEYAEVGHPVVHYLHRPVPRNELIAFFVASDVMLVTPLRDGMNLVAKEYVACRSDLGGALVLSEFTGAAAELRHAYLVNPHDLEGVKDGIEEALNQTEEAGRRRMRSMRRQVLAHDVDRWARSFLDALADSRPNDSADAAD

SEQ ID NO: 15259 - protein, 673 aa, Mycobacterium marinum M
MSTIDAVNRAAPDSSAHHALPDPGETVPKLALPTLGIFLAALGSFVLTTVGYIDGWVPFWVTIPVNAAVTFVMFTVVHDASHYSVSSVRWVNGLFGRLAFLFVGPVVAFPAFGYIHIQHHRHSNDDVEDPDTFASHGSPWLLPLRWSLVEYYYLKYYIPRARSRPVVEFAETLFMFALSITGLTIAIVTGNFWTLAVVFLIPQRIGLTVLAWWFDWLPHHGLEDTQRTNRYRATRNRVGAEWLFTPVLLSQNYHLVHHLHPSVPFYRYVRTWKRNEEAYLERNAAISTVFGQQLNPDEYRQWKELNGRLAKLLPVRMPARSSSPHAVLHRIPVASVDPITTDSTLVTFAVPEDLQDAFRFEPGQHVTVRTDLGGQGVRRNYSICAPATRAQLRIAVKHIPGGAFSTFVANDLKAGDVLELMTPTGQFGTPLNPLERKHYVGLVAGSGITPVLSILATTLEIEAESRFTLIYGNRTKESTMFRAELDRLESRYADRLEILHVMSNEPLHTPELRGRIDTEKLNRWLTSNLSPETVDEWFICGPMEMTTTVRDSLIEHGVDTEHIHLELFFGYNTAPATDHGYEGATVTFTLSGRQDTFDLTPGDSILEGALQRRSDAPYACMGGACGTCRAKLIEGNVEMDHNFALGQAELDAGYILTCQSHPTTPFVAVDYDS

SEQ ID NO: 15260 - protein, 358 aa, Mycobacterium marinum M
MTDAIPDEPLGSHVLELQIAEVVAETDDARSLVFAVPDGSDDPRIPPERLRYAPGQFLTLRVPSERTGSVARCYSLCSSPFTDDALTVTVKRTADGYASNWLCDNAHQGMRIHVLAPSGNFVPKTLDDDFLLLAAGSGITPIMSICKSTLAEGSGQVTLLYANRDERSVIFADALRELSAKYPDRLTVVHWLESLQGLPSATALAQLAAPFTGRTAFICGPGPFMEAARVALQTLDVPAGQVHIEVFKSLESDPFAAVTVEDSAAEPPATAVVELDGQTHTVSWPRSAKLLDVLLAAGLDAPFSCREGHCGACAATLRSGKVNMEVNDVLEQQDLDDGLILACQSHPESDSVEVTYDE

SEQ ID NO: 15261 - protein, 143 aa, Mycobacterium marinum M
MLRTMLKSKIHRATVTQADLHYVGSVTIDADLMDAADLLEGEQVTIVDIDNGARLVTYAITGERGSGVIGINGAAAHLVHPGDLVILIAYGTMQDAEARAYQPRIVFVDADNKQIDVGHDPAFVPAFDIPGAEELLNPRIGAR

SEQ ID NO: 15262 - protein, 272 aa, Mycobacterium marinum M
MTSAWPNLPDRPDQPDKEAPVNATVALTPEVGPSWLRPLVDNIDRVPDAVRRRLPADVLAMVTAASSTASLRRDERDAAVLVLFSGPESADGRVPTDADLLLTVRASTLRHHAGQAAFPGGASDPGDDGPVATALREAHEETGLDVSRLHPLVTMERTFIAPSRFHVVPVLAYSADPGPVNVINEAETAIVARVPVRAFINPANRLMVYRRTLSRRWAGPAFLLNQMLVWGFTGQVISAVLDVAGWSEPWDTSDLRELDDAMALVGEQGGLR

SEQ ID NO: 15263 - protein, 224 aa, Mycobacterium marinum M
MDEILARAGIFQGVEPGAVAALTKQLQPVDFPRGHTVFAEGEPGDRLYIIVAGKVKIGRRSPDGRENLLTIMGPSDMFGELSIFDPGPRTSSATTITEVRAVSMDRDALRAWIADRPEIAEQLLRVLARRLRRTNNNLADLIFTDVPGRVAKQLLQLAQRFGTQEGGAMRVTHDLTQEEIAQLVGASRETVNKALADFAHRGWIRLEGKSVLISDSERLARRAR

SEQ ID NO: 15264 - protein, 421 aa, Mycobacterium marinum M
MALVVQKYGGSSVGNAERIRRVAERIVETKKQGNDVVVVVSAMGDTTDDLMDLALQVCPVPPPRELDMLLTAGERISNALVAMAIESLGAHARSFTGSQAGVITTGTHGNAKIIEVTPGRLQAALDEGRIVLVAGFQGVSQDSKDVTTLGRGGSDTTAVALAAALGADVCEIYTDVDGIFSADPRIVHNARKLDTVTFEEMLEMAACGAKVLMLRCVEYARRHNIPVHVRSSYSDKPGTLVVGSIKDIAMEDPILTGVAHDRSEAKVTIVGIPDIPGYAAKVFRAVAEADVNIDMVLQNVSKVEDGRTDITFTCSRDSGPTAVAKLDLLKDEVGFTQLLYDDHIGKLSLIGAGMRSHPGVTATFCEALAAVGVNIELISTSEIRISVLCRDTELDKAVVALHEAFGLGGEETATVYAGTGR

SEQ ID NO: 15265 - protein, 344 aa, Mycobacterium marinum M
MSQPASHGFGQDHVPRVAILDDYARVATDLADWSPVRGRATLTVFDRHLGQAEAAEALADFDAVCTMRERMAFPRSLLERLPRLKLITIVGMNLPNLDLAAATERGVLVAHSNFAHPRFRAARDATAEFAWGLLIATVRNLAEEHRQLRAGGWQTTTGMTLSGKTLGLLGLGRVGKRMTEYAKAFGMDVIAWSQNLTEEAAAAHGVRRVDKPVLFAQSDVVSIHVVLSERTRALVGAGELAAMKPGAYLINTSRGPIVDEGALIGALEAGRIAGAGLDVYDVEPLPVDHRLRSLPNVTLSPHLGYVTREMLSACYADTVEAVVAWLDGAPIRIANPQAVQRPPS

SEQ ID NO: 15266 - protein, 1527 aa, Mycobacterium marinum M
MTPKRVGLYNPAFEHDSCGVAMVVDMHGRRSRDIVDKAITALLNLEHRGAAGAEPRSGDGAGILIQVPDAFLREVVDFELPAPGSYATGIAFLPQSSKDAAAACAAVEKIAEAEGLQVLGWRNVPTDDSSLGALSRDAMPTFRQVFLAGASDMTLERRCYVIRKRAEHELGTKGPGQDGPGRETVYFPSLSGRTFVYKGMLTTPQLKAFYLDLQDDRLTSALGIVHSRFSTNTFPSWPLAHPFRRIAHNGEINTVTGNENWMRAREALIKTDVFGTEANVEKLFPICTPGASDTARFDEVLELLHLGGRSLAHAVLMMIPEAWERHASMDPSRRAFYQYHSSLMEPWDGPASMTFTDGTIIGAVLDRNGLRPSRIWVTEDGLVVMASEAGVLDLDPSTVVQRMRLQPGRMFLVDTAQGRIVSDEEIKAELAAEHPYQEWLDNNLVPLEKLPSGEYARMAHERVVLRQLVFGYTYEELNLLVAPMVRTGAEPIGSMGTDTPIAVLSRRPRMLYDYFQQLFAQVTNPPLDAIREEVVTSLQGTTGGERDLLNPDENSCHQIQLPQPILRNHELAKLINLDPETVINGRPHGLKSKVVRCLYPVAEGGAGLAAALNEVRAQASAAIADGARIIVLSDRESDERMAPIPALLAVAGVHHHLVRERSRTKVGLVVESGDAREVHHMAMLLGCGAAAVNPYLAFESIEDMLDRGVIDGIDRNTALSNYVKAAGKGVLKVMSKMGISTLASYTGAQLFQAVGVSEEVLNEYFSGLTCATGGITLDDIAADVATRHTLAYLDRPDERAHRELEVGGEYQWRREGEYHLFNPETVFKLQHSTRTGQYKIFKEYTRLVDDQSERMASLRGLLKFRAGVRPPIPLDEVEPASEIVKRFSTGAMSFGSISAEAHETLAIAMNRLGGRSNSGEGGEDVGRFEQDPNGDWRRSAIKQVASARFGVTSHYLTNCTDIQIKMAQGAKPGEGGQLPGHKVYPWVAKVRHSTPGVGLISPPPHHDIYSIEDLAQLIHDLKNANPSARVHVKLVSENGVGTVAAGVSKAHADVVLISGHDGGTGATPLTSMKHAGAPWELGLAETQQTLLLNGLRDRIVVQVDGQLKTGRDVMIATLLGGEEFGFATAPLVVAGCIMMRVCHLDTCPVGVATQNPLLRERFNGKPEFVENFFMFIAEEVREYMAQLGFRTINEAVGQAGALDTTLARAHWKAHRLDLTPVLHEPESAFMNQDLYCSSSQDHGLDKALDQQLIVMSREALDSGKPVRFATTISNVNRTVGTMLGHEVTKAYGGQGLPDGSIDITFEGSAGNSFGAFVPKGITLRIYGDANDYVGKGLSGGRIVVRPSDNAPPGYVAEDNIIGGNVILFGATSGEVFLRGVVGERFAVRNSGAHAVVEGVGDHGCEYMTGGRVVILGQTGRNFAAGMSGGIAYVYDPDGELPDNLNTEMVDVETLDDDDSEFVHGIVQAHVDATDSAVGQRVLADWPQQQRHFVKVMPRDYKRVLQAIAEAERDGVDIDKAIMAASHG

SEQ ID NO: 15267 - protein, 371 aa, Mycobacterium marinum M
MSFLFDFFSLDFVYYPVSWIMWVWYKLFALVLGPSNFFAWALSVMFLVFTLRALLYKPFVRQIRTTRQMQELQPQIKALQKKYGKDRQRMALEMQKLQREHGFNPILGCLPMLAQIPVFLGLYHVLRSFNRTTGGFGQPHLSVVENRLTGNYVFTPTDVGHFLDANLFGAPIGASMTQRGGLDAFVDFSRPAVIAVGVPVMVLAGVATYFNSRASVARQSAEAAANPQTAMMNKLALYVFPLGVVVGGPFLPLAIILYWFSNNIWTFGQQHYVFSMIEKEEEAKKQEALERRAANAPAPGAKPKRTPKAVAGSNGSPAESEDVSDTDATETSGEEAPSGDTKQDKPNSTARNSSPTNRTPRPGARPKKRKR

SEQ ID NO: 15268 - protein, 301 aa, Arabidopsis thaliana
MAMEDQSAARSIGKVSWFSDGKGYGFITPDDGGEELFVHQSSIVSDGFRSLTLGESVEYEIALGSDGKTKAIEVTAPGGGSLNKKENSSRGSGGNCFNCGEVGHMAKDCDGGSGGKSFGGGGGRRSGGEGECYMCGDVGHFARDCRQSGGGNSGGGGGGGRPCYSCGEVGHLAKDCRGGSGGNRYGGGGGRGSGGDGCYMCGGVGHFARDCRQNGGGNVGGGGSTCYTCGGVGHIAKVCTSKIPSGGGGGGRACYECGGTGHLARDCDRRGSGSSGGGGGSNKCFICGKEGHFARECTSVA

SEQ ID NO: 15269 - protein, 294 aa, Arabidopsis thaliana
MDRQNSDDIMRFLDGMASSDDVLFGFLDEGNQSPEDFSVNLNAGEDDGDEDDNNNNSEDNKAFWQEHEQLLQGTLYRTSSIETKIRQATKEALKQVKSKGLYCVCRRPVDGGCRSCLRGEISRHLRDVAGYDCVISKSKWRSCQDIPAGEHEFIEIVDRSGSKKSEMRVVIELSFRAEFEIAKGSEEYKRLISRLPEVYVGKTERLRSLIKILCIAGKKCLRDKKMHMAPWRKHKYMQAKWLGTCDRSSSLEASVSEAMEPENWVPVAKPRVSMLNYDGLLGGFSAGPATVAVV

SEQ ID NO: 15270 - protein, 297 aa, Arabidopsis thaliana
MLREMLGCCKVYISEARNKTALEAIERALKPFPPAAIVNKFEDAAYGRVGYTVVSSLANGSSSSLKNAVFAMVKTALDTINLELHCGSHPRLGVVDHICFHPLSQTSIEQVSSVANSLAMDIGSILRVPTYLYGAAEKEQCTLDSIRRKLGYFKANREGHEWAGGFDLEMVPLKPDAGPQEVSKAKGVVAVGACGWVSNYNVPVMSNDLKAVRRIARKTSERGGGLASVQTMALVHGEGVIEVACNLLNPSQVGGDEVQGLIERLGREEGLLVGKGYYTDYTPDQIVERYMDLLNNS

SEQ ID NO: 15271 - protein, 379 aa, Arabidopsis thaliana
MCGGAIISDFIPPPRSLRVTNEFIWPDLKNKVKASKKRSNKRSDFFDLDDDFEADFQGFKDDSAFDCEDDDDVFVNVKPFVFTATTKPVASAFVSTGIYLVGSAYAKKTVESAEQAEKSSKRKRKNQYRGIRQRPWGKWAAEIRDPRKGSREWLGTFDTAEEAARAYDAAARRIRGTKAKVNFPEEKNPSVVSQKRPSAKTNNLQKSVAKPNKSVTLVQQPTHLSQQYCNNSFDNSFGDMSFMEEKPQMYNNQFGLTNSFDAGGNNGYQYFSSDQGSNSFDCSEFGWSDHGPKTPEISSMLVNNNEASFVEETNAAKKLKPNSDESDDLMAYLDNALWDTPLEVEAMLGADAGAVTQEEENPVELWSLDEINFMLEGDF

SEQ ID NO: 15272 - protein, 384 aa, Arabidopsis thaliana
MSGSLMNLFSLCFKPFGHVCDNSEAGSGGGGGVSGGTGGEGKDGLLWFRDLGKYCGGDFSMAVIQANQVLEDQSQVESGNFGTFVGVYDGHGGPEAARYVCDHLFNHFREISAETQGVVTRETIERAFHATEEGFASIVSELWQEIPNLATVGTCCLVGVIYQNTLFVASLGDSRVVLGKKGNCGGLSAIQLSTEHNANNEDIRWELKDLHPDDPQIVVFRHGVWRVKGIIQVSRSIGDMYMKRPEFNKEPISQKFRIAEPMKRPLMSATPTILSHPLHPNDSFLIFASDGLWEHLTNEKAVEIVHNHPRAGSAKRLIKAALHEAARKREMRYSDLRKIDKKVRRHFHDDITVIVVFLNHDLISRGHINSTQDTTVSIRSALEH

SEQ ID NO: 15273 - protein, 219 aa, Arabidopsis thaliana
MDMIPQLMEGSSAYGGVTNLNIISNNSSSVTGATGGEATQPLSSSSSPSANSSRYENQKRRDWNTFGQYLRNHRPPLSLSRCSGAHVLEFLRYLDQFGKTKVHTNICHFYGHPNPPAPCPCPLRQAWGSLDALIGRLRAAFEENGGKPETNPFGARAVRLYLREVRDMQSKARGVSYEKKKRKRPLPSSSTSSSSAVASHQQFQMLPGTSSTTQLKFEK

SEQ ID NO: 15274 - protein, 392 aa, Arabidopsis thaliana
MGTHIDINNLGGDTSRGNESKPLARQSSLYSLTFDELQSTLGEPGKDFGSMNMDELLKNIWTAEDTQAFMTTTSSVAAPGPSGFVPGGNGLQRQGSLTLPRTLSQKTVDEVWKYLNSKEGSNGNTGTDALERQQTLGEMTLEDFLLRAGVVKEDNTQQNENSSSGFYANNGAAGLEFGFGQPNQNSISFNGNNSSMIMNQAPGLGLKVGGTMQQQQQPHQQQLQQPHQRLPPTIFPKQANVTFAAPVNMVNRGLFETSADGPANSNMGGAGGTVTATSPGTSSAENNTWSSPVPYVFGRGRRSNTGLEKVVERRQKRMIKNRESAARSRARKQAYTLELEAEIESLKLVNQDLQKKQAEIMKTHNSELKEFSKQPPLLAKRQCLRRTLTGPW

SEQ ID NO: 15275 - protein, 204 aa, Arabidopsis thaliana
MELKNTIFLVILLSITILQSSSATPNRSESDQFIVSSCQTTQYPSLCVHTLSAYATKIRHNNDQDLAQTALIISLARAKSVTIFVAKLTKETPKFKRREYLAIKDCIEVLGNSVDRLAQSVKELARAGHAVASEDFMWKMSNVQTWVSAALTDETTCLDGFSERAMGGKVKRLIRYKVVHVAQVTSNALALVNQFAEKRSVKFP

SEQ ID NO: 15276 - protein, 929 aa, Arabidopsis thaliana
MGLCLAQLAVTCLFLVPFVLSQVTEFVSIDCGCSSNYTDPRTGLGWVSDSEIIKQGKPVTLANTNWNSMQYRRRRDFPTDNKKYCYRLSTKERRRYIVRTTFLYGGLGSEEAYPKFQLYLDATKWATVTIQEVSRVYVEELIVRATSSYVDVCVCCAITGSPFMSTLELRPLNLSMYATDYEDNFFLKVAARVNFGAPNMDALRYPDDPYDRIWESDINKRPNYLVGVAPGTTRINTSKTINTLTREYPPMKVMQTAVVGTQGLISYRLNLEDFPANARAYAYFAEIEELGANETRKFKLVQPYFPDYSNAVVNIAENANGSYTLYEPSYMNVTLDFVLTFSFGKTKDSTQGPLLNAIEISKYLPISVKTDRSDVSVLDAIRSMSPDSDWASEGGDPCIPVLWSWVNCSSTSPPRVTKIALSRKNLRGEIPPGINYMEALTELWLDDNELTGTLPDMSKLVNLKIMHLENNQLSGSLPPYLAHLPNLQELSIENNSFKGKIPSALLKGKVLFKYNNNPELQNEAQRKHFWQILGISIAAVAILLLLVGGSLVLLCALRKTKRADKGDSTETKKKGLVAYSAVRGGHLLDEGVAYFISLPVLEEATDNFSKKVGRGSFGSVYYGRMKDGKEVAVKITADPSSHLNRQFVTEVALLSRIHHRNLVPLIGYCEEADRRILVYEYMHNGSLGDHLHGSSDYKPLDWLTRLQIAQDAAKGLEYLHTGCNPSIIHRDVKSSNILLDINMRAKVSDFGLSRQTEEDLTHVSSVAKGTVGYLDPEYYASQQLTEKSDVYSFGVVLFELLSGKKPVSAEDFGPELNIVHWARSLIRKGDVCGIIDPCIASNVKIESVWRVAEVANQCVEQRGHNRPRMQEVIVAIQDAIRIERGNENGLKSSSSSSSKAQSSRKTLLTSFLELESPDISRNSLAPAAR

SEQ ID NO: 15277 - protein, 200 aa, Arabidopsis thaliana
MVTMMRPTLLILLFSTFLPQILTVDPPLLPSNGSDFIRLACNTTLYPDLCFSTLSSFANSIQNDSNRLARVAISLTLHNTLHLLSYLQNAYNRDHPTPVLRDCFENLKDAVDGMRGSMKQMKELVSASGSIESFRFQMSNVKTWLSAALTDEYTCTDGFKDVHEDDSIKDDVCSRVDDVKKLTSNALALVNRYADESIIN

SEQ ID NO: 15278 - protein, 326 aa, Arabidopsis thaliana
MDLDSMDCTSTMDVTDDEEIHQDRHSYASVSKHHHTNNNTTNVNAAASGLLPTTTSVHELLECPVCTNSMYPPIHQCHNGHTLCSTCKARVHNRCPTCRQELGDIRCLALEKVAESLELPCKHMSLGCPEIFPYYSKLKHETVCNFRPYSCPYAGSECSVTGDIPFLVAHLRDDHKVDMHSGCTFNHRYVKSNPREVENATWMLTVFHCFGQYFCLHFEAFQLGMAPVYMAFLRFMGDETEARNYNYSLEVGGYGRKLIWEGTPRSVRDSHRKVRDSHDGLIIQRNMALFFSGGDRKELKLRVTGRIWKEQQQSGEGGGACIPNLS

SEQ ID NO: 15279 - protein, 378 aa, Amanita muscaria
MRFVQIDVNILPLSILLGASNLSVMANQYHNDLLAPYLALDQGGKFHAEYVWIDGDGGLRSKTTTVDQKVTDISQLRVWDFDGSSTNQAPSGNSDVYLRPSAIFKDPFRGGENILVLSETYNNDGTPNRTNHRHHTAKVMELAKDEIPWFGIEQEYTLFDADGSPYGWPKGGFPGPQGPYYCGAGTGKVFARDLIEAHYRACLYAGVNISGINAEVMPSQWEFQVGPCEGISMGDHLWMARYLLIRVAEQWGVKVSFHPKPLQGDWNGAGAHTNYSTLAMREPGGMKYIEAAIEKLAKRHDEHIAVYGEDNEMRLTGRHETGHIGTFSSGVANRGASIRVPRHVANKGYGYLEDRRPASNIDPYRVTGIIIETTILDK

SEQ ID NO: 15280 - protein, 337 aa, Pseudomonas putida
MAKRAQSLTITDVTAQGSDAILLSLRVDDEQQPKFTFQPGQYLTLAVEVQGDEHWRCYSITSEPVTGQPISVLVRRVAGGRVSNWLCDNARPGLQLQVLPPAGHFTLARPGQPLLLYAGGSGIAPVFALAREALARGAARVRLFYANRDRATAMLLAELQALQDAAAGRLEIVHWYDAEQGLPTQAVLVAQAQGLDQADAYMCGPEPFMHAVGASLQVAGFDAQRVHREDFGAAVEGASEEAAGDGPEALLTVLMKGQTHAVPVRAGELLLSAMLRAGLPAPHACRVGECASCMCRLQAGEVQRLDSSVLDEDDVAAGWLLACRTRAASPALQVRFS

SEQ ID NO: 15281 - protein, 217 aa, Pisum sativum
MDKKPCNSSQDPEVRKGPWTMEEDLILINYIANHGEGVWNSLAKAAGLKRTGKSCRLRWLNYLRPDVRRGNITPEEQLLIMELHSKWGNRWSKIAKHLPGRTDNEIKNFWRTRIQKHIKQVDNPNQQNFQQKMSLEINDHHHHHPHQPSSSQVSNLVEPMETYSPTSYQGTLEPFPTQFPTINNDHHQNSNCCANDNNNNNYWSMEDIWSMQLLNGD

SEQ ID NO: 15282 - protein, 350 aa, Arabidopsis thaliana
MARSPCCEKNGLKKGPWTSEEDQKLVDYIQKHGYGNWRTLPKNAGLQRCGKSCRLRWTNYLRPDIKRGRFSFEEEETIIQLHSFLGNKWSAIAARLPGRTDNEIKNFWNTHIRKKLLRMGIDPVTHSPRLDLLDISSILASSLYNSSSHHMNMSRLMMDTNRRHHQQHPLVNPEILKLATSLFSQNQNQNLVVDHDSRTQEKQTVYSQTGVNQYQTNQYFENTITQELQSSMPPFPNEARQFNNMDHHFNGFGEQNLVSTSTTSVQDCYNPSFNDYSSSNFVLDPSYSDQSFNFANSVLNTPSSSPSPTTLNSSYINSSSCSTEDEIESYCSNLMKFDIPDFLDVNGFII

SEQ ID NO: 15283 - protein, 356 aa, Arabidopsis thaliana
MSSLADLINLDLSDSTDQIIAEYIWIGGSGLDMRSKARTLPGPVTDPSQLPKWNYDGSSTGQAPGDDSEVIIYPQAIFKDPFRRGNNILVMCDAYTPAGEPIPTNKRHAAAKIFEDPSVVAEETWYGIEQEYTLLQKDIKWPVGWPVGGFPGPQGPYYCGVGADKAFGRDIVDSHYKACLYAGINVSGTNGEVMPGQWEFQVGPTVGIAAADQVWVARYILERITELAGVVLSLDPKPIPGDWNGAGAHTNYSTKSMREDGGYEVIKKAIEKLGLRHKEHIAAYGEGNERRLTGKHETADINTFLWGVANRGASIRVGRDTEQAGKGYFEDRRPASNMDPYTVTSMIAESTILWKP

SEQ ID NO: 15284 - protein, 289 aa, Arabidopsis thaliana
MNLWVSIFLVSAIAGSCLPSGFAYVDVCNHEFEVFRSVIEQKCPRSLYPSPPIEVDGDLLDKLMDANHGNAYISILFYTSRCPFSRAVRPKFDVLSSMFPHITHLIVEQSQALPSVFSRYGIHSLPSILMVNQTMKMRYHGPKDLASLIQFYKETTGLKPVQYMDEGEPTSLDTDGNLITWLHNGSSIREIAEREPYMVLALMFLSLKLAILIFPIMGSRLKTLWALYVPHLSLGILGETSQLFGRALHMIDVRRLWIKLRLTKTRNFQERAKNALASVSLGKSSSQSA

SEQ ID NO: 15285 - protein, 457 aa, Escherichia coli
MMEGQQHGEQLKRGLKNRHIQLIALGGAIGTGLFLGSASVIQSAGPGIILGYAIAGFIAFLIMRQLGEMVVEEPVAGSFSHFAYKYWGSFAGFASGWNYWVLYVLVAMAELTAVGKYIQFWYPEIPTWVSAAVFFVVINAINLTNVKVFGEMEFWFAIIKVIAVVAMIIFGGWLLFSGNGGPQATVSNLWDQGGFLPHAFTGLVMMMAIIMFSFGGLELVGITAAEADNPEQSIPKATNQVIYRILIFYIGSLAVLLSLMPWTRVTADTSPFVLIFHELGDTFVANALNIVVLTAALSVYNSCVYCNSRMLFGLAQQGNAPKALASVDKRGVPVNTILVSALVTALCVLINYLAPESAFGLLMALVVSALVINWAMISLAHMKFRRAKQEQGVVTRFPALLYPLGNWICLLFMAAVLVIMLMTRGMAISVYLIPVWLIVLGIGYLFKEKTAKAVKAH

SEQ ID NO: 15286 - protein, 339 aa, carbazole-degrading bacterium CAR-SF
MHKVALNFNDGRTHFVSVNANEVLIDAAMRHGLTLPVDCREGVCASCKGSCQSGDYDLEYVDEDALSEDDLARGGILACQMRVKSDCAVSFDFDSSLCTSAGPEEVEALVTRVEVLSDSTATLHLDASSRKGQLDFLPGQYAHVQVPGTDEWRSYSFACEPNESNRLQLLIRLLPDGVMSNYLRDRAQPGDRIRLKAPLGAFYLQQVKRPLIFVAGGTGLAAFLGMLDQMVSNPARQTQSVRLFYGVTRPQDLCELERLKGYEQSVPGFSFHSIVMNPDADWQGASGVVTDLFEESHFNGGEVDAYLCGPPPMVDAVKSWLDQRNMENSRIYFEKFSAS

SEQ ID NO: 15287 - protein, 405 aa, Setosphaeria turcica
MLNKLHGQPDSYDRKSRYRFGKTLGAGTYGIVREADCPEGKVAVKIILKKNVRGNEQMVYDELEMLQRMKHPHIVKFHDWFESRDKYYIVTQLATGGELFDRICEKGKFTEKDAAETIRQVLDAVNYLHQNNVVHRDLKPENLLYLTREADSSLVLADFGIAKMLDSKSEVLTTMAGSFGYAAPEVMLKKGHGKPVDMWSMGVITYTLLCGYSPFRSENLADLIEECKNGRVIFHERYWKEVSPEAKEFIKKLLEPDPAKRPTSEAALKHVWLSGKTATDHNLVPEIKAYAAKARLRRGIELVKLANRIEALKMQEDEEEEVPGGADMPANAREAASEAIAGNTDEKGLATKETTGTGKGPGRLSRIAKGAIFREVVLAKVREMKEQEARAEFEKNATLAESAKK

SEQ ID NO: 15288 - protein, 106 aa, Narcissus pseudonarcissus
MKGGKSKADTSKKADARLSVKRKAAEKPAKKPVVKKSKAEKDPNKPKRPPSAFFVFMEEFRKQFKEKNPNNKQVSVVGKAAGDKWKSMSATEKAPYEAKAAKRKAE

SEQ ID NO: 15289 - protein, 641 aa, Kalanchoe x houghtonii
MAAYFDGGNSQIQAADGLQTLIFMNPSYVNNHHHQNPNNFVFANPSMSPATDQSQQLVGVPLQQTQHPEPISALHGLVPRPHYNLWTPIVRDNPRPQKGLSLSLSNSQQQVGFAGTPPSAISPSSGSKDDGIGTPSPASVISNGPASGLRSVLLCSKYLKATQQLLEEVVNVGSAMDSAKKKDTATGSSSKAANEASSPEAAAAAAVAVGDGENGGKKAAELSTAERHEIQMKKGKLVCMLDGVELRYRQYQQQMQIVIASFEQAAGQGSARTYTALALRTISRQFRCLKDAIVVQMRAMSKSLGEEEDMGIKEGVSRLKFVDHHLRQQRALQQLGMIQHNAWRPQRGLPERSVLVLRAWLFEHFLHPYPKDSDKQMLAKQAGLTRSQVSNWFINARVRLWKPMVEEMYNEEVKEQDNHESTDKTGISGNNNAKAYASKVPTHDNISFKNVSPEDTGATAAAKSDSVSPGRLRNQNTGFSLVGSSELEGISEMSPKRQRTNHLMINPTDSFQSNMEMKSIHASNEHVLMQFGIERQTRDDYSLMAAGPFGSCPLEEINQFDSSHQYQPRFSGKGGVSLTLGLTDTLFPNQNMRRMDTGEASEFGTINNNPNPARTTSTAYESINIQNPKRFPVQLLPDFVA

SEQ ID NO: 15290 - protein, 125 aa, Arabidopsis thaliana
MGSMFSGNRMSKEEMEVVVNKAKEIVSAYPVVVFSKTYCGYCQRVKQLLTQLGATFKVLELDEMSDGGEIQSALSEWTGQTTVPNVFIKGNHIGGCDRVMETNKQGKLVPLLTEAGAIADNSSQL

SEQ ID NO: 15291 - protein, 507 aa, Gossypium hirsutum
MAKPQLLFLFSFSLLCLISFSAADSSITADLRLTDSSFPSVHAKKLIRELNLFPKGEVNVVDEHRVSLPEGPKLVEKRFKFPTLEVPGGVSFEDLGHHAGYYKLPNSHDARMFYFFFESRNSKKDPVVIWLTGGPGCSSELALFYENGPFTIADNMSLVWNEYGWDKASNLLYVDQPIGTGFSYSSDQRDIRHNEDEVSNDLYDFLQAFFAEHPEFAKNDFFITGESYAGHYIPAFAARVHRGNKAKEGIHINLKGFAIGNGLTDPAIQYKAYTDYALDMGVIKKSDHDRINKLVPVCEMAIKLCGTDGTISCMASYFVCNNIFNGIMALAGDTNYYDVRKKCEGSLCYDFSNMESFLNKKSVRDALGVGNIDFVSCSPTVYQAMLVDWMRNLEVGIPVLLEDGIKLLVYAGEYDLICNWLGNSRWVHAMEWSGQKEFVASPEVPFIVDGAEAGVLKTHGALGFLKVHDAGHMVPMDQPKAALEMLKRWTKGTLSDASDSEKLVAEM

SEQ ID NO: 15292 - protein, 420 aa, Nitrosomonas sp. ENI-11
MGIKNLYKRGVMGLYGIAYAVAALAMTVTLDVSTVAAHGERSQEPFLRMRTVQWYDIKWGPEVTKVNENAKITGKFHLAEDWPRAAASPDFSFFNVGSPSPVFVRLSTKINGHPWFISGPLQIGRDYEFEVNLRARIPGRHHMHAMLNVKDAGPIAGPGAWMNITGSWDDFTNPLKLLTGETVDSETFNLSNGIFWHVVWMSIGIFWIGVFTIRPMFLPRSRVLLAYGDDLLMDPMDKKITWVLAILTLALVWGGYRYTENKHPYTVPIQAGQSKVAALPVAPNPVSIVITDANYDVPGRALRVTMEVTNNGDIPVTFGEFTTAGIRFINSTGRKYLDPQYPRELIAVGLNFDDESAIQPGQTKELKMEAKDALWEIQRLMALLGDPESRFGGLLMSWDAEGNRHINSIAGPVIPVFTKL

SEQ ID NO: 15293 - protein, 274 aa, Salmonella enterica subsp. enterica serovar Typhi str. CT18
MRKHTPIIKWAGGKTKLMPFLSKHFPHDKSRRWVEPFIGGGAVFLNMFATEALLADSNPDLINLYRNIQRNKPAFIREVQLLAERHFEEEDYYVLRNTFNSTSFDDAPLQRAAIFYAMNRLGYNGLCRYNLKRKFSVPWGKRYQFSLDIQKVDYLSFRLSSVELKTADFGQTLEFAGGGDQIYCDPPYDKISKTSFVSYDGIPFDKSAHVKLADMLVDANRKGASVAISNSMTPFTLELYEERGFDIHTHNAYRSVGSQSKSRKKEIEILAVLR

SEQ ID NO: 15294 - protein, 636 aa, Muriella zofingiensis
MSSPAIGIDLGTTYSCVGLWQHDRVEIIANEQGNRTTPSYVAFTDTERLIGDAAKNQVAMNPINTVFDAKRLIGRKFSDPTIQHDISHWPFKVVAGPGDKPMIQVNYKGEDKTFAPEEISSMVLVKMKEIAQAYVGADKEVKKAVVTVPAYFNDSQRQATKDAGVIAGLEVMRIINEPTAAAIAYGLDKKGTTSGEQNVLIFDLGGGTFDVSLLTIEEGIFEVKSTAGDTHLGGEDFDNRLVNFFVQEFKRKYKKDISSNPRALRRLRTSCERSKRTLSSSTQASIEIDSAVRGHRLLLLPSPVPRFEELNMDLFRKCMEPVEKVLRHAKMDKGQVNEVVLVGGSTRIPKVQQLLQDFFNGKELCKSINPDEAVAYGAAVQAAILNGETHEKVQDLLLLDVIPLSLGLETAGGVMTTLISRNTTIPTKKEQVFSTYSDNQPGVLIQVYEGERSRTKDNNLLGNFELTGIPPAPRGVPQINVTFDVDANGILNVSCGGQDHLATRTRSLITNDKGRLSKDEIERMVQEAKKYKGEDNLRGTGGGRKGLKNYGTGWATPLRTPTWQDKLRAEDKEKMEKGVDKVVSGSTTTSWLRRRRSRIKGTELEGVCNPIITKLYQGGAVPSAAGGQGPTIEEVD

SEQ ID NO: 15295 - protein, 375 aa, Fagus sylvatica
MCGGAIISDFIAPTGSRRLTADYLWGDRKKPISGKRFSKPVVDLDDEFELDFQGFKDEEESDIDEEEVLVQDVKPFTFSAPPSSGSKPVKSVEFNGQAEKSAKRKRKNQYRGIRQRPWGKWAAEIRDPRKGVRVWLGTFNTAEEAARAYDAEARRIRGKKSKGNFPMRLPVPKRSVKANLQKPLAKANLNSVQPNLNQNFNFMNSDQDYTMGLMEEKPFTNQYGYMDSIPVNADVGLKSFASNNTAPYFNSDQGSNSFDCSDYGWGEQGSKTPEISSVLSATLEGDESQFVEDAVPTKKLKSDSGNAVFIENNTAKTLSEELSAFESQMNFQMPFLEGSWESNMEALFSGDTTQDGNSMDLWSFDDLPVMAGGVL

SEQ ID NO: 15296 - protein, 644 aa, Triticum monococcum
MVREMRINTAPRGNRVPLLNNGETSRILSDLEEGSNVQAANVGFCRVIKLAKHDAGKLVFATIALLVASLSNLLVPKYGGKIIDIVSRDVQRPEDKAQALADVNGTILYIVLIVVTGSVCTALRAWLFNSASERVVARLRQDLFSHLVNQEIAFFDVTRTGELLSRLSEDTQIIKNAATTNLSEALRNLTTTAIGLGFMFSTSWKLTLLALVIVPVISVAVRKFGRFLRELSHQTQAAAAVASSIAEESFGAIRTVRAFAQEPHEISRYGGKVNETLKLGLKQAKVVGLFSGGLNAASTLSVVVVVIYGANLTINGYMTTGSLTSFILYSLTVGSSVSALSGLYTTVMKASGASRRVFQLLDRVSSMTNTGDKCPKIENEGEVELDDVWFAYPSRPSHMILKGITLKLAPGSKVALVGPSGGGKTTIANLIERFYDPLKGRILLNGVPLVEISHQYLHQKVSIVSQEPTLFNCSIEENIAYGLEGKASSADVENAAKMANAHDFICSFPDQYKTVVGERGIRLSGGQKQRVAIARALLMNPRVLLLDEATSALDAESEYLVQDAMDSLMKGRTVLVIAHRLSTVKSADTVAVISEGQIVERGTHDELLERDGIYTALVKRQLQLPKFEGTANGTAEIEPSSNGQ

SEQ ID NO: 15297 - protein, 637 aa, Triticum monococcum
MGREPRGNRAPLLDHGETARVPSDLEEGSNVQAANVGFCRVIKLAKPDAWKLIFATTALIIASLSNLLVPKYGGKIIDIVSRDVRLPEDRAQALADVNGTILYIVLIVVTGSACTALRAWVFNSASERVVARLRHDLFSHLINQEIAFFDVTRTGELLSRLSEDTQIIKNAATTNLSEALRNLTTTAIGLGFMFSTSWKLTLLSLAIVPVISAVVRKFGRFLRELSHQTQAAAAVASSIAEESFGAIRTVRAFAQEPHEISRYSGKVNETLKLGLKQATVVGLFSGGLNAASTLSVVIVVIYGAKLTINGYMTTGALTSFILYSLTVGSSVSALSGLYTTVMKASGSSRRVFQLLDRISSMKNSGDKCPKNENDGEVELDDVWFAYPSRPSHLILKGITLKLAPGSKVALVGPSGGGKTTIANLIERFYDPIKGRILLNGVPLVEISHQYLHQMVSIVSQEPTLFNCSIEENIAYGLEGKASSADVENAAKMANAHDFICGFPDQYKTIVGERGIRLSGGQKQRVAIARALLMNPRVLLLDEATSALDAESEHLVQDAMDSLMRGRTVLVIAHRLSTVKTADTVAVISEGQIVESGTHDELLGRDGIYTALVKRQLQLPKFEGTANGTDEVEPVDGH

SEQ ID NO: 15298 - protein, 326 aa, Oryza sativa Japonica Group
MEYSYSYRFMLVCSVLVLCLNTRGARCQLSDDFYDYICPDVYTVVQQHVYAAMRTEMRMGASLLRLHFHDCFVNGCDGSILLDGDDGEKFALPNKTSVRGFEVIDAIKEDLENICPEVVSCADIVALAAGYGVLFSGGPYYDVLLGRRDGLVANQSGADNGLPSPFEPIKSIIQKFNDVGLDTTDVVVLSGGHTIGRARCTLFSNRLSTTSSSADPTLDATMAANLQSLCAGGDGNETTVLDITSAYVFDNRYYQNLLNQKGLLSSDQGLFSSDDGIANTKELVETYSADAHKFFWDFGRSMVKMGNISPLTGDDGQIRKNCRVVN

SEQ ID NO: 15299 - protein, 323 aa, Linum usitatissimum
AGNSNIWLRSCLVLLVAVCGAGKCWGQLSTDFYSESCPMLMDTVRCEVESAVDKETRIAASLLRLHFHDCFVNGCDGSILLEDTDSFTGEQTAAPNNGSVRGYYVIEDIKSKVEQVCPGVVSCADIVAIAARDSTVIAGGQSWEVKVGRRDSKTASFNAANSGVLPAPTSSLNELIKSFGDQGLSANDMVVLSGSHTIGVARCVSFRDRIYNETNIDPSFASQSEENCPLAPNSGDDNLAPLDLKTPTSFDNNYYNNLIEQKGLLHSDQVLFNGGSTDSLVRSYSQSPKRFAADFAAAMVKMGDIKPLTGSQGEIRNVCSRPN

SEQ ID NO: 15300 - protein, 318 aa, Staphylococcus xylosus
MVKVYIAGPIPEAGLNLLKDQGFEVAMYEGKGIIDKETLKEGVKDADALISLLSTNVDKDVIDAASNLKIIANYGAGFNNIDGDYARQLNIDVTNTPKASTNSTAELTFGLVLSAARRIVEGDKLCRTTGFDGWAPLFFRGREVSCKTIGIIGLGEIGSAVARRAKAFDMNVLYTGPNQKVDREREIGAKYVDLETLLKNSDFITINAAYNPNMHHQIDTEQFKMMKLTSYLINASRGPIVHEQALVQALKDKEIEGAALDVFEFEPEINDELKKLDNVVLTPHIGNATYESRDMMSKIVANDTVSKLTNNEPKYVVN

SEQ ID NO: 15301 - protein, 197 aa, Populus sieboldii x Populus grandidentata
MAFAGTTQKCMACDKTVYLVDKLTADNRAYHKACFRCHHCKGTLKLGNYNSFEGVLYCRPHFDQLFKRTGSLDKSFEGTPKIVKPEKPVDGEKPVSTKVSTMFAGTREKCFGCKNTVYPTEKVSVNGTPYHKSCFKCIHGGCTISPSNYIAHEGRLYCKHHHNQLIKEKGNLSQLEGDIEKDSMSNKTNGREVAAES

SEQ ID NO: 15302 - protein, 193 aa, Nicotiana tabacum
MAFAGTTQKCMACDKTVYLVDKLTADNRIYHKACFRCHHCKATLKLGNSNSFEGVLYCRPHLIGLFKQTGSLDKSFEGTPKIVRPQKPIDSEKPQVAKVTSMFGGTREKCFGCKKTVYPTEKVSVNGTPYHKSCFKCSHGGCVISPSNYIAHEGRLYCKHHHIQLIKEKGNLSKLEGDHEMNSTTTTEVTAES

SEQ ID NO: 15303 - protein, 193 aa, Nicotiana tabacum
MAFAGTTQKCMACDKTVYLVDKFTADNRIYHKACFRCHHCKGTLKLGNYNSFEGVLYCRPHFDQLFKQTGSLDKSFEGTPKIVKPQKPIDSEKPQVAKVTSMFGGTREKCFGCKKTVYPTEKVSVNGTPYHKSCFKCSHGGCVISPSNYIAHEGRLYCKHHHIQLIKEKGNLSKLEGDHEMNSTTTTEVTAES

SEQ ID NO: 15304 - protein, 420 aa, Streptomyces sp.
MTPAEKNWAGNITFGAKRLCVPRSVRELRETVAASGAVRPLGTRHSFNTVADTSGDHVSLAGLPRVVDIDVPGRAVSLSAGLRFGEFAAELHARGLALANLGSLPHISVAGAVATGTHGSGVGNRSLAGAVRALSLVTADGETRTLRRTDEDFAGAVVSLGALGVVTSLELDLVPAFEVRQWVYEDLPEATLAARFDEVMSAAYSVSVFTDWRPGPVGQVWLKQRVGDEGARSVMPAEWLGARLADGPRHPVPGMPAGNCTAQQGVPGPWHERLPHFRMEFTPSNGDELQSEYFVARADAVAAYEALARLRDRIAPVLQVSELRTVAADDLWLSPAHGRDSVAFHFTWVPDAAAVAPVAGAIEEALAPFGARPHWGKVFSTAPEVLRTLYPRYADFEELVGRHDPEGTFRNAFLDRYFRR

SEQ ID NO: 15305 - protein, 561 aa, Leuconostoc mesenteroides subsp. cremoris
MKNVVLTEWKNGAHILLDSLEKAGVNSLFGCPGGAVIPLYDALYESSHIKHILVRHEQAAAHAAEGYAKATGKPGVVLVTSGPGATNTVTGIADAFCDSVPLVVISGQVGSAAIGSDAFQELDILSITSSITKMSYQVRTVGELPLIVEEAFKVAVSGRPGPVLIDLPKSVMLAKDTEESQADIWLRQIDTQKPDVDAVQIHQLVAALSKARQPLIITGAGVLKSNAQDLLRTLIQHYHIPTVSTLLGLGAVESENPLFLGMVGMHGSIAANQAVDQADFVLNIGSRFDDRVVTNVDDFAKHATIAHIDIDETELGKVLPTAHAIHASADDALNAILTEIKNAKMTDTSKWQESICQAKRDSMFHYQKSETAIMPQVVIQAVGKVTKGEAVVVTDVGQHQMWVAQYYPFQNNYQMLTSGGLGTMGYGIPAAIGAKFARWDKEVVLFVGDGGFQMTSEELAILNDNDLNIKIILLNNHSLGMVRQWQTLFYNGRLSSTVFKSQPQFNQLAQAYGINYVRIEKPERILEDLQLAFQSDKSVLIEIIIPDDVKVLPMVNAGRLS

SEQ ID NO: 15306 - protein, 593 aa, Glycine max
MAIATCDHDKNAKALQFIEDMTQNTESVQERVLAEILSQNSQTEYLKRFELNGATDRDTFKSKVPVVSYDDLKHDIHRIANGDRSPILCAHPISEFLTSSGTSAGERKLMPTIRQEMDRRQLIFSLPMPVMNQYVTDMDKGKALIFLFTKAEQKTPSGLVARPVSASMYKSDQFKNRPYDPYNVYTSPDEAILCPDSFQSMYTQMLCGLIMRHQVLRVGANFASGLLRSIHLLQLNWAQLSHDISTGTLNPKITDPAIKQRMTQILKPDPELAEFIVKECSGENWERIIPRIWPNTKYVEVVVTGAMAQYVPTLDYYSGGLPLASNIYGSSECFFGINLNPFCNPSDVSYTIMPNMGYFEFLPQDHDDASSSSGSSFTLSRLIDLDDVELGKSYEIVVTTYSGLCRYRVGDILRVTGFHNTAPQFSFVRRKNVLLSIDSDKTDEAELQNAVEKASVLLKEFKTSVVEYTSFADTKSIPGHYVIYWELLMKDSSNAPTTEALEQCCLTMEESLNAVYRQGRVADHSIGPLEIRVVKNGTFEELMDYAISRGASISQYKVPRCVTFTPITELLDSRVESVHFSPSEPHWTPERRR

SEQ ID NO: 15307 - protein, 66 aa, Listeria monocytogenes
MQTGTVKWFNSEKGFGFIEVEGGDDIFVHFSAIEGEGFKTLDEGQSVEFEIVEGQRGPQAEKVTKL

SEQ ID NO: 15308 - protein, 1014 aa, Arabidopsis thaliana
MASHAVPSVGEHPVLGIGTDIRSLFTAPSASALQKALGFGDVSLLNPILVHCRTSAKPFYAIIHRVTGSIIIDFEPVKPYEVPMTAAGALQSYKLAAKAITRLQSLPSGSMERLCDTMVQEVFELTGYDRVMAYKFHEDDHGEVVSEVTKPGLEPYLGLHYPATDIPQAARFLFMKNKVRMIVDCNAKHARVLQDEKLSFDLTLCGSTLRAPHSCHLQYMANMDSIASLVMAVVVNEEDGEGDAPDATTQPQKRKRLWGLVVCHNTTPRFVPFPLRYACEFLAQVFAIHVNKEVELDNQMVEKNILRTQTLLCDMLMRDAPLGIVSQSPNIMDLVKCDGAALLYKDKIWKLGTTPSEFHLQEIASWLCEYHMDSTGLSTDSLHDAGFPRALSLGDSVCGMAAVRISSKDMIFWFRSHTAGEVRWGGAKHDPDDRDDARRMHPRSSFKAFLEVVKTRSLPWKDYEMDAIHSLQLILRNAFKDSETTDVNTKVIYSKLNDLKIDGIQELEAVTSEMVRLIETATVPILAVDSDGLVNGWNTKIAELTGLSVDEAIGKHFLTLVEDSSVEIVKRMLENALEGTEEQNVQFEIKTHLSRADAGPISLVVNACASRDLHENVVGVCFVAHDLTGQKTVMDKFTRIEGDYKAIIQNPNPLIPPIFGTDEFGWCTEWNPAMSKLTGLKREEVIDKMLLGEVFGTQKSCCRLKNQEAFVNLGIVLNNAVTSQDPEKVSFAFFTRGGKYVECLLCVSKKLDREGVVTGVFCFLQLASHELQQALHVQRLAERTAVKRLKALAYIKRQIRNPLSGIMFTRKMIEGTELGPEQRRILQTSALCQKQLSKILDDSDLESIIEGCLDLEMKEFTLNEVLTASTSQVMMKSNGKSVRITNETGEEVMSDTLYGDSIRLQQVLADFMLMAVNFTPSGGQLTVSASLRKDQLGRSVHLANLEIRLTHTGAGIPEFLLNQMFGTEEDVSEEGLSLMVSRKLVKLMNGDVQYLRQAGKSSFIITAELAAANK

SEQ ID NO: 15309 - protein, 882 aa, Arabidopsis thaliana
MMTSKAKALTFICCVALLNLAIAQDQSGFISIDCGLQPENSSYTETSTDIKYVSDSSYTDTGTSYFVAPENRQNMKQSMWSVRSFPEGIRNCYTIAVNSSTKYLIRADFMYGNYDSRNEIPGFDLHLGPNKWDTVELVSPLQTVSKEIIYYVLTDTIQVCLVNTGNGTPFISVLELRQLPNSSYAAQSESLQLFQRLDFGSTTNLTVRYPNDVFDRIWFPATPNGTKPLSDPSTSLTSNSTGNFRLPQVVMRTGIVPDNPRGFVDFGWIPDDPSLEFFFYLYFTELQQPNSGTVETREFVILLNGKSFGEPLSLNYFRTLALFTSNPLKAESFQFSLRQTQSSSLPPLINAMETYFVNKLPQSSTDPNDLSAMRNIKSAYKVKRNWEGDVCVPQAYTWEGLNCSFNGTNMPRVIALNLSSAGLTGEITSDISRLSQLQILDLSNNNLSGPAVPAFLAQLQFLRVLHLANNQLSGPIPSSLIERLDSFSGNPSICSANACEEVSQNRSKKNKLPSFVIPLVASLAGLLLLFIISAAIFLILMRKKKQDYGGNETAVDAFDLEPSNRKFTYAEIVNITNGFDRDQGKVGFGRNYLGKLDGKEVTVKLVSSLSSQGYKQLRAEVKHLFRIHHKNLITMLGYCNEGDKMAVIYEYMANGNLKQHISENSTTVFSWEDRLGIAVDVAQGLEYLHTGCKPPIIHRNVKCTNVFLDESFNAKLGGFGLSRAFDAAEGSHLNTAIAGTPGYVDPEYYTSNMLTEKSDVYSFGVVLLEIVTAKPAIIKNEERMHISQWVESLLSRENIVEILDPSLCGDYDPNSAFKTVEIAVACVCRNSGDRPGMSQVVTALKESLAVEVERKKHLPVGSTDSLEELALGFGSNPPPRLR

SEQ ID NO: 15310 - protein, 96 aa, Arabidopsis thaliana
MDSKSFLLLLLLFCFLFLHDASDLTQAHAHVQGLSNRKMMMMKMESEWVGANGEAEKAKTKGLGLHEELRTVPSGPDPLHHHVNPPRQPRNNFQLP

SEQ ID NO: 15311 - protein, 342 aa, Arabidopsis thaliana
MARVLVSSPSSFFGSPLIKPSSSLRHSGVGGGGTAQFLPYRSNNNKLFTTSTTVRFSLNEIPPFHGLDSSVDIGAIFTRAESLLYTIADAAVVGADSVVTTDSSAVQKSGGWFGFISDAMELVLKILKDGLSAVHVPYAYGFAIILLTIIVKAATYPLTKQQVESTLAMQNLQPKIKAIQQRYAGNQERIQLETSRLYKQAGVNPLAGCLPTLATIPVWIGLYQALSNVANEGLFTEGFFWIPSLGGPTSIAARQSGSGISWLFPFVDGHPPLGWYDTVAYLVLPVLLIASQYVSMEIMKPPQTDDPAQKNTLLVFKFLPLMIGYFALSVPSGLSIYWLAHK

SEQ ID NO: 15312 - protein, 239 aa, Phalaenopsis equestris
MDSSSMEPKEKMGRGKIEIKRIENTTNRQVTFCKRRNGLLKKAYELSVLCDAEVALIIFSTRGRLYEYANNSVKGTIERYKKASTDNSNTGSISEANSQYYQQEATKLRQQITNLQNSNRNLLGDALTTMSLRDLKQLETRLEKGINKIRAKKNELLHAEIDYMQKREMELQTDNMFLRNKISDNERAQQQHQHMSILPSTSTEYEVMPPFDSRSFLHVNLMDPNDRYSHQQQTALQLG

SEQ ID NO: 15313 - protein, 370 aa, Arabidopsis thaliana
MSSSGQTQFRYTQTPSKVVHLRNLPWECVEEELIDLCKRFGKIVNTKSNVGANRNQAFVEFADLNQAISMVSYYASSSEPAQIRGKTVYIQYSNRHEIVNNQSPGDVPGNVLLVTFEGVESHEALVQFTDVETASAARSALDGRSIPRYLLSAHVGSCSLRMSYSAHTDLNIKFQSHRSRDYTNPYLPVNQTAMDGSMQPALGADGKKVESQSNVLLGLIENMQYAVTVDVLHTVFSAYGTVQKIAIFEKNGSTQALIQYSDIPTAAMAKEALEGHCIYDGGYCKLRLSYSRHTDLNVKAFSDKSRDYTLPDLSLLVAQKGPAVSGSAPPAGWQNPQAQSQYSGYGGSPYMYPSSDPNGASPSGQPPYYG

SEQ ID NO: 15314 - protein, 512 aa, Arabidopsis thaliana
MLRSLLLRRSVGHSLGTLSPSSSTIRSSFSPHRTLCTTGQTLTPPPPPPPRPPPPPPATASEAQFRKYAGYAALAIFSGVATYFSFPFPENAKHKKAQIFRYAPLPEDLHTVSNWSGTHEVQTRNFNQPENLADLEALVKESHEKKLRIRPVGSGLSPNGIGLSRSGMVNLALMDKVLEVDKEKKRVTVQAGIRVQQLVDAIKDYGLTLQNFASIREQQIGGIIQVGAHGTGARLPPIDEQVISMKLVTPAKGTIELSREKDPELFHLARCGLGGLGVVAEVTLQCVARHELVEHTYVSNLQEIKKNHKKLLSANKHVKYLYIPYTDTVVVVTCNPVSKWSGPPKDKPKYTTDEAVQHVRDLYRESIVKYRVQDSGKKSPDSSEPDIQELSFTELRDKLLALDPLNDVHVAKVNQAEAEFWKKSEGYRVGWSDEILGFDCGGQQWVSESCFPAGTLANPSMKDLEYIEELKKLIEKEAIPAPAPIEQRWTARSWYNHVPPDSRPSPEKGHHR

SEQ ID NO: 15315 - protein, 165 aa, Arabidopsis thaliana
MKTSHTFRRRNGFVLLLVLIHFSVFGFSSNIDVSYRARGIKINGDQKRVLSNSNHPRSDFRKSLQHGKEHSACTNHKSVRGPITRIFCQDGYVITNINFADYGNPTGTCEHFRHGKCGAPATLRLVKKNCLGKPKCVFLVTDEMFGPSHCKGPPTLAVDATCTKT

SEQ ID NO: 15316 - protein, 400 aa, Arabidopsis thaliana
MVDCGVDIYQLPVVPRACRSPRGRRLKIMRKQRSEFEVLAQVAGRFSGERKNRIVIGSLAHETKETKDDNVVVNNFLETMEVEVKPQPGLENLSQVLLSKDWLALGPSMPNSPITQEENFDSRSKIDSKRKVSHLKERGSCISQESQNMYPLKKRKLFYQNHSSESHDTPCTVKFGIKSLNISELLVDVPESATVGSLKLAVLEAVTQILKGGLNIGVLFQGKTIVDDSKTLLQIGIPYDDDDDENLGSLGFMLEPQKSETTTITTLTTVSPRTRLRQNQVLGSVDSTEAVAAKSVVPVRMKPAWQPEMVQRRIRRPFTVSEVEALVQAVERLGTGRWRDVKSHAFNHVNHRTYVDLKDKWKTLVHTAKISARQRRGEPVPQDLLDRVLAAHAFWSDRTG

SEQ ID NO: 15317 - protein, 555 aa, Arabidopsis thaliana
MADSTSLINKRTKGGWNAALFIIVVEIAERFAFYGLASNLITFLTNELGQSTATAAKNINTWIGVSCMFPILGAFLADSILGRFKTVLLTSFIYLLGIVMLPLSVTVVARRMREKVFFMALYVMAVGEGGHKPCVMTFAADQFGEANAEEKAAKTSFFNYWYMAIVLASSIAVLALIFIQERVSWSLGFSIIAGSVVIAIVIFLIGIPKYRKQVPVGSPFTRVAQVMVAALKKWRLSSTRHHYGLCYEEEDEHKLESTNSNQVYLLARTNQFRFLDKATIIDEIDHNKNRNPWRLCTVNQVEEVKLILRLIPIWISLIMFCATLTQLNTFFLKQGSMMDRTIGNHFTIPPAAFQSIVGVTILILIPLYDRVFVPMVRKITNHHSGITSLQRIGVGLFVATFNMVICGLVEAKRLKVARDHGLIDSPKEVVPMSSLWLLPQYILVGIGDVFTIVGMQELFYDQMPETMRSIGAAIFISVVGVGSFVSTGIISTVQTISKSHGEEWLVNNLNRAHLDYYYWIIASLNAVSLCFYLFIANHFLYKKLQDKDDDVESER

SEQ ID NO: 15318 - protein, 262 aa, Arabidopsis thaliana
MGRGRVELKRIENKINRQVTFAKRRNGLLKKAYELSVLCDAEVALIIFSNRGKLYEFCSSSNMLKTLDRYQKCSYGSIEVNNKPAKELENSYREYLKLKGRYENLQRQQRNLLGEDLGPLNSKELEQLERQLDGSLKQVRSIKTQYMLDQLSDLQNKEQMLLETNRALAMKLDDMIGVRSHHMGGGGGWEGGEQNVTYAHHQAQSQGLYQPLECNPTLQMGCCFGDDDDDDRYDNPVCSEQITATTQAQAQQGNGYIPGWML

SEQ ID NO: 15319 - protein, 224 aa, Arabidopsis thaliana
MYSSMSTKKKTKLSVRNQTCFKKSSLSSSSTAKKTTNLSMREQTMFKKALELSTLCDIEVCVILYGRDGELIKTWPEDQSKVRDMAERFSRLHERERCKKRTNLSLFLRKKILDDNKLSEKVLEMEDSLESGLRVLQNKLLLLQPEKNQTKLGQSRAVSSTTNLLSSPENHHNQQWTEPLENGVSNTEQELSTSSLSQHQSKYSVFLYNHDNGSFYQVPDSICF

SEQ ID NO: 15320 - protein, 550 aa, Enterobacter cloacae
MRTPYCVADYLLDRLTDCGADHLFGVPGDYNLQFLDHVIDSPDICWVGCANELNASYAADGYARCKGFAALLTTFGVGELSAMNGIAGSYAEHVPVLHIVGAPGTAAQQRGELLHHTLGDGEFRHFYHMSEPITVAQAVLTEQNACYEIDRVLTTMLRERRPGYLMLPADVAKKAATPPVNALTHKQANADSACLKAFRDAAENKLAMSKRTALLADFLVLRHGLKHALQKWVKEVPMAHATMLMGKGIFDERQAGFYGTYSGSASTGAVKEAIEGADTVLCVGTRFTDTLTAGFTHQLTPAQTIEVQPHAARVGDVWFTGIPMNQAIETLVELSKQHVHTGLMSSSSGAIPFPQPDGSLTQENFWRTLQTFIRPGDIILADQGTSAFGAIDLRLPADVNFIVQPLWGSIGYTLAAAFGAQTACPNRRVIVLTGDGAAQLTIQELGSMLRDKQHPIILVLNNEGYTVERAIHGAEQRYNDIALWNWTHIPQALSLDPQSECWRVSEAEQLADVLEKVAHHERLSLIEVMLPKADIPPLLGALTKALEARN

SEQ ID NO: 15321 - protein, 316 aa, Arabidopsis thaliana
MRDPDIVQNTRSLILLRVLTHEKLIQSHRYFFVGWIHKNLSRFRRKIRRRFLHCDFSGFGFFPRRFLFGFVLEKMDHLQESFRGSELCILCDIEACVIYYGPDGELKTWPKEREKVEDIALRYSQLNEALRRKKSVTLYDFLNKKKDKTNLEKKAMITDNDDLKTCLKNVNVLKSPIADHYFNDQISQLIQSLEPHVSKVQERIRFVESQKHKETKLDHQSLASIYSLNQSLNPSQFTLFLYNHGDNTMSQIPNMFMNNNNFQHSFVSNTQDYSALQESVNNNYGLMPNVLCGYDQNLFTSDITNNNLLIDNSMYL

SEQ ID NO: 15322 - protein, 136 aa, Arabidopsis thaliana
MDSIMCVSSWKFYTMNDSWMYLDAFVYQWMILSYLIGNFSGICSKTYCPYCVRVKELLQQLGAKFKAVELDTESDGSQIQSGLAEWTGQRTVPNVFIGGNHIGGCDATSNLHKDGKLVPLLTEAGAIAGKTATTSA

SEQ ID NO: 15323 - protein, 408 aa, Methylobacillus glycogenes
MALIVQKYGGTSVANPERIGNVARRVARHKALGQQVVVVVSAMSGETNRLIGLAKEVMPNPHPRELDVLVSTGEQVTIALLSMALMELGVKAKSYTGSQVSIVTDNAHTKARILKIDEERIRKDLDDGYVVVVTGFQGVDEHGNITTLGRGGSDTTGVALATALKADECQIYTDVDGVYTTDPRVVPEARRLKSVTFEEMLEMASLGSKVLQIRSVEFAGKYKVKLRVLSSFEEEGEGTLITFEDDNNMEQPIISGIAFNRDEAKITVLGVPDRPGIAYQILGPVADANIDVDIIIQNVAADGTTDFTFTVHKNDLQKALDILRDKVQGHIGAREIIGDDKTAKVSVVGVGMRSHVGIVSQMFRTLAEEGINIQMISTSEIQISVVIDEKYMELAVRVLHKAFGLEEV

SEQ ID NO: 15324 - protein, 163 aa, Arabidopsis thaliana
MSSTTTDSTELQNLIKLFQNCQTHPRQHFPAKSSAVLVCLYQEQREDKNELRVILTKRSTTLSSHPGEVALPGGKRDQEDKDDIATALREAREEIGLDPSLVTIISVLEPFVNKKGMSVAPVIGFLHDKKAFKQLPNPAEVEEIFDVPLEMFLKKQASRGTRA

SEQ ID NO: 15325 - protein, 692 aa, Schizosaccharomyces pombe
GTRNGVRSRPVWLPGPEKGSETIINETRSQQSRWLAYAENVIRPLIHYKYWPSSEVDENEEQWWRDYVKMNHAFADKICEIYKPGDFIIVQDYSLFLVPQLIRNKIDDAVIGFYHHHPFPSSEIARCFPRRRAILRSVLGADFIGFEDYSYASHFISCCSRVLDLEIGHDWVNLNGNKVTVRAITVGIDVPRIIRSSGNVSVSEKLEELNKRYENMKVILGRDRLDELYGVPQKLRSFQRFLRTYPEWRKKVVLIQITISSAFKHPKLLSSIKKLVQAINQEFGTDDYTPVHHVEEQLEPADYFALLTRADALFINSIREGVSNLALEYVVCQRDRYGMVLLSEFTATSAMLHDVPLINPWDYNECAGIISYALSTPLERRKMIERASYKQVTTHTMQSWTSSLIRSLAYKLAATKTDQRIPTLTPEHALSVYSKASKRLFMMDYDGTLTPIVRDPNAAVPSKKLLDNLATLAADPKNQVWIISGRDQQFLRNWMDDIKGLGLSAEHGSFVRKPHSTTWINLAELLDMSWKKEVRRIFQYYTDRTQGSSIEEKRCAMTWHYRKADPREWSFQALECEALLEELVCSKYDVEIMRGKANLEVRPSSINKGGIVKQILSSYPEDSLPSFIFCAGDDRTDEDMFRSLHKNTRINKETSFAVTIGSDKKLSIADWCIETLQMLLISALVWRILLTE

SEQ ID NO: 15326 - protein, 218 aa, Oryza sativa
MAAASATQATAAEAAAPCSTTKTESTSSSSFLRARCATTRYPDVCYDSLLPYASTFQTSHVKLAVAAADVAAAHLRAFSARVKDMLLHRGGGSEEAAASSGGGAARVDAVLHDCASTISAAANLAKRSSAELTRLDADTAASTETSTSGGSRQARWQLSNAKTWLSAAMTNEGTCSDGFEDAGAAATASPAGKEVAAGVASVTQHTSNALALVNGIPL

SEQ ID NO: 15327 - protein, 286 aa, Nostoc punctiforme PCC 73102
MASVMLATVDPGDEVIVFEPYYENYGPDAILAGATPRYVTLHPPHWTFDEAQLHQAFNANTKAIIINTPHNPTGKVFTREELTLIAELCQKWDVLAFTDEIYEHILYDGTQHIALATLPGMEERTITINGLSKTYSVTGWRVGYILANPALTGAIRKVHDFLTVGAPAPLQRAGVTAMQLPPSYYEELGKLYHQKRDSILQILDGVGIPYFLPQGAYYVLADISKFGYKTDIEFTYHLIKNIGVAVVPGSSFFSQPEKGHSLIRFCFSKTPETLQAASDRLLKLSK

SEQ ID NO: 15328 - protein, 652 aa, Nostoc punctiforme PCC 73102
MGKVIGIDLGTTNSCVAVLEGGQPLVISNSEGGRTTPSIVGFGKSGDRLVGQLAKRQAVTNAENTIYSIKRFIGRRWEDTDTERERVPYNCVKGRDDTVDVQIRSKNYTPQELSAMILQKLKQDAENFLGEEVTQAVITVPAYFTDAQRQATKDAGTIAGLEVLRIINEPTAAALAFGLEKQDQEQLILVFDLGGGTFDVSILQLGDGVFEVKATCGNNHLGGDDFDNAIVRWLMERFQQQEKIDLSQDKMALQRLREAAEKAKIELSSMVNTSVNLPFITSDETGPKHLEMEFSRSKFEELAGKLIEGTIEPMIQALKDADLKPSAIDRIILVGGSTRIPAVQNALIKFFNGKAPDRSINPDEAVALGAAIQAGVLGGEVDNLLLLDVTPLSLGIETLGEVFTKIIERNTTIPTSKSQIFSTAVDGQTSVEIHILQGERAMSRDNKSLGKFLLAGIPPSPRGVPQIEVSFEIDVNGILKVSAQDKGTGREQSIRITNTGGLSTNEVERMRQEAELFSEEDRRRKELVELKNQADNLLFSYESTIKDNSNFIGEQMKTLASEKVSQLQAAMIDSSISTVEFKQRLDEFQQTLFAIGADVYNRANSQTDEIEEASASLFTPEVDSPMNGTLIPQFNFDFDEESTAQVDYEAID

SEQ ID NO: 15329 - protein, 388 aa, Nostoc punctiforme PCC 73102
MKLAARVSQVTPSLTLAIAAKAKALKAEGIDVCSFSAGEPDFDTPAHIKAAAVKALDEGKTKYGAAAGEPKLREAIAHKLKNDNGLDYKSENVIVTNGGKHSLYNLIVALIDLGDEVIIPAPYWLSYPEMVTLVGGVAVIVPTDATTGYKITPEQLRKAITPKTKLFILNSPSNPTGMVYTPDEIKALAQVVVDADIFVVSDEIYEKILYDGAEHISIGSLGKEIFDRTLISNGFAKAYSMTGWRIGYLAGPVEIIKAASTIQGHSTSNVCTFAQYGAIAALQSSQDCVEEMRQAFAKRRQVMLDRLNAIPGLSTAKPDGAFYLFPDISKTGLKSLEFCDALLEKHQVAVIPGIAFGADDNIRLSYATDMATIEKGMDRLEKFVKSRI

SEQ ID NO: 15330 - protein, 190 aa, Nostoc punctiforme PCC 73102
MFSPPFPEENDNAHAGSITLTDEKGRSLECYVEHSLEVDGQEYVLLLPVDSPVEIFSWEGDDEEEEAVLVEDDNIIEQIFATAQAVLSEQNLILKNTAYALTVAGDLPPVEESELFTLEIEDEEADLDPEQLQLLASFYDEDQEYAIYTPLDPLLFFARITKTGEPELLSPEEFRKVQPLLEEHLFNEVE

SEQ ID NO: 15331 - protein, 402 aa, Nostoc punctiforme PCC 73102
MQNNCIYLDNNATTKVDPEVIEVMLPYLTDYYGNPSSMHTFGGQVGKAVRTAREQLAAILGADESEIVYTSCGTEGDNAAIRAALLAQPEKRHIVTTQVEHPAVLNVCKQLETQGYSVTYLSVNHQGQLDLDELEASLTGNTALVTIMYANNETGTIFPIEQIGLRVKEYGAIFHVDAVQAVGKIPLNMKTSTVDMLTLSGHKLHGPKGIGALYIRRGVRFRPFMIGGHQERGRRAGTENVPAIIALGKAAELELLHLEEATTRERKLRDRLEQTLLAKIPDCVVNGDVTQRLPNTTNIGFKYIEGEAILLLLNKYGICASSGSACTSGSLEPSHVLRAMGLPYTTLHGSIRFSLCRYTTEAEIDQVIEVMPSIVERLRALSPFKNDDAGWLQGQEQALAHR

SEQ ID NO: 15332 - protein, 318 aa, Nostoc punctiforme PCC 73102
MTSIDNYNFSFSGEVTIPQAPPDFKSGFIGIVGRPNVGKSTLMNQLVGQKIAITSPIAQTTRNRLRGILTTPEAQLIFVDTPGIHKPHHQLGEVLVQNAKIAIESVDVVLFVVDGAVACGSGDRYIAELLSRSKTPVILGVNKTDQQPSDSQFLDDSYAQMAQSHEWEIVKFSAKTSAGLPQLQELLIEHLEIGPLYYPPDLITDQPERFIMGELIREQILLLTREEVPHSVAIAIDLVEETPSITRVLATINVERDSQKGILIGKGGAMLKAIGSEAREQIQKLIAGKVYLELFVKVQPKWRQSRISLAELGYRVEE

SEQ ID NO: 15333 - protein, 504 aa, Nostoc punctiforme PCC 73102
MLNQNQTPLLDALKANAARPHAPFYTPGHKQGEGIPQPLADLLGKAVFRADLTELADLDNLFAPQGVIQEAQQLAAEAFGASQTWFLVNGSTCGIEAAILATCGTGDKIILPRNVHSSAIAGLILSGAIPIFLNPEYDPVLDIAHSITPNALESALQQHPDAKAVLTVYPTYYGVCGDLSAIANITHQYNIPLLVDEAHGAHFAFHPELPTPALAAGADLTVQSIHKVLGAMTQASMLHIQGDRIDCDRISKALQLVQSTSPSYLLLASLDAARQQMVLHGKMLMSRTLQLANEARTIISQIPGLSVLQILSPPYQGGLGGSSSLGGLVGSPGFVALDKTRLTVTVSGLGLTGFEADEILDEKFAVTAEFASLQHLTFIISLGNTPADIKQLVQGFTILAKEYRATNLNVTNPNLQNLLTTQGHTLHFSPREAFFALSETLPLAQTSDRICAEIICPYPPGIPVLMPGEIITKPVLDYLQQIQGMGGFISGCNDSSLKTLKVVK

SEQ ID NO: 15334 - protein, 634 aa, Nostoc punctiforme PCC 73102
MAKVVGIDLGTTNSCVAVMEGGKPTVIANAEGFRTTPSVVAFAKNGDNLVGQIAKRQAVMNPENTFYSVKRFIGRRYDEVSNEATEVSYKVLSSNGNVKLDCPIAGKPFAPEEISAKVLRKLVEDASKYLGETVSQAVITVPAYFNDSQRQATKDAGKIAGIEVLRIINEPTAASLAYGFDKKSNETILVFDLGGGTFDVSVLEVGDGVFEVLATSGDTHLGGDDFDKKIVDFLAEKFKKAEGIELRKDKQALQRLTEAAEKAKIELSSVTQAEINLPFITATQDGPKHLDTTLTRATFEELCSDLIDRCRVPVENALRDAKLSKGDIDEVVLVGGSTRIPAVQQIVKQVLGKDPNQSVNPDEVVAIGAAIQAGVLNNEVTGILLLDVSPLSLGVETLGGVMTKIIPRNTTIPTKKSEVFSTAVDGQTNVEIHVLQGEREFSNDNKSLGTFRLDGIPPAPRGVPQIEVVFDIDANGILNVTAKDKGTGKEQSISITGASTLDKTDVDRMVREAEQNASSDKDRREKIERKNQADSLAYQAEKQLQELGDKVPDADKTKVEGLVKELREAVAKEDDEQIKKLTPELQQALFAVGSNIYQQAGAGAAPGAEPQDGGSTSSSGSGDDVIDADFTESK

SEQ ID NO: 15335 - protein, 437 aa, Nostoc punctiforme PCC 73102
MKKDVFRDAQRSKIGVLVTTHACNPWVSPIPNSQFPIPNTQYPIHSQGNMESLTSRMQDVQSPIIPVVGELIKNSPGTISLGQGVVHYNPPPEAIEFLSKFLADPANNLYKSVEGIPPLLTAIAGKLQAFNGIEINGENCIVVTAGSNMGFMNAILAITNPGDEIILNTPYYFNHEMAIAIAGCRAVLVATDENYQLRPEAIAQAITPKTRAIVTISPNNPTGVVYSEAALRQVNQICDTHRIYHISDEAYQYFTYNGVKHVSPGAFGKSKYTISLFSLSKAYGFASWRIGYMVIPKHLFVAIKKVQDTILICPPVISQYAALGALQAKEEYLQSNIGAIFQVRQLVLDSLNRLEGLCSITPANGAFYFFLKVNTQMDAFELVKRLIQEHKVAVIPGTTFGMDDGCYLRVAYGALQKETAKEGIERLVQGLETIVRS

SEQ ID NO: 15336 - protein, 285 aa, Nostoc punctiforme PCC 73102
MVIQIPKETSPRPFLKWAGGKSRLIQQYIPYFPKSYKNYYEPFLGGGAVFFYLQPKAATLTDINAELINTYCCVRDRVEELISLLKEHKIRHNKDYYYSVRNNSGGTDLEKAARLIYLNKTCFNGLYRVNSQGKFNVPLGRYENPNICSEVLLQAASEALYYAEIKQADFTEVLNHATSSDDFVFFDPPYHPISETSYFTAYSQNCFSKKDQEVLRDTCAELASRGVKVMVCNSDSEFIRNIYTDINFEAYKIKAARSINSNIKNRGMIDELLITSFKDFYLPRQ

SEQ ID NO: 15337 - protein, 225 aa, Nostoc punctiforme PCC 73102
MDRSATSATAMKEPSMKDHKRLLLIDDDPNLILLVKDYLEFRGYEVITAENGREALEILEQDVPDMIICDVMMPEMDGYTFVEQVRQNERTSWIPVLFLSAKGQSADRVKGLNKGADVYMVKPFEPEELVAQVESSLKQTIRWKEHQAKGGENGSRIQVPFDVQLTPTELKVVQFVARGLANREIAEELNVSQRTVESHVSNMLGKTNLHNRTELARWAIENQMA

SEQ ID NO: 15338 - protein, 628 aa, Nostoc punctiforme PCC 73102
MKFSWKVVVLWTLPALVIGFFFWQGAFAGAPTDMSKNAANTRMTYGRFLEYLDGDRVSSVDLYEGGRTAIIEARDPDIENRIQRWRVDLPVNAPELISKLKEKDISFDAHPMRNDGAIWGLLGNLVFPVLLITGLFFLFRRSSNLPGGPGQAMNFGKSKARFQMEAKTGVKFDDVAGIEEAKEELQEVVTFLKQPERFTAVGARIPKGVLLVGPPGTGKTLLAKAIAGEAGVPFFSISGSEFVEMFVGVGASRVRDLFKKAKDNAPCIIFIDEIDAVGRQRGAGIGGGNDEREQTLNQLLTEMDGFEGNTGIIIIAATNRPDVLDSALLRPGRFDRQVTVDAPDIKGRLEILEVHSRNKKLDPSVSLDAIARRTPGFTGADLANLLNEAAILTARRRKEAITLREIDDAVDRVVAGMEGTPLVDSKSKRLIAYHEIGHALVGTLLKDHDPVQKVTLIPRGQAQGLTWFTPNEEQGLISRSQLKARITGALGGRAAEEVIFGAAEVTTGAGGDLQQLSGMARQMVTRFGMSDLGPLSLESQQGEVFLGRDWTTRSEYSESIASRIDGQVRAIVEECYDNAKKIVRDHRTVTDRLVDLLIEKETIDGEEFRQIVAEYAEVPEKQQYVPQL

SEQ ID NO: 15339 - protein, 649 aa, Nostoc punctiforme PCC 73102
MCGITGFWDISKQFSGEHLDETIQKMSKTLLHRGPDDGGIWTDVEVGVALGHRRLSIVDLSPLGHQPMMSANGRYMVVFNGEIYNFLELRRELTQLGHNFRGHSDTEIMLAGFSEWGLDKAIRRFNGMFAFALWDRQKRILHLGRDRLGEKPLYYGWQGSTFLFTSELKALKAHPNFRAEINRDALTQFFRYSYLPAPYSIYQGIYKLPPGTLLSWNGIDAHPDPVTYWSAREVTELGIAEPFMGSESEAVIQLEALLREAVGLRMVADVPLGAFISGGIDSSTIVALMQAQSSQPVKTFTIGFNEEAYNEAKHAKAVAKHLGTDHTELYVNPKEALEVIPKLPFLYDEPFSDVSQIPTFLVSQLAKQQVTVSLSGDGGDELFAGYNRYLFGRKIWQAIGWIPTTVRKNSARALTSVSPQNWNRGFANVNALLPSRIKQPEFGNKLHTFSEIMALPNPTAIYTKLVSHWEDPKALVIDGLEPPTILSNSQNWPHLLDFTQCMMYFDTVTYLPDDILVKVDRASMGVSLEGRIPFLDHRLVEFAWRLPLSMKIRNGQGKWLLRQVLYKYVPPTLVERPKVGFGVPINSWLRGPLRDWAEELLNENRLKNEGFFNPKPIREKWEEHLSGAASWEYRLWDVLMFQAWLEANH

SEQ ID NO: 15340 - protein, 527 aa, Nostoc punctiforme PCC 73102
MTDTTTTTTSLNKFEKFKAQKDGLAIRDEIEKFAALGWEAMDETDRDHRLKWVGVFFRPVTPGKFMMRLRMPNGILTSSQMSVLAQVVQRYGDDGCADITTRQNIQLRGIRIEDLPDIFNRFHAVGLTTIQSGMDNIRNITGDPVAGLDADELYDTRELIQQIQDMLTNKGEGNPEFSNLPRKFNIAIAGGRDNSVHAEINDLAFVPAFKEANGQEFSKPPIFGFNILVGGFFSAKRCEAAIPLNAWVAPEDVVAVCRAVLEVFRDHGPRANRQKSRLMWLIDEWGLEKFRAEVDTRLGKSLLPAAAKDEIDWEKRDHIGVYKQKQPGLNYAGLNIPVGRLYAEDMFEIARLAEVFGSGEIRFTVEQNIVIPNISDSRLATFFTEPLLERFSINPGLLARSLVSCTGAQFCNFALIETKNRALEMIKALEEDLIFTNPVRIHWTGCPNSCGQPQVADIGLMGTKTRKNGKTLEGVDIYMGGKVGKDAHLGTCVTKGVPCEDLQPLLQDLLIKNFGAKLKQEALVISG

SEQ ID NO: 15341 - protein, 389 aa, Nostoc punctiforme PCC 73102
MNIEKFIQRTEILHKRLADLYQTASVLPWIPTDLQPQALKELHNTLKIVQLAAQELYQQNEELLETRNWLEAERQHYQELFEFAPDAYLVTNTEGIIQEANHTAARLLNVSKHFLVGKPMMNFVPLGERQQVRCELIQLSESDRVKELLVRLQKRHSESFDAALTVKVVRNQQGKAISLRWMVRNISDRQYLESGIVKNDRDLFKDRPVHKYSKGETISLNPLVIFYVCQGLVKLNTYCETGEEVLIGLATAGMVFGSSLTSLNIYQATALSDVDLVSIYSAEIANSPTLSHILLPKMNQRLQQTESFLAISGRRRVQERLQHLLQLLKQEVGEAVPEGTRLSVRFTHEDFASACCTTRVTITRLLGKLQEEGIISFDLKKHMILKDSD

SEQ ID NO: 15342 - protein, 388 aa, Nostoc punctiforme PCC 73102
MRIAVAKEIEVCERRVALIPDTVARLVKQGLEVWVEKGAGERSFFSDTDYEAAGATIIGDTAKLWGETDILLKVSPPQEREDGRSEVDLLKEGAVLVSFLNPLGNPVVAEQLANRKITALSMEMIPRTTRAQSMDALSSQASLAGYKAVLIAAAALPKYFPMLTTAAGTIAPAKVFIMGAGVAGLQAIATARRLGAVVEAFDIRPAVKEEVQSLGAKFVEVKLDEETVAAGGYAKEISEASKQRTQEVVAEHVKNSDVVITTAQVPGRQAPRLVTEEMVAQMKPGSVIVDLAADQGGNCACTEPGKDIVWNGVTIIGPINLPSSMPIHASQLYAKNVTSLMQLLIKDKALRVDFSDDIVDAACVTHAGEIRNQRVRDALQALSGVGAG

SEQ ID NO: 15343 - protein, 637 aa, Nostoc punctiforme PCC 73102
MRSRSVSAGESLSQISLPQTENHKQSRASSPPVLPKRASGGFALLDSLHRHGVDYIFGYPGGAILPIYDDLYKVEATGAIKHILVRHEQGAAHAADGYARATGKVGVCFGTSGPGATNLVTGIATAYMDSIPMIVVTGQVARPSIGTDAFQETDIYGITLPIVKHSYVVRDPKDMARIVAEAFHIASTGRPGPVLIDVPKDVALEEFDYVPVKPGSVKLRGYRPTVKGNPRQINAAIQLITESRRPLLYIGGGAIAAGAHEEIKELAELFNIPVTTTLMGIGAFDEHHPLALGMLGMHGTAYANFAVSDCDLLICVGARFDDRVTGKLDEFASRAKVIHIDIDPAEVGKNRIPEVPIVGDVRNVLVDLLRRCKETGVKATPNQNQEWLNLVNRWRDEYPLIVPQHPDSISPQEVIVEVNSQAPNAFYTTDVGQHQMWAAQFLKNGPRRWISSAGLGTMGFGLPAAMGAKVAFPDEEVICISGDASFQMCLQELGTLAQYGINVKTIIINNGWQGMVRQWQQAFYGERYSCSNMEVGMPDVELLAKAYGIKGMVISDRSQLKDAIAEMLAHKGPVILNVHVTRDENCYPMVAPGKSNAQMVGLQKQPPKAAAEPVYCSNCNAKNAPNHNFCAECGTKL

SEQ ID NO: 15344 - protein, 642 aa, Nostoc punctiforme PCC 73102
MTNLGKKALVKRQSSKRVAWFGAKALPAVGIAASLIMLPGIFGSTPVLAQKAESTSSSSSTSLNYGELIKKAKAGEVQKVELDETEQVARVYLKGQKENTPPQQVRLLAQNTELINILKDKNVEFGEISSANSRAAVGLLINLMWILPLLALMLLFLRRSTNASSQAMNFGKSKARFQMEAKTGVKFEDVAGVEEAKEDLEEVVTFLKQPERFTAVGARIPKGVLLIGPPGTGKTLLAKAIAGEAGVPFFSISGSEFVEMFVGVGASRVRDLFKKAKENAPCLIFIDEIDAVGRQRGAGIGGGNDEREQTLNQLLTEMDGFEGNTGIIIIAATNRPDVLDAALLRPGRFDRQVMVDAPDLKGRLEILKVHARNKKIDPSVSLEAIARRTPGFTGADLANLLNEAAILTARRRKEAVTILEIDAAVDRVVAGMEGTALVDSKSKRLIAYHEVGHALVGTLLKDHDPVQKVTLIPRGQALGLTWFTPNEEQGLVSRSQLKSRITATLGGRAAEEIVFGKPEVTTGASNDLQQVTGMARQMVTRFGMSELGPLSLENQSGEVFLGRDWMNKSDYSEEIAAKIDSQVREIVNNSYIKAKELLEENRIVLERLVDLLIEEETIEGDSFRQIVADNAQIADAQLAVPH

SEQ ID NO: 15345 - protein, 322 aa, Nostoc punctiforme PCC 73102
MPKYLNMFVSTKINLSCLPAFTKSKIYSAIFGLILSVSLPGVAGAETVMQKVARTGVLTAGTSRDALPFAYSDSQGKLIGYSVDMLTLIQKQLEKELGKKIQLKLVGVTPAERIPKIINRQVDIICDASSFTWERDKKIDFSVSYGVTGTQILIKKDSNLGSPESLINKRVGVLAGTTNEETIKQVQTQAKLVYFKTRAEGFAALEQGKIDAFASDSIILEGWLQTAKNQDSFAIAPPRPYSREGIACMVPENNSKFLDSVNYSLVKFMQGFVNDNPKYVAIFDRWFGSQGVVFLNRDLRDLAVETMQLMIEFHEDIPQKDL

SEQ ID NO: 15346 - protein, 584 aa, Nostoc punctiforme PCC 73102
MLFDAFKNRKSPKIEFIKTDPTWRVAWGTVDESYENIAWRDEKFYVVLPRTASGFLTEKLAISSGGRFVVVGDVWLTNQVQLLQKLGIEPDSFQGSYLQVVANLWERWGFECLHQLVGMFALVVWDRERQVLKLVRDRIGVRTLYYTTTGSVRWIAPQLRTLSPHRSSELDLVALRDYLCCAFVPGERTLWEQVRELRPGTVLEFPDQKIEAYWQLQEQIVAIDQPLAWHGDRLRELLDQVVQEYLPPANEPVGVFLSGGLDSSCITALAAKFHKAPVHTFSIHFGSECPNELEFSSLVASHCQTQHHILEITFKDMWSRLPETMAYLDDPIGDPLTVPNLLLGRLARENVEVVLNGEGGDPCFGGPKNQPMLINSLYGSVTNQDALQAYLISFQKCAVDLPQLLKPEVWTAVQTAPWVFEEDLYSQASYLNRLMAMNIKFKGADQILTKVSNLTQAALLHGRSPLFDQRVVDLSMEIPPEYKLSGVEEKAVLKQVIADILPEEIIHRPKSGMMVPVQLGFRKYWQQEARDLLLNRNAAITPYLNQLPIRNWLNYQGDTWSRYGVKLWLLASLEIWLQVNQKVR

SEQ ID NO: 15347 - protein, 621 aa, Nostoc punctiforme PCC 73102
MAIKEQPKSPRFRIVANILLAVSGLFLLLNLFLPGLFASGPTGVPYSLFIHQVQEGEVNRVSVGQNQILYELKTENGEPGPVFATTPIFDLELPKLLEEKGVEFAATPPPKNTWFTTLLSWVIPPLIFIGIWQFFLARGGGGGPQGALSIGKSKAKVYVEGESAKITFADVAGVEEAKTELVEIVDFLKTPARFTQIGARIPKGVLLVGPPGTGKTLLAKAVAGEAGVPFFSISGSEFVELFVGVGSSRVRDLFEQAKKQAPCIIFIDELDAIGKSRSSNGFYGGNDEREQTLNQLLTEMDGFAAGDATVIVLAATNRPESLDSALLRPGRFDRQVLVDRPDLSGREAILKIHAQKVKLGNDVDLKAIATRTPGFAGADLANLVNEAALLAARNLRESVAQEDFAEAIERVVAGLEKKSRVMNETEKKIVAYHEVGHAMVGALTTGNGRVEKISIIPRGMAALGYTLQLPTEDRFLMNEDELRGQIATLLGGRSAEEIVFNSITTGASNDLQRATDLAERMVTSYGMSKVLGPLAYQQGQQSMFLGNGGANPRRAVSEDTSKAIDSEVKEIVETAHEQALEILRQNRDLLEAIATQLLETEVIEGEKLHDLLSQVKPVTHS

SEQ ID NO: 15348 - protein, 558 aa, Nostoc punctiforme PCC 73102
MATFTVGDYLLLRLEQIGIKHIFGVAGDYNMEFLDYIVNHNGIELIPTCNELNASYAADGYGRLNGIAALITTFGVGELSAINGVAGAYAEHVPVVAITGAPATKIQALGSLVHHTLGTGDFSMFARMYEQVTVAQAYLTNENATTEIDGVLGICLLKKLPVYISIPMDVALTEVSAPSDSFIPPVFQSDGATLAEIVDVCVNILEKASQPVILADIGVARYHLHEQLRKLLTATGYPYATMNMGKGLLEETHPQFIGIYNGAASEESVRKRIEQADCVLTIGALMTDFNTGKFSAKLDPSQTIEVHGQYVKVKHALYNNVAMADVLSALSQRLQRRDPQTLNFKSATENLDAGFITPIEGGSSAPITQQYFWHRFAHFLQEDDIIVAETGTCLFGASIVPLPKGATFVGQVLWGAIGYSVASLLGCALAKPTAGIAASQRRSILLVGDGSFQMTAQELSTILRYNLKPIIFLINNDGYTIERDIHGERMPYNDIQPWNYHQLPKVFGGNGWGIKVSTESQLDKALQTAQQNHDQLAFIEVVMDKMDSPEVLLKMLQQ

SEQ ID NO: 15349 - protein, 607 aa, Nostoc punctiforme PCC 73102
MDDIFKGFEHLLEIAKALEEKVEKGELKTSIQIRSHNLSSIPRQGNIPRTSNSSRVRSNSTVGTTPMDDTDVTPPSARTNSKAAWQGIGGLADVLQEIRELVEIPLKRPDLLVKLGLEPPRGVLLVGPPGTGKTLTARVLAEELELNYIAINGPEVMSKYYGEAEARLRSIFEKATRSAPCLIFIDEIDSLAPDRSQVEGEVEKRLVAQLLGLMDGFAKTEGVLVLAATNRPDYLDPALRRPGRFDREVQFRVPDRDGRLEILTILTSAMPLETSVNLGAIADLAVGFVGADIKALCQKAAYIALRRQVPSLNSPVPENMTIVQQDFLEAIKEIKPSVLRDVAIEVPSVSWDDIGGLDDVKQKLQESVEGALLYPELYEQTKAKPPRGILLWGSPGTGKTLLAKAIASQARANFIAVNGPELLSRWVGAAEQAVRELFRKARQAAPCVVFIDEIDTLAPARGRFTGDSGVSDRVVGQLLTELDGLHECPKVLLVGATNRPEALDPALLRAGRLDLQIKIDLPDRASRLAILRVHNLDRPLVDVDLETWATVTEGWNGADLALLSNQAALSAIRRYRAQGLTDSSLIQITNDDFQVTYQMLANQHQSQ

SEQ ID NO: 15350 - protein, 439 aa, Nostoc punctiforme PCC 73102
MLESLGRIKNPLVRSIAAAATVSSVITLSAAVVIGVSNAKAKSAYQFGVYSSLFGTASGAVFGLVYTNKASGNKSTPDLKTLDSHVWQDWRNFVVVRKVKESEEITSFYLQPEDKGEITNFQPGQFLTIKLDIPGQDKPVIRTYSLSDYPENCEYYRLSIKREPAPNGLDVMPGIASNFMHDRIQEGSVILAKPPNGKFVLDVQKSIPAVLISNGVGITPMISMAKACSLLNPTRPIWFVHGARDGKFHAFRDEVREISRQNHNLNVHFRYSRPTPEDRGKYHSVGYVDAALIQELVRQEAEYFLCGSPSFMQSIMQGLKESGVPDSRVFFESFGKPMKSVSEKQTQTVTGDDKFAEIVFAKSGKTLTWQPSDGTILEFAEANDINPPFSCRVGVCGTCMCKIREGVVAYQEEPTATTDQGSVLICISQPGTSKLVLDI

SEQ ID NO: 15351 - protein, 398 aa, Nostoc punctiforme PCC 73102
MNINPTEKLSQPIVEKVAIVGAGPGGLAAAIALRSQGIDVQIYEKAQEFRPAGTGLGLAPNGLNFLDAIAPGIVETLKGSGCEVHHTVLKNFRGETIRANASKYQEKYGQPLVTVWWYRLQQVLASRLPSDIVHLNHRCIGFEQDENGVEIRFDGEKSVYADLLIGADGVNSVIREILFGEGKPNYIGSMCWRAVIKYHHELFNDYELVFVKGNQQFMYLLNVGGGYMSWISRKFSPEYSLCHSADEVKSRILHELADWDESFQVVVQATPAEQIWEGPICDRPPLTHWSQGRVTLLGDAAHPMAPAMGQGANTTFEDAYELRECFSQSANLQEALTSYEQRRMQRTEIIQARSALGEMRYYESNTVASNGQREQTMSVNDDFHKWLYDYKPSATIKF

SEQ ID NO: 15352 - protein, 460 aa, Nostoc punctiforme PCC 73102
MTEFFNQISRRKFIFAAGASASAVFLKGCLGNPPENLTGGSTKAQPTAQSVANISSEQAPETTTVKLGYIPIVEAAPLIIAKEKGFFAKYGMTNVDLSKQASWGSARDNVEIGSAGGGIDGGQWQMPMPHLITEGLITKGNQKIPMYVLCQLITHGNGIAIANKHQGKGISLQLAGAKSLLKESKSSTPFTAAFTFPHVNQDLWIRYWLAAGGLDPDADVKLLTVPAAQTVANMKTGTMDAFSTGDPWPYRLVQDKIGYLAALTAEIWKNHPEEYLAMRGDWVDKNPKATKAILKGIMEAQQWLDNFDNRKEAAQILAGRNYFNLPSPEILADPYQGKYDMGDGRKIDDKSMAAYYWKDGKGNVSYPYKSHDLWFIVENVRWGFLPKDYVDNNAAKARELINKVNREDIWKEAAKEAGIAVADIPTNTSRGVEEFFDGIKFDPEKPEEYLKSLKIKKVSI

SEQ ID NO: 15353 - protein, 338 aa, Nostoc punctiforme PCC 73102
MNSNRGSAVLSSATFKVQASSTGMTDNHRLRLFSGSANLQLSQEVARYVGMDLGPMIRKRFADGELYVQIQESIRGCDVYLIQPCCQPVNDHLMELLIMVDACRRASARQVTAVIPYYGYARADRKTAGRESITAKLVANLITEAGANRVLAMDLHSAQIQGYFDIPFDHVYGSPVLLDYLASKELPDLVVVSPDVGGVARARAFAKKLNDAPLAIIDKRRQAHNVAEVLNIIGDVKGKTAVLVDDMIDTGGTIAEGARLLREEGARQVYACATHAVFSPPAMERLSSGLFEEVIVTNTIPIPENNRFPQLVVLSVANLLGETIWRIHEDTSVSSMFR

SEQ ID NO: 15354 - protein, 334 aa, Nostoc punctiforme PCC 73102
MKVAVFSTKVYDRQFLSTVNSPTQHELVFFEPRLNRDTAILAAGFPAVCVFVHDQVDAPTLKLLASRGTRLVVLRCAGFNNVDLQAAADLGITVVRVPAYSPYGVAEHAVGLILSLNRKIHRAYNRVREGNFSLDGLLGFNLHERTVGIVGTGKIGLILGQIMKGFGCNLLAYDVYRNPELEALGGKYVELPELFANSDIISLHCPLTPETHHLINAEAIEQIKPGVMLINTSRGALIDTQAVIEGLKSGKIGYLGVDVYEQESELFFEDLSGEIIQDDIFQRLTTFPNVLITGHQAFFTAEALHNIAETTFANIADVENGRPCANEIRAQPSA

SEQ ID NO: 15355 - protein, 127 aa, Nostoc punctiforme PCC 73102
MQRTLLLAKIHNCTLTGANINYVGSISIDEILLEKAGILPYEQVQVVNSANGQRFITYAIPAPAHSGVIELNGGAARLGIIGDRLIIMTYGQFTPEELKNYSPTVVIVDEKNRLLEVRRYDDLLVKV

SEQ ID NO: 15356 - protein, 402 aa, Nostoc punctiforme PCC 73102
MQIYLDYSATTPTRKEAIAVIQTVLTQQWGNPSSLHEWGQRAATVVEQARVQVASLINAANPESIVFTSGGTEANNLAIMGVARLYAVPQHLIISSVEHSAISETVKLLEMWGWEVTRLSVDIKGRVNPLDLKAALRHNTVLVSIIYGQSEVGTVQPIAELGKIVRCLRRAEPSHGTLFHTDAVQAAGRLPIDVQQLDVDLLSLSSHKIYGPQGAGALYVRPGVELMPLLSGGGQEMGLRSGTQAVPIIAGFGVAAELAAQELAIETPRLIELRDRAFAQLAEIPGLIPTGDGCDRLPHHVSMCLENADGKKLSGKALVRQLNLAGIGISAGAACHSGKLSPSPILLAMGYSEKAALGGIRITLGRDSTEADIDWTVMVLKQVLQRLTGESLKQQLLQIQVK

SEQ ID NO: 15357 - protein, 557 aa, Nostoc punctiforme PCC 73102
MAISNILKEPQLLRLNRWFSGLRGDLTGGLTAAVVALPLALAFAVASGVEPKAGLYTAIVAGIVAAIFGGSPVQITGPTGAMAVVLVGIVAKYGLEKVWIAGVMAGIIQIALGVAKLGQLVKFIPYPVTAGFTNGIAVIIFCGQLNNFFGLRIPRSEHFLPGLWQSLTHVEALNWAAVGLATLVMAANIFWPRINTTIPGSLVGLVLATGIATYFHLDVPTIGSIPQSLPMPQGIPHWNDFSVIRELINPALALAALGSIESLLSAVVADGMTVSEKHNSDRELIGQGLANIIIPFFGGIPATGAIARTAVNVRSGGKTRLSGVIHGVALAIIVLTLAPLAAQIPLAALAGILMVVSVRMIEWEAIGLLMRATYSDFAVMILTWLVTILFDLVLAVEVGLIAAGALFIKRMSDLSLVKIPETEVFPPGTPLELGKEIAVYRIDGPVFFGAAERFATFLRDEPEVKYLILRLRFVPNMDTTGLVALEDIYHDLERHNCRLILTGLQPEVKQLLERTGLLKTIGLSNCFETTTDAICSISPQIQRCSQPVAADLKELND

SEQ ID NO: 15358 - protein, 437 aa, Nostoc punctiforme PCC 73102
MYNQGAVEGAANIELGSRIFVYEVVGLRQGEETDQTNYPIRKSGSVFIRVPYNRMNQEMRRITRLGGTIVSIQPITALEPVNGKASFGNATSVVSELAKSGETANSEGNGKATPVNAHSAEEQNKDKKGNTMTQAKAKKDHGDVPVNTYRPNAPFIGKVISNEPLVKEGGIGIVQHLKFDLSGGDLKYIEGQSIGIIPPGLDKNGKPEKLRLYSIASTRHGDDVDDKTVSLCVRQLEYKHPETGETVYGVCSTHLCFLKPGEEVKITGPVGKEMLLPNDPDANVIMMATGTGIAPMRAYLWRQFKDAERAANPEYQFKGFSWLIFGVPTTPNLLYKEELEEIQQKYPENFRLTAAISREQKNPQGGRMYIQDRVAEHADELWQLIKNEKTHTYICGLRGMEEGIDAALTAAAAKEGVTWSDYQKQLKKAGRWHVETY

SEQ ID NO: 15359 - protein, 629 aa, Nostoc punctiforme PCC 73102
MAKIVGIDLGTTNSCIAVMEGGQPVVIPNTEGGRTTPSVVAYTKKGEKLVGQIAKRQGVMNPENTFYSVKRFIGRRYDEVTQEAKQVTYKVVRDSNGNVKLHCPALNKEFSPEEISAEVVRKLIDDASTYLGEPVRQAVITTPAYFNDSQRQATKDAGRIAGIEVLRIINEPTAAALAYGLDKKTNETILVFDLGGGTFDVSILEVGDGVFEVKATSGDTHLGGDDFDKRIVDWLATEFQRNEGIDLRKDKQALQRLTEAAEKAKIELSSATQTNINLPFITATPEGPKHLDMTLTRVQFEQMCADLFDRSRIPVEQALRDAKLSPADIDEVILVGGATRMPAVQQLVRQIIGKDPHQGVNPDEVVAVGAAIQAGVLGGEVKDVLLLDVTPLSLGVETLGGVTTKIIPRNTTVPVKKSEVFSTAADAQTNVEIHVLQGEREMASDNKSLGTFRLDGIPPAPRGMPQIEVTFDIDANGILSATAREKATGKEQSISITGASTLDKSEVERMVKEAERNAEEDRRRREQIDTKNMADSVAYQAEKQLQDLGDKVPPADKSRVESLIRDLRQAIEQNNIDRMKSLTNEIQQGLMQIGTAVYSQAGASPNGGTSTDRQGGGEDVIDADFVEQK

SEQ ID NO: 15360 - protein, 247 aa, Nostoc punctiforme PCC 73102
MGNLSGDKGTILVVDDEASIRRILQTRLEMIGYHVVTASDGEEALSAWSRETPDLIVLDVMMPKLDGYGVCLELRKQSDVPIIMLTALADVADRITGLELGADDYMIKPFSPKELEARIASLLRRRFHKSDINTIIPNSLIIHVGNLKIDVNKRQVHKNEQRIRLTGIEFSLLELLVNHSGRVFSRLEILQQLWGFVPGSHTDTRVVDVHISRLLTKVESDPNDPEFIITAKGSGYFFPRIVESEQE

SEQ ID NO: 15361 - protein, 342 aa, Nostoc punctiforme PCC 73102
MQFIDQAKIEVEAGKGGDGIVAFRREKYVPTGGPSGGNGGRGGSVFFVADENLQTLLDFRYNHRFQAEKGTRGGPNNCTGAGGKDLIIEVPCGTTIYDAETGELLGDLTEPQQTLLIAQGGKGGLGNQHFLSNRNRAPEYALPGLPGEIKQLRLELKLLAEVGIIGLPNAGKSTLISSLSAARPKIADYPFTTLIPNLGVVRKPTGDGTVFADIPGLIAGASHGAGLGHDFLRHIERTRVLLHLIDATSDDVIRDYNTIKEELQAYGQGLAERPQILALNKIDAVDRETVDLEALATQLNHLSYAPVFIISAVTRTGLEPMLQEIWGILDQMKVPEEVEALR

SEQ ID NO: 15362 - protein, 330 aa, Nostoc punctiforme PCC 73102
MKPKVVITHWVHPEIITNLSEYCEVVANPTRETLPREEILKLAQDAEALMVFMPDRIDEAFLKACPKLKIIAGALKGYDNFDVDACTRQGIWFTIVPSLLAVPTAELTIGLIIGLARQMLLGDRLIRQGTFAGWRPHLYGMGLANRTLGIVGMGSLGQALAQRLSSFEMNLIYTDAIPLPKEKAAAWCLSQVSLDTLLATSDFVVLMVPLQPETFHLINEKSLARMKPGSFLINPCRGSVVDEQAVSDALASGHLAGYAADVFELEDWARSDRPSKIPPSLLEKQDQTFFTPHLGSAVDDLRYDIAIEASQNILQVLQGHSPQGAINCPS

SEQ ID NO: 15363 - protein, 445 aa, Nostoc punctiforme PCC 73102
MGKQQIWKNWWENHTCTPEHYYQPEQIDEVVEIIKSANLEQKQIKVIGSGRSWSDIPCTDGYMISLDKFNQVLDIDIEQKTVIVKSGIRIYQLVDILAKHGLALSSLGSICEQSIAGAISTGTHGNSLHQGGLASSILELELVNGIGEVIKCSKSENPDLFSAALIGLGAIGIITQVKIQCCNQFWLTETLQCWNIKDVLENLDTLKKNDYCRFWYTTTNKDAIVQTFSDSQILEKTGFIHFIKRIITQIFWFLWISWHDNPAEHDSQSFTRKDESQHILCYPRFFLKLYKLSFRMTKYCQNVLISEYGIPEEMASIAMNKILSLVDRGIIKGHLRFEVRFGAAEDVWLSTAYQRPTCYIQVLFEKKNFTSTQDQNDAFIQVENIIKNLAGRPHWAKDHLYTNDDLRSTYPRWQEFLQIRQQTDPQQCFTNSYLNKIFDDVRRTA

SEQ ID NO: 15364 - protein, 233 aa, Nostoc punctiforme PCC 73102
MEDRYSLQAQANPWMITSAPFFQGLPEPAVESALIHLVTRTHPANQVILLENDWGGSVYFIMDGWVKIRTYNLEGKEVTLNILGKGELFGEMAALDEVPRSTDVITLAPTVIGSMPAQDFVKLLQIEPLAGVRLAQLMARRLRQVNRRLRLRESDSQSRVADTLLFLAEGQGKKGQTGTEIPNLPHRELSSLSGLARETVTRVLTRLEKKGLIKRDQDTICIPDLSALERMIV

SEQ ID NO: 15365 - protein, 443 aa, Nostoc punctiforme PCC 73102
MNFSTLGLSNEIIRAVTERGYTEPTPIQRQAIPAVLSGSDLLAGAQTGTGKTASFTLPLLHRLSSEKNVKVTSNGYRPIRALILTPTRELAAQVEESVREYGKYLQLNSMVMFGGVGINLQKQRLKNRVDILVATPGRLLDHVQQGTLNLSHIEVLVLDEADRMLDMGFIHDIRRILAILPKQRQNLLFFATFSDKIKALAAGLLNNPKMIEVARRNVTAETIAQKIYQVDRDKKRQLLAHLIRRDNWYQVLVFTRTKYGADRLVKQLGEDRIQALAIHGNKSQPVRTNALAKFKNGSLQVLVATDIAARGLDISELPHVVNFDLPNVPEDYVHRIGRTGRAGASGEAVSLVCVDEYSLLTDIEKLIEQRLPREVVAGFGPNPDTTAEPIPNGRQHRPKSGGEKRSPRTPKPLPRTSAKRKAAPPATNGEKPGARSSASRRSK

SEQ ID NO: 15366 - protein, 440 aa, Nostoc punctiforme PCC 73102
MNYKPYLQMLNLPEDSLILVVDDTTTNLGIVFDILTNVGFKVVTENDGSRALKQAEEQLPDLILLDVMMPGIDGFETCKRLKENSATYDIPVIFMTANSDTNSKVRGLNIGAVDYITKPFNEEELLARIKTHLQLRNLTKTLEKRVAERTAALSKALKDLQESQLQLVQTEKMSALGQLVAGVAHEINNPVSFIHGNLGHASVYFQDIANIINLYQQYYPNPVPEIQEEIAGIDLKYMLSDLPNLISSMKEGVQRIRNISTSLRTFSRADSDRKVSCNIHDGIDSTIMILKHRLKASENRPDIQIIRDYENLPDLECFIGQLNQVFMNLLANAIDSLEESNIGRTYIEIEANPNQIFIQTTLNENNNYILIRIKDNGVGMSADVQQKIFDYLFTTKPVGQGTGLGLSIAHQIVVEKHGGTLEVNSELEHGSEFIIKLPIY

SEQ ID NO: 15367 - protein, 1561 aa, Nostoc punctiforme PCC 73102
MNNQPMNQEQKITANINSRDTYQGQKWLVEERDACGVGFIAHRQNHTSHEIVEKALAALTCLEHRGGCSADRDSGDGAGVLTAIPWDLFQQDFAQRGKEFPSTNNIAVGMIFLPQDQEAAQKARAAVEQVATEEKLIVLGWRVVPVQSDLLGVQARENQPQIEQVLLASVDKSSDELERQLYITRRRISKVATNISEEFYICSLSSRTIVYKGMVRSAVLGEFYQDLKNPVYKSAFAVYHRRFSTNTMPKWPLAQPMRLLGHNGEINTLLGNINWMMAREASLNHPVWGDRIKELKPLVHIDNSDSATLDNVLELLVCSGRTPLEALMIMVPEAYQNQPSLHESPEIVDFYEYYSGLQEAWDGPALLVFSDGKKVGATLDRNGLRPARYLITKDDYIVVASEAGVVDFPEADIVEKGRLGPGQMIAVDLVNHEVLKNWEIKQRIAKQHPYGEWLQQYRQELKSLVISHPSLVNGNGKGQMTNDSGQLTIDKQTLLQLQTAFGYTTEDVEMVIQPMAIAGSEPTFCMGDDIPLAVLSTKSHLLYDYFKQRFAQVTNPAIDPLREKLVMSLKVELGERGNLLEPKPEYARRLKLESPVLTDGELEAIKLSGFATAELSTLFAIANGPEGLKAAVESLQAQAAESVRAGAKILILSDKENDGITTEYTYIPPLLAVGAVHHHLIREGLRMKTSLIVNTAQCWSTHHFACLIGYGAGAVCPYMALDTVRDWCIDPRTQKLMGVQKIPTLTVEQALGNYRKAVESGLLKILSKMGISLLSSYQAAQIFEAIGIGKDLIELGFRGTTSRIGGLSVSELADEVLSFHVKAFPELTTKKLENLGFVQYRPGGEYHMNSPEMVKALHKALDGKNYDHYEVYKKHLQGRPVTALRDLLDFQGERTPISIEEVESVAEIVKRFCTGGMSLGALSREAHETLAIAMNRIGGKSNSGEGGEDPVRYKVLDDVDESGNSPTLPHLKGLRNGDKAFSAIKQVASGRFGVTPEYLVNAKQIEIKIAQGAKPGEGGQLPGPKVSQYIAMLRRSKPGVTLISPPPHHDIYSIEDLAQLIFDLHQINPKAKVSVKLVSEVGIGTIAAGVAKANADIIQVSGHDGGTGASPLSSIKHAGSPWELGLSEVHRVLMENSLRDRVILRVDGGLKSGWDVVIGALMGAEEFGFGSIAMIAEGCIMARICHTNNCPVGVASQKEELRKRFTGIPEQVVNFFYFIAEEVRSLLARLGYRSLSEIIGRADLLKLRPEAKLTKTRSLNLDCLLKLPDTRDNRSWLLHEEVHSNGVVLDDKFLADPDIQAAIRDQSSVKKTYPIVNTDRTVGTRLAGAIASQYGDSGFDGQINLKFTGSVGQSFGAFNLPGISLSLEGEANDYVGKGMHGGEIIIKPPTDATYNASQNVIVGNTCLYGATGGMLFANGQAGERFAVRNSKGIAVIEGAGDHCCEYMTGGVIVVLGKVGRNVAAGMTGGLAYFLDEDDSFRELVNPEIVKIQRVITEVGAKQLQELIQTHAERTGSLKAKKILQNWQEFLPKFWQLVPPSEADSPEANPEKITELSLVTSH

SEQ ID NO: 15368 - protein, 107 aa, Nostoc punctiforme PCC 73102
MTPELKEKIDNLLQQNKILVFMKGNKLMPQCGFSNNVVQILNTLGVPFETVDVLSDSEIRQGIKEYSNWPTIPQVYINGEFVGGSDILIELYQKGELQQKVEVALAS

SEQ ID NO: 15369 - protein, 377 aa, Nostoc punctiforme PCC 73102
MVDYLIFLAISTALFALFGLGLNLQWGFTGLINFGHIAFMTLGAYTTVLLSLKGVPLLISAVAGAIVAALLGLIIGFATLRLREDYLGIVTIGTGELIRLVVNNQDLPVGDTWVSGAFGVQSYSIPLSTEPNLFVRLLMIGLLTLLAAVTFFTLWQWIRTTQISRTTDLGKRTTSKQEFVSRLAVGIVLAVLATAIYISGVIGLYNYNPKAGLMLVLLLVLALVYWRLEILVRSPWGRILKAIREDEEIPKALGKNVFWYKLQSLILGGAIAGIAGAFFAWQLSAIYPDNFQPQITFDTWIMVILGGSGNNVGTILGAVIFFAYDALTREVLPRIVHLDEARLGAFRIMVIGLILMILMIWRPQGILGKKEELTLGK

SEQ ID NO: 15370 - protein, 363 aa, Nostoc punctiforme PCC 73102
MEIGVPKENKDQEFRVGLSPSSVRVLRENGHSIFVETQAGNGAGFSDDDYRSAGAEIVPTSETAWNRELVVKVKEPLTSEYKFLQKGQILFTYLHLAADRKLTEHLIDCGTTAIAYETVEQPGANKLPLLTPMSVIAGRLAVQFGARFLERQQGGRGLLLGGVPGVKPGKVVILGGGVVGTEAAKIAVGMGAIVQILDVSVERLSYLETLFGSRVELLYSNSAHIEVAVKEADLLIGAVLVLGRRAPTLVSRELVKQMRPGSVIVDVAVDQGGCIETLRATSHTNPVYLEEGVVHYGVPNMPGAVPWTATQALNNSTLPYIVQLANLGIMALEVNPALAKGVNVQNHRLVHPAVQEVFPDLVN

SEQ ID NO: 15371 - protein, 209 aa, Nostoc punctiforme PCC 73102
MIYSTTPTSNSSAVSNSSALSGRLSQQIFTRREIIPLQNDVLWRIEYGAVRTLTWGEDGTFITLGYWGLGDLIGYPLSRVKPYQIECLTGVEVSIVPPHLWHQDINALLSHIQQAEDLLSIVHRKPISLRLWQFLVWLSEKFGRDVDKGKLIDLNVTHQDIAEVLNTTRVTVTRLLQQLEEEGTVLRHKRRIILRLPNKLIKNYGSAVC

SEQ ID NO: 15372 - protein, 618 aa, Nostoc punctiforme PCC 73102
MALIVQKYGGTSVGSVERIQAVAQRVYKTVQAGNSLVVVVSAMGKTTDGLVKLANEISPNPNRREMDMLLSTGEQVTIALLSMALQELGQPAISMTGAQVGIVTEAEHSRARILHIDTTRLCRHINAGKVVVVAGFQGTSSTGEMEITTLGRGGSDTSAVAIAAALRANFCEIYTDVPGILTTDPRLVAEAQLMDDITCDEMLELASLGAKVLHPRAVEIARNYGVPLVVRSSWTDQPGTWVTSAKPQGRSLINLEIARPVDAVEFDTDQAKVALLRVPDKPGVAARLFGEISRQKVDVDLIIQSIHEGNSNDIAFTVTTPILKRAEAVAAAIAPALRNPSNPKSDEAEVMLEHNIAKVSIAGAGMIGRPGVAAKMFATLAEAGVNIQMISTSEVKVSCVVDAAECDHAVLALRTAFEIEAGEQGSRGAGESACIDSPPPLCPSAPLPNCPPVRGVALDLNQARLAIRQLPDRPGMAAKLFGLLAQHNISVDMIIQSQRCRVIDGVPRRDIAFTVSRIDAESAKKMLTQVAAELGWGEVVLDSAIAKVSIVGAGMVGQPGVAAKMFEALAQHQINIQMIATSEIKISCVVAQEQGVKALQAIHAAFGLAGSEKVVVPA

SEQ ID NO: 15373 - protein, 547 aa, Nostoc punctiforme PCC 73102
MNTAELLVQCLENEGVQYIFGLPGEENLHVLEALKHSSIKFITTRHEQGAAFMADVYGRLTGKAGVCLSTLGPGATNLMTGVADANLDGAPLVAITGQVGTDRMHIESHQYLDLVAMFAPVTKWNKQIVRPSITPEVVRKAFKRSQSEKPGAVHIDLPENIAAMPVEGKPLRKDNSEKTYASFASIRAAAAAICQAVNPLILVGNGAIRAQASDAVTQFATLLNIPVANTFMGKGVIPYTHQLALWSVGLQQRDFITCGFDNTDLVIAIGYDLIEFSPKKWNRNGEIPIVHIGVSPAEIDSSYIPNAEVVGDISDSLYEILKLADRQGKPDPFAISLRSDIRADYEQYAHDDGFPIKPQKLIYDLRQVMGPDDIVISDVGAHKMWMARHYHCHSPNTCIISNGFAAMGIAIPGALAAKLVHPKRKVVAVTGDGGFMMNSQELETALRVGTPFVTIIFNDGGYGLIEWKQENHFGKGNSSFVHFSNPDFVKYAESMGLKGYRVESALDLIPTLKEALAQDVPAVIDCPVDYRENHRFSQKAGELSCAV

SEQ ID NO: 15374 - protein, 486 aa, Nostoc punctiforme PCC 73102
MNKHIRPWQRLLALAIGSMVFAVFAPTIVQATDPPTVQSLSETTTKLQISIDTIWVLITGFLVFFMQTGFAMLEAGLNRQRGVVNALLENFINAAVTILVWWGIGFGIAFGTSAGGLVGIDTFFLSQLPGADGSYILAAPGSTAAINTYTLFFFQFAFAATATTIATGSMAGRTDFIGDLIYSAIMGAIAYPIVVHWVWNSDGWLSKLSYHDFAGSSVVHTVGGWTALVGAYLLGSRPGRPAWGTLPPAHNLGLATLGTMILWFGWYGFNPGSTLSTGNTGLIGLVTVNTTLSAGAGALSAIIFQYTRKGKWDLVYSLNGSLAGLVAITAPCAYVAPWASVLIGLTSGILVTVGMDLIESVHIDDPVGAFAVHGINGMMGTLSVGFLGQAELTLNQKAGLFLGGGFELLGIQLLGVVAIAVFTVAFSFLMFGGLKAVGHLRVNSEADRIGIDAYEHGASVWSDVYAIEKKEINCAETTEIEALDSE

SEQ ID NO: 15375 - protein, 263 aa, Nostoc punctiforme PCC 73102
MIIENSEVVLSVRNLTANVDGTPILKGVNLEVRSGEIHAIMGPNGSGKSTFSKVLAGHPAYEVTGGEVIFQGQNLLELEPEERARSGVFLAFQYPLEIPGVSNLDFLRVAYNSRRKAQGLEEIDAFDFDDLIEEKLDVVKMNASFLSRSLNEGFSGGEKKRNEILQMALLEPKLGILDETDSGLDIDALRIVANGVNQLASPENSTILITHYQRLLDYIVPDFVHVMAQGQIITSGGKELALELESRGYDWVLEEFAAAEVGV

SEQ ID NO: 15376 - protein, 405 aa, Nostoc punctiforme PCC 73102
MKILVLNAGSSTQKSCLYEIADEAFSTQASQPLWEGKINWTQDRGVAEIEVKTATGATLQESISDDSPQAHLAYMLNTLSDGDTKVIDRLSEIDVVGHRIVHGGEDYRDSVVITEDVKKAIASLSNLAPAHNPVALSGIEAIEKILKDVTQIAVFDTGFHATIPDAAAIYPGPYQWVEQGIRRYGFHGISHQYCSQRAAQILGQDVASGRLITCHLGNGCSLAAIKNGRSIDTTMGFTPLEGLMMGSRSGSVDPGILIYLLRYCDYSVEKLDEILNKASGLKGISGVSSDMREVRKAIAQGNSRAQLAWDIYVHRLRSGIGAMVTSLGGLDALVFTAGVGEHSAEIRQAACEAFGFLGLKLDLQKNQQKPVDEDIATNDSAVRVLVIHTQEDWAIAQHCWQILKN

SEQ ID NO: 15377 - protein, 271 aa, Nostoc punctiforme PCC 73102
MHNRCNRWQVITRLHLVLSATIFWISCFSIVGTGFTASAAEMPEIQQRGYLTVAVKDNLRPLGFRDANGNLQGLEIDLAQRLALDLVGKTDAVKLQPVANRDRLSVVLDKKVDFAIARVTATESRSRIVSFSVPYYLDGTVLVTKDASVNKLSDLAKQKIAVLNNSSTIAKVRFYLPNAELVGVNSYHEAREKIESNAAVAFAADATVLSGWVQQYPQYQLLPTKLSTEPLSVVMPKGLQYDKLRRNVNQAIARYLEQGWLQQRSQYWGLP

SEQ ID NO: 15378 - protein, 288 aa, Nostoc punctiforme PCC 73102
MKVAFLGTGLMGLPMAQRLLAADIQLVAYNRTPEKLAPLQAAGAEIATHPRHAIRAAECVILMLTNAPAIYNVLLSDTAWQTLEGRTIIQMGTITPTESQEIRDAIVGGGGEYLEAPVLGSIPEAQAGKLSVMVGAEPEQYQRHLKLLQNFGTEPLLIGPVGSAAALKLALNQLIASLTTSFALSLAFVQRQGVDVDMFMQILRDSPLYAPTFDKKLQRMLDGNYAEPNFPTKHLLKDTELFISEAKSRSLDLSSIKGVRQILQTAVKMSFADDDYSSLFSVIKEWGE

SEQ ID NO: 15379 - protein, 396 aa, Nostoc punctiforme PCC 73102
MSNQLSTQPSLSTQTSSSLFTLTVAPAKVIRGSGVLQAAAAEIACLGSRPLIVAGESTLAISRKNLQPVLETQQLHPVQASYGADCCEASLKSLQKKAKEHKADVIIGVGGGKALDTAKLLAQQLQLPVVTIPTSGATCAAWSALSNVYSENGAFLYDVGLSRCPDLLILDYDLIQTAPQRTLVAGIGDAIAKWYEASVSSGHLQDTLIIAAVQQARVLRDILLQKSAAALKEPGSEVWREVVDASVLLAGVVGGLGGAQCRTVAAHAVHNGLTHISGHGSIHGEKVAFGILVQLRLEEMLQGNQLAASARQQLLKFYTEIGLPQKLSDLGLGNITLGELQTAAEIALVPNSDIHRLPFKVAPEQLMAAMVSTTAPIDSKDMNRVSPKGISDEVEE

SEQ ID NO: 15380 - protein, 526 aa, Nostoc punctiforme PCC 73102
MSKVLVSDSIDQAGIDILSQVATVDVKIGLKPAQLLEIIGEYDALMIRSSTRVTQEIIEAGTQLKIIGRAGVGVDNVDVPAATRRGIVVVNSPEGNTIAAAEHALAMILALSRHIPDANASVKRGAWDRNSFVGAEVYKKTLGVVGLGKIGSHVAAVAKTMGMKLLAYDPFISTERAEQIGCQLVELDLLFQQADYITLHIPKTPETTHLINATTLAKMKPTARIINCARGGIIDEVALAAALKAGKIGGAALDVFESEPLGESELRSLGKEVILTPHLGASTAEAQVNVAIDVAEQIRDVLLGLPARSAVNIPGLGPDVLEELKPYMQLAETLGNLVGQLAGGRVEVLNIRLQGELATNKSQPLVVAALKGLLYQALRERVNYVNASIEAKERGIRVIETRDASIRDYAGTLHLEATGTLGTHSVTGALLGEREIHLTDVDGFPINVPPSKYMLFTLHRDMPGIIGKLGSLLGSFNVNIASMQVGRKIVRGDAVMALSIDDPLPEGILDEIIKVPGIRDAYTVTL

SEQ ID NO: 15381 - protein, 599 aa, Nostoc punctiforme PCC 73102
MRGTIPVVASEQASKQLSTLRRFLQYLLLYRKEIPIALTLVFIGAVTQAIGPFFLGWSIDRLIEKGNLQGLLLLLGLLALNYGLGIIAIRGQIIRVGWIMQRLLAQLRQDIFLKIQSLPLSFFDRSEAGDLMSRLLNDVNTVNQAFGLTIAQMLGNIFSLVGIIIAMLSINLQLGLLSNLVVPLMIFTTSLFARWARARFRVTRQTIGELSAKLEEDIGSVREAQAFNRVQTNIAQFDVLNAANRDANVEAVAITSAFLPSIDFLNTLATAGVLAYGGYLAVTGAVTVGVVTSFLLYVQQFFRPIQILSQFYTQAQSAFAGLERIFLLLDEPSELKDAPDATEMPPIQGEVRFENVKFGYNPDQLVLKGVNLHAYPGQMIALVGPTGSGKSTIINLILRFYDVFAGAVKIDDIDVRSVTQASLRRQIGIVLQDNILFSGTVAENIAFGAPHTTQADIEAAAQLANVHEFITSLPQGYTTQLGERGAPLSQGQRQLISIARAVLINPRILILDEATSSIDTRTEALVQSAIARLLQGRTSFVIAHRLSTVTQADQVLVIQQGQIVEQGTHAELIERQGVYANLYGLQLGAADTTVLQNEK

SEQ ID NO: 15382 - protein, 196 aa, Nostoc punctiforme PCC 73102
MVSLYANLTSLNSNNTKEIFARRSFLPEHPKGLWKIETGFVRTFTYLEDGTTVALGLWGPGDIVGKSLSKLEPYQMECLTKVEAIVLPIEEWTQLTETLLAHIQQAQELMVIRSHKKVDTMLIKLLAWLSKKFGSEVEKGRLIDMRLTHEDLAEMLGSTRVTITRVLGQFEQEGLIARLSLHRIVVREEDIWYYEI

SEQ ID NO: 15383 - protein, 400 aa, Nostoc punctiforme PCC 73102
MGRAKKVVLAYSGGVDTSVCIPYLKQEWGVEEVITLAADLGQGDELEPIREKALKSGASESLVADVKDSFVKDYAFGAIQANALYENRYPLGTALARPLIAKILVETAEKYGADAIAHGCTGKGNDQVRFDVSVTALNPNLKILAPAREWGMSREETIAYGEKFGIPSPVKKSSPYSIDKNLLGRSIEAGLLEDPSFEPPEEIYEMTKAIADTPNEPEYIKIGFHGGIPTTLNGIAKQPVELIEELNQLVGNHGVGRIDMIENRLVGIKSREIYESPAMLVLIQAHRDLESLTLTADVTHYKRGIEETYSQIVYNGLWYSPLKVALDAFIQKTQERVSGTVRVKLFKGNSTIVGRSSDSSLYTPDLATYGADDQFDHKAAEGFIYVWGLPTRIWSRQIKS

SEQ ID NO: 15384 - protein, 242 aa, Nostoc punctiforme PCC 73102
MESHKEKILVVDDEASIRRILETRLSMIGYDVVTAGDGEEALETFRKTEPDLVVLDVMMPKLDGYGVCQELRKESDVPIIMLTALGDVADRITGLELGADDYVVKPFSPKELEARIRSVLRRVDKNGASGIPSSGVIHVANIKIDTNKRQVYKGDERIRLTGMEFSLLELLVSRSGEAFSRSEILQEVWGYTPERHVDTRVVDVHISRLRAKLEDDPSNPELILTARGTGYLFQRIIEPGEE

SEQ ID NO: 15385 - protein, 628 aa, Nostoc punctiforme PCC 73102
MAKVVGIDLGTTNSCIAVIEGGQPLVIANAEGQRITPSVVAYTKTGERLVGQIARRQAVMNPENTFYSVKRFIGRKHDEITHEASEVSYKVVRDRNGNVKLDCPALKKQFAPEEISAQVLRKLTDDASKYLGEPITQAVITVPAYFNDSQRQATKDAGKIAGLEVLRIINEPTAAALAYGLDKKGNETILVFDLGGGTFDVSILEVGEGVFEVKATSGDTHLGGDDFDKKIVDYVANDFQRHEGIDLRKDKQALQRLTEAAEKAKIELSSATQTTINLPFITATQEGPKHLDITLTRAEFEKLCADLLDRCRIPVEQALNDANLNNANLDEVVLVGGSTRIPAVQQLVKRITGKDPNQGVNPDEVVAVGAAIQGGVLAGEVKDVLLLDVTPLSLGVETMGGVMTKIIPRNTTIPVKKSETFSTAADGQSNVEIHVLQGERELVADNKSLGTFRLDGIPPAPRGVPQIEVTFDLDANGLLSVTAKDRATGKEQSITISGASTLDKRDVERMVRDAETHAQEDRQRREQIDTKNNADSLVYQAEKQLQDLNGRVSQADKSRAQQLIDELRSAIERENYEQMRSLTTNLQQALMQIGSAVYAQASTATNNPNPTNQPTGQNDDVIDADFVG

SEQ ID NO: 15386 - protein, 347 aa, Nostoc punctiforme PCC 73102
MSNQLQDYNPSGVGEINGNLLGLPCDYESANLIVFGVPWEVTVSYGAGTANGPQRILDTSTQLDLFDFDNPNGWKQGIFMVEIPQDILEKNTYYRALAAKIIERLAQGKELSDTPDLTSVLTEINQAGEQVNQWLFDNCQEAISKGKGVAVIGGDHSSPLGYFQALAANYTNYGILHIDAHADLRDAYEGFEFSHASIMFNAMKIPQISKLVQVGLRDISHDEVQMIDQSESRIIAYYDPAIKQKLYSGTTWLDLCREIISHLPEFVYISFDVDGLDPKLCPSTGTPVPGGLELEQTFFLFRELVKSGRKIIGFDICEVGDAEWDGNVGARVVYKLANLMDLSKQNS

SEQ ID NO: 15387 - protein, 135 aa, Nostoc punctiforme PCC 73102
MTYAIIETGGKQIRVEPGRFYDIELLPTEPDEKVTIDSVLLVQHDGAVSIGQPLVTGATVEGTVMRHYRGRKVLVYKMKPKKKTRKKRGHRQEITRLMIDSITLNGEVFVAQGEAEKETPVLDETPAEEVETAAE

SEQ ID NO: 15388 - protein, 241 aa, Nostoc punctiforme PCC 73102
MSGHKGKILVVDDEASIRRILETRLSMIGYDVVTASDGEEALSTFRVSTPDLIVLDVMMPKLDGYGVCQELRKESDVPIIMLTALGNVADRITGLELGADDYMTKPFSPKELEARIACILRRCFHKTSVNTTPNSTIIRVGNLKIDTNKRQVYKNEQRIRLTGVEFSLLELLVNNSGKVFSRLEMLQLLWGCVPGLHLDTRVVDVHISRLRTKVEDDPNLPELIITARGSGYFFPRIIESQ

SEQ ID NO: 15389 - protein, 347 aa, Nostoc punctiforme PCC 73102
MFQTQLQHPTSKDEMQTTQTLKQIIAGAWITQGIYVVAQLGIADLLKDGSKSYDELATKTGVDARSLYRLLRALASVGIFAEGNSGYFELTPVAESLQSDRTDSLRGYAIKSGQAWEWQPWGHLLESIKTGKPVFKNIFGMERFDYLATDPSASKIYTQAISSISGEQDAAIAAGYDFSFIHNLVEVGGGNGTLIASILKSNLTMQGILFDLPHVVADAKPVIEDLELQDRCQLVGGNFFESVPTSGDAYLLRYIIHDWDDERAIAILKNCYQAMQPDGRLLLVEMVIPQGNEPFFGKLLDLQMLVNYGGRERTQAEYQVLLKTAGFSLTKIYPVAPPISIIEAIRL

SEQ ID NO: 15390 - protein, 402 aa, Nostoc punctiforme PCC 73102
MSIRPIYLDCHATTPVDERVLAAMIPYFTEKFGNASSIGHVYGWESEAAVKQTREILAAAINATPEEIVFTSGATEANNLAIKGVAEAYFKKGQHIITVATEHNAVLDPCNYLKTLGFEITILPVKKDGLIDLTELNKAFRPETILVSVMAANNEIGVLQPLAEIGELCHAYNIIFHTDAAQAIGKTPLDVQAMKIDLMSLTAHKVFGPKGIGALYVRRRDPRVQLAPQQHGGGHERGMRSGTLYTPQIVGFGKAVEIALAEQATENQRLTQLRQSLWKQLSQLEGIHLNGHPQQRLAGNLNISVEGVDGAALLLGLQPVMSVSSGSACSSANTSPSSVLTALGNPQQLAYASVRFGIGRFNTQEEIDIVAKHAIATIQSLRKPSFMDSRAGKQQFDLAPAD

SEQ ID NO: 15391 - protein, 533 aa, Nostoc punctiforme PCC 73102
MKFRDCAAAVMGSPKSECQLSRCHTHHLLPALHGEGVPSLLSGFATCPGLFYATPAADGILSRIRIPGGIISSQQCRAIADIADQHGGGYVDVTNRANLQVREIRTGINSEVLQHLQDMGLGSRNSVVDHIRNIMTSPTAGIDAQELIDTRPFVQDWDNYIAAHPALSGLSAKFSVCFDGGGIIRVCDRLNDILFAAVLVDGNVYFRLYLSVGTKGQPPSDTGILLTPEQCLPVLAALTEVYLAHSNTTNNRRLRLLELLNTLGCENYLQEVQQRLPFSLLCSNLTPQPPSLVGKGEKFSPLLQGEGLGERLDAKYQHIGIHPQRQQGLFYIGVVLPLGRLESNQMKGLADLAAKYGSGTLRLTPWQNLLLTDIPQQWVGDVQSKIAFLGLDISATNIKSALIACSGNKGCASSATDTKSHALALVEYLETRVTLDCPVNIHFSGCEKSCAQHSKSDITLLGVSIEDGNGTVEGYHVYVGDSEHKFGRKIIYQYVTFAELPALIKRMLDVYKIQRLNSDESFGEFANRYTEKL

SEQ ID NO: 15392 - protein, 448 aa, Nostoc punctiforme PCC 73102
MSVEITAPKGTILVVDDNPTNIQVLFDVLSEIGYRVAIAKSGEAALQRVQSYHPDIILLDVMMPGIDGFETCQRLKADCATCDIPVIFMTALSDTVDKVKGLSLGAVDYITKPIQHEEALARIRVHLQLRESQKSSQQKTTELSQALDILKQAQVHLVQSEKMSSLGQMMAGVAHEINNPMTFIHANLAPAKEHIQDLLNFIELYRQCHPQPHPKIQDWMDEVDIDYLEADLPKLMNSLKLGSDRIRQIVLSLRNFSRLDESGTQTVDLHENIESTLLLLQHRLKARPEHPGIQVVRDYGHLPHVECYPSQLNQVFMNIFGNAIDALEQRDQQRSSDEIRANPSNIAIRTEHLANESIAICIADNGCGVKENVCSQMFEPFFTTKPINKGTGLGLSISYQIVTQKHGGKIYCQSTLGKGTEFTIEIPVRQAGFVKLTQMATSKPVRFS

SEQ ID NO: 15393 - protein, 340 aa, Arabidopsis halleri
MEAEKKMVLPRIKFTEHKTNTTTIVPDLTNNHQTRVLRISVTDPDATDSSSDDEEEEHQRFVSKRRRIKKFVNEVVLDSGAVAGSCSQMESKKRGKSAVKSESVVSPVVSATTTTAEKKFRGVRQRPWGKWAAEIRDPLKRVRLWLGTYNTAEEAAMVYDNAAIQLRGPDALTNFSVTPTTTEKKPPPPPSPVKKKKKTSKVKKSVTASSSISRSSSNDCLCSPVSVLRSPFAVDEFSGISSPPPAAVVVKEEPSMTTVSETFSDFSAPLFSDDDVFDFRSSVVPDYLGGDLFGEDLFTADMCTDMNFGFDFGSGLSSWHLEDHFQDIGDLFGSDPLLAV

SEQ ID NO: 15394 - protein, 159 aa, Aegilops longissima
MAGMVFGLENPMMTALQHLLDIPDGEAGGAGAAGGEKQGPMRAYVRDVRAMAATPADVKELPGAYAFVVDMSGLGSGDIKVQVEDERVLVISGERRSEEKEDAKYMRMERRMGKLMRKFVLPKNADMEKISAVCRDGVLTVTVEKLPPPEPKTIQVQVA

SEQ ID NO: 15395 - protein, 160 aa, Triticum turgidum subsp. dicoccon
MAGMVFGLENPMMTALQHLLDIPDGEAGNTAGGEKQGPTRAYVRDARAMAATPADVKELPGAYAFVVDMPGLGSGDIQVQVEDERVLVISGERRREEKEDAKYLRVERRMGKLMRKFMLPGNADMEKISAVCRDGVLTVTVDKLPPPEPKKPKTIQVQVA

SEQ ID NO: 15396 - protein, 160 aa, Triticum turgidum subsp. durum
MAGMVFGLENPMMTALQHLLDIPDGEAGNTAGGEKQGPTRAYVRDARAMAATPADVKELPGAYAFVVDMPGLGSGDIQVQVEDERVLVISGERRREEKEDAKYLPMERRMGKLMRKFMLPGNADMEKISAACRDGVLTVTVEKLPPPEPKKPKTIQVQVA

SEQ ID NO: 15397 - protein, 129 aa, Triticum monococcum
MAGMVFGLENSMMTALQHLLDIPDVKELPGAYAFVVDMPGLGSGDIKVQVEDERVLVISGERRREEKEDAKYLRMERRMGKLMRKFVLPENADMEKISAACRDGVLTVTVEKLPPPEPKKPKTIQVQVA

SEQ ID NO: 15398 - protein, 142 aa, Triticum monococcum
MAGMVFGLENPMMTALQHLLDIPDGEAGNTAGGEKQGPTRAYVRDAFVVDMPGLGSGDIKVQVEDERVLVISGERRREEKEDAKYLRMERRMGKLMRKFVLPENADMEKISAACRDGVLTVTVEKLPPPEPKKPKTIQVQVA

SEQ ID NO: 15399 - protein, 522 aa, Sesbania rostrata
MGYETRRLSDEYEVSDVLGRGGFSVVRKGTKKSSSEKTLVAIKTLRRLGASNNNPSGLPKTKGGEKSIATMMGFPTWRQVSVSDALLTNEILVMRRIVENVSPHPNVIDLYDVYEDSNGVHLVLELCSGGELFDRIVAQDRYSETEAAAVVRQIAAGLEAIHKANIVHRDLKPENCLFLDTRKDSPLKIMDFGLSSVEEFTDPVVGLFGSIDYVSPEALSQGKITTKSDMWSLGVILYILLSGYPPFIAPSNRQKQQMIVNGNFSFYEKTWKGISQSAKQLISSLLTVDPSKRPSAQQLLSHPWVIGEKAKDDQMDPEIVSRLQSFNARRKLRAAAIASVWSSTVFLRTKKLRSLVGTHDLKEEEIENLRIHFKKICANGDNATLSEFEEVLKAMNMPSLIPLAPRIFDLFDNNRDGTVDMREILCGFSSLKNSKGDDALRLCFQMYDTDRSGCITKEEVASMLRALPDDCLPADITEPGKLDEIFDLMDANSDGKVTFDEFKAAMQRDSSLQDVVLSSLRP

SEQ ID NO: 15400 - protein, 386 aa, Solanum lycopersicum
MGIFREAPNCFPGGWNIGAAARMAKSCEYCHLAAALVFCRTDNTFVCLSCDTRLHARHERVWVCEVCEQAAASVTCRADAAALCVACDRDIHSANPLARRHERVPVVPFYDPVESVVKSTAATLLVSINGTTTTATTTATITPELGKVDTCIGHHENNNDPWIPPNTITSKLPLNTEMKGMDFIFTDSENFLDFDYPACVDTQSQPHYNSSNDSVVPVQANTPIKSLPFHHQEKHFEIDFTQSHIKSYNTPSLSVSSSSLDVGIVPDGSSISEISYPYIRTMNNSNSSIDLSNSANHQGEKLLGLDREARVLRYREKKKNRKFEKTIRYASRKAYAETRPRIKGRFAKRTDGSAGAGEFDDVDGIFSGTDFIAAESRYGVVPSFLT

SEQ ID NO: 15401 - protein, 444 aa, Cicer arietinum
MSEKEKDSNSNSNSHSGLLDGKYELGRVLGHGTFAKVYHAKNLNTGKSVAMKVVGKEKVIKVGMMEQIKREISVMKMVKHPNIVQLHEVMASKSKIYIAMELVRGGELFNKVVKGRLKEDLARVYFQQLISAVDFCHSRGVYHRDLKPENLLLDEEGNLKVSDFGLCTFSEHLRQDGLLHTTCGTPAYVSPEVIAKKGYDGAKADIWSCGVILYVLLAGFLPFQDDNLVAMYKKIYRGDFKCPPWFSLEARRLITKLLDPNPNTRITISKIMESSWFKKPVPKNMAIRRKEKEEEEEKGFHLECENDKFKQQPTTMNAFHIISLSEGFDLSPLFEEKKREEREEMRFATAGTPSRVISKLEQVAKAVKFDVKSSDMKVRLQGQERGRKGKLAIAADIYAVTPSFLVVEVKKDKGDTLEYNQSCSKELRPALKDIFWTSTEPPAA

SEQ ID NO: 15402 - protein, 118 aa, Hordeum vulgare subsp. vulgare
MAAEEGAVIACHTKQEFDTHMANGKDTGKLVIIDFTASWCGPCRVIAPVFAEYAKKFPGAIFLKVDVDELKDVAEAYNVEAMPTFLFIKDGEKVDSVVGGRKDDIHTKIVALMGSAST

SEQ ID NO: 15403 - protein, 386 aa, Saccharomyces pastorianus
MKIISVLEDFGENENTIITLVPQTKDDLFTIYQIIDKEDEVIFKKLFTTKKDEVNRKTSTDLVNLRLKILSYEFDIKEEYLRYKGVTVADDTNTANLDVPVGKFLSFSVTYEHQFTIFKHHFNKYAKRLLKEALELETKSDTAAVVLQEGISHVCLLTASSTILKQKTEISMPKKKDATDINKFNEKTEKFYRATYNAMMKNFNFDELRMIILCSPGFYAKALMEKILKYAEKEQNNSILENQEMFIIAHCSTGYLQGITEVLRDPEYSTVLQNTKLIKEIQIMDDFFEHLNKDDNKAWYGKEEIKRAAKLEAVETLLITDTVLKSDDIDERETFLDLTYNIEQSGGRVFVFSTLQSHGEELGRLKGLACILKYPIPDLDEILENK

SEQ ID NO: 15404 - protein, 187 aa, Medicago sativa subsp. x varia
MTTKFTLVFLLLTLLSIATSTPTNFIKSSCSTTSYPTLCVESLSVYATTIQQDPHQLVQTALSLSLNKTQSTKSFVTKCKSFRGLKPREYAALHDCVEEITDSVDRLRRSLKGLKLCKIQGEDFSWHISNVETWVSSALTDESTCSDGFGGKALDGRMKASIRSRMVNVAQVTSNALSLINQYATKH

SEQ ID NO: 15405 - protein, 248 aa, Oryza sativa Indica Group
MAQDDEDVGLALGLSLGSGGHRRQRESRDEAPSSAAASLLTLRLPAESGGQPQVVVKREVVRAEEEEYEYEYERALYSSSAAAADDDEGCNSRKKLRLSKEQSALLEDRFKEHSTLNPKQKVALAKQLNLRPRQVEVWFQNRRARTKLKQTEVDCELLKRCCETLTEENRRLHRELQQLRALTHSTAAGFFMATTLPVPAATLSICPSCERLATAAAAAGASPTAAADRTNKPTAPHLFSPFAKSAAC

SEQ ID NO: 15406 - protein, 345 aa, Oryza sativa Indica Group
MESGRLIFSTAGSGAGQMLFLDCGAGGGGGGVGGGAMFHRGARPVLGMEEGGRGVKRPFFTTPDELLEEEYYDEQLPEKKRRLTPEQVHLLERSFEEENKLEPERKTELARKLGLQPRQVAVWFQNRRARWKTKQLERDFDRLKASFDALRADHDALLQDNHRLHSQVMSLTEKLQEKETTTEGSAGAAVDVPGLPAAADVKVAVPDAEEPALEEAAAAFEEQQEQQVKAEDRLSTGSGGSAVVDTDAQLVVGCGRQHLAAVDSSVESYFPGGDEYHDCVMGPMDHAAGGIQSEEDDGAGSDEGCSYYADDAGVLFADHGHHHHHQHADDDEEDGQQISCWWMWN

SEQ ID NO: 15407 - protein, 256 aa, Oryza sativa Indica Group
MEGEDLGSWLGLGIGGGGYAYGGDDCRRSPSSPSPVQMLFSQHVKEEITRGYDHGRDEEQASGSKIMKGERGARLRVMRSIRNSGGDGSRSRVLSLGDDGGDGGSGSGGGGGTRKKLQLTKEQSTLLEDSFRVHNILSHAQKHELARQLKLKPRQVEVWFQNRRARTKLKQTEVDCEFLKRCCESLTEENKQLKHELMELRRLASAAAAAAGSQLYVQFPRAAAAAMVNVCPSCEKVTVMGGGGGETGKSSSSYSS

SEQ ID NO: 15408 - protein, 276 aa, Oryza sativa Indica Group
MVDGHLEASTRGFDVNRPPSSGGGGGAEEEQDDVAGAALSSSPNNSAGSFPMDDFSGHGLGGNDAAPGGGGGDRSCSRASDEDDGGSARKKLRLSKEQSAFLEESFKEHSTLNPKQKLALAKQLNLRPRQVEVWFQNRRARTKLKQTEVDCEYLKRCCETLTEENRRLQKELAELRALKTVHPFYMHLPATTLSMCPSCERVASNSAPATASSAATSSTAAPPAAPSSGGIAATSSSSAAAAAAPDHRPSSFAALFSSPRGFPLSVAPQAQPPTSS

SEQ ID NO: 15409 - protein, 593 aa, Brassica rapa subsp. chinensis
PVRPPHSSSTMTSSTSLSLRFSPPPHTLLPSKPRRSLVVAAQTAPPAVEADRLEPRVELRDGFFILKEKFRKGINPQEKVKIESEPMKLFMENGIEELAKKSMEEIDGEKLTKDDIDVRLKWLGLFHRRKHQYGKFMMRLKLPNGVTTSAQTRYLASVIRKYGEDGCADVTTRQNWQIRGVVLPDVPEILKGLASVGLTSLQSGMDNVRNPVGNPIAGIDPDEIVDTRPYTNLLSQFITANSLGNPEFSNLPRKWNVCVVGSHDLYEHPHINDLAYMPANKDGRFGFNLLVGGFFSAKRCEEAIPLDAWVPADDVLPLCGAVLEAFRDLGTRGKLTETRMMWLIDELGIEGFRAEVEKRMPSGKLERESSEDLVNKQWERRDYFRVHPQKQEGLSYIGLHCPVGRLQADDMDELARLADTYGSGELRLTVEQNIIIPNVETSKTQALLQEPFLKNRFSPEPSILMKGLVACTGSQFCGQAIIETKLRALKVTEEVERLVAVPKPVRMHWTGCPNTCGQVQVADIGFMGCLTRGEDGKAVEGADVYVGGRVGSDSHIGEIYKKGVPVTDLAPLVAEILVKEFGAVPRVREENED

SEQ ID NO: 15410 - protein, 354 aa, Oryza sativa Indica Group
MELGLSLGDAVTVADGGRLELVLGLGVGVGAGVRRGEEEERGRREDVVGAGRWAAMAAASPEPSVRLSLVSSLGLHWPSETGRSEAAARGFDVNRAPSVAAGAPGMEDDEEGPGAAPALSSSPNDSGGSFPLDLSGHGLRGHAEAAAQGGGGGGGGERSSSRASDDDEGASARKKLRLSKEQSAFLEESFKEHSTLNPKQKVALAKQLNLRPRQVEVWFQNRRARTKLKQTEVDCEYLKRCCETLTEENRRLHKELAELRALKTARPFYMHLPATTLSMCPSCERVASNPATASTSAPAAATSPAAAPTAAARTAVASPEPHRPSSFAALFAAPLGFPLTAAQPRPPPPASNCL

SEQ ID NO: 15411 - protein, 320 aa, Oryza sativa Japonica Group
MAASSEVSIDPDQWFYIYSLERVAYVCERVGSPVMEEAELRRRRRKRPFLTTTHDELELQMEDLVDELYGVDEQGSSSAAARKRRLTAEQVRALERSFEEEKRKLEPERKSELARRLGIAPRQVAVWFQNRRARWKTKQLELDFDRLRAAHDELLAGRTALAADNESLRSQVILLTEKLQANGKSPSPSPAPAEQTAVPAAPESAKSFQLEEGRRLYDAAGSTTTTNGGGGGVAMPAARVAAARAASNDSPESYFAGARSPPSSSEDDCGGAGSDDDYPSSSVLLPVDATLVGDAFEHAVAATVAADEEAPLNSWEWFWN

SEQ ID NO: 15412 - protein, 200 aa, Ocimum tenuiflorum
MVRLCNSMSLKCAIQLGIPDILHKHGHPMTLSQLLQSIPINKAKSRMSPRLMRVLVNSNFFIEEKNSSNQEVHYWLTPASRLLLKGAPLTVAPLVQVILDPTFTNPWHHMSEWFTHEHHATQFEAANGCMFWEKLANEPSMGRFFDEAMSCDARLVAHVLTKDYKHVIGGIRTLVDVGGGDGTMAKAILEAAAHHKMHSY

SEQ ID NO: 15413 - protein, 200 aa, Ocimum tenuiflorum
MVRLCNSMSLKCAIQLGIPDILHKHGHPMTLSQLLQSIPINKAKSRMSPRLMRVLVNSNFFIEEKNSSNQEVHYWLTPASRLLLKGAPLTVAPLVQVILDPTFTNPWHHMSEWFTHEHHATQFEAANGCMFWEKLANEPSMGRFFDEAMSCDARLVAHVLTKDYKHVIGGIRTLVDVGGGDGTMAKAIVEAAAHHKMHSY

SEQ ID NO: 15414 - protein, 154 aa, Ocimum tenuiflorum
MSPRLMRVLVNSNFFIEEKNSSNQEVHYWLTPASRLLLKGAPLTVAPLVQVILDPTFTNPWHHMSEWFTHEHHATQFEAANGCMFWEKLANEPSMGRFFDEAMSCDARLVAHVLTKDYKHVIGGIRTLVDVGGGDGTMAKAILEAAAHHKMHSY

SEQ ID NO: 15415 - protein, 710 aa, Oryza sativa Japonica Group
MDFGDEPEGSDSQRRRKRYHRHTPRQIQQLEAMFKECPHPDENQRAQLSRELGLEPRQIKFWFQNRRTQMKAQHERADNCFLRAENDKIRCENIAIREALKNVICPTCGGPPVGEDYFDEQKLRMENARLKEELDRVSNLTSKYLGRPFTQLPPATPPMTVSSLDLSVGGMGGPSLDLDLLSGGSSGIPFQLPAPVSDMERPMMAEMATRAMDELIRLAQAGDHIWSKSPGGGVSGGDARETLNVDTYDSIFSKPGGSYRAPSINVEGSRESGLVLMSAVALADVFMDTNKWMEFFPSIVSKAHTIDVLVNGMGGRSESLILMYEELHIMTPAVPTREVNFVRYCRQIEQGLWAIADVSVDLQRDAHFGAPPPRSRRLPSGCLIADMANGYSKVTWVEHMEVEEKSPINVLYRDLVLSGAAFGAHRWLAALQRACERYASLVALGVPHHIAGVTPEGKRSMMKLSQRMVNSFCSSLGASQMHQWTTLSGSNEVSVRVTMHRSTDPGQPNGVVLSAATSIWLPVPCDHVFAFVRDENTRSQWDVLSHGNQVQEVSRIPNGSNPGNCISLLRGLNASQNSMLILQESCTDASGSLVVYSPIDIPAANVVMSGEDPSSIPLLPSGFTILPDGRPGSAAGASTSSAGPLAAARGGGGGGAGGGSVVTVAFQILVSSLPSSKLNAESVATVNGLITTTVEQIKAALNCSAHGHHP

SEQ ID NO: 15416 - protein, 372 aa, Nicotiana benthamiana
MRPLQPPPPAAATTTSSSTTASPMPPPPSRNRPRRRTDLTLPLPQRDPALAVPLPLPPTSAPSSSSSSSSSPLPTPLNFSELERINRIGSGAGGTVYKVLYRPTGRLYALKVIYGNHEDSVRLQMCREIEILRDVDNPNVVRCHDMFDHNGEIQVLLEFMDKGSLEGIHIPKESALSDLTRQVLSGLYYLHRRKIVHRDIKPSNLLINSRREVKIADFGVSRVLAQTMDPCNSSVGTIAYMSPERINTDLNHGQYDGYAGDIWSLGVSILEFYLGRFPFSVGRSGDWASLMCAICMSQPPEAPANASREFRDFIACCLQRDPARRWTAVQLLRHPFITQNRPATTTTGNMMPLPNQVHQPAHQLLPPPHFSS

SEQ ID NO: 15417 - protein, 401 aa, Borrelia hermsii DAH
MGFDMRKIAIIDGLRLPITKFGGALKGINIVDVSSDVVKALLGRNNIDRVDEVIIGNVISAGLGQNIARQIALKAGLGEITPAFTVNKVCGSGLKSLELAFNSIALGNSEIVLAGGVEDLSNAPYLLPRGVRFDGLKFGDFKIEDSIYKDALVDTPSSTVMGLTAENLAEMYEITREMQDQFAYNSHMKATAARDNGYFNDEIYPLSVFDRKTKLKRVICSDEEIRDSLSLEKLSSLKPVFKEGGTVTAGNSSSLDDGACFLILASEDFVCKTGVQPLAYVGGFKSVGLNPLHMGFGAFLAIEEIIGKFNLIPSEIDFIETNEAFAAQSLSVLKALRQKYDVQDSIINVNGGAIALGHPFSVSGARILLTLARLMRINNKSKGIASLCIGGGQGIAAFLYR

SEQ ID NO: 15418 - protein, 545 aa, Borrelia hermsii DAH
MSQSKRILRAIYLSLFFIGIFMIIDDIFFSHKSPSVMDKEIGFNLDKDFDIDNSSIDEDYALNLSANSKDIDVETGIYYATFSTFRGDLISLKLKDHLNLEKEPTEMVKVNMDRESLFYVTLDNLTRDLFSYDRVDDYTHDFKTNFEYNGKFYEYIKRYTFSNKGEYLIKLEIFLNNIDANDNSDIDSYKFVLSSDIEKLSERGKLQYNNYLSQAVYFDTKLRYGKDGLSVISPKWVGSGTKYFEVLVSKENMNVEFKQESKILKAFILNKVGNKNISDTFYIYAGPKDNGYLDLFNKEDLNSFGLSNVEFGMSVEKSLLYFIQVPMQLIMQIFYNVIPNWGLSIMFLTIVVRILIFPLTFKSFRATAELSKLQPKMKEIQVKFKNDPKRLNEEMGKLYREEGVNPLGGCFPILLQLPVFFALYGLVNNFFLLRGASFIPGWIDDLSIGDSIYYFGYKVFMWTDIRILPFIMMVTQLISTIISSNVSFKSLGSQQKILYFGMPIMFFFILYDMPSGLLIYWITTNIFTILQQYYIKMNVSERRNR

SEQ ID NO: 15419 - protein, 272 aa, Borrelia hermsii DAH
MSVAIRPVLKWAGGKKNLLKVILNNIPLSFNNYIEPFVGGGALFFALNLKNSIINDINSNLINFYREIAYNLDNFLLEVEKYNNAPLTKEHYVHIRNSFNNEDLTNLEKACIFLYLNKTCYNGLYRENGDGRFNTPFGKYKKISLYEIKNLQLASKLLREVKVLSLDFFCLLDFIKKDDFVYLDPPYIPYSKTSNFTNYSRYGFDVRMHEKLLHFCEEIDKKGAKFLLSNSNTAFSLGLYKNYNVAFVDSKRFINANPGGRGSIREILVKNF

SEQ ID NO: 15420 - protein, 632 aa, Borrelia hermsii DAH
MGKIIGIDLGTTNSCVAIMEHGKPVVIQNSEGGRTTPSIVAYTNKGERLVGQVAKNQMVTNPENTIYSIKRFMGRRFEEVASEIKMVPYKVEKGQNGDARVNISNIKKQMSPPEISAATLTKMKETAEAYLGETVTEAVITVPAYFNDAQRQATKDAGKIAGLDVKRIVNEPTAAALAYGIEKKNEEIVAVYDLGGGTFDISILELGDGVFEVKSTNGDTHLGGDNFDDEIIKHLITEFKKDSAIDLSNDKMALQRLKEAAEKAKIELSSAQEASINLPFITADANGPKHLQYTLTRAKFEQMVDHLVQKTKEPCLNAIKDAGLKASDINEVILVGGSTRIPAIQKIVKEIFAQEPNKGVNPDEAVAIGAAIQGGILTGETKDMVLLDVTPLSLGIETLGGVMTKLIERNTTIPTKKSQVFSTAADNQTSVDIKVLQGEREMASQNRVLGNFILDGIPAAPRGVPQIEVSFDIDANGIVHVSAKDMGTGKEQKIRIESSSGLSEEEIERMVRDAEAHAEEDKKLKESIETKNIANSLIYQTEKSLKEYGDKITSEDKEAIENKIKELKDALEGSDVSSIKSKTEELQQASYKIAEMMYKDAQASSSNQDNAQNNAGSESKEADYEVVDEDKK

SEQ ID NO: 15421 - protein, 406 aa, Borrelia hermsii DAH
MSLLIKKSIGIIACPGGRVFADKIMEELKKIFLDTESKVIEKISQTSHCLKEDVLKLEGILSPFLEGFGFSNSRFDEAMEIPVSFVKFANGEFKAEILKTIRNKDIFIVQDVSNTYPVNVNNNEKVVMTINDHLMNLMTTIDACKQAKANSVSVIVPSYPYSRQDKKHSREGLTASLVGRFLEELGVKHILTLDIHSKAIENVFRKTYFENLNASYEIFDALAELIDIRDSNLVVVSPDTGAVNRNKFFASSLKRPLALLYKERDYSKVTHNVNDSNISVTKLLGDVEGKNVFMSDDMLATGGTFIKAVKLLKSMGAKKIICAISLPFFNGNAIRYFDKAYEEGYFYKIIGTNAVYHDDRLISKPWYYEANVAHLFAGAIFAIHNRVSLQKILDRSHDIQALISKS

SEQ ID NO: 15422 - protein, 352 aa, Borrelia hermsii DAH
MESIMGSFNFKDYVCGRAKRIVMEKGDRASIVFPESMDDRILKATIYILKEKLAGLVVLIGCKDKVFRRLKEFVGFSGDILEMIRVIEPNSFKDFNRYLDEYLSLRYSKTLTLSKAREELLDEIVFSMMMVRLGEVKTCVCGALASSAKVLRSVFGILPKLKETKCISSFMIMDTGNDFGRFETCFGYEGILMFADCAVIINPDSMQLAEIAIQSANSFKNIFSAEPKVALLSFSTKGSAHSVEVEKVRCALDIVKKKCINLLIDGELQIDAALVKSVAEKKCSDSLVAGAANVLIFPNLEAGNIGYKLVERLAFAKAYGPFLQGLKNPVSDLSRGCSVDDIVLTSALMIGS

SEQ ID NO: 15423 - protein, 408 aa, Borrelia hermsii DAH
MKILTLNTGSSSLKFTLYQHKNTQILASGTIEKIKTKKSIIRIKTQNDLLEKIDKHIKSHKEALKQLIKILTNKKLNIINNLNEIQGIGHRIVHGGPNFKNSVILNENILSELEKISALAPLHNPTAIKVIEITLKIFPNAKQVLCFDTSWHQTMNENAFLYATPYSWYKDYNIRKYGFHGLSYAYITKRVATILNKHKKDLNLIILHLGNGSSINAVKKGISYDTSMGLTPLEGLAMGTRSGDIDPAIIPLMSKVLNKTPRKIEEILNKESGMLGISLKSNDLRDIWEGVENNEYNSKLAVEIMAYRIKKYIGSYLAILEFNIDAIVFTAGIGVTDYGIRELSLKGFEKIGIEIDLQKNNLAREKNIESDISSEKSKTKILVIPTNEELTILEDTYNLITEHSRDLK

SEQ ID NO: 15424 - protein, 290 aa, Borrelia hermsii DAH
MKSGFVSIIGRPSTGKSTLLNSICGHQISIISSTPQTTRNKIKGIFTDKRGQIIFIDTPGFHLSKKKFNIALMNNVHSAITETELILYVIDIQDEPGIEENEILTIISKSKINFLVVINKIDIQKTKEREIMIFLEKKGIKKDNIIKISAEQKINIEEIKDKIYANLQEGPLYYPEEYYTDQEMNLRTSEIIRGVTIKKLKEELPYSLYTQIEILEDRKNKLFIKANIIVAGESQKGIIVGKGGQGIKAIGEEARKIISKIFEKKCDLFLQVKLRKNWNKNSKLIKNLIN

SEQ ID NO: 15425 - protein, 327 aa, Borrelia hermsii DAH
MHILKDSLSITVSSGDGGAGCVSFLRERFNTKGGPDGGDGGRGGDVIFKVKANLKSLSLYKNGQRLAANNGKPGMGSRKSGASGEDLVIFVPPNTCIYDVATGSMLFELQNFDDEVIALKGGRGGLGNVHFKSSTKRTPRFAQPGESGATLNLRLELSLIADIGLVGFPNAGKSSLISTITASKSRVANYPFTTRFPHLGVLKASYNDLVIADVPGLIEGASQGIGLGFEFLRHISKTKILVFLIDVASDNFMSAYDILVNELSAYDIGLSSKKRIIVANKLDLEGAIENFNQLKRALVGERVLGISIYDNTGINELVSELFALSRI

SEQ ID NO: 15426 - protein, 245 aa, Carica papaya
MGRGRVELKRIENKINRQVTFAKRRNGLLKKAYELSVLCDAEVALIIFSNRGKLYEFCSSSSMLKTLDRYQKCSYGAVEVSKPAKELESSYREYLKLKTRFEALQRTQRNLLGEDLGPLNTKELEQLERQLESSLKHVRSTKTQYMLDQLTDLQNKEHMLLEANRALTIKLDEISARNHLRVAWEGSEQNVSYGHQHAQSQGLFQPLECNPTLQIGYNPVGSDQMTAAATSQGQQVNGFIPGWML

SEQ ID NO: 15427 - protein, 553 aa, Medicago truncatula
MDKAWGLALDTSSSSPIPISHSHPFLPSKQPSSTHTNDRMFPILGFPVNLTRNTNGEDGGDRKITGEVDFFSERNKPSPSHEHNQHVKSNIIKKEIVSTDEKPSTSNIHVNTGLQLANTGSDQSVVDDGASSDAENKRAKTTELAQLQVELQRMNSENKKLKEMLSHVTGNYTALQLQLVALMQKNHHTENEVVNAKAEEKNQGVGGAMVPRQFLEITNGTTEVEDQVSNSSSDERTRSNTPQMRNSNGKTGREDSPESETQGWGPNKSQKILNSSNVADQANTEATMRKARVSVRARSEASMISDGCQWRKYGQKMAKGNPCPRAYYRCTMAVGCPVRKQVQRCAEDKTILVTTYEGTHNHPLPPAAMAMASTTSAAASMLLSGSMSSADGIMTPNLLARAILPCSTSMATLSASAPFPTVTLDLTQNSNPNPLQFQRPQHAPFHQVPSFFQGQNQNFAQAAASLYNQSKFSGLQLSQEVGSSHLTTQASTQQQQQPSLADSVSAATAAITADPNFTAVLAAAISSIIGGGHANNSNNNSNSRNTISNFSGN

SEQ ID NO: 15428 - protein, 545 aa, Medicago truncatula
MTMDDHQYHNWETSELNTNNNHNHNHNNQVGPINGAPKFKSVQPPSLPLSSSPSFHLPFSSTFSPTDFLISPFFLSSPNVFASPTTEAFANQSFNWNKNSLGEEEQQGDKKDEKNLSDFSFPTQTKPESVFQSSTNMFQQEQTKKQDIWKFNEPKKQTDFSSERTASKSEFQSTQSYSSEIVPIKPEIHSNSVTGSGYYNYNNNASQFVREQKRSEDGYNWRKYGQKQVKGSENPRSYYKCTNPNCSMKKKVERDLDGQITEIVYKGTHNHPKPQSNRRTNSQPTSSCTNSGISDQSAMDHVSIQEDSSASVGEEEFEQTSQTSYSGGNDNALVPEAKRWKGDNENEGYCASASRTVKEPRVVVQTTSEIDILDDGFRWRKYGQKVVKGNPNARSYYKCTAPGCNVRKHVERAAHDIKAVITTYEGKHNHDVPAARGSAGYNLNRNSLTNSNIPAPIRPSAVNCYSNSSSFTNSLYNNTGLPANGNQESFPQDILQGHGNFGYSSLGISMDSSVNHSQYSDAAYLKAKDERKDDSFLQSFLSNDF

SEQ ID NO: 15429 - protein, 656 aa, Dactylis glomerata
MAKKGGEGPAIGIDLGTTYSCVGVWQHDRVEIIANDQGNRTTPSYVGFTDTERLIGDAAKNQVAMNPTNTVFDAKRLIGRRFSDPSVQSDMKLWPFKVIPGPADKPMIVVQYKGEEKQFAAEEISSMVLIKMKEIGEAYLGTTIKNAVVTVPAYFNDSQRQATKDAGVIAGLNVMRIINEPTAAAIAYGLDKKASSSGEKNVLIFDLGGGTFDVSLLTIEEGIFEVKATAGDTHLGGEDFDNRMVNHFVQEFKRKNKKDISGNPRALRRLRTACERAKRTLSSTAQTTIEIDSLYEGIDFYSTITRARFEEMNMDLFRKCMEPVEKCLRDAKMDKSTVHDVVLVGGSTRIPKVQQLLQDFFNGKELCKSINPDEAVAYGAAVQAAILSGEGNEKVQDLLLLDVTPLSLGLETAGGVMTTLIPRNTTIPTKKEQVFSTYSDNQPGVLIQVFEGERARTKDNNLLGKFELSGIPPAPRGVPQITVCFDIDANGILNVSAEDKTAGVKNKITITNDKGRLSKEDIEKMVQEAERYKAEDEEVKKKVDAKNALENYAYNMRNTIKDDKIAAKLSADDKKTIEDAVDGAISWLDTNQLAEADEFEDKMKELEGICNPIIARMYQGPGADMGGMPGMAGGMDMDEDVPAGGSGAGPKIEEVD

SEQ ID NO: 15430 - protein, 897 aa, Glycine max
MRMSRSFLVAFLGFLVLAVLIQAQDQSGFISIACGAPAGVNFTVRQTGLNYTSDANFINTGVSRTIVPELRHEFLRNVWNLRSFPEGKRNCYKINITRGSKYLIGASFLYGNYDGLNMLPKFDLLLGANRWDTVDIKNASVSRHFEIIYVPSLDYVHICMVDTGLGTPFISAITLRSLRNDIYETEFGSLQTYIRRDLGSNKGYRYDDDVYDRYWSYDEADTWYDNVDKWKQLNFPIDADSLVQNHYQPPAVVMSTAVTPANVSAPLVISWKPYDPKESFYVYMHFTEIQVLAKNQTREFNITLNGKLWYENESPRYHSVNTIYSTSGISGKLINFSFVMTETSTLPPIINAIEIYRVKEFPQQDTYQGDVDAITTIKSVYGVTGDWQGDPCSPKDYLWEGLNCTYPVIDSPRIITLNLSSSGLSGKIGPSILNLTMLEKLDLSNNSLNGEVPDFLSQLQYLKILNLENNNLSGSIPSTLVEKSKEGSLSLSVGQNPYLCESGQCNFEKKQKNIVTAPIVASISGVLILLVAVAILWTLKRRKSKEKSTALMEVNDESEISRLRSTKKDDSLAQVKKQIYSYSDVLKITNNFNTIIGKGGFGTVYLGYIDDSPVAVKVLSPSSVNGFRQFQAEVKLLVRVHHKNLTSLIGYCNEGTNKALIYEYMANGNLQEHLSGKHSKSTFLSWEDRLRIAVDAALGLEYLQNGCKPPIIHRDVKSTNILLNEHFQAKLSDFGLSKAIPTDGESHVSTVVAGTPGYLDPHCHISSRLTQKSDVLSFGEVLLEIITNQPVMARNQEKGHISERVSSLIEKGDIRAIVDSRLEGDYDINSAWKALEIAMACVSLNPNERPIMSGIAIELKETLAIEIARAKHCDANPRYLVEAVSVNVDTEFMPLAR

SEQ ID NO: 15431 - protein, 585 aa, Emericella nidulans
MYNAHRGMVPAPNSRLNELLDQLRQEFENQSRSTGEFEHQLTGQLQEMEMIRQKVYQLEQAQLKMKQDYEAEIRMLRHELESRGVQPVASHVAVPAQHGGPSQAPPPALGHGPSNLFGGIMANQGGSGPGLAPPPPQDQQPSQHTLQQPAAAAQPGAPQPPQSSFGGYQPGAAVNGYGPPPPPTASPGPGKRPRAPPGPATPQQAHQLAYPESRVSPQLARPTPPNQPVVRDRPGNMLANWNPEDLPPSQKKEGVDWYAVFNPEVQRVLDVELVHHLVHDSVVCCVRFSRDGKYLATGCNRSAQIFDVTLGQNVAVLQDESVDKSGDLYIRSVCFSPDGKYLATGAEDKQIRVWDIATRTIKHIFSGHEQDIYSLDFAGNGRYIASGSGDKTVRLWDIAEGKLVYTLSIEDGVTTVAMSPDGLYVAAGSLDKTVRVWDTTTGYLVERLENPDGHKDSVYSVAFAPNGKELVSGSLDKTIKLWELNLPRQQYNSAGKGGKCHRTFEGHKDFVLSVCLTPDGHWVMSGSKDRGVQFWDPITGNAQMMLQGHKNSVISVAPSPTGNLFATGSGDMRARIWRYSAYTGR

SEQ ID NO: 15432 - protein, 345 aa, Glycine max
MCGGAIISDFIPAAAIAGSRRLTADYLWPDLKKRKSDLDVDFEADFRDFKDDSDIDDDDDDHQVKPFAFAASSRLSTAAKSVAFQGRAEISANRKRKNQYRGIRQRPWGKWAAEIRDPRKGVRVWLGTFNTAEEAARAYDAEARRIRGKKAKVNFPEAPGTSSVKRSKVNPQENLKTVQPNLGHKFSAGNNHMDLVEQKPLVSQYANMASFPGSGNGLRSLPSSDDATLYFSSDQGSNSFDYAPEISSMLSAPLDCESHFVQNANQQQPNSQNVVSIEDDSAKTLSEELVDIESELKFFQMPYLEGSWGDTSLESLLSGDTTQDGGNLMNLWCLDDIPSMAGGVF

SEQ ID NO: 15433 - protein, 652 aa, Ascophyllum nodosum
  misc_feature (424)..(424): Xaa can be any naturally occurring amino acid
  unsure (1)..(652): unsure at all Xaa locations
MSAVGIDLGTTYSCVGVWQNDRVEIIANDQGNRTTTSYVAFTETERLIGDAAKNQTAMNTENTVYDAKRLIGRKFGDSTVQSDMKHWSFKVVCRDGDKPHIQVNFKGETKVFAPEEISAMVLVKMRETAEAYMGKEVKDAVVTVPAYFNDSQRQATKDAGTIAGLNVLRIINEPTAAAIAYGLDKKGAGERNVLIFDLGGGTFDVSLLTIEEGIFEVKSTAGDTHLGGEDFDNRLVNHFVAEFKKKYKKDISGNSRSLRRLRTACERAKRALSTSTQSSIEIDSLFEGIDFYTSITRARFEEMCMDLFRATLDPVEKVLRDAKADKKSVDDIVLVGGSTRIPKIQQLLQDFFNGKELNKSINPDEAVAYGAAVQAAILKGEGGSKTEDLLLDVTPLSMGIETAGGVMTNLIPRNTTIPTKKSQXFPTYADNQPGVMIQVFEGERAMTKDNNQLGKFELGGIPPAPRGVPQIEVTFDIDANGILNVSAEDKSTGKTTKITITNDTGRLSAEEIEKMVSDASKFAKDDEAAKALIEAKNGLENYAFSLRNTLKDEKVAGKIDGSDKETLSGAIEAAISWLDSNPSAEKAEYDSQREKLEGVANPIMSKLYAGAGGAGGMPGGMPGGMPGGFPGGAPAGGANAANDDGPSIEEVD

SEQ ID NO: 15434 - protein, 308 aa, Neocallimastix patriciarum
MAQKKQQQKLGFYEDFLLAGVSATISKTAAAPLERVKLLVQNQGEMLKSGRLATPYKGIGDCFVRVAKEEGIASFWRGNGANIIRYFPTQALNIAFKERIKNAFAVDKEKEGYAKWLVANIASGGAGGALSQVFVYSLDYARTRLANDAKSANGGERQYKGLIDVYKKTYKADGIAGLYRGFTLSCVGIMVYRGLYFGLYDSMKPLLKNLGMEGSFAASFILGWGVTTVAGIASYPIDTIRRRMMMTSGEAVKYKSSIDCAKQVMQKEGVQAFFKGCGANILRGVAGAGVLSGFDKIKEVYINWRIKN

SEQ ID NO: 15435 - protein, 369 aa, Lolium perenne
MLMNCDFNCDLFEQEAKRRSYPWARPCDGCHAAPSAVYCHADAAYLCASCDTQVHSANRLASSHERVRVCVSCESAAAVLECHADSAALCTTCDAQVHSANPIAQRHQRVPVLPLPALAIPAASVFAEAEAATTVYGDKEEGEEVDSWLLLERDSDDNNCTNNIDQYFNLFGYDMYYDKFSCNPGPGEEYRLQEQDVQNMYRENEVCEFAVPSQVGMASEQPESSYGMIGAEQDASMTAGTSTYTASISNGIPFSSMEVGIIPDNTRPDVSNTNIQRTSEAMELAGHSLQMPVHFSSMDRDARVLRYKEKKQARTFQKTIRYATRKAYAEARPRIKGRFAKRSDIEHELDQMLTIPALPDSGHATVLWF

SEQ ID NO: 15436 - protein, 241 aa, Populus deltoides
MGRGRVELKKIENKINRQVTFAKRRNGLLNKAYELSFLCDAEVALIIFSNSGKLFEFCSSSNMATTIEKYQRFSYGALEGGQSEKETQNNYQEYLKLKTRVDVLQRSQRNLLGEDLGNLGTMELDQLENQLDSSLKQIRSRKGQFVLDELSELQRKEELLLETNNALKRKLEETSAAIRLSWKVGEQRVPYSFQPVQPYDPVEPLQYNSTFQFGYNPAETDQATVTSSTQNVNGFIPGWML

SEQ ID NO: 15437 - protein, 503 aa, Triticum aestivum
MSTCAASLAPLLGTAAANATDYLCNQFADTTTAIDSTYLLFSAYLVFAMQLGFAMLCAGSVRAKNTMNIMLTNVLDAAAGALFYYLFGFAFAFGTPSNGFIGKHFFGLRDVPQVGFDYSFFLFQWAFAIAAAGITSGSIAERTQFVAYLIYSAFLTGFVYPVVSHWIWSADGWASASRTSGPLLFNSGVIDFAGSGVVHMVGGVAGLWGALIEGPRIGRFDHAGRAVALRGHSASLVVLGTFLLWFGWYGFNPGSFLTILKSYGPPGSIHGQWSAVGRAAVTTTLAGSTAALTTLFGKRLQTGHWNVLDVCNGLLGGFAAVTAGCSVVDPWAAIICGFVSAWVLIGLNKLAARFKFDDPLEAAQLHGGCGAWGVIFTALFARREYVEQIYGAPGRPYGLFMGGGGRLLGAHVVLILVIAAWVSCTMGPLFLALNKLGLLRISAEDEMAGMDQTRHGGFAYAYTDEDSSSRPGRGAGGSVGGFMLKSAQTSQVAADATSPSSSV

SEQ ID NO: 15438 - protein, 477 aa, Gossypioides kirkii
MDSTSKSNAATSSKKDANNGQTLLLGRYEVGKLLGHGTFAKVYHARNVKSGDSVAIKVIDKEKILKSGLIAHIKREISILRRVRHPNIVQLFEVMATKSKIYFVMEYVRGGELFNKVAKGRLKEDVARKYFQQLISAVHFCHARGVYHRDLKPENLLLDENGDLKVSDFGLSAVSDQIRQDGLFHTFCGTPAYVAPEVLARKGYDAAKVDIWSCGVILFVLMAGYLPFQDQNIMAMYKKIYKGEFRCPRWFSPELVRLLTKLLDTNPETRITIPEIMEKRWFKKGFKHIKFYIEDDKLCSVEDDNDVGSCSDQSSMSESETELETRKRVGTLPRPASLNAFDLISFSPGFNLSGLFEEGEEGSRFVSGAPVSTIISKLEEIAKVVSFTVRKKDCRVSLEGSREGAKGPLSIAAEIFELTPSLVVVEVKKKGGERGEYEDFCNRELKPGLEKLMMEESQSSAAASPAASLSYLPSDTE

SEQ ID NO: 15439 - protein, 666 aa, Bassia scoparia
MASTCANPTFTPFTSKPLKPRSPFHSFPFPSNPKTPSSSFRNLKITSSLSSSQPPKPPSAVKTHSPPSPLTTDEPLQGFVSRFAPDQPRKGCDVLVEALEREGVTDVFAYPGGASMEIHQALTRSDSIRNVLPRHEQGGIFAAEGYARATGRVGVCIATSGPGATNLVSGFADALLDSVPLVAITGQVPRRMIGTDAFQETPIVEVTRSITKHNYLVLDVEDIPRIVKEAFFLANSGRPGPVLIDIPKDIQQQLVVPDWGQGVRLGGYVSRLPKSVFSANDEGLLEQIVRLMSEAKKPVLYVGGGCLNSGEELRKFVELTGIPVASTLMGLGAYPCNDDLSLHMLGMHGTVYANYAVDKADLLLAFGVRFDDRVTGKLEAFASRAKIVHIDIDSAEIGKNKQPHVSICADVKYALKGMNKILESRKGKLNLNYSSWREELGEQKKKFPLSFKTFGEAIPPQYAIQMLDELTNGNAIISTGVGQHQMWAAQHYKYRNPRQWLTSGGLGAMGFGLPAAIGAAVARPDAVVVDIDGDGSFIMNVQELATIRVENLPVKIMLLNNQHLGMVVQWEDRFYKANRAHTYLGNPSKESEIFPDMLKFAEACDIPAARVTKVGDLRAAMQTMLDTPGPYLLDVIVPHQEHVLPMIPSGAAFKDIINEGDGRTSY

SEQ ID NO: 15440 - protein, 666 aa, Bassia scoparia
MASTCANPTFTPFTSKPLKPRSPFHSFPFPSNPKTPSSSFRNLKITSSLSSSQPPKPPSAVKIHSPPSPLTTDEPPQGFVSRFAPDQPRKGCDVLVEALEREGVTDVFAYPGGASMEIHQALTRSDSIRNVLPRHEQGGIFAAEGYARATGRVGVCIATSGPGATNLVSGFADALLDSVPLVAITGQVPRRMIGTDAFQETPIVEVTRSITKHNYLVLDVEDIPRIVKEAFFLANSGRPGPVLIDIPKDIQQQLVVPDWGQGVRLGGYVSRLPKSEFSANDEGLLEQIVRLMSEAKKPVLYVGGGCLNSGEELRKFVELTGIPVASTLMGLGAYPCNDDLSLHMLGMHGTVYANYAVDKADLLLAFGVRFDDRVTGKLEAFASRAKIVHIDIDSAEIGKNKQPHVSICADVKYALKGMNKILESRKGKLNLNYSSWREELGEQKKKFPLSFKTFGEAIPPQYAIQMLDELTNGNAIISTGVGQHQMWAAQHYKYRNPRQWLTSGGLGAMGFGLPAAIGAAVARPDAVVVDIDGDGSFIMNVQELATIRVENLPVKIMLLNNQHLGMVVQWEDRFYKANRAHTYLGNPSKESEIFPDMLKFAEACDIPAARVTKVGDLRAAMQTMLDTPGPYLLDVIVPHQEHVLPMIPSGAAFKDIINEGDGRTSY

SEQ ID NO: 15441 - protein, 666 aa, Bassia scoparia
  misc_feature (570)..(570): Xaa can be any naturally occurring amino acid
  unsure (1)..(666): unsure at all Xaa locations
MASTCANPTFTPFTSKPLKPRSPFHSFPFPSNPKTPSSSFRNLKITSSLSSSQPPKPPSAVKIHSPPSPLTTDEPPQGFVSRFAPDQPRKGCDVLVEALEREGVTDVFAYPGGASMEIHQALTRSDSIRNVLPRHEQGGIFAAEGYARATGRVGVCIATSGPGATNLVSGFADALLDSVPLVAITGQVPRRMIGTDAFQETPIVEVTRSITKHNYLVLDVEDIPRIVKEAFFLANSGRPGPVLIDIPKDIQQQLVVPDWGQGVRLGGYVSRLPKSEFSANDEGLLEQIVRLMSEAKKPVLYVGGGCLNSGEELRKFVELTGIPVASTLMGLGAYPCNDDLSLHMLGMHGTVYANYAVDKADLLLAFGVRFDDRVTGKLEAFASRAKIVHIDIDSAEIGKNKQPHVSICADVKYALKGMNKILESRKGKLNLNYSSWREELGEQKKKFPLSFKTFGEAIPPQYAIQMLDELTNGNAIISTGVGQHQMWAAQHYKYRNPRQWLTSGGLGAMGFGLPAAIGAAVARPDAVVVDIDGDGSFIMNVQELATIRVENLPVKIMLLNNQHLGMVVQXEDRFYKANRAHTYLGNPSKESEIFPDMLKFAEACDIPAARVTKVGDLRAAMQTMLDTPGPYLLDVIVPHQEHVLPMILSVAAFKDIINEGDGRTSY

SEQ ID NO: 15442 - protein, 657 aa, Bassia scoparia
  misc_feature (363)..(363): Xaa can be any naturally occurring amino acid
  unsure (1)..(657): unsure at all Xaa locations
FTPFTSKPLKPRSPFHSFPFPSNPKTPSSSFRNLKITSSLSSSQPPKPPSAVKIHSPPSPLTTDEPPQGFVSRFAPDQPRKGCDVLVEALEREGVTDVFAYPGGASMEIHQALTRSDSIRNVLPRHEQGGIFAAEGYARATGRVGVCIATSGPGATNLVSGFADALLDSVPLVAITGQVPRRMIGTDAFQETPIVEVTRSITKHNYLVLDVEDIPRIVKEAFFLANSGRPGPVLIDIPKDIQQQLVVPDWGQGVRLGGYVSRLPKSEFSANDEGLLEQIVRLMSEAKKPVLYVGGGCLNSGEELRKFVELTGIPVASTLMGLGAYPCNDDLSLHMLGMHGTVYANYAVDKADLLLAFGVRFDXRVTGKLEAFASRAKIVHIDIDSAEIGKNKQPHVSICADVKYALKGMNKILESRKGKLNLNYSSWREELGEQKKKFPLSFKTFGEAIPPQYAIQMLDELTNGNAIISTGVGQHQMWAAQHYKYRNPRQWLTSGGLGAMGFGLPAAIGAAVARPDAVVVDIDGDGSFIMNVQELATIRVENLPVKIMLLNNQHLGMVVQWEDRFYKANRAHTYLGNPSKESEIFPDMLKFAEACDIPAARVTKVGDLRAAMQTMLDTPGPYLLDVIVPHQEHVLPMIPSGAAFKDIINEGDGRTSY

SEQ ID NO: 15443 - protein, 656 aa, Bassia scoparia
  misc_feature (53)..(53): Xaa can be any naturally occurring amino acid
  misc_feature (250)..(250): Xaa can be any naturally occurring amino acid
  misc_feature (266)..(266): Xaa can be any naturally occurring amino acid
  misc_feature (362)..(362): Xaa can be any naturally occurring amino acid
  unsure (1)..(656): unsure at all Xaa locations
TPFTSKPLKPRSPFHSFPFPSNPKTPSSSFRNLKITSSLSSSQPPKPPSAVKXHSPPSPLTTDEPPQGFVSRFAPDQPRKGCDVLVEALEREGVTDVFAYPGGASMEIHQALTRSDSIRNVLPRHEQGGIFAAEGYARATGRVGVCIATSGPGATNLVSGFADALLDSVPLVAITGQVPRRMIGTDAFQETPIVEVTRSITKHNYLVLDVEDIPRIVKEAFFLANTGRPGPVLIDIPKDIQQQLVVPDWXQGVRLGGYVSRLPKSXFSANDEGLLEQIVRLMSEAKKPVLYVGGGCLNSGEELRKFVELTGIPVASTLMGLGAYPCNDDLSLHMLGMHGTVYANYAVDKADLLLAFGVRFDXRVTGKLEAFASRAKIVHIDIDSAEIGKNKQPHVSICADVKYALKGMNKILESRKGKLNLNYSSWREELGEQKKKFPLSFKTFGEAIPPQYAIQMLDELTNGNAIISTGVGQHQMWAAQHYKYRNPRQWLTSGGLGAMGFGLPAAIGAAVARPDAVVVDIDGDGSFIMNVQELATIRVENLPVKIMLLNNQHLGMVVQWEDRFYKANRAHTYLGNPSKESEIFPDMLKFAEACDIPAARVTKVGDLRAAMQTMLDTPGPYLLDVIVPHQEHVLPMIPSGAAFKDIINEGDGRTSY

SEQ ID NO: 15444 - protein, 666 aa, Bassia scoparia
MASTCANPTFTPFTSKPLKPRSPFHSFPFPSNPKTPSSSFRNLKITSSLSSSQPPKPPSAVKIHSPPSPLTTDEPPQGFVSRFAPDQPRKGCDVLVEALEREGVTDVFAYPGGASMEIHQALTRSDSIRNVLPRHEQGGIFAAEGYARATGRVGVCIATSGPGATNLVSGFADALLDSVPLVAITGQVPRRMIGTDAFQETPIVEVTRSITKHNYLVLDVEDIPRIVKEAFFLANSGRPGPVLIDIPKDIQQQLVVPDWGQGVRLGGYVSRLPKSEFSANDEGLLEQIVRLMSEAKKPVLYVGGGCLNSGEELRKFVELTGIPVASTLMGLGAYPCNDDLSLHMLGMHGTVYANYAVDKADLLLAFGVRFDERVTGKLEAFASRAKIVHIDIDSAEIGKNKQPHVSICADVKYALKGMNKILESRKGKLNLNYSSWREELGEQKKKFPLSFKTFGEAIPPQYAIQMLDELTNGNAIISTGVGQHQMWAAQHYKYRNPRQWLTSGGLGAMGFGLPAAIGAAVARPDAVVVDIDGDGSFIMNVQELATIRVENLPVKIMLLNNQHLGMVVQWEDRFYKANRAHTYLGNPSKESEIFPDMLKFAEACDIPAARVTKVGDLRAAMQTMLDTPGPYLLDVIVPHQEHVLPMIPSGAAFKDIINEGDGRTSY

SEQ ID NO: 15445 - protein, 666 aa, Bassia scoparia
  misc_feature (189)..(189): Xaa can be any naturally occurring amino acid
  unsure (1)..(666): unsure at all Xaa locations
MASTCANPTFTPFTSKPLKPRSPFHSFPFPSNPKTPSSSFRNLKITSSLSSSQPPKPPSAVKIHSPPSPLTTDEPPQGFVSRFAPDQPRKGCDVLVEALEREGVTDVFAYPGGASMEIHQALTRSDSIRNVLPRHEQGGIFAAEGYARATGRVGVCIATSGPGATNLVSGFADALLDSVPLVAITGQVXRRMIGTDAFQETPIVEVTRSITKHNYLVLDVEDIPRIVKEAFFLANSGRPGPVLIDIPKDIQQQLVVPDWGQGVRLGGYVSRLPKSEFSANDEGLLEQIVRLMSEAKKPVLYVGGGCLNSGEELRKFVELTGIPVASTLMGLGAYPCNDDLSLHMLGMHGTVYANYAVDKADLLLAFGVRFDDRVTGKLEAFASRAKIVHIDIDSAEIGKNKQPHVSICADVKYALKGMNKILESRKGKLNLNYSSWREELGEQKKKFPLSFKTFGEAIPPQYAIQMLDELTNGNAIISTGVGQHQMWAAQHYKYRNPRQWLTSGGLGAMGFGLPAAIGAAVARPDAVVVDIDGDGSFIMNVQELATIRVENLPVKIMLLNNQHLGMVVQWEDRFYKANRAHTYLGNPSKESEIFPDMLKFAEACDIPAARVTKVGDLRAAMQTMLDTPGPYLLDVIVPHQEHVLPMIPSGAAFKDIINEGDGRTSY

SEQ ID NO: 15446 - protein, 661 aa, Bassia scoparia
  misc_feature (184)..(184): Xaa can be any naturally occurring amino acid
  unsure (1)..(661): unsure at all Xaa locations
ANPTFTPFTSKPLKPRSPFHSFPFPSNPKTPSSSFRNLKITSSLSSSQPPKPPSAVKIHSPPSPLTTDEPPQGFVSRFAPDQPRKGCDVLVEALEREGVTDVFAYPGGASMEIHQALTRSDSIRNVLPRHEQGGIFAAEGYARATGRVGVCIATSGPGATNLVSGFADALLDSVPLVAITGQVXRRMIGTDAFQETPIVEVTRSITKHNYLVLDVEDIPRIVKEAFFLANSGRPGPVLIDIPKDIQQQLVVPDWGQGVRLGGYVSRLPKSEFSANDEGLLEQIVRLMSEAKKPVLYVGGGCLNSGEELRKFVELTGIPVASTLMGLGAYPCNDDLSLHMLGMHGTVYANYAVDKADLLLAFGVRFDDRVTGKLEAFASRAKIVHIDIDSAEIGKNKQPHVSICADVKYALKGMNKILESRKGKLNLNYSSWREELGEQKKKFPLSFKTFGEAIPPQYAIQMLDELTNGNAIISTGVGQHQMWAAQHYKYRNPRQWLTSGGLGAMGFGLPAAIGAAVARPDAVVVDIDGDGSFIMNVQELATIRVENLPVKIMLLNNQHLGMVVQWEDRFYKANRAHTYLGNPSKESEIFPDMLKFAEACDIPAARVTKVGDLRAAMQTMLDTPGPYLLDVIVPHQEHVLPMIPSGAAFKDIINEGDGRTSY

SEQ ID NO: 15447 - protein, 666 aa, Bassia scoparia
  misc_feature (63)..(63): Xaa can be any naturally occurring amino acid
  misc_feature (189)..(189): Xaa can be any naturally occurring amino acid
  misc_feature (260)..(260): Xaa can be any naturally occurring amino acid
  misc_feature (276)..(276): Xaa can be any naturally occurring amino acid
  unsure (1)..(666): unsure at all Xaa locations
MASTCANPTFTPFTSKPLKPRSPFHSFPFPSNPKTPSSSFRNLKITSSLSSSQPPKPPSAVKXHSPPSPLTTDEPPQGFVSRFAPDQPRKGCDVLVEALEREGVTDVFAYPGGASMEIHQALTRSDSIRNVLPRHEQGGIFAAEGYARATGRVGVCIATSGPGATNLVSGFADALLDSVPLVAITGQVXRRMIGTDAFQETPIVEVTRSITKHNYLVLDVEDIPRIVKEAFFLANSGRPGPVLIDIPKDIQQQLVVPDWXQGVRLGGYVSRLPKSXFSANDEGLLEQIVRLMSEAKKPVLYVGGGCLNSGEELRKFVELTGIPVASTLMGLGAYPCNDDLSLHMLGMHGTVYANYAVDKADLLLAFGVRFDDRVTGKLEAFASRAKIVHIDIDSAEIGKNKQPHVSICADVKYALKGMNKILESRKGKLNLNYSSWREELGEQKKKFPLSFKTFGEAIPPQYAIQMLDELTNGNAIISTGVGQHQMWAAQHYKYRNPRQWLTSGGLGAMGFGLPAAIGAAVARPDAVVVDIDGDGSFIMNVQELATIRVENLPVKIMLLNNQHLGMVVQWEDRFYKANRAHTYLGNPSKEYEIFPDMLKFAEACDIPAARVTKVGDLRAAMQTMLDTPGPYLLDVIVPHQEHVLPMIPSGAAFKDIINEGDGRTSY

SEQ ID NO: 15448 - protein, 646 aa, Bassia scoparia
  misc_feature (169)..(169): Xaa can be any naturally occurring amino acid
  misc_feature (240)..(240): Xaa can be any naturally occurring amino acid
  misc_feature (256)..(256): Xaa can be any naturally occurring amino acid
  unsure (1)..(646): unsure at all Xaa locations
RSPFHSFPFPSNPKTPSSSFRNLKITSSLSSSQPPKPPSAVKIHSPPSPLTTDEPPQGFVSRFAPDQPRKGCDVLVEALEREGVTDVFAYPGGASMEIHQALTRSDSIRNVLPRHEQGGIFAAEGYARATGRVGVCIATSGPGATNLVSGFADALLDSVPLVAITGQVXRRMIGTDAFQETPIVEVTRSITKHNYLVLDVEDIPRIVKEAFFLANSGRPGPVLIDIPKDIQQQLVVPDWXQGVRLGGYVSRLPKSXFSANDEGLLEQIVRLMSEAKKPVLYVGGGCLNSGEELRKFVELTGIPVASTLMGLGAYPCNDDLSLHMLGMHGTVYANYAVDKADLLLAFGVRFDDRVTGKLEAFASRAKIVHIDIDSAEIGKNKQPHVSICADVKYALKGMNKILESRKGKLNLNYSSWREELGEQKKKFPLSFKTFGEAIPPQYAIQMLDELTNGNAIISTGVGQHQMWAAQHYKYRNPRQWLTSGGLGAMGFGLPAAIGAAVARPDAVVVDIDGDGSFIMNVQELATIRVENLPVKIMLLNNQHLGMVVQWEDRFYKANRAHTYLGNPSKESEIFPDMLKFAEACDIPAARVTKVGDLRAAMQTMLDTPGPYLLDVIVPHQEHVLPMIPSGAAFKDIINEGDGRTSY

SEQ ID NO: 15449 - protein, 666 aa, Bassia scoparia
MASTCANPTFTPFTSKPLKPRSPFHSFPFPSNPKTPSSSFRNLKITSSLSSSQPPKPPSAVKIHSPPSPLTTDEPPQGFVSRFAPDQPRKGCDVLVEALEREGVTDVFAYPGGASMEIHQALTRSDSIRNVLPRHEQGGIFAAEGYARATGRVGVCIATSGPGATNLVSGFADALLDSVPLVAITGQVTRRMIGTDAFQETPIVEVTRSITKHNYLVLDVEDIPRIVKEAFFLANSGRPGPVLIDIPKDIQQQLVVPDWGQGVRLGGYVSRLPKSEFSANDEGLLEQIVRLMSEAKKPVLYVGGGCLNSGEELRKFVELTGIPVASTLMGLGAYPCNDDLSLHMLGMHGTVYANYAVDKADLLLAFGVRFDDRVTGKLEAFASRAKIVHIDIDSAEIGKNKQPHVSICADVKYALKGMNKILESRKGKLNLNYSSWREELGEQKKKFPLSFKTFGEAIPPQYAIQMLDELTNGNAIISTGVGQHQMWAAQHYKYRNPRQWLTSGGLGAMGFGLPAAIGAAVARPDAVVVDIDGDGSFIMNVQELATIRVENLPVKIMLLNNQHLGMVVQWEDRFYKANRAHTYLGNPSKESEIFPDMLKFAEACDIPAARVTKVGDLRAAMQTMLDTPGPYLLDVIVPHQEHVLPMIPSGAAFKDIINEGDGRTSY

SEQ ID NO: 15450 - protein, 661 aa, Bassia scoparia
ANPTFTPFTSKPLKPRSPFHSFPFPSNPKTPSSSFRNLKITSSLSSSQPPKPPSAVKIHSPPSPLTTDEPPQGFVSRFAPDQPRKGCDVLVEALEREGVTDVFAYPGGASMEIHQALTRSDSIRNVLPRHEQGGIFAAEGYARATGRVGVCIATSGPGATNLVSGFADALLDSVPLVAITGQVQRRMIGTDAFQETPIVEVTRSITKHNYLVLDVEDIPRIVKEAFFLANSGRPGPVLIDIPKDIQQQLVVPDWGQGVRLGGYVSRLPKSEFSANDEGLLEQIVRLMSEAKKPVLYVGGGCLNSGEELRKFVELTGIPVASTLMGLGAYPCNDDLSLHMLGMHGTVYANYAVDKADLLLAFGVRFDDRVTGKLEAFASRAKIVHIDIDSAEIGKNKQPHVSICADVKYALKGMNKILESRKGKLNLNYSSWREELGEQKKKFPLSFKTFGEAIPPQYAIQMLDELTNGNAIISTGVGQHQMWAAQHYKYRNPRQWLTSGGLGAMGFGLPAAIGAAVARPDAVVVDIDGDGSFIMNVQELATIRVENLPVKIMLLNNQHLGMVVQWEDRFYKANRAHTYLGNPSKESEIFPDMLKFAEACDIPAARVTKVGDLRAAMQTMLDTPGPYLLDVIVPHQEHVLPMIPSGAAFKDIINEGDGRTSY

SEQ ID NO: 15451 - protein, 666 aa, Bassia scoparia
MASTCANPTFTPFTSKPLKPRSPFHSFPFPSNPKTPSSSFRNLKITSSLSSSQPPKPPSAVKIHSPPSPLTTDEPPQGFVSRFAPDQPRKGCDVLVEALEREGVTDVFAYPGGASMEIHQALTRSDSIRNVLPRHEQGGIFAAEGYARATGRVGVCIATSGPGATNLVSGFADALLDSVPLVAITGQVSRRMIGTDAFQETPIVEVTRSITKHNYLVLDVEDIPRIVKEAFFLANSGRPGPVLIDIPKDIQQQLVVPDWGQGVRLGGYVSRLPKSEFSANDEGLLEQIVRLMSEAKKPVLYVGGGCLNSGEELRKFVELTGIPVASTLMGLGAYPCNDDLSLHMLGMHGTVYANYAVDKADLLLAFGVRFDDRVTGKLEAFASRAKIVHIDIDSAEIGKNKQPHVSICADVKYALKGMNKILESRKGKLNLNYSSWREELGEQKKKFPLSFKTFGEAIPPQYAIQMLDELTNGNAIISTGVGQHQMWAAQHYKYRNPRQWLTSGGLGAMGFGLPAAIGAAVARPDAVVVDIDGDGSFIMNVQELATIRVENLPVKIMLLNNQHLGMVVQWEDRFYKANRAHTYLGNPSKESEIFPDMLKFAEACDIPAARVTKVGDLRAAMQTMLDTPGPYLLDVIVPHQEHVLPMIPSGAAFKDIINEGDGRTSY

SEQ ID NO: 15452 - protein, 647 aa, Bassia scoparia
  misc_feature (44)..(44): Xaa can be any naturally occurring amino acid
  misc_feature (170)..(170): Xaa can be any naturally occurring amino acid
  misc_feature (241)..(241): Xaa can be any naturally occurring amino acid
  misc_feature (257)..(257): Xaa can be any naturally occurring amino acid
  unsure (1)..(647): unsure at all Xaa locations
PRSPFHSFPFPSNPKTPSSSFRNLKITSSLSSSQPPKPPSAVKXHSPPSPLTTDEPPQGFVSRFAPDQPRKGCDVLVEALEREGVTDVFAYPGGASMEIHQALTRSDSIRNVLPRHEQGGIFAAEGYARATGRVGVCIATSGPGATNLVSGFADALLDSVPLVAITGQVXRRMIGTDAFQETPIVEVTRSITKHNYLVLDVEDIPRIVKEAFFLANSGRPGPVLIDIPKDIQQQLVVPDWXQGVRLGGYVSRLPKSXFSANDEGLLEQIVRLMSEAKKPVLYVGGGCLNSGEELRKFVELTGIPVASTLMGLGAYPCNDDLSLHMLGMHGTVYANYAVDKADLLLAFGVRFDDRVTGKLEAFASRAKIVHIDIDSAEIGKNKQPHVSICADVKYALKGMNKILESRKGKLNLNYSSWREELGEQKKKFPLSFKTFGEAIPPQYAIQMLDELTNGNAIISTGVGQHQMWAAQHYKYRNPRQWLTSGGLGAMGFGLPAAIGAAVARPDAVVVDIDGDGSFIMNVQELATIRVENLPVKIMLLNNQHLGMVVQWEDRFYKANRAHTYLGNPSKESEIFPDMLKFAEACDIPAARVTKVGDLRAAMQTMLDTPGPYLLDVIVPHQEHVLPMIPSGAAFKDIINEGDGRTSY

SEQ ID NO: 15453 - protein, 646 aa, Bassia scoparia
RSPFHSFPFPSNPKTPSSSFRNLKITSSLSSSQPPKPPSAVKIHSPPSPLTTDEPPQGFVSRFAPDQPRKGCDVLVEALEREGVTDVFAYPGGASMEIHQALTRSDSIRNVLPRHEQGGIFAAEGYARATGRVGVCIATSGPGATNLVSGFADALLDSVPLVAITGQVLRRMIGTDAFQETPIVEVTRSITKHNYLVLDVEDIPRIVKEAFFLANSGRPGPVLIDIPKDIQQQLVVPDWGQGVRLGGYVSRLPKSEFSANDEGLLEQIVRLMSEAKKPVLYVGGGCLNSGEELRKFVELTGIPVASTLMGLGAYPCNDDLSLHMLGMHGTVYANYAVDKADLLLAFGVRFDDRVTGKLEAFASRAKIVHIDIDSAEIGKNKQPHVSICADVKYALKGMNKILESRKGKLNLNYSSWREELGEQKKKFPLSFKTFGEAIPPQYAIQMLDELTNGNAIISTGVGQHQMWAAQHYKYRNPRQWLTSGGLGAMGFGLPAAIGAAVARPDAVVVDIDGDGSFIMNVQELATIRVENLPVKIMLLNNQHLGMVVQWEDRFYKANRAHTYLGNPSKESEIFPDMLKFAEACDIPAARVTKVGDLRAAMQTMLDTPGPYLLDVIVPHQEHVLPMIPSGAAFKDIINEGDGRTSY

SEQ ID NO: 15454 - protein, 666 aa, Bassia scoparia
  misc_feature (63)..(63): Xaa can be any naturally occurring amino acid
  misc_feature (189)..(189): Xaa can be any naturally occurring amino acid
  misc_feature (260)..(260): Xaa can be any naturally occurring amino acid
  misc_feature (276)..(276): Xaa can be any naturally occurring amino acid
  misc_feature (430)..(430): Xaa can be any naturally occurring amino acid
  unsure (1)..(666): unsure at all Xaa locations
MASTCANPTFTPFTSKPLKPRSPFHSFPFPSNPKTPSSSFRNLKITSSLSSSQPPKPPSAVKXHSPPSPLTTDEPPQGFVSRFAPDQPRKGCDVLVEALEREGVTDVFAYPGGASMEIHQALTRSDSIRNVLPRHEQGGIFAAEGYARATGRVGVCIATSGPGATNLVSGFADALLDSVPLVAITGQVXRRMIGTDAFQETPIVEVTRSITKHNYLVLDVEDIPRIVKEAFFLANSGRPGPVLIDIPKDIQQQLVVPDWXQGVRLGGYVSRLPKSXFSANDEGLLEQIVRLMSEAKKPVLYVGGGCLNSGEELRKFVELTGIPVASTLMGLGAYPCNDDLSLHMLGMHGTVYANYAVDKADLLLAFGVRFDDRVTGKLEAFASRAKIVHIDIDSAEIGKNKQPHVSICADVKYALKGMNKILESRKGKLXLNYSSWREELGEQKKKFPLSFKTFGEAIPPQYAIQMLDELTNGNAIISTGVGQHQMWAAQHYKYRNPRQWLTSGGLGAMGFGLPAAIGAAVARPDAVVVDIDGDGSFIMNVQELATIRVENLPVKIMLLNNQHLGMVVQWEDRFYKANRAHTYLGNPSKESEIFPDMLKFAEACDIPAARVTKVGDLRAAMQTMLDTPGPYLLDVIVPHQEHVLPMIPSGAAFKDIINEGDGRTSY

SEQ ID NO: 15455 - protein, 666 aa, Bassia scoparia
  misc_feature (570)..(570): Xaa can be any naturally occurring amino acid
  unsure (1)..(666): unsure at all Xaa locations
MASTCANPTFTPFTSKPLKPRSPFHSFPFPSNPKTPSSSFRNLKITSSLSSSQPPKPPSAVKIHSPPSPLTTDEPPQGFVSRFAPDQPRKGCDVLVEALEREGVTDVFAYPGGASMEIHQALTRSDSIRNVLPRHEQGGIFAAEGYARATGRVGVCIATSGPGATNLVSGFADALLDSVPLVAITGQVPRRMIGTDAFQETPIVEVTRSITKHNYLVLDVEDIPRIVKEAFFLANSGRPGPVLIDIPKDIQQQLVVPDWGQGVRLGGYVSRLPKSEFSANDEGLLEQIVRLMSEAKKPVLYVGGGCLNSGEELRKFVELTGIPVASTLMGLGAYPCNDDLSLHMLGMHGTVYANYAVDKADLLLAFGVRFDDRVTGKLEAFASRAKIVHIDIDSAEIGKNKQPHVSICADVKYALKGMNKILESRKGKLNLNYSSWREELGEQKKKFPLSFKTFGEAIPPQYAIQMLDELTNGNAIISTGVGQHQMWAAQHYKYRNPRQWLTSGGLGAMGFGLPAAIGAAVARPDAVVVDIDGDGSFIMNVQELATIRVENLPVKIMLLNNQHLGMVVQXEDRFYKANRAHTYLGNPSKESEIFPDMLKFAEACDIPAARVTKVGDLRAAMQTMLDTPGPYLLDVIVPHQEHVLPMIPSGAAFKDIINEGDGRTSY

SEQ ID NO: 15456 - protein, 650 aa, Bassia scoparia
  misc_feature (173)..(173): Xaa can be any naturally occurring amino acid
  misc_feature (554)..(554): Xaa can be any naturally occurring amino acid
  unsure (1)..(650): unsure at all Xaa locations
PLKPRSPFHSFPFPSNPKTPSSSFRNLKITSSLSSSQPPKPPSAVKIHSPPSPLTTDEPPQGFVSRFAPDQPRKGCDVLVEALEREGVTDVFAYPGGASMEIHQALTRSDSIRNVLPRHEQGGIFAAEGYARATGRVGVCIATSGPGATNLVSGFADALLDSVPLVAITGQVXRRMIGTDAFQETPIVEVTRSITKHNYLVLDVEDIPRIVKEAFFLANSGRPGPVLIDIPKDIQQQLVVPDWGQGVRLGGYVSRLPKSEFSANDEGLLEQIVRLMSEAKKPVLYVGGGCLNSGEELRKFVELTGIPVASTLMGLGAYPCNDDLSLHMLGMHGTVYANYAVDKADLLLAFGVRFDDRVTGKLEAFASRAKIVHIDIDSAEIGKNKQPHVSICADVKYALKGMNKILESRKGKLNLNYSSWREELGEQKKKFPLSFKTFGEAIPPQYAIQMLDELTNGNAIISTGVGQHQMWAAQHYKYRNPRQWLTSGGLGAMGFGLPAAIGAAVARPDAVVVDIDGDGSFIMNVQELATIRVENLPVKIMLLNNQHLGMVVQXEDRFYKANRAHTYLGNPSKESEIFPDMLKFAEACDIPAARVTKVGDLRAAMQTMLDTPGPYLLDVIVPHQEHVLPMIPSGAAFKDIINEGDGRTSY

SEQ ID NO: 15457 - protein, 647 aa, Bassia scoparia
  misc_feature (44)..(44): Xaa can be any naturally occurring amino acid
  misc_feature (57)..(57): Xaa can be any naturally occurring amino acid
  misc_feature (170)..(170): Xaa can be any naturally occurring amino acid
  misc_feature (257)..(257): Xaa can be any naturally occurring amino acid
  misc_feature (551)..(551): Xaa can be any naturally occurring amino acid
  unsure (1)..(647): unsure at all Xaa locations
PRSPFHSFPFPSNPKTPSSSFRNLKITSSLSSSQPPKPPSAVKXHSPPSPLTTDEPXQGFVSRFAPDQPRKGCDVLVEALEREGVTDVFAYPGGASMEIHQALTRSDSIRNVLPRHEQGGIFAAEGYARATGRVGVCIATSGPGATNLVSGFADALLDSVPLVAITGQVXRRMIGTDAFQETPIVEVTRSITKHNYLVLDVEDIPRIVKEAFFLANSGRPGPVLIDIPKDIQQQLVVPDWGQGVRLGGYVSRLPKSXFSANDEGLLEQIVRLMSEAKKPVLYVGGGCLNSGEELRKFVELTGIPVASTLMGLGAYPCNDDLSLHMLGMHGTVYANYAVDKADLLLAFGVRFDDRVTGKLEAFASRAKIVHIDIDSAEIGKNKQPHVSICADVKYALKGMNKILESRKGKLNLNYSSWREELGEQKKKFPLSFKTFGEAIPPQYAIQMLDELTNGNAIISTGVGQHQMWAAQHYKYRNPRQWLTSGGLGAMGFGLPAAIGAAVARPDAVVVDIDGDGSFIMNVQELATIRVENLPVKIMLLNNQHLGMVVQXEDRFYKANRAHTYLGNPSKESEIFPDMLKFAEACDIPAARVTKVGDLRAAMQTMLDTPGPYLLDVIVPHQEHVLPMIPSGAAFKDIINEGDGRTSY

SEQ ID NO: 15458 - protein, 661 aa, Bassia scoparia
  misc_feature (184)..(184): Xaa can be any naturally occurring amino acid
  misc_feature (367)..(367): Xaa can be any naturally occurring amino acid
  unsure (1)..(661): unsure at all Xaa locations
ANPTFTPFTSKPLKPRSPFHSFPFPSNPKTPSSSFRNLKITSSLSSSQPPKPPSAVKIHSPPSPLTTDEPPQGFVSRFAPDQPRKGCDVLVEALEREGVTDVFAYPGGASMEIHQALTRSDSIRNVLPRHEQGGIFAAEGYARATGRVGVCIATSGPGATNLVSGFADALLDSVPLVAITGQVXRRMIGTDAFQETPIVEVTRSITKHNYLVLDVEDIPRIVKEAFFLANSGRPGPVLIDIPKDIQQQLVVPDWGQGVRLGGYVSRLPKSEFSANDEGLLEQIVRLMSEAKKPVLYVGGGCLNSGEELRKFVELTGIPVASTLMGLGAYPCNDDLSLHMLGMHGTVYANYAVDKADLLLAFGVRFDXRVTGKLEAFASRAKIVHIDIDSAEIGKNKQPHVSICADVKYALKGMNKILESRKGKLNLNYSSWREELGEQKKKFPLSFKTFGEAIPPQYAIQMLDELTNGNAIISTGVGQHQMWAAQHYKYRNPRQWLTSGGLGAMGFGLPAAIGAAVARPDAVVVDIDGDGSFIMNVQELATIRVENLPVKIMLLNNQHLGMVVQWEDRFYKANRAHTYLGNPSKESEIFPDMLKFAEACDIPAARVTKVGDLRAAMQTMLDTPGPYLLDVIVPHQEHVLPMIPSGAAFKDIINEGDGRTSY

SEQ ID NO: 15459 - protein, 666 aa, Bassia scoparia
  misc_feature (189)..(189): Xaa can be any naturally occurring amino acid
  misc_feature (570)..(570): Xaa can be any naturally occurring amino acid
  unsure (1)..(666): unsure at all Xaa locations
MASTCANPTFTPFTSKPLKPRSPFHSFPFPSNPKTPSSSFRNLKITSSLSSSQPPKPPSAVKIHSPPSPLTTDEPPQGFVSRFAPDQPRKGCDVLVEALEREGVTDVFAYPGGASMEIHQALTRSDSIRNVLPRHEQGGIFAAEGYARATGRVGVCIATSGPGATNLVSGFADALLDSVPLVAITGQVXRRMIGTDAFQETPIVEVTRSITKHNYLVLDVEDIPRIVKEAFFLANSGRPGPVLIDIPKDIQQQLVVPDWGQGVRLGGYVSRLPKSEFSANDEGLLEQIVRLMSEAKKPVLYVGGGCLNSGEELRKFVELTGIPVASTLMGLGAYPCNDDLSLHMLGMHGTVYANYAVDKADLLLAFGVRFDDRVTGKLEAFASRAKIVHIDIDSAEIGKNKQPHVSICADVKYALKGMNKILESRKGKLNLNYSSWREELGEQKKKFPLSFKTFGEAIPPQYAIQMLDELTNGNAIISTGVGQHQMWAAQHYKYRNPRQWLTSGGLGAMGFGLPAAIGAAVARPDAVVVDIDGDGSFIMNVQELATIRVENLPVKIMLLNNQHLGMVVQXEDRFYKANRAHTYLGNPSKESEIFPDMLKFAEACDIPAARVTKVGDLRAAMQTMLDTPGPYLLDVIVPHQEHVLPMIPSGAAFKDIINEGDGRTSY

SEQ ID NO: 15460 - protein, 666 aa, Bassia scoparia
  misc_feature (76)..(76): Xaa can be any naturally occurring amino acid
  misc_feature (189)..(189): Xaa can be any naturally occurring amino acid
  unsure (1)..(666): unsure at all Xaa locations
MASTCANPTFTPFTSKPLKPRSPFHSFPFPSNPKTPSSSFRNLKITSSLSSSQPPKPPSAVKIHSPPSPLTTDEPXQGFVSRFAPDQPRKGCDVLVEALEREGVTDVFAYPGGASMEIHQALTRSDSIRNVLPRHEQGGIFAAEGYARATGRVGVCIATSGPGATNLVSGFADALLDSVPLVAITGQVXRRMIGTDAFQETPIVEVTRSITKHNYLVLDVEDIPRIVKEAFFLANSGRPGPVLIDIPKDIQQQLVVPDWGQGVRLGGYVSRLPKSEFSANDEGLLEQIVRLMSEAKKPVLYVGGGCLNSGEELRKFVELTGIPVASTLMGLGAYPCNDDLSLHMLGMHGTVYANYAVDKADLLLAFGVRFDDRVTGKLEAFASRAKIVHIDIDSAEIGKNKQPHVSICADVKYALKGMNKILESRKGKLNLNYSSWREELGEQKKKFPLSFKTFGEAIPPQYAIQMLDELTNGNAIISTGVGQHQMWAAQHYKYRNPRQWLTSGGLGAMGFGLPAAIGAAVARPDAVVVDIDGDGSFIMNVQELATIRVENLPVKIMLLNNQHLGMVVQWEDRFYKANRAHTYLGNPSKESEIFPDMLKFAEACDIPAARVTKVGDLRAAMQTMLDTPGPYLLDVIVPHQEHVLPMIPSGAAFKDIINEGDGRTSY

SEQ ID NO: 15461 - protein, 666 aa, Bassia scoparia
  misc_feature (189)..(189): Xaa can be any naturally occurring amino acid
  misc_feature (372)..(372): Xaa can be any naturally occurring amino acid
  unsure (1)..(666): unsure at all Xaa locations
MASTCANPTFTPFTSKPLKPRSPFHSFPFPSNPKTPSSSFRNLKITSSLSSSQPPKPPSAVKIHSPPSPLTTDEPPQGFVSRFAPDQPRKGCDVLVEALEREGVTDVFAYPGGASMEIHQALTRSDSIRNVLPRHEQGGIFAAEGYARATGRVGVCIATSGPGATNLVSGFADALLDSVPLVAITGQVXRRMIGTDAFQETPIVEVTRSITKHNYLVLDVEDIPRIVKEAFFLANSGRPGPVLIDIPKDIQQQLVVPDWGQGVRLGGYVSRLPKSEFSANDEGLLEQIVRLMSEAKKPVLYVGGGCLNSGEELRKFVELTGIPVASTLMGLGAYPCNDDLSLHMLGMHGTVYANYAVDKADLLLAFGVRFDXRVTGKLEAFASRAKIVHIDIDSAEIGKNKQPHVSICADVKYALKGMNKILESRKGKLNLNYSSWREELGEQKKKFPLSFKTFGEAIPPQYAIQMLDELTNGNAIISTGVGQHQMWAAQHYKYRNPRQWLTSGGLGAMGFGLPAAIGAAVARPDAVVVDIDGDGSFIMNVQELATIRVENLPVKIMLLNNQHLGMVVQWEDRFYKANRAHTYLGNPSKESEIFPDMLKFAEACDIPAARVTKVGDLRAAMQTMLDTPGPYLLDVIVPHQEHVLPMIPSGAAFKDIINEGDGRTSY

SEQ ID NO: 15462 - protein, 666 aa, Bassia scoparia
  misc_feature (189)..(189): Xaa can be any naturally occurring amino acid
  misc_feature (217)..(217): Xaa can be any naturally occurring amino acid
  misc_feature (372)..(372): Xaa can be any naturally occurring amino acid
  unsure (1)..(666): unsure at all Xaa locations
MASTCANPTFTPFTSKPLKPRSPFHSFPFPSNPKTPSSSFRNLKITSSLSSSQPPKPPSAVKIHSPPSPLTTDEPPQGFVSRFAPDQPRKGCDVLVEALEREGVTDVFAYPGGASMEIHQALTRSDSIRNVLPRHEQGGIFAAEGYARATGRVGVCIATSGPGATNLVSGFADALLDSVPLVAITGQVXRRMIGTDAFQETPIVEVTRSITKHNYLXLDVEDIPRIVKEAFFLANSGRPGPVLIDIPKDIQQQLVVPDWGQGVRLGGYVSRLPKSEFSANDEGLLEQIVRLMSEAKKPVLYVGGGCLNSGEELRKFVELTGIPVASTLMGLGAYPCNDDLSLHMLGMHGTVYANYAVDKADLLLAFGVRFDXRVTGKLEAFASRAKIVHIDIDSAEIGKNKQPHVSICADVKYALKGMNKILESRKGKLNLNYSSWREELGEQKKKFPLSFKTFGEAIPPQYAIQMLDELTNGNAIISTGVGQHQMWAAQHYKYRNPRQWLTSGGLGAMGFGLPAAIGAAVARPDAVVVDIDGDGSFIMNVQELATIRVENLPVKIMLLNNQHLGMVVQWEDRFYKANRAHTYLGNPSKESEIFPDMLKFAEACDIPAARVTKVGDLRAAMQTMLDTPGPYLLDVIVPHQEHVLPMIPSGAAFKDIINEGDGRTSY

SEQ ID NO: 15463 - protein, 647 aa, Bassia scoparia
  misc_feature (44)..(44): Xaa can be any naturally occurring amino acid
  misc_feature (57)..(57): Xaa can be any naturally occurring amino acid
  misc_feature (170)..(170): Xaa can be any naturally occurring amino acid
  misc_feature (257)..(257): Xaa can be any naturally occurring amino acid
  misc_feature (353)..(353): Xaa can be any naturally occurring amino acid
  unsure (1)..(647): unsure at all Xaa locations
PRSPFHSFPFPSNPKTPSSSFRNLKITSSLSSSQPPKPPSAVKXHSPPSPLTTDEPXQGFVSRFAPDQPRKGCDVLVEALEREGVTDVFAYPGGASMEIHQALTRSDSIRNVLPRHEQGGIFAAEGYARATGRVGVCIATSGPGATNLVSGFADALLDSVPLVAITGQVXRRMIGTDAFQETPIVEVTRSITKHNYLVLDVEDIPRIVKEAFFLANSGRPGPVLIDIPKDIQQQLVVPDWGQGVRLGGYVSRLPKSXFSANDEGLLEQIVRLMSEAKKPVLYVGGGCLNSGEELRKFVELTGIPVASTLMGLGAYPCNDDLSLHMLGMHGTVYANYAVDKADLLLAFGVRFDXRVTGKLEAFASRAKIVHIDIDSAEIGKNKQPHVSICADVKYALKGMNKILESRKGKLNLNYSSWREELGEQKKKFPLSFKTFGEAIPPQYAIQMLDELTNGNAIISTGVGQHQMWAAQHYKYRNPRQWLTSGGLGAMGFGLPAAIGAAVARPDAVVVDIDGDGSFIMNVQELATIRVENLPVKIMLLNNQHLGMVVQWEDRFYKANRAHTYLGNPSKESEIFPDMLKFAEACDIPAARVTKVGDLRAAMQTMLDTPGPYLLDVIVPHQEHVLPMIPSGAAFKDIINEGDGRTSY

SEQ ID NO: 15464 - protein, 666 aa, Bassia scoparia
  misc_feature (189)..(189): Xaa can be any naturally occurring amino acid
  unsure (1)..(666): unsure at all Xaa locations
MASTCANPTFTPFTSKPLKPRSPFHSFPFPSNPKTPSSSFRNLKITSSLSSSQPPKPPSAVKIHSPPSPLTTDEPPQGFVSRFAPDQPRKGCDVLVEALEREGVTDVFAYPGGASMEIHQALTRSDSIRNVLPRHEQGGIFAAEGYARATGRVGVCIATSGPGATNLVSGFADALLDSVPLVAITGQVXRRMIGTDAFQETPIVEVTRSITKHNYLVLDVEDIPRIVKEAFFLANSGRPGPVLIDIPKDIQQQLVVPDWGQGVRLGGYVSRLPKSEFSANDEGLLEQIVRLMSEAKKPVLYVGGGCLNSGEELRKFVELTGIPVASTLMGLGAYPCNDDLSLHMLGMHGTVYANYAVDKADLLLAFGVRFDDRVTGKLEAFASRAKIVHIDIDSAEIGKNKQPHVSICADVKYALKGMNKILESRKGKLNLNYSSWREELGEQKKKFPLSFKTFGEAIPPQYAIQMLDELTNGNAIISTGVGQHQMWAAQHYKYRNPRQWLTSGGLGAMGFGLPAAIGAAVARPDAVVVDIDGDGSFIMNVQELATIRVENLPVKIMLLNNQHLGMVVQWEDRFYKANRAHTYLGNPSKESEIFPDMLKFAEACDIPAARVTKVGDLRAAMQTMLDTPGPYLLDVIVPHQEHVLPMIHSGAAFKDIINEGDGRTSY

SEQ ID NO: 15465 - protein, 666 aa, Bassia scoparia
MASTCANPTFTPFTSKPLKPRSPFHSFPFPSNPKTPSSSFRNLKITSSLSSSQPPKPPSAVKIHSPPSPLTTDEPPQGFVSRFAPDQPRKGCDVLVEALEREGVTDVFAYPGGASMEIHQALTRSDSIRNVLPRHEQGGIFAAEGYARATGRVGVCIATSGPGATNLVSGFADALLDSVPLVAITGQVQRRMIGTDAFQETPIVEVTRSITKHNYLVLDVEDIPRIVKEAFFLANSGRPGPVLIDIPKDIQQQLVVPDWGQGVRLGGYVSRLPKSEFSANDEGLLEQIVRLMSEAKKPVLYVGGGCLNSGEELRKFVELTGIPVASTLMGLGAYPCNDDLSLHMLGMHGTVYANYAVDKADLLLAFGVRFDDRVTGKLEAFASRAKIVHIDIDSAEIGKNKQPHVSICADVKYALKGMNKILESRKGKLNLNYSSWREELGEQKKKFPLSFKTFGEAIPPQYAIQMLDELTNGNAIISTGVGQHQMWAAQHYKYRNPRQWLTSGGLGAMGFGLPAAIGAAVARPDAVVVDIDGDGSFIMNVQELATIRVENLPVKIMLLNNQHLGMVVQWEDRFYKANRAHTYLGNPSKESEIFPDMLKFAEACDIPAARVTKVGDLRAAMQTMLDTPGPYLLDVIVPHQEHVLPMIPSGAAFKDIINEGDGRTSY

SEQ ID NO: 15466 - protein, 666 aa, Bassia scoparia
  misc_feature (63)..(63): Xaa can be any naturally occurring amino acid
  misc_feature (189)..(189): Xaa can be any naturally occurring amino acid
  misc_feature (260)..(260): Xaa can be any naturally occurring amino acid
  misc_feature (276)..(276): Xaa can be any naturally occurring amino acid
  unsure (1)..(666): unsure at all Xaa locations
MASTCANPTFTPFTSKPLKPRSPFHSFPFPSNPKTPSSSFRNLKITSSLSSSQPPKPPSAVKXHSPPSPLTTDEPPQGFVSRFAPDQPRKGCDVLVEALEREGVTDVFAYPGGASMEIHQALTRSDSIRNVLPRHEQGGIFAAEGYARATGRVGVCIATSGPGATNLVSGFADALLDSVPLVAITGQVXRRMIGTDAFQETPIVEVTRSITKHNYLVLDVEDIPRIVKEAFFLANSGRPGPVLIDIPKDIQQQLVVPDWXQGVRLGGYVSRLPKSXFSANDEGLLEQIVRLMSEAKKPVLYVGGGCLNSGEELRKFVELTGIPVASTLMGLGAYPCNDDLSLHMLGMHGTVYANYAVDKADLLLAFGVRFDDRVTGKLEAFASRAKIVHIDIDSAEIGKNKQPHVSICADVKYALKGMNKILESRKGKLNLNYSSWREELGEQKKKFPLSFKTFGEAIPPQYAIQMLDELTNGNAIISTGVGQHQMWAAQHYKYRNPRQWLTSGGLGAMGFGLPAAIGAAVARPDAVVVDIDGDGSFIMNVQELATIRVENLPVKIMLLNNQHLGMVVQWEDRFYKANRAHTYLGNPSKESEIFPDMLKFAEACDIPAARVTKVGDLRAAMQTMLDTPGPYLLDVIVPHQEHVLPMIPSGAAFKDIINEGDGRTSY

SEQ ID NO: 15467 - protein, 666 aa, Bassia scoparia
  misc_feature (63)..(63): Xaa can be any naturally occurring amino acid
  unsure (1)..(666): unsure at all Xaa locations
MASTCANPTFTPFTSKPLKPRSPFHSFPFPSNPKTPSSSFRNLKITSSLSSSQPPKPPSAVKXHSPPSPLTTDEPPQGFVSRFAPDQPRKGCDVLVEALEREGVTDVFAYPGGASMEIHQALTRSDSIRNVLPRHEQGGIFAAEGYARATGRVGVCIATSGPGATNLVSGFADALLDSVPLVAITGQVPRRMIGTDAFQETPIVEVTRSITKHNYLVLDVEDIPRIVKEAFFLANSGRPGPVLIDIPKDIQQQLVVPDWDQGVRLGGYVSRLPKSEFSANDEGLLEQIVRLMSEAKKPVLYVGGGCLNSGEELRKFVELTGIPVASTLMGLGAYPCNDDLSLHMLGMHGTVYANYAVDKADLLLAFGVRFDDRVTGKLEAFASRAKIVHIDIDSAEIGKNKQPHVSICADVKYALKGMNKILESRKGKLNLNYSSWREELGEQKKKFPLSFKTFGEAIPPQYAIQMLDELTNGNAIISTGVGQHQMWAAQHYKYRNPRQWLTSGGLGAMGFGLPAAIGAAVARPDAVVVDIDGDGSFIMNVQELATIRVENLPVKIMLLNNQHLGMVVQLEDRFYKANRAHTYLGNPSKESEIFPDMLKFAEACDIPAARVTKVGDLRAAMQTMLDTPGPYLLDVIVPHQEHVLPMIPSGAAFKDIINEGDGRTSY

SEQ ID NO: 15468 - protein, 642 aa, Guillardia theta
PSAIDLGTTYSCVGIWQNERVEIIANDQGNRTTPSWVAFTESERLIGDAAKNQAAMNPHNTIFDAKRLIGRKMDDSSLQADLKHFPFKVVPKDGKPHIQAEYKGENKTFSPEEISSMILTKMKETSEAYLGKEVKHAVITVPAYFNDSQRQATKDAGLIAGLNVLRIINEPTAAAIAYGLEKKGTGERNILIYDLGGGTFDVSLLTIDDGIFEVLATAGDTHLGGEDFDNRLVQFVLQEFKRKHKKDPSENARALRRIRTACERAKRTLSSAANTTIEVDSCFEGIDFYTNITRAKFEEPLLDLFRGTLDPVDRVLRDSKISKGQVHEIVLVGGSTRIPKIQSLLQDFFNGKELNKSINPDEAVAYGAAVQAAILAGVDSEKTQDLLLLDVAPLSLGIETAGGVMTKLIERNTTIPCKKSQVFSTYADNQPGVLIQVYEGERQMTKDNNLLGKFQLDGIPPAPRGVPKIEVTFDIDANGIVHVQAKDKATGKEQKITITNDKGRLSQDDIERMVKEAEGFKEEDERQRKKVDAKNSLENYAYSLKNTLSDEKVAESLIDSDKSSLTSKIDETISWLESNANAEVEEFEANEKALEGVAMPIMTKLYQGGRMPDMGGGMPDMSGGAPSSGAGGAGGPHIEEVD

SEQ ID NO: 15469 - protein, 251 aa, Cupriavidus taiwanensis
MNLRRKCLIAALSAVAGLTFGASAHAQDSNVLRVATDATFPPMEFIENGKRTGFDVELVEAMAKTMGKQVEWTNIDFKGLIPGLVSRRFDMAVSGIYITPERRKVVDFTEPYYTGGLVALVKSGNTAINKPEDLNGKKVSVQVGTKSVSFLRDTYPQVTRVEVEKNQEMFNLVEIGRADAAVTGKPAAMQYVKTRGGLRVVEQQLTTEEYGMAVRKDTPELTRALNAALAKVKADGTYAKLTQKWFGSAAK

SEQ ID NO: 15470 - protein, 392 aa, Cupriavidus taiwanensis
MEEIVIVSAARTPMAAFQGEFASVTAPQLGAVAIRAAVERAGLKPEQVEEVVFGCVLPAGQGQAPARQAALGAGLPLGTGCTTVNKMCGSGMRAAMTVYDGLVAGSFEIAVAGGMESMTNAPYLIPKGRGGYRIGHGMIYDHMMLDGLEDAYDKGRAMGTFGEDCAAKYGFTRQQQDEFAMESVRRAQQATENGDFRWEIAPVTVSGKGGDTVIDTDEGPRRIKLDKIPSLKPAFAKDGTITAASSSSINDGASALVMMRASTAKKLGLQPIARMLGHTTHAQAPGWFTTAPVEAIAKLYRKLDWNTGSVDLFEINEAFAVVPMAAMHDLKIPRDKVNIHGGACALGHPIGASGARIMTTLIGALRKTGGKRGVASLCIGGGEATAVGIEIL

SEQ ID NO: 15471 - protein, 465 aa, Cupriavidus taiwanensis
MSLFRTKDIDAMLAVARDDGLKKVLGPVDLVLMGIGAIIGTGIFVLTGTGALTAGPALTVSFVIAALACGFAALCYAEFASAIPVSGSIYTYSYATLGEIVAWMIGWDLLLEYGLATSAVSVGWSGYFQSLMAGFGMKLPAALTAAPGLVPGVQTVLNLPACLIMLAITWVVSYGVRESARVNNLMVAVKIGVVLLFIAVGVWHVQPANWQPFAPFGFTGIFNAAALVFFAFIGFDAVTSAAEEVRNPRRDLPIGIIGSLAVCTVLYVVVAAIMTGIVPFAKFAGVDHPVSLALQFAGQNWVAGFVDLGAILGMTTVILVMTYGQTRVIFAMSRDGLLPERLSSVHPVHATPYFATWTVGLVFAAIAAFVPLNVLAELINIGTLAAFTLISVAVLVLRKTRPELPRAFRCPGVPVVPLLSIGFCLFLMAHLQALTWAAFLVWLALGLVIYFAYARRNAVLHNHGG

SEQ ID NO: 15472 - protein, 444 aa, Cupriavidus taiwanensis
MPTRLSHARPLHAAVQNSDAAASADAVPASSGRRRALATIASASVMTLVDPLVRAGAWAAGSDAPEKTEVRIGFIPLTDCASVVMAATLGLDKKYGIKITPTKEASWAGVRDKLVNGELDAAHVLYGLVYGVQLGIGGPKKDMAVLMSLNHNGQAITLSSKLAEKGVRDGASLKALMAKEKRDYTFAQTFPTGTHAMWLYYWLAANGINPMQDAKAITVPPPQMVANMRVGNMDGFCVGEPWGARAIADKIGFTAETTQAIWKNHPEKTLGTTAEFVQKYPNTARAMVAAVLEASKFIDASASNRRKTAETIAAKSYVNTDMDIILDRMLGRYTNGLGKTWDDPDAMKFYQDGNANFPFLSDGMWFLTQHKRWGLLKAHPDYLAVARQVNRIDIYKQAATAAQVPLPKSDMRSSKLIDGVVWDGKDPKAYADGFKIKAAGTPSA

SEQ ID NO: 15473 - protein, 317 aa, Cupriavidus taiwanensis
MSSEGLMVFTGNANPKLAEAVVQHLGIPLGKAQVGRFSDGEVQVEIQENVRGKHVIVLQSTCAPTNDNLMELMVMVDALKRASARSITAAMPYFGYARQDRRPRSARVAISAKVVANMLEVAGVERVLTMDLHADQIQGFFDIPVDNIYASPVLLGDLREKNYGDLLVVSPDVGGVVRARALAKELNCDLAIIDKRRPKANVAEVMNIIGEVEGRNCVIMDDMIDTGGTLCKAAQVLKERGALKVFAYCTHPVLSGGAAARIADSALDEVVVCDTIPLSEEAAKCGKIRQLSTAPLLAETFTRIVKGDSIMSLFAGS

SEQ ID NO: 15474 - protein, 338 aa, Cupriavidus taiwanensis
MRSHSLVYFVAMIANFDADRALRLARDTLQTEADAVSALSGRLNGDFAHAVQLILQCTGRVVVSGIGKSGHIGRKVAATLASTGTPAFFVHPAEASHGDLGMVTRDDVLIAFSNSGETGELLSIIPIVKRIGARLISVTGNPDSNLAKLADVHLDAAVEKEACPLNLAPTASTTAALALGDALAVAVLDARGFGEEDFARSHPGGALGRKLLTHVRDVMRTGNAVPEVRESTPLAQALMEITRKGMAMTAVVDPDGRAIGVFTDGDLRRLLETPRDWKTVPIGEVMHRNPHVVNQDQLAVEAVQVMEANRINQLLVVDDDGRLAGALHIHDLTRAKVI

SEQ ID NO: 15475 - protein, 463 aa, Cupriavidus taiwanensis
MPRLVAVSNRVADPRNVAAGGLAVALSEALRQTGGLWFGWSGKALQTAQGGTPGEGDLHLQQAGNVTLATVDLSREDHDAYYLGYSNGVLWPVFHYRLDLADFDSNFLNGYRRVNQLFARKLAPLLQPDDIIWIHDYHLIPLASELRAIGCGQKIGFFLHVPLPPPLILAAIPQHEWLMRALFAYDLLGFQSHADVEHFSRYVQAEAQAEPMGEHRYRAFHRTVRAQAFPIGIDVDEFMELGRGEEAQETYEMMCAQYARRRLLLGIDRLDYSKGLPQRLKAFYRLLAEYPENRSSATLVQIAAPSRESVDAYADLRREMEQLSGSINGEFGELDWMPVRYIHRTTARKRLPGLCRASRVALVTPLRDGMNLVAKEFIAAQDPEDPGVLVLSRFAGAAEQLREALLVNPYDTRATAQAIQQALHMPLAERHQRHQKLLERIRAQDVHWWSREYLRALSETEGA

SEQ ID NO: 15476 - protein, 398 aa, Cupriavidus taiwanensis
MKQLQDAYIVAATRSPIGKAPKGAFKNTRPDDLLATILKAAVAQVPNLDPKLIEDAIVGCAIPEAQQGLNVARIGALLSGLPNTVGGITVNRFCASGVSAVAMAADRIRVGESDVMIAAGVESMSMVPMMGNSPSMSPEIFTRDENVGIAYGMGLTAEKVAQQWKVSREDQDAFSLASHQKAIAAQQAGEFKDEITPIEIVERFPDLASGQVSVKTRTISLDEGPRPETSLEGLGKLRPVFANKGSVTAGNSSQTSDGAGALILVSEKILKQFNLVPLARFVSFAVRGVPPEIMGIGPKEAIPAALKAAGLTQDQIDWIELNEAFAAQSLAVMRDLDLDPARVNRMGGAIALGHPLGATGAIRSATVVHALRRHNLKYGMVTMCVGTGMGAAGIFERV

SEQ ID NO: 15477 - protein, 422 aa, Cupriavidus taiwanensis
MAPPQERCMPSPSRPCAPRPRASFARVVAACRRWLLPAAAAAACAALAAGCATAPRPKRAAPAAPPAPAPAASAPASAPAAQPKPLVIAHRGASALRPEHTLAAYAKAIEDGADAIEPDLVMTRDGVLVARHENDITGTTNVAELPQFAERKRTKVIDGERLTGWFTEDFTLAELKTLRARERIPRLRPANARLNDQFEVPTFDEIVRLAEQAALRTGKPVGIYAELKHPSYFRGIGLPLEDKLAAAVRAQPYLRNAPVFIQCFESGSLRALRRTLGNGLPNVKLVQLIGNPRKGPADWKLAGDGRTFGDMLSTTGLREVAAYADGIGPEKSSVVPRDAQGALGAPTAVVQQAHAAGLFVHPYTFRPENSFLPKALQSGGDEATRSPAGMEREVQAFVAAGIDGFFTDDPALGRRAVDTPAR

SEQ ID NO: 15478 - protein, 202 aa, Cupriavidus taiwanensis
MPQTPPKFVILDRDGVVNLDSDQFIKTPDEWVPIDGSLEAIAALNQAGYRVVIASNQSGIGRGLFEMSALNAMHEKMHTALARLGGRVEAVFFCPHTAADGCECRKPRPGMLEQISERFGIELRGVPIVGDSLRDLEAGVAVGCAPHLVRSGKGLKTLDKGGLPPGTQVHDDLRAFARWLTGNDGGQRQPAPSAQGGHGAAG

SEQ ID NO: 15479 - protein, 516 aa, Cupriavidus taiwanensis
MSFSELGLSEKIVRAVAEQGYTTPTPIQAQAIPAILKGGDLLAGAQTGTGKTAGFTLPMLQLLSETAARQAGGAQRGGRVAVRALVLTPTRELAAQVEESVRNYGKYLRLRSMVMFGGVGINPQIEQLKRGVEIVVATPGRLLDHVSQRTIDLSQVELLVLDEADRMLDMGFIHDIRKILNVLPAKRQNLLFSATFSDDIRALADRLLNNPASIEVARRNTTAETVDQRVYPVDRERKRELLAHLVRQHDWHQVLVFTRTKHGANRLAEQLTKDGLSALAIHGNKSQSARTRALSEFKAGTLRLLVATDIAARGIDIDQLPHVVNFDLPNVPEDYVHRIGRTGRAGAEGEAISLVCVDELGLLRDIERLIKRKLEQTVLPGFEVDPSIAPEPIQKGRQQRGGGGQGQGRGRAEARPAGAGEGAQRQRPARQGQGAHGGAGTPGGQRGNGAANGNRAAQPAGARNPAPRRDGQDPARQQRAAAQPARQPHDAAPAPARNRRPAPQAALLGGSRKPAR

SEQ ID NO: 15480 - protein, 400 aa, Cupriavidus taiwanensis
MLNSNIDPIVILSAARTPMGGFQGELSPLTAPELGGAAIRAAVERANVNVTSVQELLMGCVLPAGVGQAPARQASIHGGLSLAVPCTTISKVCGSGMKAVMLAHDLLVAKTNDIMVAGGMESMSNAPYLLPKARGGYRLGHGTVLDHMFLDGLEDHYSEGTRGRLMGTFAEDCAATYGFTRDAQDEWAVSSTLRAQAAMEAGDFDWETVPLTLEGRKGRVQVRSDEQPRKADLNRISTLKPAFRKDGTVTAANSSSISDGAAAMVLARQSVAETMGLQPIARIVGHATHAQTPATFTTAPIGAIQKLLGQLEWSASEVDLWEINEAFAVVAMAAARDLRLDRDKINIHGGACALGHPIGASGARILVTLLAALKKTGGRRGIASLCIGGGEATAVAVEMA

SEQ ID NO: 15481 - protein, 189 aa, Cupriavidus taiwanensis
MTPVADHGFDVYSPKQVASRVNEFCIAKAHMPLLTLAMLGMLAGAFIGLGALMFALVSSDASLGFAASRLLGGLGFSLGLILVTVAGAELFTGNNLLAMAWASGCVSTRDVLRNWVVVCMANFIGALGLALLVWLSGHATMNGGAVATTVVAIATAKAGLSATDAFFWVHRGIPGKAARILRKKYSSSR

SEQ ID NO: 15482 - protein, 491 aa, Cupriavidus taiwanensis
MNSALIFIFGAIALALALGLLARRGKKMSLEEWAVGGRGFGTAIVFLLMAGEIYTTFVFLGASGYAYGHGGPAYYMLGYGSLCFVLSYWLLPLIWRYAKAKNLISQSDFFASKYDSRPLGILVAVVGIVALMPYLVLQLKGLGIIVSVASYGAIDSSHGMWIGAIVVALYVAISGVHGSAWTSVVKDILVMFVAVFLGLYLPFHYHGGVGQMFADIEAAKPGFLALRESGESPVWLVSTVLLSALGFYMWPHMFMATYTAKTDVVLRKNAYVLPIYQLMLLFIFFVGFTAVLQIPGLKGSDIDLALLKISLQTFDPWFVGVIGAAGVLTALVPGSMILMTSATLLANNVYRPLRPSASSAEIVKLSKWMAPCIMAVGLFFALQGGKTIVALLLMAYAFVTQLFPVLVMSSLRNNPVTPVAAMTSIAVGEATVAWVSLTKQSVASLFPFLPDALKDVNVGVVALVLNIATLIIVTLLTRRSERPGLTAPVSQ

SEQ ID NO: 15483 - protein, 67 aa, Cupriavidus taiwanensis
MATGIVKWFNSEKGYGFITPDDGGKDLFAHYKEIQGAGFKSLEEGAKVEFEITQGMKGPQASKIRKL

SEQ ID NO: 15484 - protein, 400 aa, Cupriavidus taiwanensis
MTEAFICDAIRTPIGRYGGSLSAVRADDLGAVPLKALMARNANVDWKAIDDVIYGNANQAGEDNRNVARMSSLLAGLPQDVPGATINRLCGSGMDATGTAARAIKAGEANLMIAGGVESMSRAPFVMGKATSAFSRDAQIFDTTIGWRFINPAMRAAYGVDSMPETAENVATDYKISREDQDLMALRSQEKASRAQADGTLAQEITAVTIAQKKGDPIVVERDEHPRATSMEALAKLRGVVRPDGTVTAGNASGVNDGACAILLASEAGIKQHGLTPRARIVGMATAGVAPRVMGIGPAPATQKLMKQLGMTLDQIDVIELNEAFAAQGLAVLRELGIADDDKRVNPNGGAIALGHPLGMSGARLVTTAMYQLHRTGGRFALCTMCIGVGQGIAMVIERV

SEQ ID NO: 15485 - protein, 190 aa, Cupriavidus taiwanensis
MIYIRGGAADGLYCVLKGAVRLSGTSMRGKEATLDLLEPGQWFGELSMIDGLPRVHDAWAHVASRVVLLRPAHFQSLLQTHPSFARHLLLLQSSRMRALLAGVEAFLVRPGEELFAVRLLDLASHYGTQTNRGVEIDLPLPQDLLSQLVGVSRQRVSQILRLWEQEAIISQHYGHIIVLDLARLKLVAGA

SEQ ID NO: 15486 - protein, 351 aa, Cupriavidus taiwanensis
MAPVQFHRLQIAEVVAETDQAHSLVFALPDGLRETFAYRPGQFLTLRVPVDGVPLQRCYSLSSTPGVDGALRVTVKRVQSGRVSNWICDHLGAGDTVEAMPPAGVFTPPALHGDFLLLAGGSGITPVLSIAKAALRHGRGAVTLVYANRDERSIIFREALAELARSHPGRLRVIHWLDSVQGPPTQRQIEELVRPWSLAQCFVCGPGPFMDGAQAALQALGVPRGQLHVERFVSLPDAPAAAAPATVAAPDAGRAAPAMRGAALTVQLDGATHQVSVAPDETVLDALQRAGVAAPSSCRAGLCGACMCQVTQGDVTLGDNHVLDGADLEAGWTLACQARPASGEIHLKFPD

SEQ ID NO: 15487 - protein, 276 aa, Mesorhizobium sp. ZJ15B7
WGFDGSSTMQAEGRSSDCVLKPVALYPDPARTNGILVMCEVMMPDGVTPHESNSRATILDDEDAWFGFEQEYFFYKDGRPLGFPESGYPAPQGPYYTGVGYKNVGDVARKIVEEHLDQCLAAGINHEGINAEVAKGQWEFQIFGKGSKKAADQIWMARYLLLRLTETYGIDIEFHCKPLGDTDWNGSGMHCNFSTKFMREVGGKAYFEALMAQFDKNLMDHIAVYGPDNDKRLTGKHETAPWNKFSYGVADRGASIRVPHSFVKNDYKGYLEDGRP

SEQ ID NO: 15488 - protein, 276 aa, Mesorhizobium sp. HN14A16
WGFDGSSTQQAEGHSSDCVLKPVAVYPDPARTNGVLVMCEVMMPDGVTPHASNKRATILDDEGAWFGFEQEYFFYKDGRPLGFPESGYPAPQGPYYTGVGYSNVGSVARQIVEEHLDLCLAAGINHEGINAEVAKGQWEFQIFGKGSKKAADQMWMARYLMQRLTEKYGIDIEYHCKPLGDTDWNGSGMHANFSTAYMREVGGKAYFEALMAAFDKNLMDHIAVYGPDNDKRLTGKHETAPWNRFSYGIADRGASIRVPHSFVKNDYKGYLEDRRP

SEQ ID NO: 15489 - protein, 403 aa, Pyrococcus furiosus DSM 3638
MFTNLVKMGKKLKNLTKKYQLNKEKIEKFITVRKRLTFLGERPSVVEKPVVVKFGGTSVRYAFEEALELVANLNENTRTIVVVSALAGVTDCLLRLANGDMSALLEIEEIHEELSQELDVQLDHLMYQLHKTLNSKSSFPSKEAFVDEIASFGERFSAELFSEGLKILGINAKAVDSKDILFAKGDYGNAEVDFKKSVYGAGILYRMLRRGIVPVVTGYYGNLNGFRATFGRGGSDYSATSIARLVNAKATLIMSDVEGIYTADPKLVPSAKLIHYISYREAKIAAKLGMKALHHRAIDPVEGRIPVILGKTRDLKFGTLISHKSQGIPVVVHKLIEDHAEVSVVSTRRSFSLPYEVYEEGDFYFKIKIPKEQFLEVLKDIHRRVVENESLRPSYDSELWAWV

SEQ ID NO: 15490 - protein, 367 aa, Klebsiella pneumoniae
MDRIIQSPGKYIQGAGAIKRLGDYLKPLAERWLVVGDKFVLGFAEEMLRKSLADAGLAAEIAPFGGECSHNEINRLRDIAGNAKCTAVLGIGGGKTLDTAKALAHFMNVPVAIAPTIASTDAPCSALSVIYTDEGEFDSYLMLPRNPNMVIVDTQIVAGAPARLLAAGIGDALATWFEARACSRSGATTMAGGKCTQAALALAELCYNTLLEEGEKAMLAAEQHVVTPALERVVEANTYLSGVGFESGGLAAAHAIHNGMTAIPDAHHYYHGEKVAFGTLTQLVLENAPVDEIETVAALCHSVGLPITLAQLDIKGDIPTKMRLVAEAACAEGETIHNMPGGVDSDQVYAALLVADQYGQRFLQEWE

SEQ ID NO: 15491 - protein, 386 aa, Solanum lycopersicum
MADMNQHPTVFQKAANQLDLRSSLSQDVHARYGGVQPAIYQRHFAYGNYSNAGLHRGQATQDLSLITSNASPVFVQAPQEKGFAAFATDFLMGGVSAAVSKTAAAPIERVKLLIQNQDEMLKAGRLSEPYKGIGDCFGRTIKEEGFGSLWRGNTANVIRYFPTQALNFAFKDYFKRLFNFKKDRDGYWKWFAGNPASGGAAGASSLFFVYSLDYARTRLANDAKASKKGGERQFNGLVDVYRKTLKSDGIAGLYRGFNISCVGIIVYRGFYFGMYDSLKPVLLTGNLQDSFFASFALGWLITNGAGLASYPIDTLRRRMMMTSGEAVKYKSSLDAFSQIVKNEGPKSLFKGAGANILRAVAGAGVLAGYDKLQVLVLGKKYGSGGA

SEQ ID NO: 15492 - protein, 635 aa, Haemophilus parasuis
MGKIIGIDLGTTNSCVAVMDGDKPRVIENAEGARTTPSIIAYTDKETLVGQPAKRQAITNPKNTLFAIKRLIGRRFTDSEVQRDIEIMPFEITKADNGDAWVSVKGEKMAPPQISAEVLKKMKKTAEDFLGESVTEAVITVPAYFNDAQRQATKDAGRIAGLEVKRIINEPTAAALAYGLDSKKENQIVAVYDLGGGTFDLSIIEIDNLDGEQTFEVRATNGDTHLGGEDFDNRLINYLVEEFQKEQGVDLRNDSMAMQRVKEAAEKAKIELSSAQSTEVNLPYITADATGPKHLVLTVTRAKLEALVEDLVNRSLEPVKVALADAGLSVSEINDVILVGGQTRMPLVQKKVADFFGKEPRKDVNPDEAVAIGAAVQGGVLAGDVTDVLLLDVTPLSLGIETMGGVMTTLIEKNTTIPTKKSQVFSTAEDNQSAVTIHVLQGERKRASDNKSLGQFNLEGINPAPRGMPQIEVTFDIDANGIINVSAKDKNTGKEQQIKIQASSGLSDAEIEQMVRDAEANAEADRKFEELVQTRNQADAIAHSTRKQIAEAGSNLADADKAKIEEAVAALEKAAKGEDKADIEAKIEALVKASEPLIQAGQAQAQQGQQQAQQSQKDDGVVDAEFEEVKDNKNL

SEQ ID NO: 15493 - protein, 316 aa, Triticum aestivum
MASASCLGLVVLVAMASAASAQLSSTFYDTSCPNALATIKAGVTAAVQNEARMGASLVRLHFHDCFVDGCDGSVLLADTGSFIGEQGAAPNNNSIRGMNVIDNIKTQVEAVCKQTVSCADILAVAARDSVVALGGPTWTVLLGRRDSTTASKTNAENDLPPPTFDLQNLTTLFGNKQLSMTDMVALSGAHTIGQSQCRFFRDRIYNETNIDTAFATSLRANCPRSGGDNSLAPLDTGTPNGFDNAYYTNLMSQKGLLHSDQVLFNGGGADNTVRSFSSSAATFNSAFTTAMINMGNIAPKTGTQGQIRLVCSKVNS

SEQ ID NO: 15494 - protein, 233 aa, Secale cereale
VQLKRIENKINRQVTFSKRRSGLLKKAHEISVLCDAEVGLIIFSTKGKLYEFSTESCMDKILERYERYSYAEKVLVSSESEIQGNWCHEYRKLKAKVETIQKCQKHLMGEDLESLNLKELQQLEQQLESSLKHIRSRKNQLMHESISELQKKERSLQEENKVLQKELVEKQKAQAAQQDHTQPQTSSSSSSFMLRDAALAGNTSTHPAAAGERAEDAAVEPQAPPRTGLPLWM

SEQ ID NO: 15495 - protein, 563 aa, Mycobacterium avium 104
MPVTDAATEPAYTVGDYLLDRLAELGVSEIFGVPGDYNLEFLDHIVAHPRLRWVGNANELNAGYAADGYGRLRGMSALVTTFGVGELSAANAVAGSYAEQVPVVHIVGGPSKDAQGTRRALHHSLGDGDFEHFFRVSREITCAQANLMPATARREIDRVLSEVREQKRPGYILLSTDVARFPTEPPEAALPRYTGGTSPRALAMFTEAAAALIGEHRITVLADLLVHRLQAIKELEALLAADVVPHATLMWGKSLLDESSPNFLGIYAGSASAPAVRTAIEEAPVLVTAGVVFTDMVSGFFSQRIDPARTIDVGQYQSSVAGEVFAPLEMGEALQALAAILTRRGVSSPPVASPPAEPLPPPPPREQPLTQKMVWDRVCTALTPGNVVLADQGTSFYGMADHRLPQGVTFIGQPLWGSIGYTLPAALGAAVAHPDRRTVLLIGDGAAQLTVQELGTFAREGLSPVIVVVNNDGYTVERAIHGETAPYNDIVGWKWTEVPNSLGVTDHLAFRVQTYGELDDALTAAARHQDRMVLVEVVLPRLEIPRLLVELVRPTSPDGSPRR

SEQ ID NO: 15496 - protein, 644 aa, Oryza sativa Indica Group
MATTAAAAAATLSAAATAKTGRKNHQRHHVLPARGRVGAAAVRCSAVSPVTPPSPAPPATPLRPWGPAEPRKGADILVEALERCGVSDVFAYPGGASMEIHQALTRSPVITNHLFRHEQGEAFAASGYARASGRVGVCVATSGPGATNLVSALADALLDSVPMVAITGQVPRRMIGTDAFQETPIVEVTRSITKHNYLVLDVEDIPRVIQEAFFLASSGRPGPVLVDIPKDIQQQMAVPVWDTSMNLPGYIARLPKPPATELLEQVLRLVGESRRPILYVGGGCSASGDELRRFVELTGIPVTTTLMGLGNFPSDDPLSLRMLGMHGTVYANYAVDKADLLLAFGVRFDDRVTGKIEAFASRAKIVHIDIDPAEIGKNKQPHVSICADVKLALQGLNALLDQSTTKTSSDFSAWHNELDQQKREFPLGYKTFGEEIPPQYAIQVLDELTKGEAIIATGVGQHQMWAAQYYTYKRPRQWLSSAGLGAMGFGLPAAAGASVANPGVTVVDIDGDGSFLMNIQELALIRIENLPVKVMVLNNQHLGMVVQWEDRFYKANRAHTYLGNPECESEIYPDFVTIAKGFNIPAVRVTKKSEVRAAIKKMLETPGPYLLDIIVPHQEHVLPMIPSEGAFKDMILDGDGRTMY

SEQ ID NO: 15497 - protein, 286 aa, Heterosigma akashiwo
MKKYIEEKYVFSKDVDSNLHGEDVFFRFEDEDIKKEKKLLLEIKNLHATVNDNEILKGINLKINEGETHAIMGPNGSGKSTLAKVLVGHPGYQITKGSVFFKGKNLLELEPEQISHLGLFLAFQYPFEVNGVTNAQFLRTAYNSKLKSLGLPEDKDPLAFYKVISDKLSIVGMNPKFLERNVNEGFSGGEKKRNEILQLALLDSQLAILDETDSGLDIDALQEVSTGFNKIMRLDKAAIIITHYQRLLNYIPPDFVHVIRDGQIVKTGGLELSHELEKRGYDCIES

SEQ ID NO: 15498 - protein, 244 aa, Capsella bursa-pastoris
NKINRQVTFSKRRAGLLKKAHEISVLCDAEVALVVFSHKGKLFEYSTDSCMEKILERYERYSYAERQLIAPESDVNTNWSMEYNRLKAKIELLERNQRHYLGEDLQAMSPKELQNLEQQLDTALKHIRSRKNQLMYESINDLQRKEKAIQEQNSMLSKQIKEREKILRAQQEQWDQQNNGHNMPPPPPPQQHQIQHPYMLSHQPSPFLNMGGLYQEEDPMAMRRNDLDLSLEPVYNCNLGCFAA

SEQ ID NO: 15499 - protein, 438 aa, Oryza sativa Japonica Group
MGGEEGMAAGRKKRVGRYEVGRTIGQGTFAMKVLDKDTILNHRMLHQIKREISIMKIVRHPNIVRLNEVLAGKTKIYIILELITGGELFDKIARQGKLRENEARKYFQQLIDAINYCHSKGVYHRDLKPENLLLDSRGNLKVSDFGLSTLAQKGVGLLHTTCGTPNYVAPEVLSNNGYDGSAADVWSCGVILYVLMAGYLPFEEDDLPTLYDKITAGQFSCPYWFSPGATSLIHRILDPNPKTRITIEQIREDTWFKKTYVAIKRGEDENVDLDDVQAVFDNIEDKYVSEQVTHNDGGPLVMNAFEMITLSQGLDLSALFDRQQEFVKRQTRFVSRKPAKTIVATIEVVAETMGLKVHSQNYKLRLEGVSSNRMSPFAVVLQVFEVAPSLFMVDVRKVAGDTLEYHRFYKNLCNKMESIIWRPIEVSAKSALLRTATC

SEQ ID NO: 15500 - protein, 468 aa, Triticum aestivum
MSSSTGSLDHAGFTFTPPPFITSFTELLSGSGAGDAERSPRGFNRGGRAGAPKFKSAQPPSLPISSPFSCFSIPAGLSPAELLDSPVLLNYSHILASPTTGAIPARRYDWQASADLNTFQQDEPCRGDSGLFGFSFHAVKSNATVNAQANCLPLFKEQQQQQQQQVVEVSNKSSSGGGNNKQVEDGYNWRKYGQKQVKGSENPRSYYKCTYNNCSMKKKVERSLADGRITQIVYKGAHDHPKPLSTRRNSSGCAAVVAEDHANGSEHSGPTPENSSVTFGDDEADNGLQLSDGAEPVAKRRKEHADNEGSSGGTGGCGKPVREPRLVVQTLSDIDILDDGFRWRKYGQKVVKGNPNPRSYYKCTTVGCPVRKHVERAAHDNRAVITTYEGKHNHDMPVGRGAGASRALPTSSSSDSSVVTWPAAVQAPYTLEMLTNPAAGHRGYAAGGAFQRTKDEPRDDMFVESLLC

SEQ ID NO: 15501 - protein, 534 aa, Triticum aestivum
MRVVEENGRVEQLSRAETCRDGEAGEGRRWRRDGQAGRLRGLELGHPGPTQVSISIFNLPAPSTLEKISLLLPSIAMSSPTGSLDHAGFTFTPPPFITSFTELLSGSGAGDVEGSPRGFNRGGRAGVPKFKSAQPPSLPISSPASPFSCFSIPAGLSPAELLHSPVLLNYSHILASPTTGAIPARRYDWQASADLNTFQQDEVGRGDSGLFGFSFHAVKPNATVNAQTNYLPLFKEHQQQQQQQVVEVSNKSSSGDNNKQVEDGYNWRKYGQKQVKGSENPRSYYKCTYNNCSMKKKVERSLADGRITQIVYKGAHDHPKPPSTRRNSSGCAAVIAEDHTNGSEHSGPTPENSSVTFGDDEADNGAEPETKRRKEHGDNEGSSGGTGACVKPVREPRLVVQTLSDIDILDDGFRWRKYGQKVVKGNPNPRSYYKCTTVGCPVRKHVERASHDNRAVITTYEGRHSHDVPVGRGAGASRALPTSSSSDSSVVVCPAAAGQAPYTLEMLANPAAGHRGYAAKDEPRDDMFVESLLC

SEQ ID NO: 15502 - protein, 561 aa, Triticum aestivum
MTTSSSGSVETSANSRPGSFSFGSASFTEMLGGSAAAGGASGYKALTPPSLPLSPSLMSPSSFFSMPAGMNLADFLDSPVLLTSSILPSPTTGAFGSQFNWRPEAPTPSAAEQGGKEEQRQPYSDVSFQTAPANSEEAARATMTTSLQPPVAVASQGEEAYTGQQQQAWGYGQHQEGMNASAANPASFSAPALQATSSEMAPAGAYRQTHSQRRSSDDEYNWRKYGQKQVKGSENPRSYYKCTFPNCPTKKKVETSIEGQITEIVYKGTHNHAKPQNTRRNSGSSAAQVLQSGGDMSEHSFGGMSGTAATPENSSASFGDDEIGASSPRAGNVGGDDLDDDEPDSKKWRKDGDGEGSNSMAGNRTVREPRVVVQTMSDIDILDDGYRWRKYGQKVVKGNPNPRSYYKCTTVGCPVRKHVERASHDLRAVITTYEGKHNHDVPAARGSAALYRPAPRAADSTASTGHYLNPQPSAMAYQASAAPAVTGTQQYAPRPDGFGGQNQGSFGFNGNFGFSGPGLDNPTASYMSQHQQQQRQNDAMHASSAKEEPREEDMFFQNSQY

SEQ ID NO: 15503 - protein, 278 aa, Triticum aestivum
YNWRKYGQKQVKGSENPRSYYKCTYNNCSMKKKVERSLADGRITQIVYKGAHDHPKPLSTRRNSSGCAAVVAEDHANGSEHSGPTPENSSVTFGDDEADNGLQLSDGAEPVTKRRKEHADNEGSSGGTGGCGKPVREPRLVVQTLSDIDILDDGFRWRKYGQKVVKGNPNPRSYYKCTTVGCPVRKHVERASHDNRAVITTYEGKHSHDVPVGRGRALPATSSSDSSGVIWPAAVPAPYTLEMLTNPAAGHRGYAAGGAFQRTKDEPRDDMFVESLLC

SEQ ID NO: 15504 - protein, 321 aa, Hypocrea lixii
QGMFAAITPALAIGAVADRGRMLPAIVFMFIWSTVVYDPIAYWTWNANGWLAKLPNYDFAGGGPVHMSSGACALAYSIMLGKRTGYDKNRGLPYRPHSVTNVVVGTVFLWVGWFGFNGGSALGMNLRAIMACFVTNLAASVGGVTWILLDYRLEKKWSTIGFCSGAIAGLVAITPASGYVTPWASFIIGMVGAICCNFATKLKFLIGVDDALDIFAVHGIGGMVGNILTGIFGTSSIADLDGSSYPPIGWVNGHWVQLGNQLVGVCAVFGYSFTLSCIILFLMNLIPGLSLRVNAEDEDVGVDDCQLGEFAYDYVEMRRHV

SEQ ID NO: 15505 - protein, 314 aa, Aegilops ventricosa
MAMGSASCISLVVLVALATAASGQLSSTFYDTSCPRALVAIKSGVAAAVSSDPRMGASLLRLHFHDCFVQGCDASVLLTGMEQNAGPNVGSLRGFGVIDNIKTQLESVCKQTVSCADILTVAARDSVVALGGPSWTVPLGRRDSTTASASLANSDLPGPSSSRSQLEAAFLKKNLNTVDMVALSGAHTIGKAQCSNFRTRIYGGDTNINTAFATSLKANCPQSGGNTNLANLDTMTPNAFDNAYYTNLLSQKGLLHSDQVLFNNETTDNTVRNFASNAAAFSSAFTTAMIKMGNIAPLTGTQGQIRLSCSKVNS

SEQ ID NO: 15506 - protein, 85 aa, Euphorbia esula
LVTDIPATTRASFGQEIMCYESPRPLTGIHRFVFILYRQLGRQTVFPPSYRHNFSCRNFSQDYNLGSPVAAVYFNCQRESGSGGR

SEQ ID NO: 15507 - protein, 85 aa, Euphorbia esula
LVTDIPATTGPSYGQEILGYESPRPAMGIHRYVFILFQQKKRQTVDAPGWRQHFNTHDFAEFYNLGSPVAALYFNCQRESGSGGR

SEQ ID NO: 15508 - protein, 90 aa, Euphorbia esula
LVTDIPATTGPSYGQEILGYESPRPAMGIHRYVFILFQQKKRQTVDAPGWRQHFNTRDFAEFYNLGSPVAALYFNCQRENSSRGRRILLN

SEQ ID NO: 15509 - protein, 454 aa, Vicia faba
MERNGSVLMQRYELGKLLGQGTFAKVYHARNLKNGMNVAIKIIDKERVLRVGMIDQIKREISVMRLVRHPHVVELYEVMASKTKIYFVMEYVKGGELFDKISKGKLNHDDARRYFQQLISAVDYCHSRGVCHRDLKPENLLLDENGNLKVSDFGLSALADTKRQDGLLHTTCGTPAYVAPEVINRKGYDGTKADIWSSGVILFVMLAGFLPFRDPNLIEMYKKIGKADFKYPNWFSSDVRRLLSKILNPNPKSRISLAKIMESSWFKKGLKKPIITDTDNKELAPLDIDEVFKASENGDNVDLPKPCSNLNAFDIISFSSGFDLSSLFEEKEQKTEMRFTSYKPASVIISKFEEICKSLGLKLKKKGGGLLKLESSKEGRKGRLGINAEIFEITPAFHLVELKKSNGDTLEYQKLLKESVRPSLKDIVWTWQGEQPEGHCLDMARRTTSPVAER

SEQ ID NO: 15510 - protein, 219 aa, Malus x domestica
MVRGKTQMKRIENAASRQVTFSKRRNGLLKKAFELSVLCDAEVALVIFSARGKLYEFSSTSIRSTIDRYQMRVKDQGQLTTKAFQEDMEHETNDTQTLAKKIESIEASKRKLLGNDLESCSMEELHQTENQLERSLKKIRAKKHQLLREQIDKLKEEEKNLLEQNAKLREMCGMQQLGPSRKSKHGDDREVFQPQTPNVDVETDLFIGPPKRQQSGRKP

SEQ ID NO: 15511 - protein, 370 aa, Methanocaldococcus jannaschii
  misc_feature (222)..(222): Xaa can be any naturally occurring amino acid
  unsure (1)..(370): unsure at all Xaa locations
MLSKRLLNFESFEVMDILALAQKLESEGKKVIHLEIGEPDFNTPKPIVDEGIKSLKEGKTHYTDSRGILELREKISELYKDKYKADIIPDNIIITGGSSLGLFFALSSIIDDGDEVLIQNPCYPCYKNFIRFLGAKPVFCDFTVESLEEALSDKTKAIIINSPSNPLGEVIDREIYEFAYENIPYIISDEIYNGLVYEGKCYSAIEFDENLEKTILINGFSXLYAMTGWRIGYVISNDEIIEAILKLQQNLFISAPTISQYAALKAFEKETEREINSMIKEFDRRRRLVLKYVKDFGWEVNNPIGAYYVFPNIGEDGREFAYKLLKEKFVALTPGIGFGSKGKNYIRISYANSYENIKEGLERIKEFLNK

SEQ ID NO: 15512 - protein, 677 aa, Camellia sinensis
MSGKGEGPAIGIDLGTTYSCVGVWQHDRVEIIANDQGNRTTPSYVAFTDTERLIGDAAKNQVAMNPTNTVFDAKRLIGRRFTDASVQSDMKLWPFKVIAGPGDKPMIGVNYKGEEKLFAAEEISSMVLIKMREIAEAYLGSTVKNAVVTVPAYFNDSQRQATKDAGVIAGLNVMRIINEPTAAAIAYGLDKKATSVGEKNVLIFDLGGGTFDVSLLTIEEGIFEVKATAGDTHLGGEDFDNRMVNHFVQEFKRKSKKDISGNPRALRRLRTACERAKRTLSSTAQTIIEIDSLYEGVDFYSPITRARFEELNMDLFRKCMEPVEKCLRDAKMDKSTVHDVVLVGGSTRIPKVQQLLQDFFNGKELCKSINPDEAVAYGASVQAAILSGEGNEKVQDLLLLDVTPLSLGLETAGGVMTVLIPRNTTIPTKKEQVFSTYSDNQPGVLIQVYEGERTRTRDNNLLGKFELSGIPPAPRGVPQITVCFDIDANGILNVSAEDKTTGQKNKITITNDKGRLSKEEIEKMVQEAEKYKSEDEEHKKKVEAKNTLENYAYNMRNTVKDEKIGEKLPAADKKKIEDAIEQAIQWLDSNQLAEADEFEDKMKELESICNPIIAKMYQGAGGGDMGGAGMDVWVVLVWMRMVLLLVEVVPVPRLRKWTKLLVFYLRCFFLFFCVFNI

SEQ ID NO: 15513 - protein, 1129 aa, Vitis riparia
MSSGNRGTQSHHQAQSSGTSNLRVYHTDSMSKAIAQYTMDARLHAVYEQSGESGKSFDYSQSVRTTTQSVPEQQITAYLSKIQRGGHIQPFGCMLAVDEATFRVIAFSENAREMLGLTPQSVPSLEKPEILLVGTDVRTLFTPSSAVLLEKAFGAREITLLNPVWIHSKNSGKPFYAILHRIDVGIVIDLEPARTEDPALSIAGAVQSQKLAVRAISHLQSLPGGDINLLCETVVENVRELTGYDRVMVYKFHEDEHGEVVAESKRSDLEPYIGLHYPATDIPQASRFLFRQNRVRMIVDCHATPVLVIQDEGLMQPLCLVGSTLRAPHGCHAQYMANMGSIASLAMAVIINGSDEEAIGGRNLMRLWGLVVCHHTSARCIPFPLRYACEFLMQAFGLQLNMELQLASQLSEKHVLRTQTLLCDMLLRDSPTGIVTQSPSIMDLVKCDGAALYYLGKYYPTGVTPTEAQIKDIAEWLLANHADSTGLSTDSLADAGYPGAASLGDAVCGMAVAYITSRDFLFWFRSHTAKEIKWGGAKHHPEDKDDGQRMHPRSSFKAFLEVVKSRSLPWENAEMDAIHSLQLILRDSFKDATDGSNSKAVMHAQLGELELQGMDELSSVAREMVRLIETATAPIFAVDVDGCINGWNAKVAELTGLSVEEAMGKSLVHDLVYKESEETVDKLLHHALRGEEDKNVEIKLRTFDSQQHKKAVFVVVNACSSRDYTNNIVGVCFVGQDVTGQKVVMDKFIHIQGDYKAIVHSPNPLIPPIFASDENTVCSEWNTAMEKLTGWSRGDIIGKMLVGEIFGSSCRLKGPDALTKFMIVLHNAIGGQDTDKFPFSFFDQNGKYVQALLTANKRVNIEGQIIGAFCFLQIASPELQQALKVQRQQEKKCFARMKELAYICQEIKNPLSGIRFTNSLLEATDLTEDQKQFLETSAACEKQMSKIIRDVDLDSIEDGSLELERAEFLLGSVINAVVSQVMILLRERDLQLIRDIPEEVKTLAVYGDQVRIQQVLADFLLNMVRYAPSPDGWIEIQVRPRLKQISEEVKLMHIEFRMVCPGEGLPPNLIQDMFHSSRWMTQEGLGLSMCRKILKLINGEVQYIRESERCYFLISIELPIPRRGSKSVD

SEQ ID NO: 15514 - protein, 1129 aa, Vitis vinifera
MSSGNRGTQSHHQAQSSGTSNLRVYHTDSMSKAIAQYTMDARLHAVYEQSGESGKSFDYSQSVRTTTQSVPEQQITAYLSKIQRGGHIQPFGCMLAVDEATFRVIAFSENAREMLGLTPQSVPSLEKPEILLVGTDVRTLFTPSSAVLLEKAFRAREITLLNPVWIHSKNSGKPFYAILHRIDVGIVIDLEPARTEDPALSIAGAVQSQKLAVRAISHLQSLPGGDINLLCETVVENVRELTGYDRVMVYKFHEDEHGEVVAESKRSDLEPYIGLHYPATDIPQASRFLFRQNRVRMIVDCHATPVLVIQDEGLMQPLCLVGSTLRAPHGCHAQYMANMGSTASLAMAVIINGSDEEAIGGRNLMRLWGLVVCHHTSARCIPFPLRYACEFLMQAFGLQLNMELQLASQLSEKHVLRTQTLLCDMLLRDSPTGIVTQSPSIMDLVKCDGAALYYQGKYYPTGVTPTEAQIKDIAEWLLANHADSTGLSTDSLADAGYPGAASLGDAVCGMAVAYITSRDFLFWFRSHTAKEIKWGGAKHHPEDKDDGQRMHPRSSFKAFLEVVKSRSLPWENAEMDAIHSLQLILRDSFKDATDGSNSKAVMHAQLGELELQGMDELSSVAREMVRLIETATAPIFAVDVDGCINGWNAKVAELTGLSVEEAMGKSLVHDLVYKESEETVDKLLHHALRGEEDKNVEIKLRTFDSQQHKKAVFVVVNACSSRDYTNNIVGVCFVGQDVTGQKVVMDKFIHIQGDYKAIVHSPNPLIPPIFASDENTVCSEWNTAMEKLTGWSRGDIIGKILVGEIFGSSCRLKGPDALTKFMIVLHNAIGGQDTDKFPFSFFDQNGKYVQALLTANKRVNIEGQIIGAFCFLQIASPELQQALKVQRQQEKKCFARMKELAYICQEIKNPLSGIRFTNSLLEATDLTEDQKQFLETSAACEKQMSKIIRDVDLDSIEDGSLELERAEFLLGSVINAVVSQVMILLRERDLQLIRDIPEEVKTLAVYGDQVRIQQVLADFLLNMVRYAPSPDGWIEIQVCPRLKQISEEVKLMHIEFRMVCPGEGLPPNLIQDMFHSSRWMTQEGLGLSMCRKILKLINGEVQYIRESERCYFLISIELPIPHRGSKSVD

SEQ ID NO: 15515 - protein, 709 aa, Bifidobacterium longum DJO10A
MIRVAIDGPAGVGKSSTSKALAKYFGYAYLDTGAMYRACAWWCLKQDIDLDAETVDERVITEAVGEFFTGDHFDISVDPDNPRVFADDEDISEVIRSSEVSSHVSKVSNVIPVRNVLIAAQRAYIAREASADSFSGGLGIVAEGRDITTVVSPDAEVRVLLTAREEVRQARRTGQAVKGVGAEDVAARDKADSKVTSFLTAADGVTTIDNSDLDFAHTLDLLIGLVEDAIENQEYEQYAANLEGYELDEGDEDLISGRGFTEGARKAGPKPVGVLAVVGRPNVGKSSLVNRILGRRAAVVEDTPGVTRDRVSYDAEWAGTDFKLVDTGGWEADVEGIESAIASQAQVAVTLADAVVFVVDGQVGMTTTDERIVKMLRAAGKPVVLAVNKIDDQASEYLAAEFWKLGLGEPYSISAMHGRGVGDLLDVALDKLKQAEKTSGYLTPSGLRRVALVGRPNVGKSSLLNQLAREERAVVNDLAGTTRDPVDEIVNIDGEDWLFIDTAGIKRRQHKLTGAEYYSSLRTQAAIERCELALILFDASQPVSDQDLKVMSTAVDAGRAIVLVFNKWDAMDEFDKQRLERLWNTEFDRVMWAERVNLSAKTGWHTNRLTRAMDKALESWDQRIPTGKLNAFLGKIQAAHPHPLRGGKQPRILFATQASTRPPRFVIFATGFLEHGYRRYIERSLREEFGFEGTPIQISVNIREKKKRK

SEQ ID NO: 15516 - protein, 1523 aa, Bifidobacterium longum DJO10A
MTFKAPLDLTVHAPDGMYDPANEHDACGVGMVTTLNKRPERKIVTDAIEVLVNLDHRGAVGAEENTGDGAGILMSMPDEFMRATVPAELPEAGHYAAGIAFLDRDIETSGQQEQAIAKIVREEGLEVLAWRVVPTNPDGLGLQALAAMPGFKTLVVASPDGALAGVDLDRKTFRIRKRVEHEVGVYFASLSARTITYKGMLTTMQLTHFFEDLNDERMKATIAIVHSRFSTNTFPSWPLAQPFRLLAHNGEINTIQGNRNWLSAREGRLSSELLGEFEPLLPITTPGYSDSGTFDECLELLHLAGRSLPHAICMMLPPAWEKNPDLDPDVRAFYEYNNTLIEPWDGPADIVFTDGTQVGALLDRNGFRPGRWQLTDDGYIVLASEAGVLPEIAQEHIVSKGRLEPGEMFLVDTAEGRIIPDEEVKRNLAAQHPYRKWVEGNSVEMSDLPRREHVSHSGQSVQRRQRAFGYTEEDLKLLLTPMANTGKEPLGSMGNDAPMPALSSRSRMLFDYFTQKFAQVTNPPLDWEREEIVTSLESAIGPEPNLLADSELHAKKILIPLPVVNSDEMAQLKRLDKARILGGYYRPYVVKGLYQVAGGGKALEERLDEIFAEIDEAIANGKNFIVLSDRESNHTWGPIPSLLLTSAVQHHLLRRHTRTQISVAVEAGDVREIHHVALLIAYGAACVNPYLAFESVEDLARNGYLKVDADTAVKNLTKALSTGVLKIMSKMGVSTIMSYRGAQLFEAVGLSQEVIDEYFTGTTSRVGGVGLDEIAEEVAIRHRVAYPNQWSASPHRNLRTGGDYKWRRTGEDHLNDPEAIFLLQQSTQRGDYQMFKKYSHHINDTSNRLMTLRGLMKFNTNRKPIDIAEVEPASEIVKRFSTGAMSYGSISQEAHETLAIAMNSIGARSNSGEGGESDDRINDPQRYSRIKQIASARFGVTSDYLVHATDLQIKLAQGAKPGEGGHLPGAKVPPWIAKVRHATPGVELISPPPHHDIYSIEDLKQLINDAKMANPKARIHVKLVSEFGVGTIAAGVAKCHADVVLISGYDGGTGAAPLNAIKHAGTPWEIGLSETQQTLILNGLRSRIVVQCDGELKTGRDVVIAALLGAEEFGFATAALIVEGCVMMRACQKNTCPQGIATQDPELRARFKGKPEYVVNFFMFIAEEVREILAQLGFRTLEEAIGHVECLDQDEAIKRWKSSGIDLSNVLKQAGPVPGTILHQTIEQNHELEKALDNKLIELAQPALEHKEPVRIEMPIRNVNRTVGTMVGYEITRRYGEEGLPDDTIDMTLHGSGGQSIGAFIPRGETMRIYGEVNDYAGKGLSGGRMIVRPEDNVTFDKHSNVIAGNVTGFGATSGQMFVAGRAGERFGVRNGGATFVVEGVGDHGCEYMTGGTVVVLGPTGRNFGAGFSGGNTYVLDLDMKKVNPGAIKSGALLFKSLDAETSKLVYALVKQHAEETGSQFAAALLEDWNETVKRFTHVVPKQFVAMTKAMEEAKTNNVDFNAPGAWEKVYEQVMEGAR

SEQ ID NO: 15517 - protein, 387 aa, Bifidobacterium longum DJO10A
MAQNPEATVVFGVLNETSETESRVALTPDIVTRLKRSGVSSLIEAGAGIAADYTDEDYEKAGAKVTSRDEVLAEADALGFVDRPSAETVAKLKAGQWVIGMLGSFTDADYVAALEKAGLVGIAIEKLPRKLSSAQSMDEMTSQNSVMGYKAAITAADAYGSFLPMMTTAAGTIRPAKALVLGAGIAGLQAIGTLKRLGAVVTAYDVRPASQGEVESLGAKFLDLGLDFSKGQGEGGYARALSAEEQAQQQAAVDEKAAGFDIIITTAKVPGRKPPVLLTAAGVKGLKRGAVIVDCAASDLGGNVEGSAVGEQVTEGGVKLIGAPYLASGVATTASNLLSRNVADILVHFVRDGKLGQDFTEELDDALVVAGRAAAPAAAADAEKSEK

SEQ ID NO: 15518 - protein, 728 aa, Bifidobacterium longum DJO10A
MPRNNFDDRDDSADFQMNDSAESRPLTFGELGVPGPLVRVLAADDKKTAFPIQADTLPDSLAGRDILGRGRTGSGKTLAFSIPLVTRLGSYDSFGEIAMEEFRKEIKRRKKASLEERRADDFLPHPRGLVLAPTRELANQINDVLMPLAHTFGMNTTTVYGGVKYIHQIRDLKAGADIVVACPGRLEDLLRQQALTLSSVEVVVIDEADEMADMGFLPPVKRLLEQISPDAQHMLFSATLDHGVDEVVNTFLHDPKVHEVDSATTEPDLMTHHVFETTRGDKHELVRMLASGEGRRILFTRTKFQAKKLAKNLTQNGIPAAELHGNLNQNQRDRNLAAFDSGDVRVMVATDVAARGIDVGGVELVVQVEPPADPKSFVHRSGRTARAGKAGDVVTLVLPEQRRETRRLLNQAGIKTKMIEVTHDSPEVLELVGDRAERVDGWSLDKSQSVGNPRKGKNRGAKNAAGDESGRGGKRKHNRNRNRDEQNVAETEFQHENAGGEFVAEGEPQRKHGDKASKKAVKKNRNRAERRAGMSNPEAERRDYLFEHGDDRREERRKGDRRDGYGKNRYDERQDNGRGQYGKNRRNDRYGKGDKFDKRDRAGYGRNDDFGSRRHNAGRDFERSDSRDFERPRKPRRNERSHEDYGFSYDERSHDGRRQSMRNTRQGEGGKRIHRKNENRIVRDERSEGAKRHERRMIAKYGNTEGPNRRHSKKNRHNAPFRMKSGRR

SEQ ID NO: 15519 - protein, 409 aa, Bifidobacterium longum DJO10A
MAKTVLVINSGSSSIKYQLVDLESGEGLASGLVEKIGEPVDGHYKHEYNGEKHELEEPIHDHEQGLKRVLGFFEEYGPNLSEAGIVAVGHRVVQGGSIFPKPALVTNKTINQVKDLAVLAPLHNGPEAKGAEVMRSLLPDVPQIFVFDSSFFFQLPKAASTYALNKEIADQYHIRRYGAHGTSHEYISSVVPDVIGKPAEGLKQIVLHIGNGASASAEVSGKPVETSMGLTPLEGLMMGGRTGDIDPAVVFHLIRNAHMNVDELDALFNKRSGMMGMTGYGDLREVHRLVSEGNEDAKLALDVYVHRIVSYIGNYTYQMGGCDVITFTAGVGENDDVVRKMVCDKLAPFGVKLDEEKNATRSKEPRVISTPDSSVIIAVIPTNEELAIARKSAAIAEAGTDTYGNTFAK

SEQ ID NO: 15520 - protein, 316 aa, Leucaena leucocephala
MASLTHFFLLALSVLSLFASSSNAQLSPNFYARSCPNVRAIVRNTMRQALAREARLGASILRLFFHDCFVNGCDAGILLDDTASFTGEKNAGPNQSARGYEVIDAIKTNVEAACRGTVSCADILALAAQEGVTQLGGPHGQYHLARRDARTASQSKANSEIPGPSSELSTLISMFAAKGLNAREMTVLSGAHSIGQGQCNFFRNRIYNENNIDPSFAATRRATCPRTGGGINLAPLDFTPNRFDNTYYKDLVNRRGLFHSDQVFFNGGSQDAIVRAYSTNSVLFFGDFAFAMVKMSSITPLTGSQGEIRKDCRVVN

SEQ ID NO: 15521 - protein, 396 aa, Pyrococcus furiosus DSM 3638
MSEDEAQFHGNYDDYVTYLKRRIRQLELQVRMLEADKERLERELSRLRSEMSRLRQPPAFAGSVIEVLDDDRAIVQNYNGPRFVVRIAPWIDKSKLRPGTRVALDQRTMAIIEILPASKDPAVLGFEVVERPNVTYNDIGGLKKQLQELREAIELPLKHPELFEEVGIDPPKGVLLYGPPGCGKTLMAKAIAHEVNATFIRVVGSELVRKYIGEGARLVHELFELAKEKAPTIIFIDEIDAIGAKRLDETTGGEREVNRTLMQLLAEMDGFDPRGNVKVIAATNRPDILDPALLRPGRFDRLIEVPLPDFEGRLEILKVHTRRMKLRGVDLRLIAELTEGASGADLKAIATEAGMFAIRERRTYVTQEDFLKAIDKVLGNEKKIIQQIMSHEVIYG

SEQ ID NO: 15522 - protein, 502 aa, Pyrococcus furiosus DSM 3638
MRTHVLPEFLVERDDKRCIKCGACIYQCPFGVYKWNADKSDITIDYTKCVGCQRCVVFCPTDALIVRPYPGSYKPNAYWNREVISDIKRQAEGGGVLLTGTGNDKPYKVYFDHILLNASQVTNPPIDPLREPIELRTFIGGKPEKLEVDLENIEIKTEIPPNIEIEVPIMFAGMSYGALSYNAFLAIAMAAKEFGTMFSTGEGGLPRELRRKYGDHAIVQVASGRFGVDPDYLNSAAAIEIKIGQGAKPGIGGHLPGEKVTEGIARTRMIPPGTDAISPAPHHDIYSIEDLATLIHAIKEATNYEKPVFVKVAAVHNIAAIASGIARAGADAIVIDGFRGGTGAAPKRIRDNVGIPIELALASVDRRLREEGIRNRVSLIVSGGIRNAADVVKAIALGADAVYIGTAALIAIGCTMCQKCYTGKCPWGITTQDPILSRRLDPNEASKRLINLLKAWSLEIKEMLGAMGINAIESLRGNREHLRGIGLEKWELEVLGIKGAGE

SEQ ID NO: 15523 - protein, 410 aa, Pyrococcus furiosus DSM 3638
MRIVLAYSGGLDTSVILKLMQEKLGAEVITVTVDVGQKDDFEKIEEKAYKFGAVKHYYIDAKEEFAENYVCKAIKANALYENAYPLSTALARPLIVEKLVEVAKKEGAGIIAHGCTGKGNDQVRFNLGIKALMPEAEILQPVAEWNLTRDWEMEYAKKHGIPVSDKIYSIDENIWGRSIEGGVLEDPSIEPPEEVFEWTVSIEKAPDKPEYVTIGFENGVPVSLNGEKMKLLELILKLNEIAGKHGVGRIDHIEDRSVGIKSREVYEAPAAVTLIKAHQDLEKLTLTKWVIEFKSIVDSKWSWLVYNGLWYEPLRLALEGFIDEAEKAVNGEVTVKLWKGNAIVVGRKSDNALYDVKMATYEKFSTFDQKLAKGFIELFGMQSVLAYNMLHGVHSTSNISEIKEAIKTLE

SEQ ID NO: 15524 - protein, 336 aa, Pyrococcus furiosus DSM 3638
MKPKVFITRAIPENGINMLEEEFEVEVWEEEREIPREKLLEKVKDVDALVTMLSERIDQEVFENAPRLRIVANYAVGYDNIDVEEATRRGIYVTNTPDVLTNATADHAFALLLATARHVVKGDKFVRSGEWKRKGIAWHPKWFLGYELYGKTIGIVGFGRIGQAIARRAKGFNMRILYYSRTRKSQAEKELGAEYRPLEEVLKESDFVILAVPLTKETMYMINEERLKLMKPTAILVNIARGKVVDTKALIKALKEGWIAGAGLDVFEEEPYYNEELFSLDNVVLTPHIGSATFEAREAMAELVARNLIAFKRGEIPPTLVNKEVIKIRKPGFNEQ

SEQ ID NO: 15525 - protein, 324 aa, Pyrococcus furiosus DSM 3638
MIVLEVRNLRIYYSTPVGFVKAVDGVSFEVKKGEVFGIAGESRCGKSTLVHSLILRKPPMTHKGGKAIFKGKDLMKLSREEARKIQYKELSIIPQYAMNALNPTKKIKDIVWDLAREHGMQDREEVEKLLKERLSMVKLSPKVAEMYPVELSGGMRQRATMVVSTLLNPDLLIADEITSALDVTTQRVVIELLHYFMQEGIVKSIIFVTHDLALLKQIADRVMVMYAGKVVEIGPMEEVLESPAHPYTQMLLDSLPRMGVHYKRQKLHGIPGYPISLLNPPQGCRFYTRCPYAMEHCPKIEPKLVQVSKEHYAACHLLGGEGSA

SEQ ID NO: 15526 - protein, 333 aa, Pyrococcus furiosus DSM 3638
MRPKVGVLLKMKREALEELEKYAEVEVIPYPSEEELKNKIHEFDGIIVSPVTKITKDVLEKAERLKVISCHSAGYDHIDVEEATRKGIYVTKVSGLLSEAVAEFAVGLLINLMRKIHYADKLIRRGEWESHVKIWTGFKGIESLYGKKVGILGMGAIGKAIARRLIPFGVELYYWSRHRKVDVESELHATYMDIDELLEKSDIVILALPLTKDTYHIINEERVKKLEGKYLVNIGRGALVDERAITEAIKQGKLKGYATDVFENEPVREHELFKYEWETVLTPHYAGLAVEAQEDVGFRAVENLISIFRGIVPEDLVNKEVLKIRPIESVKML

SEQ ID NO: 15527 - protein, 390 aa, Pyrococcus furiosus DSM 3638
MKEKRKYFMAHRIGVIQRSKIRELFERASKMENVISLGIGEPDFDTPNNIKEAAKRALDEGWTHYTPNAGIPELREAIAEYYKKFYGIDVEVDNVLVTAGAYEATYLAFETMLEQGDEVIIPDPAFVCYVEDAKLAEAKPIRLPLREENDFKPDIDELLERITKRTRMIVINYPNNPTGAVLDKETAKAIADVAEDYNIYILSDEPYEHFLYDDAKHYPMIKFAPDNTILANSFSKTFAMTGWRLGFVIAPTQIIREMIKLHAYIIGNVASFVQVAGIEALRSKESWKAVEEMRKEYNERRKLVLQRLRKMPYIKVREPKGAFYVFPNISETEMSSEEFSEWLLEKAKVVVIPGTAFGENGEGYVRISYATSREKLIEAMDRIEKALEEI

SEQ ID NO: 15528 - protein, 278 aa, Pyrococcus furiosus DSM 3638
MIGWIGLGHIGRAMAERLSEEYELLVWNRTIEKANGFKTVARTPEEVAEKCDVIFLSLYDSEAVRQVSERLLSVNLRGKIIVDTTTNHHEKVLEFHEIYRNVGAFYLESPVIGSVIPARNGQLTILVSGEREAFERVRPYLQKLGKRIFYFNEPGKATKLKLINNFVLGAFMAALGEAIALGEKAGLSREEIIEILENGAGNSMVLSAKKTKLLNDDYSTHFSVKNLVKDLSYAYDLAVASRKAVPLNATVREIYRLAFEKGLEELDFSVVYRLFREL

SEQ ID NO: 15529 - protein, 663 aa, Pyrococcus furiosus DSM 3638
MLKTVALVGNPNVGKTTIFNALTGLRQHVGNWPGVTVEKKEGIMEYREKEFLVVDLPGIYSLTAHSIDELIARNFILDGNADVIVDIVDSTCLMRNLFLTLELFEMEVKNIILVLNKFDLLKKKGAKIDIKKMRKELGVPVIPTNAKKGEGVEELKRMIALMAEGKVTTNPIIPRYDEDIEREIKHISELLRGTPLAEKYPIRWLALKLLQRDEEVIKLVLKYLGQEKMDEILKHISELEEKYKRPLDIVIASQKYEFLEQLLRKFVVHEPEVKENLANQLDRLLTHPVYGMISLLITFYLVFKFVFTFGFPLQELLDTAFSQLGESIAPYIGNEALRGLIVDGIIGGVGTVVSFFPLVFLLFVAMSILEDVGYLARIAAMMERFMRIFRLPGKAVIPMVLAFGCNVPAIMATRTIENEKERIITLLINPLVPCVARMTVITFLAGTFFPDRAPLVAIAIYAIAIGLALLSSLLLGKFIVKGEESPFIIELPEYLIPSWRVVLVHSWERSKEFLKKAATVILFGSILIWYLSSYPEPVGNGISYAERLGKIFEPLMKLMGLDWKAAVALLFGIIAKENTIVAYSIIYGVSEESLAGTLAGIMTPLQAFVLALVTTLYMPCIATLAAIRAEGGTKWMIMAALYNLLLATVIGIAVYQIGGIIYG

SEQ ID NO: 15530 - protein, 631 aa, Pyrococcus furiosus DSM 3638
MEELQYFPYERLRPNQREFIEIVKEAVKRGENLIVEAPTGFGKTISVLAGVLPYAISLGYKVVYLARTHKQMDRVIEELKKIRERNEVSGIEFRSRRDLCLHSYIQTFVQDAYTSMIVCKTLRKLGKCPFFENIKEKRDRVEEIVRFFLNSPPFPHEVLEYSELLELCPYEITKKIGEKANVIVASYLYMISPPIRQAFLENLGVDYSDLIVIFDEAHNLPDQAISALSDRLSIRSIERAIKEAEEYGEKDIENFLSILLRGLEILYKEKLENYESEEVPIRPEEVFLHVASVLGWSGREIGMMLEDMIEVGDAIREDRIERNLPPRSYVGRVGEFLWNWLALREREDYLHLFTKERGLALELVALDPSVALEFLEEVHSAIFMSGTLSPLEAFRDIIGVKAELKKFPRMIKRENAIVLVARDVSTRGIERSPSLYRRISEYIFEAVRNTPKNVGVFTASYEVLEGILSTNVHIKIEEEIGKKVFIEKRDAPSRENDEMIRAFKEESKGKGAVLFGVMGGRNSEGQDYSGDEMNGVVLVGIPYARPTPRVQAQIRYFEKKFPGKGRYYGYVLPAHRKLTQAAGRVHRSEEEKGSIVILDYRVLWKSVKKDLPDWMVETMIPVTLPHYENKT

SEQ ID NO: 15531 - protein, 564 aa, Pyrococcus furiosus DSM 3638
MEMSGAKALVRALEKEGVQHTFGIIGGSIMPVFDELLDSNIRHITTRHEQGAAHAADGYARVSGRPGVAITTSGPGATNLVTGIATAYMDSSPIVALTGQVPTYMVGKMAFQETDIINITKPITKWNYQVKRPREIPEAVKMAFTIATLGRPGPTLIDLPKDAQTDVEDVDFDVDISQKVTPWRPPKLDACPEEVKKAVDMILSAERPVIIVGGGVVWSGATDEVLAIAEYLLIPIMATFMGKGAVPENHPLYVGNLGMHGKIAANKLLPQTDLIIAVGMRWSDRTVSEFENFAPEAKIIHIDIDPKEVGKNVKVDLGIIGDAKRVLRAIYNEIVRRAKKRESWPWLEKVREFKEKYKEELVPIDGDYLRPPEILKELRKLLPPDAIVATEVGQNQMWVALFFPILKPRTFLTSGGLGTMGFGFPAAIGAKVAKPEKVVVDIAGDGSFMMSERELATAVNENLPVIVIILNNSSLGMVAQWQRMFYNRRYIATYFKKNPDFVKLAEAYGANGYKAETMDELLKAVKEGMNSDVPTVIDVPIHPEDDVLPMVPPGQHISNVVTRY

SEQ ID NO: 15532 - protein, 837 aa, Pyrococcus furiosus DSM 3638
MIIGRGEERKEEIKLRVAEALKWDVGRGIVRFDKKYQRMLGVEPGDIVEIEGNRITAAIVANAHPDDRGLDIVRMDGYIRKNAGVSIGDYVTIRRAEVKEAKKVVLAPAQKGVYIQIPGDLVKNNLLGRPVVKGDIVVASGRSEFYTGTPFDEIFRGFFEMSMGFGELKFVVVSTVPRGIVQITYNTEVEVLPQAVEVREEKVPEVTYEDIGGLKEAIEKIREMVELPLKHPELFERLGIEPPKGVLLYGPPGTGKTLLAKAVANEANAYFIAINGPEIMSKYYGESEERLREIFKEAEENAPAIIFIDEIDAIAPKREEVVGEVEKRVVSQLLTLMDGLKSRGKVIVIAATNRPDAIDPALRRPGRFDREIEVGVPDKQGRKEILQIHTRGMPIEPDYDKESVIKALKELEKEEKYEKSEIKKIIEEISKATSEEEVKEILKKHGKIFMDVRAKLIDKLLDELAEVTHGFVGADLAALAREAAMVVLRRLIKEGKINPEAESIPREVLEELKVTRRDFYEALKMVEPSALREVLIEIPNVHWDDIGGLEEVKQQLREAVEWPLKYPKAFKRLGISPPKGILLYGPPGTGKTLLAKAVATESQANFIAIRGPEVLSKWVGESEKRIREIFRKARQAAPAIIFIDEIDAIAPARGGYEGERVTDRLINQLLTEMDGIQENSGVVVIGATNRPDIIDPALLRPGRFDRLILVPAPDEKARLEIFKVHTRGMPLADDVDLKELARRTEGYTGADIAAVCREAALNALRRVVKSVPKEELEEESEEFLDKLIVTRKDFEEALKKVKPSVNKYMMEYYRQFEESRKRISGESMGREPDYFTG

SEQ ID NO: 15533 - protein, 373 aa, Pyrococcus furiosus DSM 3638
MIVLKFGGSSIKYDFEEATNLALSLFEDDAVIVVVSAIKGITDKLILYSQTLDKTIATKIASEYVSFAKSHGIDPVILKPYLDELFNLPDLPEEALRDYILSLGEVLSAVIFSASIGGKFVPSWDIFEAEGNFGNAFIDIKSSKKKFKRVFEVLEEGYIPVIPGFTAGKDGYILTLGRGGSDYSGVAAGVLGKAKLVAIMSDVEGIYTADPKLVPSARLIPYVSYDEIIISSKHGMRALQWKAAELAKEYKIPVLFGRTRNWRMGTLMSERSSGMPLMTYKDGLLLVNVTEEIKYPIIAEGPFWKLYKVSQEEGIHLMRELHTKLFQPSFIQYSVYKSSENGQKTQEFNEKISIEQGENRKIYYSEEEVNLPG

SEQ ID NO: 15534 - protein, 471 aa, Pyrococcus furiosus DSM 3638
MCLITGGINLTKEEIVKMIITGKHRGPDSFGVWSDGLVIKSEDFSEIKEIRGGNVVLAQCRLAMTGSKNYTQPFYNDIVLVHNGEIYNHESLRKWLIERGASFESDVDSEVILRLLEYFIFDKKMKVEEAVKKAMLMLRGDYAVAFALNGKIYLFRDPIGVRPLYYSPRGRFGSEKKVLWSVGEEAIPVNPGELVKLPEEEKMKLLSPWDIKGSGKGYYDGLKNLLQDAVRIRTAKKVGVLFSGGLDSSLIALLASKYSKVVLYTAGTEDSKDVEWARKVSDELRLELREYIFTREEVEREIKNVMFAIEEPNPMNLAIAIPLYFATKLARKDDVKVLLSGQGADELFGGYAKYLENPSLMRKDIEEIAERNLGRDDKVGMLNGVEVRYPYLDLPFVSLALRVPLEEKIREGVRKAILRRIALDFGLPEEVAFREKKAAQYGSNAQKILSKIAKKSLREFAQKLFSEVFST

SEQ ID NO: 15535 - protein, 322 aa, Pyrococcus furiosus DSM 3638
MLKVENLKIYYSTPIGFVKAVDGVSFEVKKGEVFGIAGESGCGKSTLVHSLILRKPPMTHKGGKAIFKGKDLMKLSREEARKIQYKELSIIPQYAMNALNPTKKIKDIVWDLAREHGMQDREEVEKLLKERLSMVKLSPKVAEMYPVELSGGMRQRATMVVSTLLNPDLLIADELTSALDVTTQRVVIELLHYFMQEGIVKSIIFVTHDLALLKQIADRVMVMYAGKVVEIGPMEEVLESPAHPYTQMLLDSLPRMGVHYKRQKLHGIPGYPISLLNPPQGCRFYTRCPYAMEHCPKIEPKLVQVSKEHYAACHLLGGEGSA

SEQ ID NO: 15536 - protein, 259 aa, Pyrococcus furiosus DSM 3638
MVSKPHGGKLIRRIAAPRTRERILSEQHEYPRVQIDHGRAIDLENIAHGVYSPLKGFLTREDFESVLDYMRLSDDTPWTIPIVLDVGEPTFEGGDAILLYYENPPIARMHVEDIYTYDKKEFAVKVFKTDDPNHLGVARVYSMGKYLVGGGIELLNELPNPFAKYTLRPVETRILFKERGWKTIVAFQTRNVPHLGHEYVQKAALTFVDGLFINPVLGRKKKGDYKDEVIIKAYYLIMKYCSNTTHHAIMRKTSTSSQT

SEQ ID NO: 15537 - protein, 389 aa, Pyrococcus furiosus DSM 3638
MALSDKLDLVNPSEIRKLFDLAAGMKDVISLGIGEPDFDTPAHIKEYAKEGLDKGLTHYGPNVGLPELREAIAEKLKKQNGIEADPNSEIMVLVGANQAFLMSLATFLKDGEEVLIPSPMFVSYAPAVILAGGKPVEVPTYEDNEFRINVDDLKKHVSEKTRALIINSPNNPTGAVLTKKDLEEIADFANEHDLMIISDEVYEHFIYDGAKHYSIAALDGMFGRTITVNGFSKTFAMTGWRLGFVVAPSWVIEKMVKFQMYNATCPVTFIQYAAAKALRDERSWKAVEEMRKEYERRRNLVWKRLNEMGLPTVEPKGAFYIFPRIKDTGLSSKEFSELMLMEAKVAVVPGSAFGRAGEGYIRISYATAYEKLEEAMNRMEKVLKEKKLI

SEQ ID NO: 15538 - protein, 138 aa, Pyrococcus furiosus DSM 3638
MGDKTKVQVSKLKPGRYIIIDDEPCRIVNITVSSPGKHGSAKARIEAVGIFDGKVRSIVKPTSAEVDVPIIDKRTAQVIAVTPDTVQIMDMETYEMFEVPLDTGVEEEIKDKIKEGINVEYWETLGRIKIMRIKGEEE

SEQ ID NO: 15539 - protein, 243 aa, Pyrococcus furiosus DSM 3638
MLKVENLWVKVEDKEILKGINLNIGENELHVVMGPNGSGKSTLALTIAGHPKYKVIQGSILFEGEEITSLPPEERVKKGIFLSFQHPVEVDGVKIIHFLQRILKNLKGMDEIKAYEAIYTAIKELGLDESILTRFLNVGFSGGERKKLEMLQAYLVEPKLLILDEPDSGVDVDSLKTIAKIIRRLYERGTSVLLITHYGRILEYLNPTKVHVIKNGKIVASGSIDLVKIIEERGYSAVGDNEE

SEQ ID NO: 15540 - protein, 356 aa, Pyrococcus furiosus DSM 3638
MEILEEKPKEGKIKIKAETLDDLWHLYHIISEGDVVYAKTLRKQAQRSDSLRPEKVEAVPVFLGIKAEKINLHRFANQLRITGPIIYASREDVPLGRYHTLTVEPGTVITIQKEKWKNYHIERLKEAIESSKKARVMIVAIEDGEAEIAIVREYGLDFVGSITYNISGKRYNIKRDDEEKKFFHEVAKSMEELMKRENIEKAIVAGPGFYKENFVNFLRENYPELAKKVVTDDTSMGGRTGIYEVIKRGTVDKVYTESRISKEIKLVEKVIEEIAKNGLVAYGLKEVEEATNYGAVETLIVLDSLLKGELREKIEELMELARNLRASVVVVSSEHEGGDKLKALGGIAALLRFKIK

SEQ ID NO: 15541 - protein, 356 aa, Pyrococcus furiosus DSM 3638
MYRIRNEGIQMHIMEFPREVILGKNVISETVNVAKRLSFSSPVLVVYGPKTKEIAGKDVERVLKEEFDVHSVIVKEATINEVEKVEGIIRDNKVKWAIAVGGGTIIDVTKLASYRAGIPFVSFPTTASHDGIASANASIKGLGTKTSIKARPPVAVIADIRIIKSAPRRYLAAGVGDVISNITAVRDWKLAHKIKGEYFSEYAAALSLMSAKMVMRDAEIIRIGDDEGVRKVVKALISSGVAMSIAGSSRPASGAEHLFSHALDLLLEKPALHGEQTGIGTIIMAYLHGINWRKIKETLQKVGAPTTAYELGVDPEIIIEALTIAHTIRPERYTILGRDGLTREAAERAAKITGVI

SEQ ID NO: 15542 - protein, 306 aa, Pyrococcus furiosus DSM 3638
MKVLVAAPLHEKALNILKDAGFEVIYEEYPEENRLLELVRDVEAIIVRSKPKITRKVIENAPKLKVIARAGVGLDNIDVEAAKEKGIEVVNAPAASSRSVAELAVGLMFAVARKIAYADRKMREGKWAKKECMGIELEGKTLGIIGFGRIGYQVAKIARALGMKLLLYDPYPNEERAKEVGGKFVDLETLLKESDIVTIHVPLIPETYHLINEERLRLMKRTAILINTSRGAVVDTQALIKALEEGWIAGAGLDVFEEEPLPENHPLTKFDNVVLTPHIGASTYEAQERAGVEVAEKIVEILKKSS

SEQ ID NO: 15543 - protein, 581 aa, Pyrococcus furiosus DSM 3638
MSSSLSQLRRLLGYLRNHKLEFLTGIILVVFMSYASSVIPILIKEAIDKGISTKNYEFALRYSLIILGVAVLQGAFSFTARYLLVKSAQHAVYDLRMDAFRAIQRHNIEFFDKTYSGQLISRITNDTERITRFLSFRIRMFVYSMFLIAMSLYYMSRMSGILSAVAFVTIIIVVLINTTYAKKVRPIYDKVRHQTGVIASVATASISGIKTIKALAAERFIQGKFSNENEKLYKFNIDATRITAIYGNASFLVLGLAMGTMVYYGGKGIIEGLLTVGELAAFLTYMLTLMWPLRALGFTIGDIQRSLAAASRLFEIIDSAPKSIDPPDAVEIKNPKGKIEFKDVWFTYHTGKTVLKGINLTINSGEKVLITGPPGSGKSTILKLIARFYEPTKGQILIDDIDIRKIKTENLRKIVAYVPQEPFIFNRTIRENIALAKPHAEINEIIKAAKIAKIHDFISTLPNGYETIVGEKGVTLSGGQRQRIALARALLLEPKIILLDDPVSNLDAKTEKELVEDLKDILKDKTAIIVSQRLSLAKIVDRVVVMKDGNIVEEGSPEELAKKGGLFSEMLASMKGEKNGE

SEQ ID NO: 15544 - protein, 578 aa, Pyrococcus furiosus DSM 3638
MESNSTLFLIKRFIGEVTRQKKILGIILLSIIGLTLTNLASPYILRIIIDEYLVPRKLEGLGFITALYLLTLIGQWAFMTLQTYYIEVFGQRVLRELRSKLHEKMLISNLDFFKNKSTGDLVSRIINDTNMVNDVLVSGLLSGVSSILSLSGIIIAMFLLDVRLTLVTLTSVPLMVAIALYFGGKMRRAYRETREKIARISTIVEESVAGIETIKAFGKERDVEKDFSLASIETIKAYLRVAVYMGIFWPLMNITSLLSVIIVIAYGGYLAYKGAVSIGVVVAFIQYAQRFRGPINNVVSMYDSLQSALAALERIYEILDDENVEDYKGINVERLTGEIKFENVWFEYEKGIPVLKNINLHISPGSKVAIVGKTGAGKTTMINLILRFYDPNQGRILYDGIEGRKISRESLRKRIGYVPQETYLFPGTIMENILIGNPEAKEEDVVRICKELGIHDFIMKLPNGYETTAGEAGKLLSVGERQLISIARALLKDPDIVILDEALSSVDPKTESLVQRAMLKLMEGRTSIIIAHRLTITQYADKIVVLEDGKIVEEGSPQELLEKRGYFYTLYTTQVEEI

SEQ ID NO: 15545 - protein, 580 aa, Pyrococcus furiosus DSM 3638
MSFFQGRKMEVEKLALKYALINAIEHDGKANPKAVIGKILGENPELRKKAREIVPIVNKIVEEVNTLSLEEQKKKLEEIYPEYFMEGTKKEKEEKKQLPPLPKAEKGKVVTRFAPNPDGAFHLGNARAAILSYEYAKMYDGKFILRFDDTDPKVKRPELIFYDMIIEDLEWLGIKPDEIVYASDRLEIYYKYAEELIKMGKAYVCTCPPDEFRKLRDQGIACPHRDEPVEVQLERWKKMLNGEYREGEAVVRIKTDLNHPNPAVRDWPALRIVDEPNHPRTGNKYRVWPLYNFASAIDDHELGVTHIFRGQEHSENETRQRYIYEYFGWEYPVTVHHGRLSIEGVILSKSKTRKGIEEGKYLGWDDPRLGTIRALRRRGILPEAIRELILEVGLKKSDATVSWDNLAAINRKLVDPIANRYFFVADPIPMYIEEAEEFEAKIPLHPDHPERGYRVLKFEPGKPIYVSKDDLSLLKPGGFIRLKDLFNVEILEVGDTIKARFHSHEYEVARKNKWRMIHWVPEGKECEVIIPEGEELIIRKGLLEKNANVKEGEIVQFERFGFVRIDKIENDKVIAIYAHK

SEQ ID NO: 15546 - protein, 796 aa, Pyrococcus furiosus DSM 3638
MSEKKKEVKLKVASAYQRDVGRGIVRIDRETMRELGISPGDVVEIIGTKNTAAIAWPAYPEDEGLGIIRMDGTIRKNAGVGLGDEVIVRKADVKEARKVVLAPTEPIRFGRDFIEWLHERLIGRPVVRGDYIKVGVLGQELTFVVTTTQPAGVVQITEFTDFDVSERPVKEVEKRITTGVTYEDIGGLKDVIEKIREMIELPLKHPELFEKLGIEPPKGVLLYGPPGTGKTLLAKAVANEANAYFIAINGPEIMSKYYGESEERLREVFREAEENAPAIIFIDEIDAIAPKREEVTGEVEKRVVAQLLTLMDGLKSRGKVIVIGATNRPDAIDPALRRPGRFDREIEIGIPDKQGRKEILQIHTRGMPIEPDFRKDDVLKILEELRGEEKFKDVIDRAIDQVSKAKEEEIQQVLKRISQDLYEEVKARLIDKLLEELAEVTYGFVGADLAALAREAAMAALRRLIREGKIDFEAETIPREVLEELKVTRRDFYEALKMVEPSALREVLIEIPNVHWDDIGGLEEVKQQLREAVEWPLKYPEAFRAFGITPPKGILLYGPPGTGKTLLAKAVATESQANFIAIRGPEVLSKWVGESEKRIREIFRKARQAAPAIIFIDEIDAIAPTRGTDVNRVTDRIINQLLTEMDGIVENSGVVVIGATNRPDIIDPALLRPGRFDRLILVPAPDEKARLEIFKVHTRGMPLADDVDLKELARRTEGYTGADIAAVCREAALNAMRRALEQGIIKEGMKADEIRKVAKVTMKDFEEALKKIGPSVSKETMEYYLKVQEKFKQARG

SEQ ID NO: 15547 - protein, 321 aa, Pyrococcus furiosus DSM 3638
MKIQRKLLRQKVSFDFSFLLIKFLNSSLARLFGDDMLLHTYKSFDMELPLVNIKDADYVILGLPYDGTTSYKPGARFGPVLIRQATLNFESYILDYDVDLAEAKIADAGDVALPVSIEEALKVAEETVRELREINPKALPIFLGGEHSMTLAPVRVLKPKSYVVFDAHLDLRDSYGGSKFNHACVARRINELRVEVAIFGVRSGTKEEVDFARKNGIEWIHARDYSFEAFVDIVSTLPEPIYLSIDIDTFDASLVPETGTPEPGGLRFWDVVEALEWLSESREVIGIDIMEVGGEKLGNVTALTGAKLLFYLLGMFEGIKK

SEQ ID NO: 15548 - protein, 150 aa, Camellia sinensis
MSMIPSFFGNRQGSSIFDPFSLDPFRNSPFSEFSQENSAIANARVDWKETPEAHLFKADLPGLKKEEVKVEIEDDRVLQISGERKVEKEEKNDTWHRVERSSGKFMRRFMLLENARMDQVKASMENGVLTVTIPKEEVKKPEIKSIDISG

SEQ ID NO: 15549 - protein, 428 aa, Mycobacterium tuberculosis
MALVVQKYGGSSVADAERIRRVAERIVATKKQGNDVVVVVSAMGDTTDDLLDLAQQVCPAPPPRELDMLLTAGERISNALVAMAIESLGAHARSFTGSQAGVITTGTHGNAKIIDVTPGRLQTALEEGRVVLVAGFQGVSQDTKDVTTLGRGGSDTTAVAMAAALGADVCEIYTDVDGIFSADPRIVRNARKLDTVTFEEMLEMAACGAKVLMLRCVEYARRHNIPVHVRSSYSDRPGTVVVGSIKDVPMEDPILTGVAHDRSEAKVTIVGLPDIPGYAAKVFRAVARRRRQHRHGAAERLQGRGRQDRHHLHLLPQTSGPPPWKNWTRSETRSASTQLLYDDHIGKVSLIGAGMRSHPGVTATFCEALAAVGVNIELISTSEDQRSRCCAATPNWTRPWSRCMKRSGSAATRRPRCTRGRDGRWACQ

SEQ ID NO: 15550 - protein, 755 aa, Agrobacterium tumefaciens
MSASALLDNQCDHFSTKMVDLIMVDKADELHRRLSDAFLEREASRGKRINQISAECSAGLACNRLADGRFPEISDGEKVAVLSAYIYIGKEVLGRILKSKTWVRAAVSGLVAIDLAPFCLDFSEAQLIQALFLLSGKRCAPSDLSHFVAISISKTARFETLRVPLYEKGTTKGVTGFTITFEGAVPFDMVAYGRNLMLKASSGSFPTIDLLYDYRPFFEQCSDSGRIGFFPEDVPKPKVAVIGAGISGLVVASELLHAGVDDVTIYEASDRVGGKLWSHAFKDAPSVVAEMGAMRFPPAASCLFFFLERYGLSSMRPFPNPGTVDTNLVYQGVRYTWNAGQQPPKLFDRVYNGWRAFLKEGFHEGDIVLASPVAITQALKSGDIRRARDSWQIWLNRFGRESFSSAIERIFLGTHPPGGETWSFPHDWDLFKLMGIGSGGFGPVFESGFIEILRLVINEYEENQWMCSEGISELPRRIASQVVNGVSVSQRIRHVQVRAIEKEETKIKITLKSRISEHYNKVVVTSGLANIQLRHCLTYDTTIFRAPVNQAVDNSHMTGSSKLFLLTERKFWLDHVLPSCVLMDGIAKAVYCLDYEPQDPNGKGLVLISYTWEDDSHKLLAVPDKKERFCLLRDAISRSFPAFAEHLVPACADYDQNVIQHDWLTDENAGGAFKLNRRGEDFYSEELFFQALDTTNDTGVYLAGCSCSFTGGWAEGAIQTACNAVCAIIHNCGGILANGNPLEHPWKRYNYRTRN

SEQ ID NO: 15551 - protein, 177 aa, Bacillus cereus
MAKKKAIFLDRDGVINQVLTDRVRFVNKPEDIYLLPGAADAIAIFNRQGYMVLVTSNQGGVGLGYMTQEELLEIHKHMQEKLINENAGAHIQEFAACIHRLKDGCSCRKPEAGMLLQLAQKYDIDLASSYMIGDQETDICAGKKAGTKTIRIASSLEETQANFKFPSLLNVALENIF

SEQ ID NO: 15552 - protein, 254 aa, Clostridium perfringens
MQKSMLKPPITRLGGKSKSRKEIISMMPDHVCYVEPFFGAGWVYFGKSKSKIEVINDIENEIPNLFKIIKYHAPEMKRLLSYEISGRSIFDEYKNATLEHLTDIQRAIRFMYLITQSFGGQGNHYGYGTNTLPSQKIFDCNLDELQERLKNTYIENLDFKKIIEKYDREYTLFFLDPPYYGTAGYEAEFGIKEQLKLRDILKNIKGKFILTINDCEETRSWYKDFNIKEVEVHYSVSRQTEGRKRNKELIITNY

SEQ ID NO: 15553 - protein, 255 aa, Cryptomeria japonica
MVRGKTQMKRIENATSRQVTFSKRRNGLLKKAYELAVLCDAEVALIIFSPRGKLYEYSSNSMQVLLEKYQKCSHENNNNKASEQDAQYLKQEIANMRERIKSLETTQRNMLGEDLTQCSLKDLADLEVRVERGLSHIRAHKEQYLMETIKQCERKERMLMEENTRLRKKDQILTEENALLMKKCGGSQFLDGSSSTTCTIGLLTSNSHSEDENHLQLVMRPPDVQDSPTEVETHQLQLVMRPPDVQDHLVVHDSD

SEQ ID NO: 15554 - protein, 2738 aa, Debaryomyces hansenii
MASYLPQEEFETNVYKYDETPENKSWASTLPTAKGLYNPEYEKDACGVGFTCHIKGEASHKIVSDCRNLLCNMTHRGGELNPKDGDGAGLLSSLPHKFFLREFKYYCNIDLPKLGQYGTGNIFFKKDDIVFEKSRKTFESIANTLGLKVLGWRKVPHDSSILGPASLSREPLILQPAIVLSELFDGQHKEISEEEFEKNYQMDFEKKLFILRKQSTHTIGLHNWFYICSLSSKTIVYKGQLAPNQVYAYYHDLANAEYEAHFALVHSRFSTNTFPSWDRAQPLRWAAHNGEINTLRGNKNWMRAKEGVMESELFGDELDKLYPIIEEGGSDSAAFDNVLELLVINGVLSLPEAVMMLIPEAWQNDIHIDSKKKAFYEWAACLMEPWDGPALFTFADGRYCGANLDRNGLRPCRYYVTDDDRMICASEVGVIEIEPEKILQKGRLQPGRMLLVDTKEGRIVDDRELKNKVASRFDFKSWVLANMISMDDLFSKLESRNVNLIENPESQDITVQTDPRLVAFGYSHEQISMVLAPMAEAKEALGSMGNDNALACISEQPKLLYDYFRQLFAQVTNPPIDPIREEIVMSLECYVGPQGNLLEMKPDQCNRLLLKSPVLSSLELNAIKNIEKVYPKWSVTNIDITFDKAEGIQGYINKIDNICQASSKAIADDHQIIILSDKLTSFNRIPISALIATGAVHHHLVRQKQRSKVAIIIETAEAREVHHACCLVGYGADGINPYLALETLVRMNIENLLKASLTDDQIIKNYKIAVDSGILKVMSKMGISTLASYKGAQIFEALGVDNSVIDRCFAGTASRIKGITFEYIAQDAFSLHDVGYPSRETIKPVALPETGEYHWRDGGDSHINEPAAIASMQDAVKNKNEIAYEAYSKKEYEAIKKCTLRGLLDFDYENSQSIPIDQVEPWTEIVRRFFTGAMSYGSISMEAHSTLAVAMNRLGGKSNTGEGGEDSARSLVHSNGDTMRSSIKQIASGRFGVTSHHLSDADELQIKMAQGAKPGEGGELPGHKVSEQIGKTRHSTPGVGLISPPPHHDIYSIEDSKQLLYDLKCSNPRARTSVKLVSEVGVGIVAAGVAKAGSENILISGGDGGTGAAKLTSIKYAGLPWELGLAESHQTLVLNDIRGRVILQTDGQLRTGRDIAVAALLGAEEWGFATTPLIALGCIMMRRCLASDTLVRTSEGDKPVAEVAIGDYLLDAEDKPVLCMGANPSQTGRMKEIAYQDFDSKKRVSFKCTPDHHLELTLTDSTPSLSGKSVTWFSRCTGAHLSEEVSEVYLDNMVSIFYNDLVDSTDSAVDKDSIHEAVDLALEDHYHRGNSDQYSIHLNEYISRIADKELQNEPEFIRECIHDAANRFVITSSGNRNIKSESFDDKLSLSRSRSSTADSDSDYVITDASVHSHSNNSSVYLASPDSMIPDGAANRFENIASKLKEPVCNCGGIRKIFRSFGTTEDAELAYSLLLSEHYYRLDPRFVTDGYTFQASVEQYENMCSQEVQNMHLKLYRSPLKFVEREHNSAELPVDPYFLGLWLGDGDSSGTTIMTTDREIVVWLNSYVERLNQNKPEGCFPLKLTEQLIYGAGHTSKSGHTTKVDVRNYKISSGDAFVRSGTYWNPIFDGLKKLGLLNNKSAGIPQEYMNSDEQNRLSVIAGLMDSDGCYVKSHNTYRFTQLTEDHKKIVYDLKELALSCGINTTGVESSVKPLGFNKHKHSTEYVVYLGNGSQKFQELLLLPRKKMEISKKHVSLDARPFTVSDVEDGEFRAIEVSGGVFQLANRLVVANCHLNTCPVGIATQDPELRKKFTGTPEHVINFFYYLANELRGIMANLGFRTVNEMIGRTEKLKVREDLRNTKNANMDLSPILTPAHTIRPGVATHCVKKQDHRLHVRIDNKLIDESEITLAKGLPVTIDCDVVNTDRSLGTTLSYRVSKTFGEQGLPHDTIHVNVNGSAGQSFGAFLAPGITLELEGDANDYVGKGLSGGRIIVYPPKESKFNAEDQIIAGNTAFFGATSGAAFIRGIAAERFAVRNSGANIVVEGTGDHGCEYMSGGRVVVLGSTGRNFAAGMCGGIAYVLDMAQDFGDKVNSQNVELSQITEASEIAFVRGLIEDHRHYTSSAVAENILNNFDRILPRFVKVLPYDYEKVLENEKKKQEEAKKNELNTFIKSIKEDPESDATNGEAAKIRKGHIHRPSSATVSAKDCSHEPNVLDLEDTIFDTEVEKKSVAKLDKLKGFMKYKRRNEKYRDAKKRTNDWNEMTSRLTKDELKYETARCMDCGVPFCTSDTGCPISNVIPKWNELVFQDRWYDALQRLLMTNNFPEFTGRICPAPCNGACVLGINSDPVNIKSVECAIIDHGFEQGWIKPEPPQHRTGKSIAVIGSGPAGLATADQLNKAGHSVKVYERSDRPGGLLMYGIPNMKLDKRIVKRRTDLMTAEGVEFICSTTIGEDISIEEIRSSNDAVVFAVGSTIPRDLRIKGRELNNINFAMQLLHKNTKALLDNDLEEIKKTLEGKHVIVIGGGDTGNDCLGTSTRHGAKSVTNFELLPNPPTSRPKDNPWPQWPRVFRVDYGHTEVTEHYGKDPREYSILSKEFVDDGEGNVKGIKTIRVEWKRSDSGAWQMAEVPGSEEFFSADVVLLSMGFVGPDADNLEVTKTKRGTISTVEPNGYKVSNEDNLFTAGDCRRGQSLVVWGIQEGRQCAREVDNYLMGSSRLPGNGSIEQRNFKLLEELAEKV

SEQ ID NO: 15555 - protein, 417 aa, Pseudomonas stutzeri A15
MDSTALIPVQYGLDTFYFVICGALVMWMAAGFAMLEAGLVRAKNTAEILTKNIVLYALASIMYLLVGYYIMYSSPEGGIFPSLGFLIGDEHAVDLVAAGGEDAPYYSARADFFFQIVFAATCMSVVSGAVAERMKLWAFIAFAVVMTGFIYPIQGFWKWGGGFLDAAGFLDFAGSGVVHMAGAAAALAGVLLLGARKGKYGPNGQINAIPGANMPLATLGAFILWMGWFGFNGGSQLKMSTIEDANAVAQVFVNTNMGAAGGLIAALITARLLFGKSDLTMVLNGALAGLVAITAEPLTPSALQATLIGGVGGVLVVFSILGLDKLKLDDPVGAISVHGVAGMWGLLAVTADQCRRFFRQSSCLGLVSIFLWVFFASLIVWGIIKAVMGLRVSEEEEYEGVDVVECGLEAYPEFTRQ

SEQ ID NO: 15556 - protein, 259 aa, Campylobacter jejuni
MVFRKSLLKLAVFALGACVAFSNANAAEGKLESIKSKGQLIVGVKNDVPHYALLDQATGEIKGFEVDVAKLLAKSILGDDKKIKLVAVNAKTRGPLLDNGSVDAVIATFTITPERKRIYNFSEPYYQDAIGLLVLKEKKYKSLADMKGANIGVAQAATTKKAIGEAAKKIGIDVKFSEFPDYPSIKAALDVKRVDAFSVDKSILLGYVDDKSEILPDSFEPQSYGIVTKKDDPAFAKYVDDFVKEHKNEIDALAKKWGL

SEQ ID NO: 15557 - protein, 173 aa, Agrobacterium rhizogenes
MGCCGMLRRTNIGCEDINWKGQAVEKYVGAKLHGIRVTDAKLNYHGSITIDADFCREVGLKPLEYVEIWNKMSGARISTYVLYGDPGSRCCILNGAAARTCQQGDEIIIASSVFCEIDDIIKLKPRVLVFGENNEIVDRITYEVFRRADNSLDMAVSSELPDNSYGFPASISG

SEQ ID NO: 15558 - protein, 257 aa, Klebsiella pneumoniae
MPFISHHYPHDHSCRWVEPFIGGGAVFLNMFAQNALLADSNPDLINLYRTIQRQKTNFINQVQNLADKTFVEKDYYEMRDRFNKTCISGQPLQRAALFYSLNRLGYNGMCRYNSERIYSVPWGKHTELKLDFNKIDYLSFRLSGIELITAGFEETLAATGEGDQIYCDPPYDKTSKTSFVSYDGKPFSQSDHVLLANMLVDAHRKGAAVAISNSLTPFTLGLYEERGFVIHRLSAYRSVGSKPNTRKTETEILAVLK

SEQ ID NO: 15559 - protein, 266 aa, Lactuca sativa
PGEDSEVILYPQAIFKDPFRGGNNILVICDTYTPQGVPIPTNKRAKAAEIFSDPKVVAQVPWFGIEQEYTLLQQDVKWPLGWPVGGYPGPQGPYYCGAGADKSFGRDISDAHYKACLYAGINISGTNGEVMPGQWEFQVGPSVGIEAGDHIWCARYLLERITEQAGVVLTLDPKPIEGDWNGAGCHTNYSTLSMREEGGFEVIKEAILNLSLRHADHISAYGEGNERRLTGKHETASINTFSWGVANRGCSIRVGRDTEKAGKGYL

SEQ ID NO: 15560 - protein, 389 aa, Saccharum hybrid cultivar
SRSRLLRNVETTAEALNEAISMSEQEKQLRHGKHYRYVSTHDVAYWSKSFVQDLERACKDHFRKPCWGIGLGFGFRVVALDPHFTKLNLDTIIMSYERAKSRVILLDYDGTLVPQTSIDKKPSSEILRIINTLCSDSNNTVFIVSGRSRDSLGSLFASCPKLGIAAEHGYFLRWTRDEGWQSSTHTSDFGWMQMAEPVMNLYTESTDGSYIETKETALVWHHQDADPGFGSTQAKEMLDHLESVLANEPVAVKSGQFIVEVKPQGVSKGLVAEKILTLMKEKGQQADFVLCIGDDRSDEDMFENIADVIKRNVVAPKTPLFACTVGQKPSKARFYLDDTLEVGNMLSLLADASEPDPVIELEDDLATSVSAIDISDEPPQLGHRREEGS

SEQ ID NO: 15561 - protein, 664 aa, Citrus maxima
MVSSMFYNSVNLSTTVFSRTHFPVPVYKHSCIDFSRYDHCINYKFRTGTSGQSKNPTQMKAAVAESPTNNSDSENKKLRILVAGGGIGGLVFALAAKRKGFEVLVFEKDMSAIRGEGQYRGPIQIQSNALAALEAIDLDVAEEVMRAGCVTGDRINGLVDGISGSWYIKFDTFTPAAEKGLPVTRVISRMTLQQILAKAVGDEIILSESNVIDFKDHGDKVSVVLENGQCYAGDLLIGADGIWSKVRKNLFGPQEAIYSGHTCYTGIADFIPAEIESVGYRVFLGHKQYFVSSDVGAGKMQWYAFHKEPAGGLDDPEGKKERLLKIFEGWCDNVGDLILATDEEAIFRRDIYDRTPIFTWGRGRVTLLGDSVPAMQPNLGQGGCLAIEDGHQLAVELGKACKKSNESKTPIDIVSALKSYERARRLRVAVIHGLARSAAVMASTYKAYLGVGLGPLSFLTKFRIPHPGRVGGRFFIDLAMPLMLSWVLGGNSSKLEGRSPCCKLSDKASDNLRTWFRDDDALERAMNGEWFLVPSGSENVVSQPIYLSVSHENEPYLIGSESHEDFPRTSIVIPSAQVSKMHARISYKDGAFYLIDLQSEHGTYVTDNEGRRYRVSSNFPARFRPSDTIEFGSDKKAIFRVKVIGTPPNNNSERKEAGEILQAV

SEQ ID NO: 15562 - protein, 625 aa, Mycobacterium tuberculosis
MARAVGIDLGTTNSVVSVLEGGDPVVVANSEGSRTTPSIVAFARNGEVLVGQPAKNQAVTNVDRTVRSVKRHMGSDWSIEIDGKKYTAPEISARILMKLKRDAEAYLGEDITDAVITTPAYFNDAQRQATKDAGQIAGLNVLRIVNEPTAAALAYGLDKGEKEQRILVFDLGGGTFDVSLLEIGEGVVEVRATSGDNHLGGDDWDQRVVDWLVDKFKGTSGIDLTKDKMAMQRLREAAEKAKIELSSSQSTSINLPYITVDADKNPLFLDEQLTRAEFQRITQDLLDRTRKPFQSVIADTGISVSEIDHVVLVGGSTRMPAVTDLVKELTGGKEPNKGVNPDEVVAVGAALQAGVLKGEVKDVLLLDVTPLSLGIETKGGVMTRLIERNTTIPTKRSESFTTADDNQPSVQIQVYQGEREIAAHNKLLGSFELTGIPPAPRGIPQIEVTFDIDANGIVHVTAKDKGTGKENTIRIQEGSGLSKEDIDRMIKDAEAHAEEDRKRREEADVRNQAETLVYQTEKFVKEQREAEGGSKVPEDTLNKVDAAVAEAKAALGGSDISAIKSAMEKLGQESQALGQAIYEAAQAASQATGAAHPGGEPGGAHPGSADDVVDAEVVDDGREAK

SEQ ID NO: 15563 - protein, 519 aa, Arabidopsis thaliana
MLNATTHVSRSYVEADSNANPHAVQSQGNLPSCCPSSKVSNILHPNKDATASEMPASTNDPEVRVKETDTSKQQQITTGLEAPVGSSIYGSDGQANRRLPEELHTSVSSQPQKSDKHEKVASSKGPSAPRKRNYDPDLFFKVNGKLYQRLGKIGSGGSSEVHKVISSDCTIYALKKIKLKGRDYATAYGFCQEIGYLKKLKGKTNIIQLIDYEVTDKTLLQEVLNGTMSNKDGRVKEDGFIYMVLEYGEIDLAHMLSQKWREIEGSDRTIDENWLRFYWQQILQAVNTIHEERIVHSDLKPANFLLVRGFLKLIDFGIAKAINSDTTNIQRDSQVGTLSYMSPEAFMCNESDENGNTIKCGRPSDIWSLGCILYQMVYGRTPFADYKTFWAKFKVITDPNHEITYNQLSNPWLIDLMKKCLAWDRNQRWRIPELLQHPFLAPPIPHEPQVKTIKLFSLIAESCGSDDDKANSMISQLEQLLSNPAPRPRNDVLDSRDQNQQLLSSFRTLYSTPGSVTRS

SEQ ID NO: 15564 - protein, 1123 aa, Glycine max
MSTSRPSQSSSNSGRSRRSARAMALATVDAKLHATFEESGSSFDYSSSVRISGTADGVNQPRHDKVTTAYLHHMQKGKMIQPFGCLLALDEKTCKVIAYSENAPEMLTMVSHAVPSVGDHPALGIGTDIKTLFTAPSASALQKALGFAEVLLLNPVLIHCKTSGKPFYAIIHRVTGSMIIDFEPVKPYEVPMTAAGALQSYKLAAKAITRLQSLPSGSMERLCDTMVQEVFELTGYDRVMAYKFHEDDHGEVIAEITKPGLEPYLGLHYPATDIPQASRFLFMKNKVRMIVDCHAKHVRVLQDEKLPFDLTLCGSTLRAPHSCHAQYMANMDSIASLVMAVVVNDNEEDGDTDAIQPQKRKRLWGLVVCHNTTPRFVPFPLRYACEFLAQVFAIHVNKEIELEYQIIEKNILRTQTLLCDLVMRDAPLGIVSESPNIMDLVKCDGAALIYKNKVWRLGVTPSESQIREIAFWLSEYHMDSTGFSTDSLSDAGFPSALSLGDVVCGMAAVRVTAKDVVFWFRSHTAAEIRWGGAKHEAGEKDDGRRMHPRSSFKVFLDVVKARSLPWKEYEIDAMHSLQLILRNAFKDTESMDLNTKAINTRLSDLKIEGMQELEAVTSEIVRLIETATVPILAVDVDGLVNGWNIKIAELTGLPVGEAMGKHLLTLVEDSSTDRVKKMLNLALLGEEEKNVQFEIKTHGSKMDSGPISLVVNACASRDLRDNVVGVCFVAHDITAQKNVMDKFTRIEGDYKAIVQNRNPLIPPIFGTDEFGWCCEWNPAMTKLTGWKREEVMDKMLLGELFGTHMAACRLKNQEAFVNLGVVLNKAMTGLETEKVPFGFFARNGKYVECLLSVSKKLDVEGLVTGVFCFLQLASPELQQALHIQRLSEQTALKRLNALSYMKRQIRNPLCGIIFSRKMLEGTALGTEQKQLLRTSAQCQQQLSKILDDSDLDSIIDGYLDLEMAEFTLHEVLVTSLSQVMTKSNGKSIRIVNDVAEQIVMETLYGDSLRLQQVLADFLLISINFTPNGGQVVVAGTLTKEQLGKSVHLVKLELSITHGGSGVPEALLNQMFGNNGLESEEGISLLISRKLLKLMNGDVRYLREAGKSAFILSAELAAAHNLKG

SEQ ID NO: 15565 - protein, 1130 aa, Glycine max
MSTSRPSQSSSNSRRSRHSARMAQATVDAKIHATFEESGSSFDYSSSVRVSGTADGVNQPRSDKVTTAYLNRMQRGKMIQPFGCLLAIDEKTCKVIAYSENAPEMLTMVSHAVPSVGDHPALGIGTDIKTLFTAPSVSGLQKALGCADVSLLNPILVHCKTSGKPFYAIVHRVTGSLIVDFEPVKPYEVPMTAAGALQSYKLAAKAITRLQSLPSGNMERLCDTMVQEVFELTGYDRVMAYKFHEDDHGEVIAEITKPGLEPYLGLHYPATDIPQASRFLFRKNKVRMIVDCHAKHVRALQDEKLQFDLILCGSTLRAPHSCHAQYMANMDSIASLVLAVVVNDNEEDGDTDAVQPQKRERLWGLVVCHNTTPRFVPFPLRYACEFLAQVFAVHVHKEIELEYQIIEKNILRTQALLCMLMRDAPLGIVSESPNIMDLVKCDGAALIYRNKVWRLGVTPSEPQIREIALWLSEYHMDSTGFSTDSLFDAGFPSALSLGDVVCGMASVRVTAKDMVFWFRSHTAAEIRWGGAKHEAGEKDDSRRMHPRSSFKAFLEVVKARSLPWKEYEMDAIHSLQIILRNAFKEDTESLDLNAKAINTRLSDLKIEGINDLKIERMQELEAVTSEIVRLIDTATVPILAVDVDGLVNGWNIKIAELTGLPIGEATGKHLLTLVEDSSTDRVKKMLNLALLGEEEKNVQFEIKTHGSKMDSGPISLVVNACASRDLRDNVVGVCFVAHDITAQKNVMDKFIRIEGDYKAIVQNRNPLIPPIFGTDEFGWCCEWNPAMVKLTGWKREEVMDKMLLGEIFGTQMAACRLKNQEAFVNLGVVLNKAMTSSETEKVPFGFFARNGKYVECLLSVSKKLDVEGLVTGVFCFLQLASPELQQALHIQRLSEQTASKRLNALSYMKRQIRNPLCGIVFSRKMLEGTDLGTEQKQLLRTSAQCQQQLSKILDDSDLDTIIDGYLDLEMAEFTLHEVLVTSLSQVMTKSNGKSIRIVNDVAGHIMMETLYGDSLRLQQVLADFLLISINFTPNGGQVVVAGSLTKEQLGKSVHLVKLELSITHGGSGVPEVLLNQMFGNNGLESEEGISLLISRKLLKLMNGDVRYLREAGKSAFILSAELAAAHNLKA

SEQ ID NO: 15566 - protein, 1122 aa, Glycine max
MSTSRPSQSSSNSRRSRHSARMAQATVDAKIHATFEESGSSFDYSSSVRVSGTADGVNQPRSDKVTTAYLNHMQRGKIIQPFGCLLAIDEKTCKVIAYSENAPEMLTMVSHAVPSVGDHPALGIGTDIKTLFTAPSASALQKALGFAEVLLLNPVLIHCKTSGKPFYAIIHRVTGSMIIDFEPVKPYEVPMTAAGALQSYKLAAKAITRLQSLPSGSMERLCDTMVQEVFELTGYDRVMAYKFHEDDHGEVIAEITKPGLEPYLGLHYPATDIPQASRFLFMKNKVRMIVDCHAKHVRVLQDEKLPFDLTLCGSTLRAPHSCHAQYMANMDSIASLVMAVVVNDNEEDGDTDAIQPQKRKRLWGLVVCHNTTPRFVPFPLRYACEFLAQVFAIHVNKEIELEYQIIEKNILRTQTLLCDLVMRDAPLGIVSESPNIMDLVKCDGAALIYKNKVWRLGVTPSESQIREIAFWLSEYHMDSTGFSTDSLSDAGFPSAPSLGDVVCGMAAVRVTAKDVVFWFRSHTAAEIRWGGAKHEAGEKDDGRRMHPRSSFKVFLDVVKARSLPWKEYEIDAMHSLQLILRNAFKDTESMDLNTKAINTRLSDLKIEGMQELEAVTSEIVRLIETATVPILAVDVDGLVNGWNIKIAELTGLPVGEAMGKHLLTLVEDSSTDRVKKMLNLALLGEEEKNVQFEIKTHGSKMDSGPISLVVNACASRDLRDNVVGVCFVAHDITAQKNVMDKFTRIEGDYKAIVQNRNPLIPPIFGTDEFGWCCEWNPAMTKLTGWKREEVMDKMLLGELFGTHMAACRLKNQEAFVNLGVVLNKAMTGLETEKVPFGFFARNGKYVECLLSVSKKLDVEGLVTGVFCFLQLASPELQQALHIQRLSEQTALKRLNALSYMKRQIRNPLCGIIFSRKMLEGTALGTEQKQLLRTSAQCQQQLSKILDDSDLDSIIDGYLDLEMAEFTLHEVLVTSLSQVMTKSNGKSIRIVNDVAEQIVMETLYGDSLRLQQVLADFLLISINFTPNGGQVVVAGTLTKEQLGKSVHLVKLELSITHGGSGVPEALLNQMFGNNGLESEEGISLLISRKLLKLMNGDVRYLREAGKSAFILSAELAAAHNLKG

SEQ ID NO: 15567 - protein, 1100 aa, Glycine max
MSKAIAQYTEDARLHAVFERSGESGRSFNYSESIRIASESVPEQQITAYLVKIQRGGFIQPFGSMIAVDEPSFRILGYSDNARDMLGITPQSVPSLDDKNDAAFALGTDVRALFTHSSALLLEKAFSAREISLMNPIWIHSRTSGKPFYGILHRIDVGIVIDLEPARTEDPALSIAGAVQSQKLAVRAISQLQSLPGGDVKLLCDTVVESVRELTGYDRVMVYKFHEDEHGEVVSESKRPDLEPYIGLHYPATDIPQASRFLFKQNRVRMIVDCHASAVRVVQDEALVQPLCLVGSTLRAPHGCHAQYMANMGSIASLVMAVIINGNDEEGVGGRSSMRLWGLVVCHHTSARCIPFPLRYACEFLMQAFGLQLNMELQLAAQSLEKRVLRTQTLLCDMLLRDSPTGIVTQSPSIMDLVKCDGAALYFQGNYYPLGVTPTEAQIRDIIEWLLAFHGDSTGLSTDSLGDAGYPGAASLGDAVCGMAVAYITEKDFLFWFRSHTAKEIKWGGAKHHPEDKDDGQRMHPRSSFKAFLEVVKSRSLPWENAEMDAIHSLQLILRDSFKDAEHRNSKAVVDPHVSEQELQGVDELSSVAREMVRLIETATAPIFAVDVDGHVNGWNAKVSELTGLPVEEAMGKSLVHDLVFKESEETMNKLLSRALKGEEDKNVEIKMRTFGPEHQNKAVFLVVNACSSKDFTNNVVGVCFVGQDVTGQKIVMDKFINIQGDYKAIVHSPNPLIPPIFASDDNTCCLEWNTAMEKLTGWGRVDVIGKMLVGEVFGSCCQLKGSDSITKFMIVLHNALGGQDTDKFPFSFLDRHGKYVQTFLTANKRVNMEGRIIGAFCFLQIMSPELQQALKAQRQQEKNSFGRMKELAYICQGVKNPLSGIRFTNSLLEATSLTNEQKQFLETSVACEKQMLKIIRDVDLESIEDGSLELEKGEFLLGNVINAVVSQVMLLLRERNLQLIRDIPEEIKTLAVYGDQLRIQQVLSDFLLNIVRYAPSPDGWVEIHVRPRIKQISDGLTLLHAEFRMVCPGEGLPPELIQDMFNNSRWGTQEGLGLSMSRKILKLMNGEVQYIREAERCYFYVLLELPVTRRSSKKC

SEQ ID NO: 15568 - protein, 1036 aa, Glycine max
MIAVDEPSFRILAYSDNARDMLGITPQSVPSLDDKNDAAFALGTDIRTLFTHSSAVLLEKAFSAREISLMNPIWIHSRTSGKPFYGILHRIDVGIVIDLEPARTEDPALSIAGAVQSQKLAVHAISQLQSLPGGDVKLLCDTVVESVRELTGYDRVMVYRFHEDEHGEVVAETKRPDLEPYIGLHYPATDIPQASRFLFKQNRVRMIVDCHASAVRVVQDEALVQPLCLVGSTLRAPHGCHAQYMANMGSTASLVMAVIINGNDEEGVGGRTSMRLWGLVICHHTSARCIPFPLRYACEFLMQAFGLQLNMELQLAAQSLEKRVLRTQTLLCDMLLRDSPTGIVTQSPSIMDLVKCDGAALYYQGNYYPLGVTPTEAQIRDIIEWLLAFHRDSTGLSTDSLADAGYPGAASLGDAVCGMAVAYITEKDFLFWFRSHTAKEIKWGGAKHHPEDKDDGQRMHPRSSFKAFLEVVKSRSLPWENAEMDAIHSLQLILRDSFKDAEHSNSKAVLDPRMSELELQGVDELSSVAREMVRLIETATAPIFAVDVDGRINGWNAKVSELTGLPVEEAMGKSLVRDLVFKESEETVDKLLSRALKGEEDKNVEIKMRTFGPEHQNKAVFVVVNACSSKDYTNNVVGVCFVGQDVTGQKIVMDKFINIQGDYKAIVHNPNPLIPPIFASDDNTCCLEWNTAMEKLTGWSRADVIGKMLVGEVFGSCCQLKGSDSITKFMIVLHNALGGHDTDRFPFSFLDRYGKHGQAFLTANKRVNMDGQIIGAFCFLQIVSPELQQALKAQRQQEKNSFARMKELAYICQGVKNPLSGIRFTNSLLEATCLSNEQKQFLETSAACEKQMLKIIHDVDIESIEDGSLELEKGEFLLGNVINAVVSQVMLLLRERNLQLIRDIPEEIKTLAVYGDQLRIQQVLSDFLLNIVRYAPSPDGWVEIHVHPRIKQISDGLTLLHAEFRMVCPGEGLPPELIQNMFNNSGWGTQEGLGLSMSRKILKLMNGEVQYIREAQRCYFYVLLELPVTRRSSKKC

SEQ ID NO: 15569 - protein, 1100 aa, Glycine max
MSKAIAQYTEDARLHAVFEQSGESGRSFNYSESIRIASESVPEQQITAYLVKIQRGGFIQPFGSMIAVDEPSFRILGYSDNARDMLGITPQSVPSLDDKNDAAFALGTDVRALFTHSSALLLEKAFSAREISLMNPIWIHSRTSGKPFYGILHRIDVGIVIDLEPARTEDPALSIAGAVQSQKLAVRAISQLQSLPGGDVKLLCDTVVESVRELTGYDRVMVYKFHEDEHGEVVSESKRPDLEPYIGLHYPATDIPQASRFLFKQNRVRMIVDCHASAVRVVQDEALVQPLCLVGSTLRAPHGCHAQYMANMGSIASLVMAVIINGNDEEGVGGRSSMRLWGLVVCHHTSARCIPFPLRYACEFLMQAFGLQLNMELQLAAQSLEKRVLRTQTLLCDMLLRDSPTGIVTQSPSIMDLVKCDGAALYFQGNYYPLGVTPTEAQIRDIIEWLLAFHGDSTGLSTDSLGDAGYPGAASLGDAVCGMAVAYITEKDFLFWFRSHTAKEIKWGGAKHHPEDKDDGQRMHPRSSFKAFLEVVKSRSLPWENAEMDAIHSLQLILRDSFKDAEHRNSKAVADPRVSEQELQGVDELSSVAREMVRLIETATAPIFAVDVDGHVNGWNAKVSELTGLPVEEAMGKSLVHDLVFKESEETMNKLLSRALKGEEDKNVEIKMRTFGPERQNKAVFLVVNACSSKDFTNNVVGVCFVGQDVTGQKIVMDKFINIQGDYKAIVHSPNPLIPPIFASDDNTCCLEWNTAMEKLTGWGRVDVIGKMLVGEVFGSCCQLKGSDSITKFMIVLHNALGGQDTDKFPFSFLDRHGKYVQTFLTANKRVNMEGQIIGAFCFLQIMSPELQQALKAQRQQEKNSFGRMKELAYICQGVKNPLSGIRFTNSLLEATSLTNEQKQFLETSVACEKQMLKIIRDVDLESIEDGSLELEKGEFLLGNVINAVVSQVMLLLRERNLQLIRDIPEEIKTLAVYGDQLRIQQVLSDFLLNIVRYAPSPDGWVEIHVRPRIKQISDGLTLLHAEFRMVCPGEGLPPELIQDMFNNSRWGTQEGLGLSMSRKILKLMNGEVQYIREAERCYFYVLLELPVTRRSSKKC

SEQ ID NO: 15570 - protein, 867 aa, Glycine max
MIAVDEPSFRILAYSDNARDMLGITPQSVPSLDDKNDAAFALGTDIRTLFTHSSAVLLEKAFSAREISLMNPIWIHSRTSGKPFYGILHRIDVGIVIDLEPARTEDPALSIAGAVQSQKLAVRAISQLQSLPGGDVKLLCDTVVESVRELTGYDRVMVYRFHEDEHGEVVAETKRPDLEPYIGLHYPATDIPQASRFLFKQNRVRMIVDCHASAVRVVQDEALVQPLCLVGSTLRAPHGCHAQYMANMGSTASLVMAVIINGNDEEGVGGRTSMRLWGLVICHHTSARCIPFPLRYACEFLMQAFGLQLNMELQLAAQSLEKRVLRTQTLLCDMLLRDSPTGIVTQSPSIMDLVKCDGAALYYQGNYYPLGVTPTEAQIRDIIEWLLAFHRDSTGLSTDSLADAGYPGAASLGDAVCGMAVAYITEKDFLFWFRSHTAKEIKWGGAKHHPEDKDDGQRMHPRSSFKAFLEVVKSRSLPWESAEMDAIHSLQLILRDSFKDAEHSNSKAVLDPRMSELELQGVDELSSVAREMVRLIETATAPIFAVDVDGRINGWNAKVSELTGLPVEEAMGKSLVRDLVFKESEETVDKLLSRALKGEEDKNVEIKMRTFGPEHQNKAVFVVVNACSSKDYTNNVVGVCFVGQDVTGQKIVMDKFINIQGDYKAIVHNPNPLIPPIFASDDNTCCLEWNTAMEKLTGWSRADVIGKMLVGEVFGSCCQLKGSDSITKFMIVLHNALGGHDTDRFPFSFLDRYGKHVQAFLTANKRVNMDGQIIGAFCFLQIVSPELQQALKAQRQQEKNSFARMKELAYICQGVKNPLSGIRFTNSLLEATCLSNEQKQFLETSAACEKQMLKIIHDVDIESIEDG

SEQ ID NO: 15571 - protein, 596 aa, Glycine max
MSSSFSVRFLAPLPPSSSSCFPTSSLPKTWLCAAATPTVVRNHHLLLEVEASRLEPRVEERDGFWVLKEEYRGGISPQEKVKLEKDPMKLFMEGGIEELAKMSLEEIESSKHTKDDIDVRLKWLGLFHRRKQHHGRFMMRLKLKLPNGVTTSAQTRYLASVIRKYGKDGCADVTTRQNWQIRGVVHPECPEILKGLDEVGLTSLQSPMDNVRNPVGNPLAGIDPDEIVDTRPYNNLLSQFITANSRGNPAMSNLPRKWNVCVVGSHDLFEHPHINDLAYMPANKDGRFGFNLLVGGFFSAKRCAEAIPLDAWVSADDVIPLCKAVLEAYRDLGFRGNRQKTRMMWLIDELGIEVFRSEVEKRMPGKKLERASKEELVKKQWERRDYLGVHPQKQEGLSYVGIHIPVGRVQADDMDELARLADEYATGELRLTVEQNIIIPNLDNNKIDGLLNEPLLKGRFSPEPSLLMKTLVACTGNQFCGQAIIETKERALKVTEEVERQVAVTRPVRMHWTGCPNTCGQVQVADIGFMGCMARDDNGKATEGVDIFLGGRIGSDSHLAQVYKKGVPCKDLVPVVVDILVKHFGAVLRNREEGED

SEQ ID NO: 15572 - protein, 197 aa, Bradyrhizobium yuanmingense
PTPNLRGKTQIKEFASFPTLEQLPLWGFDGSSTQQAEGHSSDCVLKPVAVFPDGARTNGVLVMCEVMMPDGKTPHPSNKRATILDDSGAWFGFEQEYFFYKDGRPLGFPTAGYPAPQGPYYTGVGYSNVGDVARKIVEEHLDLCLAAGINHEGINAEVAKGQWEFQIFGKGSKTAADQMWMARYLMLRLTEKYGIDI

SEQ ID NO: 15573 - protein, 197 aa, Bradyrhizobium elkanii
PTPSLRGKTQIKEFASFPTLEQLPLWGFDGSSTQQAEGHSSDCVLKPVACYPDAARENGVLVMCEVMMPDGKTPHPSNKRATILDDDGAWFGFEQEYFFYKDGRPLGFPEEGYPAPQGPYYTGVGYKNVGSVARKIVEEHLNLCLAAGINHEGINAEVAKGQWEFQIFGKGSKTAADQMWMARYLMLRLTESYGIDI

SEQ ID NO: 15574 - protein, 197 aa, Bradyrhizobium liaoningense
PTPNLRGKTQIKEFASFPTLEQLPLWGFDGSSTQQAEGHSSDCVLKPVAVFPDGARTNGVLVMCEVMMPDGKTPHPSNKRATILDDAGAWFGFEQEYFFYKDGRPLGFPEYGYPAPQGPYYTGVGYKFVGDVARKIVEEHLDLCLAAGINHEGINAEVAKGQWEFQIFGKGSKKAADEMWMARYLMLRLTEKYGIDI

SEQ ID NO: 15575 - protein, 197 aa, Bradyrhizobium elkanii
PTPNLRGKTQIKEFASFPTLEQLPLWGFDGSSTQQAEGHSSDCVLKPVACYPDAARENGVLVMCEVMMPDGKTPHPSNKRATILDDDGAWFGFEQEYFFYKDGRPLGFPEEGYPAPQGPYYTGVGYKNVGSVARKIVEEHLNLCLAAGINHEGINAEVAKGQWEFQIFGKGSKTPADQMWMARYLMLRLTESYGIDI

SEQ ID NO: 15576 - protein, 197 aa, Bradyrhizobium elkanii
PTPSLRGKTQIKEFASFPTLEQLPLWGFDGSSTQQAEGHSSDCVLKPVACYPDAARENGVLVMCEVMMPDGKTPHVSNKRATVLDDEGAWFGFEQEYFFYKDGRPLGFPEEGYPAPQGPYYTGVGYKNVGSVARKIVEEHLNLCLAAGINHEGINAEVAKGQWEFQIFGKGSKTAADQMWMARYLMLRLTESYGIDI

SEQ ID NO: 15577 - protein, 197 aa, Bradyrhizobium elkanii
PTPSLRGKTQIKEFASFPTLEQLPLWGFDGSSTQQAEGHSSDCVLKPVACYPDAARENGVLVMCEVMMPDGKTPHVSNKRATVLDDEGAWFGFEQEYFFYKDGRPLGFPSEGYPAPQGPYYTGVGYSNVGSVARKIVEEHLNLCLAAGINHEGINAEVAKGQWEFQIFGKGSKTAADQMWMARYLMLRLTESYGIDI

SEQ ID NO: 15578 - protein, 197 aa, Bradyrhizobium yuanmingense
PTPNLRGKTQIKEFASFPTLEQLPLWGFDGSSTQQAEGHSSDCVLKPVAVFPDGARTNGVLVMCEVMMPDGKTPHPSNKRATILDDSGAWFGFEQEYFFYKDGRPLGFPTAGYPAPQGPYYTGVGYSNVGDVARKIVEEHLDLCLAAGINHEGINAEVAKGQWEFQIFGKGSKTAADQMWMARYLMLRLTEKYGIGI

SEQ ID NO: 15579 - protein, 197 aa, Bradyrhizobium yuanmingense
PTPNLRGKTQIKEFASFPTLEQLPLWGFDGSSTQQAEGHSSDCVLKPVAVFPDGARTNGVLVMCEVMMPDGKTPHPSNKRATILDDSGAWFGFEQEYFFYKDGRPLGFPTAGYPAPQGPYYTGVGYSNVGDVARKIVEEHLDLCLAAGINHEGINAEVAKGQWEFQIFGKGSKTTADQMWMARYLMLRLTEKYGIDI

SEQ ID NO: 15580 - protein, 197 aa, Bradyrhizobium yuanmingense
PTPNLRGKTQIKEFASFPTLEQLPLWGFDGSSTQQAEGHSSDCVLKPVAVFPDGARTNGVLVMCEVMMPDGKTPHPSNKRATILDDSGAWFGFEQEYFFYKNGRPLGFPESGYPAPQGPYYTGVGYSNVGDVARKIVEEHLDLCLAAGINHEGINAEVAKGQWEFQIFGKGSKTAADQMWMARYLMLRLTEKYGIDI

SEQ ID NO: 15581 - protein, 197 aa, Bradyrhizobium yuanmingense
PTPNLRGKTQIKEFASFPTLEQLPLWGFDGSSTQQAEGHSSDCVLKPVAVFPDGARTNGVLVMCEVMMPDGKTPHASNKRATILDDAGAWFGFEQEYFFYKDGRPLGFPTSGYPAPQGPYYTGVGFSNVGDVARKIVEEHLDLCLAAGINHEGINAEVAKGQWEFQIFGKGSKTAADQMWMARYLMLRLTEKYGIDI

SEQ ID NO: 15582 - protein, 197 aa, Bradyrhizobium japonicum
PTPNLRGKTQIKEFASFPTLEQLPLWGFDGSSTQQAEGHSSDCVLKPVAVFPDAARTNGVLVMCEVMMPDGKTPHASNKRATILDDAGAWFGFEQEYFFYKDGRPLGFPTSGYPAPQGPYYTGVGFSNVGDVARKIVEEHLDLCLAAGINHEGINAEVAKGQWEFQIFGKGSKKAADEMWMARYLMLRLTEKYGIDI

SEQ ID NO: 15583 - protein, 197 aa, Bradyrhizobium liaoningense
PTPNLRGKTQIKEFASFPTLEQLPLWGFDGSSTMQAEGHSSDCVLKPVAVFPDGARTNGVLVMCEVMMPDGKTPHPSNKRATILDDAGAWFGFEQEYFFYKDGRPLGFPEYGYPAPQGPYYTGVGYKFVGDVARKIVEEHLDLCLAAGINHEGINAEVAKGQWEFQIFGKGSKKAADEMWMARYLMLRLTEKYGIDI

SEQ ID NO: 15584 - protein, 622 aa, Pisum sativum
MKLKNGLLLFFLFVECAFFKVDSKCVKGCDLALASYYVMPLVELPTIKNYMQSKIVTNSSDVLNSYNKVLVTNHGNIFSYSRINIPFPCECIGGEFLGHVFEYTTKKGDTYDLIANNYYVSLTTVELLKKFNSYDPNHIPAKAKVNVTVNCSCGNSQISKDYGLFVTYPLRSTDSLEKIANESKLDEGLIQNFNPDVNFSRGSGIVFIPGRDKNGEYVPLYPKTGVGKGVAIGISIAGVFAVLLFVICIYVKYFQKKEEEKTILPRVSKALSTQDGNASSSGEYETSGSSGHGTGSAAGLTGIMVAKSTEFSYQELAKATDNFSLDNKIGQGGFGAVYYAELRGEKTAIKKMNVQASSEFLCELKVLTHVHHLNLVRLIGYCVEGSLFLVYEHIDNGNLGQYLHGKDKEPLPWSSRVQIALDSARGLEYIHEHTVPVYIHRDVKSANILIDKNLRGKVADFGLTKLIEVGNSTLHTRLVGTFGYMPPEYAQYGDVSPKIDVYAFGVVLYELISAKNAVLKTGEESVAESKGLVALFEKALNQIDPSEALRKLVDPRLKENYPIDSVLKMAQLGRACTRDNPLLRPSMRSLVVDLMTLSSPFEDCDDDTSYENQTLINLLSVR

SEQ ID NO: 15585 - protein, 620 aa, Pisum sativum
MKLKNGLLLFFLFVECAFFKVDSKCVKGCDLALASYYVMPLVELPTIKNYMQSKIVTNSSDVLNSYNKVLVTNHGNIFSYSRINIPFPCECIGGEFLGHVFEYTTKKGDTYDLIANNYYVSLTTVELLKKFNSYDPNHIPAKAKVNVTVNCSCGNSQISKDYGLFVTYPLRSTDSLEKIANESKLDEGLIQNFNPDVNFSRGSGIVFIPGRDKNGEYVPLYPKTGVGKGVAIGISIAGVFAVLLFVICIYVKYFQKKEEEKTILPRVSKALSTQDASSSGEYETSGSSGHGTGSAAGLTGIMVAKSTEFSYQELAKATDNFSLDNKIGQGGFGAVYYAELRGEKTAIKKMNVQASSEFLCELKVLTHVHHLNLVRLIGYCVEGSLFLVYEHIDNGNLGQYLHGKDKEPLPWSSRVQIALDSARGLEYIHEHTVPVYIHRDVKSANILIDKNLRGKVADFGLTKLIEVGNSTLHTRLVGTFGYMPPEYAQYGDVSPKIDVYAFGVVLYELISAKNAVLKTGEESVAESKGLVALFEKALNQIDPSEALRKLVDPRLKENYPIDSVLKMAQLGRACTRDNPLLRPSMRSLVVDLMTLSSPFEDCDDDTSYENQTLINLLSVR

SEQ ID NO: 15586 - protein, 622 aa, Pisum sativum
MKLKNGLLLFFLFVECAFFKVDSKCVKGCDLALASYYVMPLVELPTIKNYMQSKIVTNSSDVLNSYNKVLVTNHGNIFSYFRINIPFPCECIGGEFLGHVFEYTTKKGDTYDLIANNYYVSLTSVELLKKFNSYDPNHIPAKAKVNVTVNCSCGNSQISKDYGLFVTYPLRSTDSLEKIANESKLDEGLIQNFNPDVNFSRGSGIVFIPGRDKNGEYVPLYPKTGVGKGVAIGISIAGVFAVLLFVICIYVKYFQKKEEEKTILPQVSKALSTQDGNASSSGEYETSGSSGHGTGSAAGLTGIMVAKSTEFSYQELAKATDNFSLDNKIGQGGFGAVYYAELRGEKTAIKKMNVQASSEFLCELKVLTHVHHLNLVRLIGYCVEGSLFLVYEHIDNGNLGQYLHGKDKEPLPWSSRVQIALDSARGLEYIHEHTVPVYIHRDVKSANILIDKNLRGKVADFGLTKLIEVGNSTLHTRLVGTFGYMPPEYAQYGDVSPKIDVYAFGVVLYELISAKNAVLKTGEESVAESKGLVALFEKALNQIDPSEALRKLVDPRLKENYPIDSVLKMAQLGRACTRDNPLLRPSMRSLVVDLMTLSSPFEDCDDDTSYENQTLINLLSVR

SEQ ID NO: 15587 - protein, 620 aa, Pisum sativum
MKLKNGLLLFFLFVECAFFKVDSKCVKGCDLALASYYVMPLVELPTIKNYMQSKIVTNSSDVLNSYNKVLVTNHGNIFSYFRINIPFPCECIGGEFLGHVFEYTTKKGDTYDLIANNYYVSLTSVELLKKFNSYDPNHIPAKAKVNVTVNCSCGNSQISKDYGLFVTYPLRSTDSLEKIANESKLDEGLIQNFNPDVNFSRGSGIVFIPGRDKNGEYVPLYPKTGVGKGVAIGISIAGVFAVLLFVICIYVKYFQKKEEEKTILPQVSKALSTQDASSSGEYETSGSSGHGTGSAAGLTGIMVAKSTEFSYQELAKATDNFSLDNKIGQGGFGAVYYAELRGEKTAIKKMNVQASSEFLCELKVLTHVHHLNLVRLIGYCVEGSLFLVYEHIDNGNLGQYLHGKDKEPLPWSSRVQIALDSARGLEYIHEHTVPVYIHRDVKSANILIDKNLRGKVADFGLTKLIEVGNSTLHTRLVGTFGYMPPEYAQYGDVSPKIDVYAFGVVLYELISAKNAVLKTGEESVAESKGLVALFEKALNQIDPSEALRKLVDPRLKENYPIDSVLKMAQLGRACTRDNPLLRPSMRSLVVDLMTLSSPFEDCDDDTSYENQTLINLLSVR

SEQ ID NO: 15588 - protein, 345 aa, Pisum sativum
MKLKNGLLLFFLLVECAFFKVDSKCVKGCDIALASYYVMPLVELSNITTFMQSKLVTNSSDVLNRYNKVLVTNHGNIFSYFRINIPFPCECIGGEFLGHVFEYTTKKGDTYDLIANNYYVSLTTVELLKKFNSYDPNHIPAKAKVNVTVNCSCGNSRISKDYGLFVTYPLRFTDSLEKIANESKLDEGLIQNFNPDVNFSRGSGIVFIPGRDKNGEYVPLYPKTGVGKGVAIGISIAGVFAVLLFVICIYVKYFQKKEEEKTILPRVSKALSTQDGNASSSGEYETSGSSGHGTGSAAGLTGIMVAKSTEFSYQELAKATDNFSLDNKIGQGGFGAVYYAELRGE

SEQ ID NO: 15589 - protein, 343 aa, Pisum sativum
MKLKNGLLLFFLLVECAFFKVDSKCVKGCDIALASYYVMPLVELSNITTFMQSKLVTNSSDVLNRYNKVLVTNHGNIFSYFRINIPFPCECIGGEFLGHVFEYTTKKGDTYDLIANNYYVSLTTVELLKKFNSYDPNHIPAKAKVNVTVNCSCGNSRISKDYGLFVTYPLRFTDSLEKIANESKLDEGLIQNFNPDVNFSRGSGIVFIPGRDKNGEYVPLYPKTGVGKGVAIGISIAGVFAVLLFVICIYVKYFQKKEEEKTILPRVSKALSTQDASSSGEYETSGSSGHGTGSAAGLTGIMVAKSTEFSYQELAKATDNFSLDNKIGQGGFGAVYYAELRGE

SEQ ID NO: 15590 - protein, 345 aa, Pisum sativum
MKLKNGLLLFFLLVECAFFKVDSKCVKGCDIALASYYVMPLVELSNITTFMQSKLVTNSSDVLNRYNKVLVTNHGNIFSYFRINIPFPCECIGGEFLGHVFEYTTKKGDTYDLIANNYYVSLTSVELLKKFNSYDPNHIPAKAKVNVTVNCSCGNSQISKDYGLFVTYPLRSTDSLEKIANESKLDEGLIQNFNPDVNFSRGSGIVFIPGRDKNGEYVPLYPKTGVGKGVAIGISIAGVFAVLLFVICIYVKYFQKKEEEKTILPQVSKALSTQDGNASSSGEYETSGSSGHGTGSAAGLTGIMVAKSTEFSYQELAKATDNFSLDNKIGQGGFGAVYYAELRGE

SEQ ID NO: 15591 - protein, 343 aa, Pisum sativum
MKLKNGLLLFFLLVECAFFKVDSKCVKGCDIALASYYVMPLVELSNITTFMQSKLVTNSSDVLNRYNKVLVTNHGNIFSYFRINIPFPCECIGGEFLGHVFEYTTKKGDTYDLIANNYYVSLTSVELLKKFNSYDPNHIPAKAKVNVTVNCSCGNSQISKDYGLFVTYPLRSTDSLEKIANESKLDEGLIQNFNPDVNFSRGSGIVFIPGRDKNGEYVPLYPKTGVGKGVAIGISIAGVFAVLLFVICIYVKYFQKKEEEKTILPQVSKALSTQDASSSGEYETSGSSGHGTGSAAGLTGIMVAKSTEFSYQELAKATDNFSLDNKIGQGGFGAVYYAELRGE

SEQ ID NO: 15592 - protein, 622 aa, Pisum sativum
MKLKNGLLLFFLLVECAFFKVDSKCVKGCDIALASYYVMPLVELSNITTFMQSKLVTNSSDVLNRYNKVLVTNHGNIFSYFRINIPFPCECIGGEFLGHVFEYTTKKGDTYDLIANNYYVSLTSVELLKKFNSYDPNHIPAKAKVNVTVNCSCGNSQISKDYGLFVTYPLRSTDSLEKIANESKLDEGLIQNFNPDVNFSRGSGIVFIPGRDKNGEYVPLYPKTGVGKGVAIGISIAGVFAVLLFVICIYVKYFQKKEEEKTILPQVSKALSTQDGNASSSGEYETSGSSGHGTGSAAGLTGIMVAKSTEFSYQELAKATDNFSLDNKIGQGGFGAVYYAELRGEKTAIKKMNVQASSEFLCELKVLTHVHHLNLVRLIGYCVEGSLFLVYEHIDNGNLGQYLHGKDKEPLPWSSRVQIALDSARGLEYIHEHTVPVYIHRDVKSANILIDKNLRGKVADFGLTKLIEVGNSTLHTRLVGTFGYMPPEYAQYGDVSPKIDVYAFGVVLYELISAKNAVLKTGEESVAESKGLVALFEKALNQIDPSEALRKLVDPRLKENYPIDSVLKMAQLGRACTRDNPLLRPSMRSLVVDLMTLSSPFEDCDDDTSYENQTLINLLSVR

SEQ ID NO: 15593 - protein, 620 aa, Pisum sativum
MKLKNGLLLFFLLVECAFFKVDSKCVKGCDIALASYYVMPLVELSNITTFMQSKLVTNSSDVLNRYNKVLVTNHGNIFSYFRINIPFPCECIGGEFLGHVFEYTTKKGDTYDLIANNYYVSLTSVELLKKFNSYDPNHIPAKAKVNVTVNCSCGNSQISKDYGLFVTYPLRSTDSLEKIANESKLDEGLIQNFNPDVNFSRGSGIVFIPGRDKNGEYVPLYPKTGVGKGVAIGISIAGVFAVLLFVICIYVKYFQKKEEEKTILPQVSKALSTQDASSSGEYETSGSSGHGTGSAAGLTGIMVAKSTEFSYQELAKATDNFSLDNKIGQGGFGAVYYAELRGEKTAIKKMNVQASSEFLCELKVLTHVHHLNLVRLIGYCVEGSLFLVYEHIDNGNLGQYLHGKDKEPLPWSSRVQIALDSARGLEYIHEHTVPVYIHRDVKSANILIDKNLRGKVADFGLTKLIEVGNSTLHTRLVGTFGYMPPEYAQYGDVSPKIDVYAFGVVLYELISAKNAVLKTGEESVAESKGLVALFEKALNQIDPSEALRKLVDPRLKENYPIDSVLKMAQLGRACTRDNPLLRPSMRSLVVDLMTLSSPFEDCDDDTSYENQTLINLLSVR

SEQ ID NO: 15594 - protein, 222 aa, Pisum sativum
MKLKNGLLLFFLFVECAFFKVDSKCVKGCDLALASYYIMPLVELPTIKSYMQSKIVTNSSNVLNSYNKVLVTNHGNIFSYSRINIPFPCECIGGEFLGHVFEYITKKGDTYDLIANNYYVSLTTVELLKKFNSYDPNHIPAKAKVNVTVNCSCGNSQISKDYGLFVTYPLRSTDSLEKIANESKLDEGLIQNFNPDVNFSRGSGIVFIPGRDKNGEYVPLYP

SEQ ID NO: 15595 - protein, 345 aa, Pisum sativum
MKLKNGLLLFFLFVECVFFKVDSKCVKGCDLALASYYVMPLVELPTIKNYMQSKIVTNSSNVLNSYNKVLVTNHGNIFSYSRINIPFPCECIGGEFLGHVFEYTTKKGDTYDLIANNYYVSLTTVELLKKFNSYDPNHIPAKAKVNVTVNCSCGNSQISKDYGLFVTYPLRSTDSLEKIANESKLDEGLIQNFNPDVNFSRGSGIVFVPGRDKNGEYVPLYPKTGVGKGVAIGISIAGVFAVLLFVICIYVKYFQKKEEEKTILPRVSKALSTQDGNASSSGEYETSGSSGHGTGSAAGLTGIMVAKSTEFSYQELAKATDNFSLDNKIGQGGFGAVYYAELRGE

SEQ ID NO: 15596 - protein, 343 aa, Pisum sativum
MKLKNGLLLFFLFVECVFFKVDSKCVKGCDLALASYYVMPLVELPTIKNYMQSKIVTNSSNVLNSYNKVLVTNHGNIFSYSRINIPFPCECIGGEFLGHVFEYTTKKGDTYDLIANNYYVSLTTVELLKKFNSYDPNHIPAKAKVNVTVNCSCGNSQISKDYGLFVTYPLRSTDSLEKIANESKLDEGLIQNFNPDVNFSRGSGIVFVPGRDKNGEYVPLYPKTGVGKGVAIGISIAGVFAVLLFVICIYVKYFQKKEEEKTILPRVSKALSTQDASSSGEYETSGSSGHGTGSAAGLTGIMVAKSTEFSYQELAKATDNFSLDNKIGQGGFGAVYYAELRGE

SEQ ID NO: 15597 - protein, 619 aa, Pisum sativum
MKLKNGLLLFFMFLDCIFFKVESKCVIGCDIALASYYVMPLVQLSNITTFMQSKLVTNSFEVIVRYNRDIVFSNDNLFSYFRVNIPFPCECIGGEFLGHVFEYTANEGDTYDLIANTYYASLTTVEVLKKYNSYDPNHIPVKAKVNVTVNCSCGNSQISKDYGLFITYPLRPRDTLEKIARHSKLDEGVIQSYNLGVNFSKGSGVVFFPGRDKNGEYVPLYPRTGLGKGAAAGISIAGIFALLLFVICIYIKYFQKKEEEKTKLPQVSTALSAQDGNASGSGEYETSGSSGHGTGSTAGLTGIMVAKSTEFSYQELAKATNNFSLDNKIGQGGFGAVYYAVLRGEKTAIKKMDVQASTEFLCELQVLTHVHHLNLVRLIGYCVEGSLFLVYEHIDNGNLGQYLHGIDKAPLPWSSRVQIALDSARGLEYIHEHTVPVYIHRDVKSANILIDKNLHGKVADFGLTKLIEVGNSTLHTRLVGTFGYMPPEYAQYGDVSPKIDVYAFGVVLYELISAKNAILKTGESAVESKGLVALFEEALNQIDPLEALRKLVDPRLKENYPIDSVLKMAQLGRACTRDNPLLRPSMRSLVVALMTLLSHTDDDDTFYENQSLTNLLSVR

SEQ ID NO: 15598 - protein, 617 aa, Pisum sativum
MKLKNGLLLFFMFLDCIFFKVESKCVIGCDIALASYYVMPLVQLSNITTFMQSKLVTNSFEVIVRYNRDIVFSNDNLFSYFRVNIPFPCECIGGEFLGHVFEYTANEGDTYDLIANTYYASLTTVEVLKKYNSYDPNHIPVKAKVNVTVNCSCGNSQISKDYGLFITYPLRPRDTLEKIARHSKLDEGVIQSYNLGVNFSKGSGVVFFPGRDKNGEYVPLYPRTGLGKGAAAGISIAGIFALLLFVICIYIKYFQKKEEEKTKLPQVSTALSAQDASGSGEYETSGSSGHGTGSTAGLTGIMVAKSTEFSYQELAKATNNFSLDNKIGQGGFGAVYYAVLRGEKTAIKKMDVQASTEFLCELQVLTHVHHLNLVRLIGYCVEGSLFLVYEHIDNGNLGQYLHGIDKAPLPWSSRVQIALDSARGLEYIHEHTVPVYIHRDVKSANILIDKNLHGKVADFGLTKLIEVGNSTLHTRLVGTFGYMPPEYAQYGDVSPKIDVYAFGVVLYELISAKNAILKTGESAVESKGLVALFEEALNQIDPLEALRKLVDPRLKENYPIDSVLKMAQLGRACTRDNPLLRPSMRSLVVALMTLLSHTDDDDTFYENQSLTNLLSVR

SEQ ID NO: 15599 - protein, 211 aa, Pisum sativum
MKLKNGLLLFFMFLDCIFFKVESKCVIGCDIALASYYVMPLVQLSNITTFMQSKLVTNSFEVIVRYNRDIVFSNDNLFSYFRVNIPFPCECIGGEFLGHVFEYTANEGDTYDLIANTYYASLTTVEVLKKYNSYDPNHIPVKAKVNVTVNCSCGNSQISKDYGLFITYPLRPRDTLEKIARHSKLDEGVIQSYNLGVNFSKGSGVVFFPGR

SEQ ID NO: 15600 - protein, 371 aa, Oxyrrhis marina
MAALKALEANLAKDTQANYVMAEYVWIDGFGGLRSKTKVITGVTLPATIESLKARLPVWNFDGSSTGQAPGEDSEVILKPQAVFRDPFRGGSNIMVMADCYTPAGEPIPTNTRAGASALFAKKPEEEPWFGIEQEYTLFKDGTKLGWPRSGARSMGPCVQLGFPGPQGPYYCSAGADVCFGRPISDDHMHACLYAGINISGTNAEVMPGQWEYQVGPCVGIDSGDHMWMSRYIMLRICEAHGVTVSWDPKPIPGDWNGAGCHTNYSTKAMREQDNSYETIMKPMLANMEKKHMEHIAVYGEGNDKRLTGAHETAPIDKFSYGVANRGASVRIPNDTAKHGKGYFEDRRPASNIDPYLVTGKIFQTTVLDLA

SEQ ID NO: 15601 - protein, 281 aa, Cucumis melo
TLEDGMKVAVKRGNPRSEQGLAEFRTEIEMLSKLRHRHLVSLIGYCDERSEMILVYEYMANGPLRSHLYGTDLPPLSWKQRLDICIGAARGLHYLHTGAAQSIIHRDVKTTNILLDENFVAKVADFGLSKTGPSLDQTHVSTAVKGSFGYLDPEYFRRQQLTEKSDVYSFGVVLMEVLCTRPALNPVLPREQVNIAEWAMTWQKKGMLDHIMDPNLVGKVNPASLKKFGETAEKCLAEYGVDRPSMGDVLWNLEYALQLEETSSALMEPEDNSTNQSLPSN

SEQ ID NO: 15602 - protein, 376 aa, Andropogon ternarius
ALSIAGAVQSQKLAVRAISRLQALPGGDVKLLCDTVVEHVRVLTGYDRVMVYRFHEDEHGEVVAESRRDNLEPYLGLHYPATDIPQASRFLFRQNRVRMIADCHATPVRVIQDPGLSQPLCLVGSTLRAPHGCHAQYMANMGSIASLVLAVIISSGGDDEQTGRGGISSAMKLWGLVVCHHTSPRCIPFPLRYACEFLMQAFGLQLNMELQLAHQLSEKHILRTQTLLCDMLLRDSPTGIVTQSPSIMDLVKCDGAALYYHGKYYPLGVTPTESQIKDIIEWLTVCHGDSTGLSTDNLADAGYLGAAALGDAVCGMAVAYITPSDYLFWFRSHTAKEIKWGGAKHHPEDKDDGQRMHPRSSFKAFLEVAKSRSLPW

SEQ ID NO: 15603 - protein, 376 aa, Apluda mutica
ALSIAGAVQSQKLAVRAISRLQALPGGDVKLLCDTVVEHVRELTGYDRVMVYRFHEDEHGEVVAESRRDNLEPYLGLHYPATDIPQASRFLFRQNRVRMIADCHATPVRVIQDPGLSQPLCLVGSTLRAPHGCHAQYMANMGSIASLVMAVIISSGGDDEQTGRGGISSAMKLWGLVVCHHTSPRCIPFPLRYACEFLMQAFGLQLNMELQLAHQLSEKHILRTQTLLCDMLLRDSPTGIVTQSPSIMDLVKCDGAALYYHGKYYPLGVTPTESQIKDIIEWLTVCLGDSTGLSTDSLADAGYLGAAALGDAVCGMAVAYITPSDYLFWFRSHTAKEIKWGGAKHHPEDKDDGQRMHPRSSFQAFFEVVKSRSLPW

SEQ ID NO: 15604 - protein, 376 aa, Bothriochloa odorata
ALSIAGAVQSQKLAVRAISRLQALPGGDVKLLCDTVVEHVRELTGYDRVMVYRFHEDEHGEVVAESRRDNLEPYLGLHYPATDIPQASRFLFRQNRVRMIADCRATPVRVIQDPGLSQPLCLVGSTLRAPHGCHAQYMANMGSIASLVMAVIISSGGDHEQTGRGGISSAMKLWGLVVCHHTSPRCIPFPLRYACEFLMQAFGLQLNMELQLAHQLSEKHILRTQTLLCDMLPRDSPTGIVTQSPSIMDLVKCDGAALYYHGRYYPLGVTPTESQIKDIIEWLTVCHGDSTGLSTDSLADAGYLGAAALGDAVCGMAVAYITPSDYLFWFRSHTAKEIKWGGAKHHPEDKDDGQRMHPRSSFKAFLEVVKSRSLPW

SEQ ID NO: 15605 - protein, 376 aa, Chionachne koenigii
ALSIAGAVQSQKLAVRAISRLQALPGGDVKLLCDTVVEHVRELTGYDRVMVYRFHEDEHGEVVAESRRDNLEPYLGLHYPATDIPQASRFLFRQNRVRMIADCHATPVRVVQDPGLSQPLCLVGSTLRSPHGCHAHYMANMGSIASLVMAVIISSGGDDEHTGRGGISSAMKLWGLVVCHHTSPRCIPFPLRYACEFLMQAFGLQLNMELQLAHQLSEKHILRTQTLLCDMLLRDSPTGIVTQSPSIMDLVKCDGAALYYHGKYYPLGVTPTESQIKDIIEWLTVCHGDSTGLSTDSLADAGYLGAATLGDAVCGMAVAYITPSDYLFWFRSHTAKEIKWGGAKHHPEDKDDVQRMHPRSSFKAFLEVVKSRSLPW

SEQ ID NO: 15606 - protein, 376 aa, Chrysopogon fulvus
ALSMAGAVQSQKLAVRAISRLQALPGGDVKLLCDTVVEHVRELTGYDRVMVYRFHEDEHGEVVAESRRDNLEPYLGLHYPSTDIPQASRFLFRQNRVRMIADCHATPVRVIQDPGLSQPLCLVGSTLRAPHGCHAQYMANMGSIASLVMAVIISSGGDDEQTGRGGISSAMKLWGLVVCHHTSPRCIPFPLRYACEFLMQAFGLQLNMELQLAHQLSEKHILRTQTLLCDMLLRDSPTGIVTQSPSIMDLVKCDGAALYYHGKYYPLGVTPTESQIKDIIEWLTVCHGDSTGLSTDSLADAGYLGAAALGDAVCGMAVAYITPSDYLFWFRSHTAKEIKWGGAKHHPEDKDDGQRMHPRSSFKAFLEVVKSRSLPW

SEQ ID NO: 15607 - protein, 376 aa, Chrysopogon gryllus
  misc_feature (240)..(240): Xaa can be any naturally occurring amino acid
  unsure (1)..(376): unsure at all Xaa locations
ALSIAGAVQSQKLAVRSISRLQALPGGDVKLLCDTVVEHVRELTGYDRVMVYRFHEDEHGEVVAESRRDNLEPYLGLHYPATDIPQASRFLFRQNRVRMIADCHATPVRVIQDPGLSQPLCLVGSTLRAPHGCHAQYMANMGSIASLVMAVVISSGGDDEQTGRGGISSAMKLWGLVVCHHTSPRCIPFPLRYACEFLTQAFGLHLNMELQLAHQLSEKHILRTQTLVCDMLLRDSPSGXVTQSPSIMDLVKCDGAALYYHGKYYPLGVTPTESQIKDIIEWLTVCHGDSTGLSTDSLADAGYLGAAALGDAVCGMAVAYITPSDYLFWFRSHTAKEIKWGGAKHHPEDKDDGQRMHPRSSFKAFLEVVKSRSLPW

SEQ ID NO: 15608 - protein, 376 aa, Cleistachne sorghoides
ALSIAGAVQSQKLAVRAISRLQALPGGDVKLLCDTVVEHVRELTGYDRVMVYRFHEDEHGEVVAESRRDNLEPYLGLHYPATDIPQASRFLFRQNRVRMIADCHATPVRVIQDPGLSQPLCLVGSTLRAPHGCHAQYMANMGSIASLVMAVIISGGGDDEQTGRGGISSAMKLWGLVVCHHTSPRCIPFPLRYACEFLMQAFGLQLNMELQLAHQLSEKHILRTQTLLCDMLLRDSPTGIVTQSPSIMDLVKCDGAALYYHGKYYPLGVTPTESQIKDIIEWLTVCHGDSTGLSTDSLADAGYLGAAALGDAVCGMAVAYITPSDYLFWFRSHTAKEIKWGGAKHHPEDKDDGQRMHPRSSFKAFLEVVKSRSLPW

SEQ ID NO: 15609 - protein, 376 aa, Coelorachis selloana
ALSIAGAVQSQKLAVRAISRLQALPGGDVKLLCDTVVEHVRELTGYDRVMVYRFHEDEHGEVVAESRRDNLEPYLGLHYPATDIPQASRFLFRQNRVRMIADCHATPVRVIQDPGLSQPLCLVGSTLRAPHGCHAQYMANMGSIASLVMAVIISSGGDDEQTGRGGISSSMKLWGLVVCHHTSPRCIPFPLRYACEFLMQAFGLQLNMELQLAHQLSEKHILRTQTLLCDMLLRDSPTGIVTQSPSIMDLVKCDGAALYYHGKYYPLGVTPTESQIKDIIEWLTVCHGDSTGLSTDSLADAGYLGAAALGDAVCGMAVAYITPSDYLFWFRSHTAKEIKWGGAKHHPEDKDDGQRMHPRSSFKAFLEVVKSRSLPW

SEQ ID NO: 15610 - protein, 376 aa, Coix aquatica
ALSIAGAVQSQKLAVRAISRLQALPGGDVKLLCDTVVEHVRELTGYDRVMVYRFHEDEHGEVVAESRRDNLEPYLGLHYPATDIPQASRFLFRQNRVRMIADCHATPVRVIQDPGLSQPLCLVGSTLRSPHGCHAQYMANMGSIASLVMAVIISSGGDDEQTSRGGISSAMKLWGLVVCHHTSPRCIPFPLRYACEFLMQAFGLQLNMELQLAHQLSEKHILRTQTLLCDMLLRDSPTGIVTQSPSIMDLVKCDGAALYYHGKYYPLGVTPTESQIKDIIEWLTVCHGDSTGLSTDSLADAGYLGAAALGDAVCGMAVAYITPNDYLFWFRSHTAKEIKWGGAKHHPEDKDDGQRMHPRSSFKAFLEVVKSRSLPW

SEQ ID NO: 15611 - protein, 376 aa, Cymbopogon flexuosus
ALSIAGAVQSQKLAVRAISRLQALPGGDVKLLCDTVVEHVRELTGYDRVMVYRFHEDEHGEVVAESRRDNLEPYLGSHYPATDIPQASRFLFRQNRVRMIADCHATPVRVIQDPGLSQPLCLVGSTLRAPHGCHAQYMANMGSIASLVMAVIISSGGDDEQTGRGGISSAMKLWGLVVCHHTSPRCIPFPLRYACEFLMQAFGLQLNMELQLAHQLSEKHILRTQTLLCDMLLRDSPTGIVTQSPSIMDLVKCDGAALYYHGKYYPLGVTPTESQIKDIIEWLTVCHGDSTGLSTDSLADAGYLGAAALGDAVCGMAVAYITPSDYLFWFRSHTAKEIKWGGAKHHPEDKDDGRRMHPRSSFKAFLEVVKSRSLPW

SEQ ID NO: 15612 - protein, 333 aa, Dichanthium aristatum
TGYDRVMVYRFHEDEHGEVVAESRRDNLEPYLGLHYPATDIPQASRFLFRQNRVRMIADCHATPVRVIQDPGLSQPLCSVGSTLRAPHGCHAQYMANMGSIASLVMAVIISSGGDDEQTGRGGISSSMKLWGLVVCHHTSPRCIPFPLRYACEFLMQAFGLQLNMELQLAHQLSEKHILRTQTLLCDMLLRDSPTGIVTQSPSIMDLVKCDGAALYYHGKYYPLGVTPTESQIKDIIEWLTVCHGDSTGLSTDSLADAGYLGAAALGDAVCGMAVAYITPSDYLFWFRSHTAKEIKWGGAKHHPEDKDDGQRMHPRSSFKAFLEVVKSRSLPW

SEQ ID NO: 15613 - protein, 376 aa, Elionurus muticus
ALSIAGAVQSQKLAVRAISRLQALPGGDVKLLCDTVVEHVRELTGYDRVMVYRFHEDEHGEVVAESRRDNLEPYLGLHYPATDIPQAPRFLFRQNRVRMIADCHATSVRVIQDPGLSQPLCLVGSTLRAPHGCHAQYMANMGSIASLVMAVIISSGGDDEQTGRGGISSSMKLWGLVVCHHTSPRCIPFPLRYACEFLMQAFGLQLNMELQLAHQLSEKHILRTQTLLCDMLLRDSPTGIVTQSPSIMDLVKCDGAALYYHGKYYPLGITPTESQIKDIIEWLTVCHGDSTGLSTDSLADAGYLGAAALGDAVCGMAVAYITPSDYLFWFRSHTAKEIKWGGAKHHPEDKDDGQRMHPRSSFKAFLEVVKSRTLPW

SEQ ID NO: 15614 - protein, 376 aa, Heteropogon contortus
ALSIAGAVQSQKLAVRAISRLQALPGGDVKLLCDTVVEHVRELTGYDRVMVYRFHEDEHGEVVAESRRDNLEPYLGLHYPATDIPQASRFLFRQNRVRMIADCHATPVRVIQDPGLSQPLCLVGSTLRAPHGCHAQYMANMGSIASLVMAVIISSGGEGEQTARGGISSAMKLWGLVVCHHTSPRCIPFPLRYACEFLMQAFGLQLNMELQLAHQLSEKHILRTQTLLCDMLLRDSPTGIVTQSPSIMDLVKCDGAALYYHGKYYPLGVTPTEAQIKDIIEWLTVCHGDSTGLSTDSLADAGYLGAVALGDAVCGMAVAYITPSDYLFWFRSHTAKEIKWGGAKHHPEDKDDGQRMHPRSSFKAFLEVVKSRSLPW

SEQ ID NO: 15615 - protein, 376 aa, Hyparrhenia hirta
ALSIAGAVQSQKLAVRAISRLQALPGGDVKLLCGTVVEHVRELTGYDRVMVYKFHEDEHGEVVAESKRDNLEPYLGLHYPATDIPQASRFLFRQNRVRMIADCHATPVRVIQDPGLSQPLCLVGSTLRAPHGCHAQYMANMGSIASLVMAVIISSGGDDEQTGRGGISSAMKLWGLVVCHHSSPRCIPFPLRYACEFLMQAFGLQLNMELQLAHQLSEKHILRTQTLLCDMLLRDSPTGIVTQSPSIMDLVKCDGAALYYHGKYYPLGVTPTESQIKDIIEWLTVCHGDSTGLSTDNLADAGYLGAAVLGDAVCGMAVAYITPSDYLFWFRSHTAKEIKWGGAKHHPEDKDDGQRMHPRSSFKAFLEVVKSRSLPW

SEQ ID NO: 15616 - protein, 376 aa, Ischaemum afrum
  misc_feature (261)..(261): Xaa can be any naturally occurring amino acid
  unsure (1)..(376): unsure at all Xaa locations
ALSIAGAVQSQKLAVRAISRLQALPGGDVKLLCDTVVEHVRELTGYDRVMVYRFHEDEHGEVVAESRRDSLEPYLGLHYPATDIPQASRFLFRQNRVRMIADCHATPVRVVQDPGLSQPLCLVGSTLRAPHGCHAQYMANMGSIASLVMAVIISSGGDDEQTGRGGISSAMKLWGLVVCHHTSPRCIPFPLRYACEFLMQAFGLQLNMELQLAHQLSEKHILRTQTLLCDMLLRDSPTGIVTQSPSIMDLVKCDGAALYYXGKYYPLGVTPTESQIKDIIEWLTVCHGDSTGLSTDSLADAGYLGAAALGDAVCGMAVAYITPSDYLFWFRSHTAKEIKWGGAKHHPEDKDDGQRMHPRSSFKAFLEVVKSRSLPW

SEQ ID NO: 15617 - protein, 323 aa, Microstegium nudum
ALSIAGAVQSQKLAVRAISRLQALPGGDVKLLCDTVVEHVRELTGYDRVMVYRFHEDEHGEVVAESRRDNLEPYLGLHYPATDIPQASRFLFRQNRVRMIADCHATPVRVIQDPGLSQPLCLVGSTLRAPHGCHAQYMANMGSIASLVMAVIISSGGDDEQTGRGGISSAMKLWGLVVCHHTSPRCIPFPLRYACEFLMQAFGLQLNMELQLAHQLSEKHILRTQTLLCDMLLRDSPTGIVTQSPSIMDLVKCDGAALYYHGKYYPLGVTPTESQIKDIIEWLTVCHGDSTGLSTDSLADAGYLGAAALGDAVCGMAVAYITP

SEQ ID NO: 15618 - protein, 373 aa, Paspalum simplex
ALFVAGGLQAHKLAVRAISRLQALPGGDVKLLCDTVVELVRDLTGYDRVMVYRFHEDEHGEVVAESRRENLEPYLGLHYPATDIPQASRFLFRQNRVRMIDDCHATPVRVIQDPGLSQPLCLVGSTLRAPHGCHAQYMATWVQLHRLLWQSSFGGDDEQTRGGISSAMKLWGLVVCHHTSPRFIPFSLRYACEFLMQAFGLQLNMELQLARQLSEKHILRTQTLLCDMLLRDSPTGIVTQSPSIMDLVKCDGAALYYHGKYYPWGVTPTESQIKDIIEWLTVCHGDSTGLSTDSLADAGYLGAAALGDAVCGMAVAYITPSDYLFWFRSHTAKEIKWGGAKHHPEDKDDGQRMHPRSSFKAFLEVVKSRSLPW

SEQ ID NO: 15619 - protein, 333 aa, Phacelurus digitatus
TGYDRVMVYRFHEDEHGEVVAESRRDNLEPYLGLHYPATDIPQASRFLFRQNRVRMIADCHATPVRVIQDPGLSQPLCLVGSTLRAPHGCHAQYMANMGSIASLVMAVIISSGGDDEQTGRGGISSAMKLWGLVVCHHTSPRCIPFPLRYACEFLMQAFGLQLNMELQLAHQLSEKHILRTQTLLCDMLLRDSPTGIVTQSPSIMDLVKCDGAALYYHGKYYPLGVTPTESQIKDIIEWLTVCHGDSTGLSTDSLADAGYLGAAALGDAVCGMAVAYITPSGYLFWFRSHTAKEIKWGGAKHHPEDKDDGQRMHPRSSFKAFLEVVKSRSLPW

SEQ ID NO: 15620 - protein, 376 aa, Saccharum officinarum
  misc_feature (131)..(147): Xaa can be any naturally occurring amino acid
  unsure (1)..(376): unsure at all Xaa locations
ALSIAGAVQSQKLAVRAISRLQALPGGDVKLLCDTVVEHVRELTGYDRVMVYRFHEDEHGEVVAESRRDNLEPYLGLHYPATDIPQASRFLFRQNRVRMIANCHATPVRVIQDPGLLQPLCLVGSTLRAPXXXXXXXXXXXXXXXXXVMAVIISSGGDDEQTGRGGISSAMKLWGLVVCHHTSPRCIPLPLRYACEFLMQAFGLQLNMELQLAHQLSEKHILRTQTLLCDMLLRDSPTGIVTQSPSIMDLVKCDGAALYYHGKYYPLGVTPTESQIKDIIEWLTVCHGDSTGLSTDSLADASYLGAAALGDAVCGMAVAYITPSDYLFWFRSHTAKEIKWGGAKHHPEDKDDGQRMHPRSSFKAFLEVVKSRSLPW

SEQ ID NO: 15621 - protein, 332 aa, Schizachyrium scoparium
GYDRVMVYRFHEDEHGEVVAESKRDNLDPYLGLHYPATDIPQASRFLFRQNRVRMIADCHATPVRVIQDPGLSQPLCLVGSTLRAPHGCHAQYMANMGSIASLVMAVIISSGGDDEQTGRGGISSAMKLWGLVVCHHTSPRCIPFPLRYACEFLMQAFGLQLNMELQLAHQLSEKHILRTQTLLCDMLLRDSPTGIVTQSPSIMDLVKCDGAALYYHGKYYPLGITPTESQIKDIIEWLTVCHGDSTGLSTDSLADAGYLGAAALGDAVCGMAVAYITPSDYLFWFRSHTAKEIKWGGAKHHPEDKDDGQRMHPRSSFKAFLEVVKSRSLPW

SEQ ID NO: 15622 - protein, 376 aa, Tripsacum dactyloides
ALSIAGAVQSQKLAVRAISRLQALPGGDVKLLCDTVVEHVRELTGYDRVMVYRFHEDEHGEVVAESRRDNLEPYLGLHYPATDIPQASRFLFRQNRVRMIADCHATPVRVIQDPGLSQPLCLVGSTLRAPHGCHAQYMANMGSIASLVMAVIISSGGDDEQTGRGGISSAMKLWGLVVCHHTSPRCIPFPLRYACEFLMQAFGLQLNMELQLAHQLSEKHILRTQTLLCDMLLRDSPTGIVTQSPSIMDLVKCDGAALYYHGKYYPLGVTPTESQIKDIIEWLTVCHGDSTGLSTDSLADAGYLGAAALGDAVCGMAVAYITPSDYLFWFRSHTAKEIKWGGAKHHPEDKDDGQRMHPRSSFKAFLEVVKSRSLPW

SEQ ID NO: 15623 - protein, 376 aa, Tristachya superba
ALSIAGAVQSQKLAVRAISRLQALPGGDVKLLCDTVVEHVRELTGYDRVMVYRFHEDEHGEVVAECRRDNLEPYLGLHYPATDIPQASRFLSRQNRVRMIADCHATPVRVIQDPGLSQPLCLVGSTLRAPHGCHAQYMANMGSIASLVMAVIISSGGDDEQTARGGISSSMKLWGLVVCHHTSPRFIPFPLRYACEFLMQAFGLQLNMELQLAHQLSEKHILRTQTLLCDMLLRDSPTGIVTQSPSIMDLVKCDGAALYYHGKYYPLGVTPTESQIKDIIEWLTVCHGDSTGLSTDSLADAGYHGATALGDAVCGMAVTYITPSDYLFWFRSHTAKEIKWGGAKHHPEDKDDGQRMHPRSSFKAFLEVVKSRSLPW

SEQ ID NO: 15624 - protein, 376 aa, Urochloa mutica
ALSIAGAVQSQKLAVRAISRLQALPGGDVKLLCDTVVEHVRELTGYDRVMVYRFHEDEHGEVVAECRRDNLEPYLGLHYPATDIPQASRFLFRQNRVRMIADCHATPVRVIQDPGLSQPLCLVGSTLRAPHGCHAQYMANMGSIASLVMAVIISSGGDDEQTARGGISSSMKLWGLVVCHHTSPRFIPFPLRYACEFLMQAFGLQLNMELQLAHQLSEKHILRTQTLLCDMLLRDSPTGIVTQSPSIMDLVKCDGAALYYHGKYYPLGVTPTESQIKDIIEWLTVCHGDSTGLSTDSLADAGYHGATALGDAVCGMAVAYITPSDYLFWFRSHTAKEIKWGGAKHHPEDKDDGQRMHPRSSFKAFLEVVKSRSLPW

SEQ ID NO: 15625 - protein, 226 aa, Saccharomyces pastorianus
PRVIDENVSGDILIKWTYKQTNKRHYGPQDFEVLRLLGKGTFGQVYQVKKKDTQRIYAMKVLSKKVIVKKNEIAHTIGERNILVTTASKSSPFIVGLKFSFQTPADLYLVTDYMSGGELFWHLQKEGRFSEDRAKFYIAELVLALEHLHDNDIVYRDLKPENILLDANGYIALCDFGLSKADLKDRTNTFCGTTEYLAPELLLDETGYTKMVDFWSLGVLIFEMCG

SEQ ID NO: 15626 - protein, 784 aa, Oryza sativa
MTPARRMPPVIGRNGVAYESPSAQLPLTQADMLDSHHLQQALQQQYFDQIPVTTTAAADSGDNMLHGRADAGGLVDEFESKSCSENVDGAGDGLSGDDQDPNQRPRKKRYHRHTQHQIQEMEAFFKECPHPDDKQRKELSRELGLEPLQVKFWFQNKRTQMKNQHERHENAQLRAENDKLRAENMRYKEALSSASCPNCGGPAALGEMSFDEHHLRVENARLRDEIDRISGIAAKHVGKPPIVSFSVLSSPLAVAAARSPLDLAGAYGVVTPGLDMFGGAGDLLRGVHPLDADKPMIVELAVAAMDELVQMAQLDEPLWSSSSEPAAALLDEEEYARMFPRGLGPKQYGLKSEASRHGAVVIMTHSNLVEILMDVNQFATVFSSIVSRASTHEVLSTGVAGNYNGALQVMSMEFQVPSPLVPTRESYFVRYCKNNSDGTWAVVDVSLDSLRPSPVQKCRRRPSGCLIQEMPNGYSKVTWVEHVEVDDSSVHNIYKPLVNSGLAFGAKRWVGTLDRQCERLASAMASNIPNGDLGVITSVEGRKSMLKLAERMVASFCGGVTASVAHQWTTLSGSGAEDVRVMTRKSVDDPGRPPGIVLNAATSFWLPVPPAAVFDFLRDETSRSEWDILSNGGAVQEMAHIANGRDHGNSVSLLRVNSANSNQSNMLILQESCTDASGSYVVYAPVDIVAMNVVLNGGDPDYVALLPSGFAILPDGPSGNAQAAVGENGSGSGGGSLLTVAFQILVDSVPTAKLSLGSVATVNSLIACTVERIKAAVCRDSNPQ

SEQ ID NO: 15627 - protein, 660 aa, Sporobolus stapfianus
MVGMRVPYGGSYTNNGSNESQPPGAAPEVPAMVEVHKVVPPPPQSTASKLKTRLKETLFPDDPFRGFQGQPARVQWVLAVKYLFPILDWLPAYSLSLFKSDLIAGLTIASLAIPQGISYAKLANLPPLIGLYSSFVPPLVYAVLGSSRDLAVGPVSISSLIMGPCCASRQPHCGADAVPAARLHATLFAGIFQASLGILRLGFIIDFLSKATLVGFMAGAAIIVSLQQLKALLGIVHFTTEMGIVPVMASVFHHTKEWSWQTILMGVCFLVFLLVARHVSIRWPRLFWVSACAPLVSVIISTLVVFLFKAQNHGISIIGQLKCGLNRPSWDKTNIDTTYLGLTMKTGLVTGIISLTEGIAVGRTFASLKEYQIDGNKEMMAIGLMNVVGSCTSCYVTTGAFSRSPVNHNAGCKTAMSNVIMALTVMVTLLFLMPLFVYTPNVVLGAIIIAAVIGLIDIPAVYHIWKMDKMDFLVCVCAFAGVLFISVQEGLAIAVGISVFRVLLQITRPKITVQGNIMGTDIYRNLHQYKDAQRIPGFLILATEAPINFANSNYLNERIKRWIEEESSAQTKQTELRFVILDLSAVPAIDTSGVAFLIDIKKSIEKRGLELVLVNPTGEGHGKNTASERGTQAFQVGIACILTTGEAVASLSALAKMASP

SEQ ID NO: 15628 - protein, 165 aa, Sorghum bicolor
MAGELRRGPWTVEEDLLLVNYVAAHGEGRWNSLARSAGLKRTGKSCRLRWLNYLRPDLRRGNITPQEQLLILELHSRWGNRWSKIAQHLPGRTDNEIKNYWRTRVQKHAKQLKCDVNSQQFKDVMRYLWMPRLVERIQAAAANASAGGASPQPGAAADTPLFSLW

SEQ ID NO: 15629 - protein, 183 aa, Sorghum bicolor
MTERDRRELSSEEESASAAAGDLHRGPWSVEEDMLLVNYVAAHGEGRWNALARCAGLRRTGKSCRLRWLNYLRPDLRRGNITAQEQLLILELHSRWGNRWSKIAQHLPGRTDNEIKNYWRTRVQKHARQLNCDVNSQQFKDLMRYIWMPRLLERIGSDDSGDGAVVIDAAVHADATAVADPTL

SEQ ID NO: 15630 - protein, 667 aa, Schizosaccharomyces pombe
MSSPSENHLLGPKTSFIDNRTSTSRPLHEIPSYQSLARRSSTWKRANIPQQKPSLVRRINYYIPVLHWLPNYSLRNIIWDVLAGCSTACLSVPIALSFAQTFLGVPPIYILTGTAIGPILYCLFTACPLISIGPEAGMCLLIAENIHQRVLSKADVPQETAILVTGLIAFIAGIINLAAGLFRLGFLDALVSPVLLRGCILSISMIIMINQGSVFFGFSGVKYKGSDFPIDKLMFLIRNMSKANIYTTILSCITISLLIGCRNLKSKLSAKYPRIVSIPDAVIILLLGSFLSKKFDWHSNYGIAILGEIKTTILLPKLPLPEKNKLHFITQSLQTGVMCSFLAFIDTVIAVKAISLQTNNLIRSNRELISLGAANIGSSLFCGLPICGGYLRTKCNIMSGARTQVATIACSVLILLATFFIMPVFSTVPTCMLASMVVSLGVSLFADAAVEIFKLARIRVWWELGIIFSIATCTMMFGLETGIIFGLSITVMQIIRHSTRSRIMFRSPTSNGTAEFILEDAASTLSHRTNPSSTAVESAPRILVVRIPEPLFFANVSQLEDRLNRLEKYGHPRMHPGETPYRRIEDIEVVVFDMVGVSSIDSSALFAFQRILKEYVEHQVEVHLVSLDPQVLHIFEKHGLLDLIGGYDHVQDSIKKVDALCDIELGV

SEQ ID NO: 15631 - protein, 564 aa, Schizosaccharomyces pombe
MDTNQVNYIIWRYLKECGYSHTKFAFERETGIQNLDKQWGSTCQVGALVEILQKGLQYVELEKHYVDNHSSNEEASKTSIDGESLVNENPCKLPFYLTVPHICETTLTKADSTNGFCEHNNSNDHQLKILQDKGSGSPSSPVMPFKDKIEKRDIDITMADESNVEKDPARPIAVYNSSPVTEITEIKQVTFTGGEDIKSDFFKVIPTKHPVTCADWRPLLQENYHVYEFSIGMTNATLASVSICEEQNDFKAKTDYCLQSSFDNQDITGVAWNNSGSFLAYAFFSGVIEIYDSHGSQILSFHNNKGPVLSLKWSGTDTYLAAGSADGTITLFDQLKQTQYSIDTLASSVLDIEWISFDEFVTSDVEGSLRVYKVDGKAPVSTVSHAHDNSIVALRYNLRISLLLTASSDTTVKLWSRGDAGAFECLHVFSFSSPVNCIDWNLREGTPILAVASNSIVSMYNAISLQQLAVFMRHTAPVSALSFSHNGRYLATGDTSGGVCIWSCKTAKLFKELGSDNSELIAVTNVLPEEQVNFLRWSFDDKDLLIGKQKKEIICCCDFLHDSL

SEQ ID NO: 15632 - protein, 421 aa, Schizosaccharomyces pombe
MNENQKSFDSDKSESEDEQKNGRVKVRSRKTDDNEGYTWEGEYQRSWDIVQEDAEGSLVGVIAGLIQSGKRKRLLRDTTPLQRGIIRHMVLVLDLSNSMEERDFHHKRFDLQIKYASEFVLEFFEQNPISQLSIIGVMDGIAHRITDLHGNPQSHIQKLKSLRDCSGNFSLQNALEMARASLSHIASHGTREVLIIFGSILSSDPGDIFKTIDALVHDSIRVRIVGLAAEVAICKEICNKTNSSTKNAYGVVISEQHFRELLLESTIPPATDSAKTTDASLVMMGFPSKVVEQLPSLCACHSIPSRGGFHCPRCKAKVCTLPIECPSCSLVLILSTHLARSYHHLFPLKNWSEIPWSANPKSTHCFACQLPFPKPPVSPFDESTSSMRYACPSCKNHFCLDCDVFAHEQLHECYGCQCSGN

SEQ ID NO: 15633 - protein, 390 aa, Schizosaccharomyces pombe
MKLIQKNIEKNGSGWITMCPEEPEDMWHLYNILQVGDQLKASTVRRVVKVGATGSTSGSRVVMKLRILVENMDFDTKAAQLHIKGRTTEYHPEVKMGSYHTLDLELHRNFTLYKNEWDAFALDRVDAACNPSRNAEIGAVVLDEGLANICLITDYMTILRQRIDQVIPRKRRGDSSAYQKGLDKFYDSVFQSINSEFDFDKLKVVILASPGFVARGLYDYIFSMAVKLDLKQIVKSKNKFVILHSSTGHIHSLNEILKDPAVESKLADTKYVQEIRVLNKFYDVMNEDDRKAWYGPNHVLKAFELGAIGELLISDSLFRSSDIATRKKWVSLVEGVKEINCPVYIFSSLHESGKQLDLLSGIAAILTYPVDEEDISEDEEDEESQNFEHS

SEQ ID NO: 15634 - protein, 261 aa, Schizosaccharomyces pombe
MAKSRFEYVKQYERLDRLLPETYIVIRIDGKGFHKFTKKHDFEKPNDLRCLNLMNAAARVVMSEFTDIVLAYGDSDEYSFVWSKSTELYERRESKLVSHVCSLFTSAFVFNWPKHFDIPLLSLPSFDGRAVLYPNMKVLRDYLHWRQVDCHINNLYNTTFWMLILKGGFTNTQAEEYLKGTVSAEKHEILFSKFGINYNFEPEIYKKGSIWIREPIDQEWHQQDKKFSVKQKKKMVLSILHVSLIDDDFWTSRPFLEVLLQ

SEQ ID NO: 15635 - protein, 576 aa, Schizosaccharomyces pombe
MQPQEVDLMENSTMRNGARVLPPEAISKRHIGPYIIRETLGEGSFGKVKLATHYKTQQKVALKFISRQLLKKSDMHMRVEREISYLKLLRHPHIIKLYDVITTPTDIVMVIEYAGGELFDYIVEKKRMTEDEGRRFFQQIICAIEYCHRHKIVHRDLKPENLLLDDNLNVKIADFGLSNIMTDGNFLKTSCGSPNYAAPEVINGKLYAGPEVDVWSCGIVLYVMLVGRLPFDDEFIPNLFKKVNSCVYVMPDFLSPGAQSLIRRMIVADPMQRITIQEIRRDPWFNVNLPDYLRPMEEVQGSYADSRIVSKLGEAMGFSEDYIVEALRSDENNEVKEAYNLLHENQVIQEKSHLSKSKRVDSFLSVSPPAFSEYTSELQKKSKQELIDPTLEGPRWTVSDPPTYAKQTIDSNICVLVPTAEKNKLEMRTLADAASAVDTSQSTRKKSRRNKWHFGVRCRGDAPEILLAVYRALQRAGAQFTVPKPVNGKYRSDMYTIKSRWEIPHCKREGKNTYAYIELQLYEVMPGCFMLDVKSNGYKDIYSHPERTADHGMDDLKSSFPFLDLCAMLVCKLFSA

SEQ ID NO: 15636 - protein, 497 aa, Schizosaccharomyces pombe
MSSTTDATPTPSGVNGGDSMTVNLNQFYNNGDVAWILTSTALVFIMIPGVGFFYSGLARRRSAISMLFLSMMSVAIVAFQWFFWGYSLTFSHEGGPYIGSLANFGLRQTLGRPSSGASSVPDILFCVFQGMFAAITPALAIGAAADRGRMFPCMVFMFLWTSIVYDPIAFWTWNPNGWLNKLGSYDFAGGSPVHISSGMAALAYSIVIGKRCDHGTTKYRPHNVPHVVLGTVFLWFGWFGFNGGSSAAANMRGVMAVVVTHLAASVGGIVWCVIDFAKNRHWSVVGFCEGAVAGLVAITPGSGFVPPWAAVVIGALGAVFCYAATYLKKIIRVDDALDIFAEHGVGGMVGNILTALFAADYIEALDGSGTAYTGGWITHHYIQLGYQLADTVSCAAYSFAVSCALLFVMNYIPGLSLRVSREDEVLGLDKIELGESAYYYKDSTDEPPPITTSGVQYTSPTVSDSASNEKEQEHRAQNEAQKEEEYRAESEAQAPAI

SEQ ID NO: 15637 - protein, 321 aa, Schizosaccharomyces pombe
MASNSIKIFAGNSHPELAEKVARRIGLSLGKVAVVQYSNRETSVTIGESVRDEDVFILQTGCGSINDHLMELLIMINACRSASARRITAIIPCFPYARQDKKDKSRAPITARLVANMLQTAGCNHIITMDLHASQIQGFFNVPVDNLYAEPSVLRYIRENIDTTVNPTVIVSPDAGGAKRATALADRLDLDFALIHKERQKANEVSRMVLVGDVRDKLAILVDDMADTCGTLGLAAKTLKDNGAKAVYAIVTHGILSGKAIKVINESALEKVIVTNTIPHDDKRSLCSKIETIDISGVLAECIRRIHHGESVSVLFSVAPA

SEQ ID NO: 15638 - protein, 215 aa, Populus tremula
CKNFMVMRGHKNAVLDLHGTADGSQIISASPDKTVRAWDVETGKQIKKMAEHSSFVNSCCPSRRGPPLVVSGSDDGTSKLWDLRQKGAIQTFPDKYQITAVSFSDASDKIFTGGIDNDVKVWDIRKGEVTMTLEGHQDMITSMQLSPDGSYLLTNGMDNKLCIWDMRPYAPQNRCVKIFEGHQHNFEKNLLKCSWSPDGSKVTAGSADRMVYIWD

SEQ ID NO: 15639 - protein, 215 aa, Populus tremula
CKNFMVMRGHKNAVLDLHGTADGSQIISASPDKTVRAWDVETGKQIKKMAEHSSFVNSCCPSRRGPPLVVSGSDDGTSKLWDLRQKGAIQTFPDKYQITAVSFSDASDKIFTGGIDNDVKVWDIRKGEVTMTLEGHQDMITSMQLSPDGSYLLTNGMDNKLCIWDMRPYAPQNRCVKIFEGHQHNFEKHLLKCSWSPDGSKVTAGSADRMVYIWD

SEQ ID NO: 15640 - protein, 215 aa, Populus tremula
CKNFMVMRGHKNAVLDLHWTADGSQIISASPDKTVRAWDVETGKQIKKMAEHSSFVNSCCPSRRGPPLVVSGSDDGTSKLWDLRQKGAIQTFPDKYQITAVSFSDASDKIFTGGIDNDVKVWDIRKGEVTMTLEGHQDMITSMQLSPDGSYLLTNGMDNKLCIWDMRPYAPQNRCVKIFEGHQHNFEKNLLKCSWSPDGSKVTAGSADRMVYIWD

SEQ ID NO: 15641 - protein, 215 aa, Populus tremula
CKNFMVMRGHKNAVLDLHWTADGSQIISASPDKTVRAWDVDTGKQIKKMAEHSSFVNSCCPSRRGPPLVVSGSDDGTSKLWDLRQKGAIQTFPDKYQITAVSFSDASDKIFTGGIDNDVKVWDIRKGEVTMTLEGHQDMITSMQLSPDGSYLLTDGMDNKLCIWDMRPYAPQNRRVKIFEGHQHNFEKHLLKCSWSPDGSEVTAGSADRMVYIWD

SEQ ID NO: 15642 - protein, 215 aa, Populus tremula
CKNFMVMRGHKNAVLDLHWTADGSQIISASPDKTVRAWDVDTGKQIKKMAEHSSFVNSCCPSRRGPPLVVSGSDDGTSKLWDLRQKGAIQTFPDKYQITAVSFSDASDKIFTGGIDNDVKVWDIRKGEVTMTLEGHQDMITSMQLSPDGSYLLTNGMDNKLCIWDMRPYAPQNRCVKIFEGHQHNFEKNLLKCSWSPDGSKVTAGSADRMVYIWD

SEQ ID NO: 15643 - protein, 215 aa, Populus tremula
CKNFMVMRGHKNAVLDLHWTADGSQIISASPDKTVRAWDVETGKQIKKMAEHSSFVNSCCPSRRGPPLVVSGSDDGTSKLWDLRHKGAIQTFPDKYQITAVSFSDASDKIFTGGIDNDVKVWDIRKGEVTMTLEGHQDMITSMQLSPDGSYLLTNGMDNKLCIWDMRPYAPQNRCVKIFEGHQHNFEKNLLKCSWSPDGSKVTAGSADRMVYIWD

SEQ ID NO: 15644 - protein, 215 aa, Populus tremula
CKNFMVMRGHKNAVLDLHWTADGSQIISASPDKTVRAWDVETGKQIKKMAEHSSFVNSCCPSRRGPPLVVSGSDDGTSKLWDLRQKGAIQTFPDKYQITAVSFSDASDKIFTGGIYNDVKVWDIRKGEVTMTLEGHQDMITSMQLSPDGSYLLTDGMDNKLCIWDMRPYAPQNRRVKIFEGHQHNFEKNLLKCSWSPDGSEVTAGSADRMVYIWD

SEQ ID NO: 15645 - protein, 215 aa, Populus tremula
CKNFMVMRGHKNAVLDLHWTADGSQIISASPDKTVRAWDVETGKQIKKMAEHSSFVNSCCPSRRGPPLVVSGSDDGTSKLWDLRQKGAIQTFPDKYQITAVSFSDASDKIFTGGIDNDVKVWDIRKGEVTMTLEGHQDMITSMQLSPDGSYLLTNGMDNKLCIWDMRPYAPQNRCVKIFEGHQHNFEKHLLKCSWSPDGSKVTAGSADRMVYIWD

SEQ ID NO: 15646 - protein, 215 aa, Populus tremula
CKNFMVMRGHKNAVLDLHWTADGSQIISASPDKTVRAWDVDTGKQIKKMAEHSSFVNSCCPSRRGPPLVVSGSDDGTSKLWDLRQKGAIQTFPDKYQITAVSFSDASDKIFTGGIYNDVKVWDIRKGEVTMTLEGHQDMITSMQLSPDGSYLLTNGMDNKLCIWDMRPYAPQNRCVKIFEGHQHNFEKNLLKCSWSPDGSKVTAGSADRMVYIWD

SEQ ID NO: 15647 - protein, 215 aa, Populus tremula
CKNFMVMRGHKNAVLDLHWTADGSQIISASPDKTVRAWDVETGKQIKKMAEHSSFVNSCCPSRRGPPLVVSGSDDGTSKLWDLRQKGAIQTFPDKYQITAVSFSDASDKIFTGGIDNDVKVWDIRKGEVTMTLEGHQDMITSMQLSPDGSYLLTDGMDNKLCIWDMRPYAPQNRRVKIFEGHQHNFEKNLLKCSWSPDGSEVTAGSADRMVYIWD

SEQ ID NO: 15648 - protein, 215 aa, Populus tremula
CKNFMVMRGHKNAVLDLHWTADGSQIISASPDKTVRAWDVETGKQIKKMAEHSSFVNSCCPSRRGPPLVVSGSDDGTSKLWDLRQKGAIQTFPDKYQITAVSFSDASDKIFTGGIDNDVKVWDIRKGEVTMTLEGHQDMITSMQLSPDGSYLLTNGMDNKLCIWDMRPYAPQNRCVKIFEGHQHNFEKNLLKCSWSPDGSKVTAGSADRMVYIWG

SEQ ID NO: 15649 - protein, 339 aa, Populus tremula
SWVNTVITMASKDPERLKYLSTLADQKTTAVPIAPGQQVLKIANYVVRVKLGTPGQQMFMVLDTSNDAAWVPCSGCTGCSSTTFLPNASTTLGSLDCSEAQCSQVRGFSCPATGSSACLFNQSYGGDSSLAATLVQDAITLANDVIPGFTFGCINAVSGGSIPPQGLLGLGRGPISLISQAGAMYSGVFSYCLPSFKSYYFSGSLKLGPVGQPKSIRTTPLLRNPHRPSLYYVNLTGVSVGRIKVPIPSEQLVFDPNTGAGTIIDSGTVITRFVQPVYFAIRDEFRKQVNGPISSLGAFDTCFAATNEAEAPAVTLHFEGLNLVLPMENSLIHSSSGSV

SEQ ID NO: 15650 - protein, 339 aa, Populus tremula
SWVNTVITMASKDPERLKYLSTLADQKTTAVPIAPGQQVLKIANYVVRVKLGTPGQQMFMVLDTSNDAAWVPCSGCTGCSSTTFLPNASTTLGSLDCSEAQCSQVRGFSCPATGSSACLFNQSYGGDSSLAATLVQDAITLANDVIPGFTFGCINAVSGGSIPPQGLLGLGRGPISLISQAGAMYSGVFSYCLPSFKSYYFSGSLKLGPVGQPKSIRTTPLLRNPHRPSLYYVNLTGVSVGRIKVPIPSEQLVFDPNTGAGTIIDSGTVITRFVQPVYFAIRDEFRKQVNGPISSLGAFDTCFAETNEAEAPAVTLHFEGLNLVLPMENSLIHSSSGSV

SEQ ID NO: 15651 - protein, 173 aa, Populus tremula
LLLLPFFLTTLLLYCQPISTVASPDPTFSPSNGTDYIRSGCGATLYPEICYASLARYASAVQNSPGRLARVAIKVSLLRTSHMAAYVSNLSRQSDFGADNRAAAALHDCFSNLGDAVDEIRGSLKQMRQVGAAGPSTESFQFQMGNVQTWMSAALTDEDTCTDGFEDVGDGEV

SEQ ID NO: 15652 - protein, 173 aa, Populus tremula
LLLLPFFLTTLLLYCQPISTVASPDPTFSPSNGTDYIRSGCGATLYPEICYASLARYASAVQNSPGRLARVAIKVSLLRTSHMAAYVSNLSRQSDFGADNRAAAALHDCFSTLGDAVDEIRGSLKQMRQVGAAGPSTESFQFQMGNVQTWMSAALTDEDTCTDGFEDVGDGEV

SEQ ID NO: 15653 - protein, 173 aa, Populus tremula
LLLLPFFLTTLLLYCQPISTVASPDPTFSPSNGTDYIRSGCGATLYPEICYASLSRYASAVQNSPGRLARVAIKVSLLRTSHMAAYVSNLSRQSDFGADNRAAAALHDCFSNLGDAVDEIRGSLKQMRQVGAAGPSTESFQFQMGNVQTWMSAALTDEDTCTDGFEDVGDGEV

SEQ ID NO: 15654 - protein, 173 aa, Populus tremula
LLLLPFFLTTLLLYCQPISTVASPDPTFSPSNGTDYIRSGCGATLYPEICYASLARYASAVQNSPGRLARGAIKVSLLRTSHMAAYVSNLSRQSDFGADNRAAAALHDCFSNLGDAVDEIRGSLKQMRQVGAAGPSTESFQFQMGNVQTWMSAALTDEDTCTDGFEDVGDGEV

SEQ ID NO: 15655 - protein, 190 aa, Populus tremula
RISRRFHSRQVSPRLPACNYSIGTITYELNVLRSRGPRRMHCMMHSIPMSSIEEGGTVPTLTSLTETFGGRFPHLSTSKGKESVSDISSPSPSQSPVLTQGSEEPLVLKNKAPRWHEQLQCWCLNFRGRVTVASVKNFQLVAAVESFHNVSSADQERVILQFGKIGKDIFTMDYRYPLSAFQAFAICLSS

SEQ ID NO: 15656 - protein, 190 aa, Populus tremula
RISRRFHSRQVSPRLPACNYSIGTITYELNVLRSRGPRRMHCMMHSIPMSSIEEGGTVPTLTSLTETFGGQFPHLSTSKGKESVSDISSPSPSQSPVLTQGSEEPLVLKNKAPRWHEQLQCWCLNFRGRVTVASVKNFQLVAAVESFHNVSSADQERVILQFGKIGKDIFTMDYRYPLSAFQAFAICLSS

SEQ ID NO: 15657 - protein, 190 aa, Populus tremula
RISRRFHSRQVSPRLPACNYSIGTITYELNVLRSRGPRRMHCMMHSIPMSSIEEGGTVPTLTSLTETFGGRFPHLSTSKGKESVSDISSPSPSQSPVLTQGSEEPLVLKNKAPRWHEQLQCWCLNFRGRVTVASVKNFQLVAAAESFHNVSSADQERVILQFGKIGKDIFTMDYRYPLSAFQAFAICLSS

SEQ ID NO: 15658 - protein, 190 aa, Populus tremula
RISRRFHSRQVSPRLPACNYSIGTITYELNVLRSRGPRRMHCMMHSIPMSSIEEGGTVPTLTSLTETFGGRFPYLSTSKGKESVSDISSPSPSQSPVLTQGSEEPLVLKNKAPRWHEQLQCWCLNFRGRVTVASVKNFQLVAAVESFHNVSSADQERVILQFGKIGKDIFTMDYRYPLSAFQAFAICLSS

SEQ ID NO: 15659 - protein, 505 aa, Schizosaccharomyces pombe
MFTDYPNDINCESPRMSDLDGFCQNAFSDLNSLNQQVFKANYAVRGALAILADEIQDDLLENPSSYPFSEIVYANIGNPQQMGQSPITFVRQVLSLCQYPTLLDHAEEKWFQNLFPTDVVQRSKMLLKESGSLGAYSASQGIPLVRRHVADFIRARDGFDCEPSDIYLTSGASHAARLIMTLIIARPTDGVMVPAPQYPLYGAQIDLMSGSMVSYSLSEENNWDIDFDQFKKSFDEASKKGINVRLCVVINPGNPTGACISENSMEKVLRFAKAKGIVLLADEVYQNNIYQNKFHSFRRKLGELREKEPDNHWDQVSLISVNSVSKGQFGECGQRGGYLDVVNIPEPAKDQILKLATIDICPPVAGQLLVDMLVNPPKPGDPSYDLFIKEVDEIHEALRLQCRQLYEGTKRMKRVSCLEPHGAMYLHPSVSLPEKLITTAKAQKIQPDEFYAIELLKRSGICVVPGSGFGQPEGDYHIRITFLAKGTEYIERFVKAHNEIMDLYE

SEQ ID NO: 15660 - protein, 557 aa, Schizosaccharomyces pombe
MCGILAVHHVAEDIEAFKPKALHLSKQLRHRGPDWSGKAIRNQTILCHERLAIVGVESGAQPLVSDDGKLVLTVNGEIYNHLKLRENLKGNYKFKTYSDCEVILYLYREHGPACANMLDGMFSWVLYDQDKDKVVAARDPIGITTLYQGFSSDSPDTAYFASELKALHPVCDKIIAFPPGHYYDSETKQTVRYFKPSWWDENKIPSNPVDYKLLRETLEASVRKRLMAEVPYGVLLSGGLDSSLIASIAARETEKLANSTSQSEEARTITAWPKLHSFAIGLPGSPDLLAARKVADFLHTFHHEHTFTIDEGLDALRDVIYHLETYDVTTIRASTPMYLLSRKIKAQGVKMVLSGEGSDEIFGGYLYFGNAPSREAFHSECVRRVKNLHLSDCLRANKSTMAWGLEARVPFLDKDFLEVALNIDPEEKMYINGRKEKYILRKAFDTTHDSSLQPYLPQDILWRQKEQFSDGVGYSWIDALKDTAELCISDDEFALPRREWGDDIPTTKEAFWYRKLFDEIFPRQCADTVMRWVPKAEWGCPEDPSGRYQAGHVAALK

SEQ ID NO: 15661 - protein, 322 aa, Schizosaccharomyces pombe
MATSSAAAAASTPVNANTITETKNSTFFFDFMMGGVSAAVSKTAAAPIERVKLLIQNQDEMIRAGRLSHRYKGIGECFKRTAAEEGVISLWRGNTANVLRYFPTQALNFAFKDKFKKMFGYKKERDGYAKWFAGNLASGGAAGAASLLFVYSLDYARTRLANDAKSAKKGGERQFNGLVDVYRKTYRSDGLRGLYRGFGPSVVGIVVYRGLYFGMYDTLKPVVLVGPLEGNFLASFLLGWAVTTGSGVASYPLDTIRRRMMMTSGEAVKYSSSFECGRQILAKEGARSFFKGAGANILRGVAGAGVLSIYDQVQLLMFGKKF

SEQ ID NO: 15662 - protein, 669 aa, Schizosaccharomyces pombe
MTVLAPLRRLHTRAAFSSYGREIALQKRFLNLNSCSAVRRYGTGFSNNLRIKKLKNAFGVVRANSTKSTSTVTTASPIKYDSSFVGKTGGEIFHDMMLKHNVKHVFGYPGGAILPVFDAIYRSPHFEFILPRHEQAAGHAAQAYSRVTKKPGVVLVTSGPGATNVITPIADALADGTPLVVFSGQVATSAIGSDAFQEADMVGISRSCTKWNVMVKDVADLPRRIDEAFEIATSGRPGPVLVDLPKDVTASVLKEPIPILSSVPSMNRRMKEVLEEGSKNVTAKIDRVANLLKLAKKPVIFCGHGVLANPECPTLLRKFSERLQIPVTTSLLGLGAVDERSDLSLHMLGMHGSGYANMAMQEADLILALGVRFDDRVTGNVSLFAPQARLAAAEERGGIIHFDISPKNIGKVVQPTEAIEGDVYESLKLLDSATKNIKIPSRFDWLSQIQTWKERFPFTFTRSAPGELVKPQEVIQELDKQTSDIKDKVTITTGVGAHQMWAATFYRWTKPSSLVTSGGLGTMGFGLPAAIGASVAAPKDIVIDIDGDASFSMTGMELATVRQFDIPVKILILNNEEQGMVTQWQNLFYEKRYSHTHQKNPNFVKLADAMGIKALRVEKREDLAKKMKEFLSTKGPVLMEVLVAQKEHVYPFVPGGKALHQFILHESLS

SEQ ID NO: 15663 - protein, 334 aa, Schizosaccharomyces pombe
MNPYEPVEGLYVNAKQYHRILKRREARAKLEERLRGVQTTKKPYLHESRHKHAMRRPRGPGGRFLTADKVSKLRAQEAAEAAANGGSTGDDVNATNANDATVPATVSSEVTHTSEGYADSNDSRPSSISNSSESPAPINSATASMSPANNTSGNNITSPNVRGELDMSGNIAMSGGPTNTASTSGPVPHDMTVLPQTDSNTSNLMSSGSQLGSFATASTNGNNSTTTTTSSAAHPGSFHKGTNDYSSTLAGNEHSAFPGLDVYHDDSVSAGAAFIPHNPMDSIDHLDVNDPTATGLPVLPASDIDPLNLTGNTQDSMIIGQQTYPSHGSSGTMK

SEQ ID NO: 15664 - protein, 341 aa, Schizosaccharomyces pombe
MKNLVVFGTESHPKLTESICEHLCLDIGRVELSKFSNGETSVRIKQSVRGCDVYIVSPASGQVNDHLMELLIMISACKTASAKKVTAVLPVFPYSRQPDQKFSFSGAPLSDLQDAVVPCKKQTGYHPWIAQSGTLVADLLMCSGADHIITMDLHDPQFQGFFDIPVDNLFGRPLLKHYISLNIPNYHNAVIVSPDAGGAKRATAIADALGLDFALIHKNRRHEYGTSLMLVGDVQNKVAILIDDLIDTAYTLVRAAEFVKEHGASKIYALVTHCVLSGDAIERVKLSCIDKLIVTNTAPQTITPSGCFDIIDVAPTFAEAIRRIHNGESISILYDHNQVWV

SEQ ID NO: 15665 - protein, 785 aa, Schizosaccharomyces pombe
MIGSINESPIEEHMNDSPSTKEKADSVDISDYIVSHSDDSLSKDIKKDTKSFLDVEHGEISTVDEFEEDSPYPEVRAAVPPTDDPSMPCNTIRMWTIGLIYSTVGAAVNMFFSLRNPTVTLSVLISELLAYPALQIWDLIFPDREFRIGRLKFNFKPGPFNVKEHALIVVMSSVSFGNAYSTDIILAQRVHYKQRFGFGYEICLTLATQLIGYGLAGLSRRLLVRPASMLWPVNLVQCTLIKTLHRKDLRNAVANGWRISPFRFFLYVFIASFIWNWFPSYIFQALSLFAWVTWIRPNSPTVNQIFGESTGISILPMTFDWNQISAYILSPLMAPADALMNILLGVILFFWIVTPALNFTNTWYGDYLPISSSGIIDHFGNSYNVTRILTKDATFDLDAYQNYSPIFMSTTYALAFGLSFASITSVIFHVILYHGKEIYDRLRDPPAPDIHEKLMKAYDEVPFYWYLSVFLAFFGMMMGTIYGWKTETPWWVIIVGVIFSAVWFIPIGIVQAITNIQLGLNVFTEFIVGYMYPGRPLAMMIFKTVGYITMTQGLAFAADLKFGHYMKLPPRIMFYTQMIATIWSCFVQIGVLDWALGNIDNVCQADQPDNYTCPNATVFFNSSVIWGVIGPKRMFSGKNTYTGLQYFWLAGVLGTILFWALWKKWPQKWWGQLNGPLIFGGTGYIPPATPVNYLAWSGIGLFFNYYLKKIFADWWQKYNFTLSAALDTGTQLSVIILFFCLQLPMVNFPDWWGNDGAFNTLDATGAAVRKLVNESAGEFFGPAEW

SEQ ID NO: 15666 - protein, 726 aa, Schizosaccharomyces pombe
MDPIRFGLSRVPFAHCYNKRVIFRANYLVPLTWLKNNVAYKSTNTLLLPTPNAEYYSTSKLSSQVNVSLNSLSQKASSGSKIYPFKNSFPLPFSRSILPIRSLAFLKLCVRHNSTVPSKDEQAQDISKINTNGTLQTPNKKVNVFRLFTLARGQGWNFFIAGSLLLVSSGVTMSIPYIVGKILDAGSSGDSSVTHIMGIPSGTFYIGLLGLFFLGSACNFGRIITLRLLSERIVSRLRARLFAKCMSLDGAFFDFHKHGDLISRLTTDSSIVGKSLSMYLSDGLRSSVSAIAGIGMMLYVSMRLTGYMSLIVPPIALGAFFYGEYVRKLSRTTQDALGDLTRVSEEKLANVRTTQAFLGERQEVNRYNDYIRNLFVLAKREAFASGIFFGSTGFLGNATVIAILALGGRMVAAGDITVGQLSSFLLYTVYAGGSIVGLSGCFTDIMKGLGAASRLFELLDAKPKIAPTVGIPVPVTVGKAILSFRNVGFAYPTRPSASIFDNLSFDIHPGTNVAIVAPSGGGKSTISQLLLRFYAPSSGKILADGVDISTYNVHQWRSHFGLVGQEPVLFSGTIGENIAYGKSNASQEEIEDAAKRANCSFVLSFPEKWSTQVGTRGLQLSGGQKQRIAIARALLRNPAFLILDEATSALDGEAEVMVDKTIQSLMHNRSMTTITIAHKLATIRRADQIIVVGDGKVLEQGSFERLSRPGTNFYKLMRWQLGKVEP

SEQ ID NO: 15667 - protein, 877 aa, Schizosaccharomyces pombe
MSFIKKIKHYFADPADLPQDEAPDSVPGLVPPPSNFVPVYPEPTYSDTVSKKGTIVRVVRHTASKLTKHGDSSQSLSTLPNNDISVGEYVEPLPSVPGWLKQNIFSHFGTRLLHYLRSLFPIMNWLPRYNWNWLVYDFIAGITVGCVVVPQGMSYAKVATLPAQYGLYSSFVGVAIYCIFATSKDVSIGPVAVMSLVTSKVIANVQAKDPNYDAAQIGTTLALLAGAITCGLGLLRLGFIIEFIPVPAVAGFTTGSALNIMAGQVSSLMGYKSRVHTNAATYRVIIQTLQNLPHTKVDAAFGLVSLFILYLVRYTCQHLIKRYTKFQRVFFLTNVLRSAVIIIVGTAISYGVCKHRRENPPISILGTVPSGFRDMGVPVISRKLCADLASELPVSVIVLLLEHISIAKSFGRVNDYKVIPDQELIAMGATNLIGVFFHAYPATGSFSRSAINAKSGVRTPLGGIFTAGVVVLALYCLTGAFYYIPNAVLSAVIIHSVFDLIIPWRQTLLFWRMQPLEALIFICAVFVSVFSSIENGIYTAVCLSAALLLFRIAKPSGSFLGILKIANKFDDDENSIDVVRDIYVPLNQKGMNPNLTVRDPPAGVLIFRLQESFTYPNAGHVNSMLTSKAKTVTRRGNANIYKKASDRPWNDPAPRKKKNAPEVEDTRPLLRAIILDFSAVNHIDTTGVQALVDTRKELEIYAGDEVEFHFTDINNDWIKRTLVAAGFGKARDATKYTSRSIEVGSAAPLRDIETPMAPGNSRIVMPSSVRVRPFDEEEAIESSIPAIVSEDGADSDTISVSDDKDKKVEGHRPSQDPTFSHHEYYPVISTTYPFFHVDVTSAVVDIQYRHVLDVNYKPKIVTNEVENENIEHSDGAA

SEQ ID NO: 15668 - protein, 498 aa, Schizosaccharomyces pombe
MGSLMLSRARCLLELRSALFFVKRESQDINNVRQSLGVYGRSFMTSSRMDKPSMSNKPREQMYGLGNMTAVQEPIPENSLKTVTLDQAQTAASTVTGLHPIYMDFQATSPLDYRVLDSMLPFFTGIYGNPHSRTHAYGWEAEKAVENARQEIASVINADPREIIFTSGATESNNAILKGVARFYKSRKKHLVSVQTEHKCVLDSLRALQEEGFEVTFLPVQTNGLINLDELRDAIRPDTVCVSVMAVNNEIGVCQPLEEIGKICRQKKVFFHSDAAQGYGKIDIDVNRMNIDLMSISAHKIYGPKGIGAAYVRRRPRVRLEPLISGGGQERGLRSGTLAPSQVVGFGTAARICKEEMKYDYAHISKLSQRLIDGLLAIPYTSLNGDPKSRYPGCVNISFNYVEGESLLMGLKNIALSSGSACTSASLEPSYVLRAIGQSDENAHSSIRFGIGRFTTEAEIDYAIENVSRQVSFLRNMSPLWDLVQEGVDLSTIEWSQH

SEQ ID NO: 15669 - protein, 539 aa, Schizosaccharomyces pombe
MTSNRSTRSSTKREEVSKNGVEKRELDESDVMKNGKKPVKRAKVSSLPKPVRVPGSAKRINKIPELPTERLNVYVFGSGSMNELGMGEEEMDVVYRPRLNPILSTDKVGVVDLAVGGMHSAALSHDGRVYTWGVNDDYALGRLTKDQKDENGDKVDNDLLEGTPSKVEGALSHLRVTKVICSDNLTAAITDNGCCFTWGTFRCSDGVLGYSDSQKRTAEPTQMRLPEICQLATGTDHIIALTTTGKVYTWGNGQQFQLGRRMLERRRLQGLTPQPLALKNIISVGAGSYHSFAIDNKGRVYAWGLNITRQCGIEVEDEEEGAVITKPTLVDALEGYNVKSITGGEHHTLALLEDGRVLAWGRDDRHQLGIPDNALPETVVKDEKGNNYYLSTPTIIPGLTNVIQVVCGTHHNLAVTSDGKVYSWGSAENYEVGQGDNDEDVAVPTLVRSKAIKEVAIRVAGAGGQFSIIAGIPNASEEPVANGIKSEPENEKKLKTEETSKTDDSPVTDAKPDVTSNGEPSTATSESKDSVLEPSSTTA

SEQ ID NO: 15670 - protein, 117 aa, Schizosaccharomyces pombe
MSESPSANISDADKSAITPTTGDTSQQDVKPSTEHINLKVVGQDNNEVFFKIKKTTEFSKLMKIYCARQGKSMNSLRFLVDGERIRPDQTPAELDMEDGDQIEAVLEQLGGCTHLCL

SEQ ID NO: 15671 - protein, 678 aa, Schizosaccharomyces pombe
MKTYEYVLLVIILILSLCYFIYNNFLNKPKAPERRVVATDSIVELMEAEKLTAAVFFGSQTGTAEDFAYRFSTEAKANFNLTNMVFDLENYDLTDLDNFDRSKLLVFFLATYGEGEPTDNAEAFLQLLEGDDTVFSSGKGIEDTPFEGIRYAIFGLGNHTYEYYNAMAKKVDAAMTRLGATRVGNLGLGDDAAGMLEEDYLQWKDDTLPEIGKLFHLQEVHKEYNPMFEVIEKPEISNTSSTVFLGEPSRQQLKGNVASKAPRSQANPFFSSPVRSLELFKSGSRNCLHLELDIADSGMRYQTGDYASICPMNPSQAVDDLLEVLGLKEKRDTVIIVKPIDTLDKAPVLSPTTYDTVFRYYYEICGIVSRQLLSFIAPFAPTPESKQELEKLGNDYDYFKKNVVDLHLNLAQVLRRVSPDAPFTKLPFSMLLENMAHMKPRYYSISSSSVVHPDKVHVTAVVDKKEWTDKNHIFYGLTTNYLLAHCRHMHGEKIPHPNGLEYTLEGPRKNWTGKIPMFVKKSTFRLAPPDVPIIMVGPGTGVAPFRGFVMERANLASKGVKVAKTLLFYGCQYSDKDFLYKEEWQQYKDVLKDSFELITAFSREQDHKIYVQHRLLEHSDTIAKLVEEGAAFYICGDADHMAKDVVNALASILTTVDVDGMKAVKALRDDNRFFEDTW

SEQ ID NO: 15672 - protein, 157 aa, Schizosaccharomyces pombe
MAEEEHVDFEGGEAGASLTFPMQCSALRKNGHVVIKGRPCKIVDMSTSKTGKHGHAKVHIVALDIFNGRKYEDMSPSTHNMDVPVVKRDEYQLVNIDDGYLNLMTTDGTTKDDVRLPEGELGNEIEEGFEEGKDLIITVVSAMGEEIALACRDAPSA

SEQ ID NO: 15673 - protein, 583 aa, Schizosaccharomyces pombe
MGQGESIPSRQIQRDASMQAVSSESENINDSDRQNSGFSRLWNRFPSLQRVLGLRRAKRHRNDEGNSENGNRDRTTERSAFRSRYRGSLLNRNSPSLRSLSPPATPATPRSRIEGESQTSAIPQTDRLILENHQQEFERAARRFRSSIAALRNLNTQNNQSTLASNHEDENVSSSGGQEMQDHGSVNNLESPGTAIGRLPVRSVTSLADSNMEDYTRAVMNYINNSENTQQASVSPEESQLVMLSRFVFSVASGWVSVLMNSSSAHQSNNLEFPSSISGNVESGNVAFDEFLSLLHAGNLVQAMNAETNPRTAELIANAVDLEEESGPINLFRTFRFDNLHRNHEGQEVIPIIIVGIRSLRNSGSDEDDQPSADSPTLMHPSDLISSLVNSQNQTTSVSDNTGPNENVNEAEHISEDEQASTATDVNGISDNNGSSTQQAPETRNNNSQTDHQLPRSWAIYVREAFVPQNHPVLRAPSLFTDSPTYEDMLLLNSIIGIEKPPVASQKDLEKAGGVFPFSGTDERCLVCLSNFELNDECRRLKQCNHFFHRECIDQWLTSSQNSCPLCRTKGVASASTPSSPKP

SEQ ID NO: 15674 - protein, 376 aa, Schizosaccharomyces pombe
MSASRTNVNVAIVGTGNIGGELLNQIKGFNENASTNGTTSFNVVAISSMEGHYVSKDYQPINLSEWKNLTSQNQGAYSLDALVDFLAKSPLPAILVDNTASEAIAQSYPKFLSKKINIATPNKKAFSASNDVYQNIIKASKESGALLMHEASVGAGLPIISTLKELIATGDEIIKIEGIFSGTLSYIFNVWSPNGKKGTASFSDIVKIAKQNGYTEPDPRDDLNGMDVARKVTILSRIAGVHVESASSFPVKSLIPEPLKSAVNAEEFLAGLPNFDSEFASMREEAEKEGKVVRFVGEADVANKTTLVKLEKYDASHPFANLQSSDNIISFTTKRYHTRPLVVIGAGAGAAVTAAGVLGDMIKIMSQVRASDAPSA

SEQ ID NO: 15675 - protein, 275 aa, Schizosaccharomyces pombe [sequence omitted]

SEQ ID NO: 15676 - protein, 905 aa, Schizosaccharomyces pombe
MADYPFTDKAAKTLSDAYSIAQSYGHSQLTPIHIAAALLSDSDSNGTTLLRTIVDKAGGDGQKFERSVTSRLVRLPAQDPPPEQVTLSPESAKLLRNAHELQKTQKDSYIAQDHFIAVFTKDDTLKSLLAEAGVTPKAFEFAVNNVRGNKRIDSKNAEEGFDALNKFTVDLTELARNGQLDPVIGREDEIRRTIRVLSRRTKNNPVLIGEPGVGKTSIAEGLARRIIDDDVPANLSNCKLLSLDVGSLVAGSKFRGEFEERIKSVLKEVEESETPIILFVDEMHLLMGAGSGGEGGMDAANLLKPMLARGKLHCIGATTLAEYKKYIEKDAAFERRFQIILVKEPSIEDTISILRGLKEKYEVHHGVTISDRALVTAAHLASRYLTSRRLPDSAIDLVDEAAAAVRVTRESQPEVLDNLERKLRQLRVEIRALEREKDEASKERLKAARKEAEQVEEETRPIREKYELEKSRGSELQDAKRRLDELKAKAEDAERRNDFTLAADLKYYGIPDLQKRIEYLEQQKRKADAEAIANAQPGSEPLLIDVVGPDQINEIVARWTGIPVTRLKTTEKERLLNMEKVLSKQVIGQNEAVTAVANAIRLSRAGLSDPNQPIASFLFCGPSGTGKTLLTKALASFMFDDENAMIRIDMSEYMEKHSVSRLIGAPPGYVGHEAGGQLTEQLRRRPYSVILFDEIEKAAPEVLTVLLQVLDDGRITSGQGQVVDAKNAVIIMTSNLGAEYLTTDNESDDGKIDSTTREMVMNSIRGFFRPEFLNRISSIVIFNRLRRVDIRNIVENRILEVQKRLQSNHRSIKIEVSDEAKDLLGSAGYSPAYGARPLNRVIQNQVLNPMAVLILNGQLRDKETAHVVVQNGKIFVKPNHEANANGSADIDMDGIDDDVNDEELE

SEQ ID NO: 15677 - protein, 519 aa, Schizosaccharomyces pombe
MSIAKNIENDPSKGWVVQKFGGTSVGKFPIKIAVDVAKEYLSTKRVALVCSARSTDTKAEGTTTRLIRATEAALRPAVGSVHDLVRIIETDHVQAARDFIQDVGIQDELIDAFHADCVELEQYLNAIRVLSEVSPRTRDLVIGMGERLSCRFMAAVLKDQGIDSEFIDMSHIIDEQREWRNLDASFYAYLASQLASKVTAVGNKVPVVTGFFGMVPGGLLSQIGRGYTDFCAALLAVGLNADELQIWKEVDGIFTADPRKVPTARLLPLITPEEAAELTYYGSEVIHPFTMSQVVHARIPIRIKNVGNPRGKGTVIFPDTISRHGSATPPHPPKIMPDDISASLANKGATAVTIKDTIMVINIQSNRKISAHGFLASIFAILDKYKLAVDLITTSEVHVSMALYEESDDGNMHEAFVELRRLGTLDILHGLAILSLVGKHMRNTTGYAGRMFCKLAEAQINIEMISQGASEINISCVIDEKMAVKALNVIHKELLEPLALHEVPSQASMLVEKPWLYSA

SEQ ID NO: 15678 - protein, 244 aa, Schizosaccharomyces pombe
MSVEITFVEQFQEILQNGKEQIILLNFYAPWAAPCKQMNQVFDQFAKDTKNAVFLKIEAEKFSDIAESFDVNAVPLFVLIHGAKVLARISGANPQKLKAAIDEYIQPLISQISSTNASVETQVNSVQTTNTTSNTSKAPNGLDSELNERLSTLTNAHNVMLFLKGTPSEPACGFSRKLVGLLREQNVQYGFFNILADDSVRQGLKVFSDWPTFPQLYIKGEFVGGLDIVSEMIENGELQEMLPN

SEQ ID NO: 15679 - protein, 395 aa, Schizosaccharomyces pombe
MVNTEVYIVSAVRTPMGSFGGSFASLPATKLGSIAIKGALERVNIKPSDVDEVFMGNVVSANLGQNPARQCALGAGLPRSIVCTTVNKVCASGMKATILGAQTIMTGNAEIVVAGGTESMSNAPYYAPKNRFGAKYGNVELVDGLLRDGLSDAYDGLPMGNAAELCAEEHSIDRASQDAFAISSYKRAQNAQATKAFEQEIVPVEVPVGRGKPNKLVTEDEEPKNLNEDKLKSVRAVFKSNGTVTAANASTLNDGASALVLMSAAKVKELGLKPLAKIIGWGEAAQDPERFTTSPSLAIPKALKHAGIEASQVDYYEINEAFSVVAVANTKILGLDPERVNINGGGVAMGHPLGSSGSRIICTLAYILAQKDAKIGVAAVCNGGGGASSIVIERV

SEQ ID NO: 15680 - protein, 526 aa, Schizosaccharomyces pombe
MARETEFNDKSPSSTDDGMSQSHFSDKLKNLFHFRRNRAATVSTSVRNDQRDNDSDDSTFDINVNQLNELDLNDSSDQLDSRPSLRRVSSAPDSHKGVEAPPPRPLINMSNIRKAQVKILKNPGNYIFGRTEYGKRTYSGNSTKISRVEVTPHSFEKIRLLGQGDVGKVYLVRQKSNHRLFAMKILNKREMIKRHKVNRVLAEQEILTKSKHPFIVTLYHSFQSRDYLYLCMEYCAGGEFFRALHSLPKHILPEKDACFYAAEVTAALEYLHLMGFIYRDLKPENILLHQSGHIMLSDFDLSKPISIVTHPTVVLPKHSTFSQEKPALDTNSYFSNFRTNSFVGTEEYIAPEVIRSCGHTVAVDWWTLGIFIYEILYGTTPFKGKNRHATFSNILYSDVSFPEYHGAPNVSSTCKSLIRRLLVKDESKRCGSVAGASDIKQHPFFRHIQWALLRSMKPPIIPKIEDGMEAVEPSDNDNEEEDFLNSQYLISANLPAVDMHSSTPVNEQSNPFDSFSSVTLHHAGDE

SEQ ID NO: 15681 - protein, 811 aa, Schizosaccharomyces pombe
MDQDYEELRAKFTKIGLNETTVKDTLKNKKLSSSLNKVIEETNVGSSGCDRTIGNLLFTLANASLKQKDPKSNAHEAFIASKIVSGDLKTNLQVNAAITYCKDKDTIDESEFDKETGVGVVLTPEQIEQLVGDYVAENKSKILEQRYQLLNPSASALRQHALLKWAPQLEVKQTLDRKFLELLGPKTEQDAAAGKKKGAKAKNSKQKTVDSGKAKEQKIVSEQSKKYNMFEEGFLAKLHKPGGNTQLIPERMKEHLQATGGGVVTRFPPEPNGYLHIGHSKAIAVNFGFARYHNGVCYLRFDDTNPEAEEERYFESIKDLVAWLGFQPYKITYSSDYFDKLYELAEELIKRDKAYVCHCTDAEIKKARGGEERGPRYACVHRDRPIEESLLEFRNMRDGKYQPKEAILRMKQDLSDGNPQMWDLIAYRVLNSPHPRTGDKWKIYPTYDFTHCLVDSFENISHSLCTTEFILSRVSYEWLCNALEVYCPAQREYGRLNVVGTLMSKRKIMKLVKEGYVHGWNDPRLYTLVALRRRGVPPGAILEFVSEVGVTTAVSNIEVARFENCVRKFLENSVPRLMFLPDPIKVTLENLDDSYREQIEIPFNPKDPSMGSRSAFLTKHIYIDRSDFREEASSDFFRLTLGQPVGLFRASHPVVAKRVVKNDEGEPIEIIAEYDASSSKKPKTFIQWVSRDKESNSPVLIAETRLFNNLFKCDNPAALKEQELAAQLNPESEVVLKNSIIEPGIYDLIKSAPWPKTDSSAGVDKAENPESVRFQAMRVGYFCLDEDTKKPNHLVLNRIVSLREDSAKNKN

SEQ ID NO: 15682 - protein, 413 aa, Schizosaccharomyces pombe
MFTYQKIIQLALLLSGVCGALASIDTDSHLSPKVLEKLRPTENLAYEDDSLDDDTWRSKRWEFDYQYSGISTFAHLPHVRCLVEQSEDFDIAIIGVPFDTAVSHRPGARFGPKGIRSASSRQMAIRGFNPSLNVNPYESWAKILDCGDIPVSSYDNQLAVRQMTEGYIDLLSRKATASPASNNLKTAGLAKDGIFHPRLITLGGDHSIGLASLRALGHFYGNVSVIHFDSHLDTWNPKRYYPSYWHSDRADFTHGTMFWMASKEGLINNGTSIHAGLRTRLSGTDYYDYEEDNRVGFTFIEAQEIDEIGVNGIVERIKQVVGDTLVYLSIDIDVVDPGLAPGTGTPETGGWTTREMKSILRKLDGHLNLVGAEVVEVSPPYDDRAESTSLAASDFIFEILSSMVKHPLYDVKK

SEQ ID NO: 15683 - protein, 594 aa, Schizosaccharomyces pombe
MTKDAESTMTVGTYLAQRLVEIGIKNHFVVPGDYNLRLLDFLEYYPGLSEIGCCNELNCAFAAEGYARSNGIACAVVTYSVGALTAFDGIGGAYAENLPVILVSGSPNTNDLSSGHLLHHTLGTHDFEYQMEIAKKLTCAAVAIKRAEDAPVMIDHAIRQAILQHKPVYIEIPTNMANQPCPVPGPISAVISPEISDKESLEKATDIAAELISKKEKPILLAGPKLRAAGAESAFVKLAEALNCAAFIMPAAKGFYSEEHKNYAGVYWGEVSSSETTKAVYESSDLVIGAGVLFNDYSTVGWRAAPNPNILLNSDYTSVSIPGYVFSRVYMAEFLELLAKKVSKKPATLEAYNKARPQTVVPKAAEPKAALNRVEVMRQIQGLVDSNTTLYAETGDSWFNGLQMKLPAGAKFEVEMQWGHIGWSVPSAMGYAVAAPERRTIVMVGDGSFQLTGQEISQMIRHKLPVLIFLLNNRGYTIEIQIHDGPYNRIQNWDFAAFCESLNGETGKAKGLHAKTGEELTSAIKVALQNKEGPTLIECAIDTDDCTQELVDWGKAVAPPTPVLLPLITRLKRTLFGKNMLHLDYKNYLDIRNT

SEQ ID NO: 15684 - protein, 394 aa, Schizosaccharomyces pombe
MALQSLFLILLAGAAQLAQAHPKIFEQSRANAVETFDDAFPGDGETQADSVFSGIATFGRLPYWKCLNDKSQSFDIAFLGAPFDTGTSYRPGARFGPSGIREGSRRLNLYGGYNVPMETNPFNNWAKIVDCGDIPLTSYDNAVAIKQIENGHFELLTRKPTSYSEKDGYALDGSVLPRVITLGGDHTIVLPILRSVSRAYGPVSIIHFDSHLDSWKPKVFGGGKSSVGSINHGTYFYHASQEGLVSNDSNIHAGIRTTLSGLSDYDNDADCGFEIIEAREIDTIGIDAIIKRIRDRVGDGIAYLSIDIDVLDPAYAPATGTPESAGWTTRELRTILRGLDGIKLVGADIVEVAPAYDFAEVTTLAAADILFEVMSIMVKTPVYKEQAKQQSRFY

SEQ ID NO: 15685 - protein, 614 aa, Schizosaccharomyces pombe
MASVEDATKVQEMLDALKAEYNALAHHSFASKARGNDYESSMIQSQIQEIEAFRKTVDDMYEKQKSIRETYEKDINKLKRELEELGVEANTASYRNRGERSELAASNNQVTHIDQEHPSQTKSTSQPPSNHLPAFQQIPPIHQSAYPQNNVAEVLMPPIPPSVEASSGQNFNQGIASQNPAISTSNLPSTTPLYIPPVNYGANQVSQQPNPQLPGVSNYYNPSATSKPAVNVQPPRIPTKATPSAEPSMTASANAGSISQAGPDGEYQGREQIAPVSDTEAARKTTSQSWYVTYNPACKRVFNINLVHTLEHPSVVCCVKFSNNGKYLATGCNQAANVFDVQTGKKLFTLHEESPDPSRDLYVRTIAFSPDGKYLVTGTEDRQIKLWDLSTQKVRYVFSGHEQDIYSLDFSHNGRFIVSGSGDRTARLWDVETGQCILKLEIENGVTAIAISPNDQFIAVGSLDQIIRVWSVSGTLVERLEGHKESVYSIAFSPDSSILLSGSLDKTIKVWELQATRSVGLSAIKPEGICKATYTGHTDFVLSVAVSPDSRWGLSGSKDRSMQFWDLQTGQSYLTCQGHKNSVISVCFSPDGRQFASGSGDLRARIWSIDPASP

SEQ ID NO: 15686 - protein, 586 aa, Schizosaccharomyces pombe
MITVRQFTFTIFKFQFMATSNVSSRVNELLEAVKKEFEDICQKTKTVEAQKDDFEYKAMISAQINEMALMKQTVMDLEMQQSKVKDRYEEEITSLKAQLEARRKEIASGVVPQSSKTKHGRNSVSFGKYGNAGPFNSDNSSKPLILNNGSSGGTPKNLRSPAIDSDGTVLAPIQTSNVDLGSQYYSSPHVRPAVGATMAGSAMRTFPSNLPLGHPPPPSDSANSSVTPIAAPLVVNGKVSGNPPYPAEIIPTSNVPNREEKDWTVTSNVPNKEPPISVQLLHTLEHTSVICYVRFSADGKFLATGCNRAAMVFNVETGKLITLLQEESSKREGDLYVRSVAFSPDGKYLATGVEDQQIRIWDIAQKRVYRLLTGHEQEIYSLDFSKDGKTLVSGSGDRTVCLWDVEAGEQKLILHTDDGVTTVMFSPDGQFIAAGSLDKVIRIWTSSGTLVEQLHGHEESVYSVAFSPDGKYLVSGSLDNTIKLWELQCVSNVAPSMYKEGGICKQTFTGHKDFILSVTVSPDGKWIISGSKDRTIQFWSPDSPHSQLTLQGHNNSVISVAVSPNGHCFATGSGDLRARIWSYEDL

SEQ ID NO: 15687 - protein, 772 aa, Schizosaccharomyces pombe
MKFYIDDLPILFPYPRIYPEQYQYMCDLKHSLDAGGIALLEMPSGTGKTISLLSLIVSYQQHYPEHRKLIYCSRTMSEIDKALAELKRLMAYRTSQLGYEEPFLGLGLTSRKNLCLHPSVRREKNGNVVDARCRSLTAGFVREQRLAGMDVPTCEFHDNLEDLEPHSLISNGVWTLDDITEYGEKTTRCPYFTVRRMLPFCNVIIYSYHYLLDPKIAERVSRELSKDCIVVFDEAHNIDNVCIESLSIDLTESSLRKASKSILSLEQKVNEVKQSDSKKLQDEYQKLVRGLQDANAANDEDQFMANPVLPEDVLKEAVPGNIRRAEHFIAFLKRFVEYLKTRMKVLHVIAETPTSFLQHVKDITFIDKKPLRFCAERLTSLVRALQISLVEDFHSLQQVVAFATLVATYERGFILILEPFETENATVPNPILRFSCLDASIAIKPVFERFRSVIITSGTLSPLDMYPKMLQFNTVMQESYGMSLARNCFLPMVVTRGSDQVAISSKFEARNDPSVVRNYGNILVEFSKITPDGLVAFFPSYLYLESIVSSWQSMGILDEVWKYKLILVETPDPHETTLALETYRAACSNGRGAVLLSVARGKVSEGVDFDHHYGRAVIMFGIPYQYTESRVLKARLEFLRDTYQIREADFLTFDAMRHAAQCLGRVLRGKDDHGIMVLADKRYGRSDKRTKLPKWIQQYITEGATNLSTDMSLALAKKFLRTMAQPFTASDQEGISWWSLDDLLIHQKKALKSAAIEQSKHEDEMDIDVVET

SEQ ID NO: 15688 - protein, 566 aa, Schizosaccharomyces pombe
MNELHDGESSEEGRINVEDHLEEAKKDDTGHWKHSGTAKPSKFRAFIRLHFKDSRKFAFSRKKEKELTSEDSDAANQSPSGAPESQTEEESDRKIDGTGSSAEGGDGSGTDSISVIKKSFFKSGRKKKDVPKSRNVSRSNGADTSVQREKLKDIFSPHGKEKELAHIKKTVATRARTYSSNSIKICDVEVGPSSFEKVFLLGKGDVGRVYLVREKKSGKFYAMKVLSKQEMIKRNKSKRAFAEQHILATSNHPFIVTLYHSFQSDEYLYLCMEYCMGGEFFRALQRRPGRCLSENEAKFYIAEVTAALEYLHLMGFIYRDLKPENILLHESGHIMLSDFDLSKQSNSAGAPTVIQARNAPSAQNAYALDTKSCIADFRTNSFVGTEEYIAPEVIKGCGHTSAVDWWTLGILFYEMLYATTPFKGKNRNMTFSNILHKDVIFPEYADAPSISSLCKNLIRKLLVKDENDRLGSQAGAADVKLHPFFKNVQWALLRHTEPPIIPKLAPIDEKGNPNISHLKESKSLDITHSPQNTQTVEVPLSNLSGADHGDDPFESFNSVTVHHEWD

SEQ ID NO: 15689 - protein, 432 aa, Schizosaccharomyces pombe
MSNPDCLSKAISLVKTAIDNDNAEQYPDAYKYYQSALDYFMMALKYEKNEKSKEIIRSKVIEYLDRAEKLKVYLQEKNNQISSKSRVSNGNVEGSNSPTANEALDSDAKKLRSALTSAILVEKPNVRWDDIAGLENAKEALKETVLLPIKLPQLFSHGRKPWSGILLYGPPGTGKSYLAKAVATEAGSTFFSISSSDLVSKWMGESERLVRQLFEMAREQKPSIIFIDEIDSLCGSRSEGESESSRRIKTEFLVQMNGVGKDESGVLVLGATNIPWTLDSAIRRRFEKRIYIPLPNAHARARMFELNVGKIPSELTSQDFKELAKMTDGYSGSDISIVVRDAIMEPVRRIHTATHFKEVYDNKSNRTLVTPCSPGDPDAFESSWLEVNPEDIMEPKLTVRDFYSAVRKVKPTLNAGDIEKHTQFTKDFGAEG

SEQ ID NO: 15690 - protein, 775 aa, Schizosaccharomyces pombe
MSTISEVGPWELGLSLGSGGPNSSRLAKHRETGQLAVVKPIVGWSELTSSQQARIEGELVLLRLIEHPNVLQLIDVISAQEQLFVVVEYMPGGELFDCMLRKGSFTEQDTAKFLWQILCGLEYCHKLHICHRDLKPENLYLDAHGSIKIGEFGMASIQQPGKLLQTSCGSPHYASPEIIMGRSYDGCASDIWSCGIIFFALLTGKLPFDDDNIRSLLLKVCQGQFEMPSNISPQAQHLLYRMLDVDSSTRITMEQIREHPFLSCFVHPNISIPIISAPIQPIDPLIVQHLSLVFRCSDDPMPLYEKLASQSPLVEKTLYTLLSRHLHPPSSAAVDRNRAVVDDLLGTAASNGQQMDEEEIEQAINIPTLAPYPISYAAESVPRPATSASPFLTPVTTSGTFNYSFNATNPQSILQRPATTSSAVPQLPKSVTPGLAYPHDSSMLSSNYRPPSALSPRNFNVSINDPEVQLSRRATSLDMSNDFRMNENDPSIVGNLAASNFPTGMGPPRKRVTSRMSEHTGNRVVSFPRGSAFNPRVTRFNVGNEQFSNNIDNNNYNQPYANATMNNSRRLRTPSGERSMRADLSQSPASYDSLNVPKHRRRQSLFSPSSTKKKLSGSPFQPKRSFLRRLFSSEPSCKCVYASLVASELEHEILEVLRRWQLLGIGIADIIYDSVSASISARIKRQNSLNLKPVRFRISVLAEFFGSQAVFVLESGSSTTFDHLATEFQLIFEDKGFLDNLELSYFQASASRPVSRMSVSSSPFAVFRQRQSVQS

SEQ ID NO: 15691 - protein, 108 aa, Schizosaccharomyces pombe
MPRAAKSSRKKDPNTPKRNMSAFMFFSIENREKMKTDNPDATFGQLGSLLGKRWKELTSTEREPYEEKARQDKERYERERKEYDTKLANGEKTGKASAPAAAAAAKEE

SEQ ID NO: 15692 - protein, 359 aa, Schizosaccharomyces pombe
MSQYDVEPLLSKAAILNKYADLPQNGKVMAEYIWIDGFNHLRSKTMTLDAKPSSIDQLRVWNFDGSSTGQAPGNNSDTLLKPVAMYNDPFRRGDNILVLAACYTADGSPNGFNHRDACAKLLEKHADKETWFGIEQEYTMLDYYDRPFGWPKGGFPGPQGPFYCGVGTGRVFARDIVEAHYKACLYAGINISGINAEVMPSQWEYQVGPCAGIEMGDQLWMSRFLLHRIAEDFGVKISFHPKPILGDWNGAGCHTNVSTKDTRAEGGIKAIESYLEKFAKRHKEHIAVYGDDNDLRLTGRHETGSIDKFTYGVADRGASVRIPRSVAMNGCGYFEDRRPASSIDPYLVTGIITETMFEH

SEQ ID NO: 15693 - protein, 512 aa, Schizosaccharomyces pombe
MSSVNSIPTATSTVYISVLPATATPSGGSGGNVLHEDLNKFYDYGNTSWILACTPLCLIMVPGVAFFYSGLARRKNTLALIMLSMLGLCVSFFQWYFWGYSLAFSQTGTSGYIGNLRHFAFIRTLADYSPGSNNIPELVFANFQGMFAAITVALFTGAAAERGRIGPMLIITFVWLTVVYCPIACWIWNPNGWAFKFGVYDFAGGGPVEVGSGFAALAYTVCLGRRSKFVEEQFRPHSVLNVVLGTSLLWFGWLGFNGGSAYGSNLRAAMAITNTNLAGAVAGLVWVIYDYIFRTRKWSTIGFCSGVVAGLVAATPCAGFVSPHASLAIGAITGLCCNWAIKLKSHMRIDDAMDIFAIHGVAGFVGTFLNGLFAVDYIAAMDGIYVGENKIRGGWFDHHWRQLGLQMAYICAVGAYDFVVTFIILFITDKIPYLQLRVSPDAEEIGVDADQIGEYAFDYIEERREYKHWKISPAGVPEEIIISNGVAQPTGNVAAPGKILESTNPLELGLTI

SEQ ID NO: 15694 - protein, 335 aa, Schizosaccharomyces pombe
MQQTYKPNTSALKDGAPKATVDQKQLLPCKYRVGRVLGGGTYATVREAVHIETNKMYAAKIMNKKMMEKKQDFVKNEIAILKRVSYEHPNILHLVDFFETVNNLYLITELATGGELFDRICAKGSFYEADAAALMRTTTSAVKYLHDNGIVHRDLKPENLLYRSKDPNSDLLIADFGLSHFYEDSQYYMLMTACGTPEYMAPEVFRRTGYGKPVDMWAIGVITYFLLSGYTPFARPSQVEVIEAILANEYTFNDPCWSGISETAKDFIKKCLENDPSKRLTAADALKHPFLSEKRPATSNLLPNVRENFNARKTFRTAYNAVRAFNTWKKLENKH

SEQ ID NO: 15695 - protein, 461 aa, Schizosaccharomyces pombe
MSIPHINKLSQDGRVRFSNWAKTFSAISLGLRCPKTEEQLREILVDANSNGKKIRVVGAGHSPSDIVCTSGYLLSLDKMNKVVSFDPDSLSITVQAGIRFYQVQEILQNLGYSLPIVGSISETSVSGIMSTCTHGSSLQHQVLPHYIKSMRIMLADGSIVTCSRELQKDMFAAAQVSLGALGVIVDITISVVPAFDLVATEDVTTVTDLFQDWKNNLIWESAEFVRVHVFPYANRAVVWRANKVEPNTVPHTPKPSLFRLKLDSFVYQCLLFVGKCVNRVTPYLERFWFKCHYGSKLGTALQVAGPGFDVLQMFCYFSQHVSEWGIPLESAPDALEKLINYTVDDAGKIGAYTHWPIEVRVCAPTPEDECWLSTDCKVPTCYIEAIMYRPFSTSINYKPYFKALEDIANQYNGKPHWAKEYSLTKEQLLERYPNLSKWLSLRKLLDPKGVFWNDYLQRHLG

SEQ ID NO: 15696 - protein, 656 aa, Schizosaccharomyces pombe
MSNSQSIKIKKPRSNENFASGSYSSRRSQQIHRLSHSPMAEGFHKPKLNISPSESNLPNNVAENTTDTPVNYGSIRDENHNSRKGKDVTLNSDEAHSENVPSTSEDPDVVRRHLGGQAADDDNFSSLQLQGGDMHRQVYRWQQEVDQNKQIRRGRSRSFSAKVSDPNLHLRSVQDMKQAGGMRRDFLRNRASSISMSSNAHGNPNFLNRNFIEFLSVYGHFAGEELSEEDEDEDTDDFAMPRDVNPSLIHSTVPSEQEPLISRHGRYKLQTPGNASNGKAVLLLLKSFVGTGVLFLPKAFKLGGLVFSSATLLIVGVLSHICFLLLIQTRMKVPGSFGDIGGTLYGPHMRFAILASIVVSQIGFSSAYISFVASTLQACVKVISTTHREYHLAVFIFIQFLVFVPLSLVRKISKLSATALIADVFILLGILYLYFWDVITLATKGIADVAMFNKTDFSLFIGVAIFTYEGICLILPIQEQMAKPKNLPKLLTGVMAAISLLFISIGLLSYAAFGSKVKTVVILNMPESTFTVIIQFLYAIAILLSTPLQLFPAIAIIEQGIFTRSGKRNRKIKWRKNYLRVLIVILAILISWAGSSRLDLFVSMVGSVCCIPLIYMYPPMLHYKACANNWILRTLDIFMFTIGAFAMAFTTYMTFF

SEQ ID NO: 15697 - protein, 450 aa, Schizosaccharomyces pombe
MIGPRLCAATPRFPLVSLAHRNSKVFALASSNAVAQRWGKRFYAPIETETPHKVGVEFEESKDRIFTSPQKYVQGRHAFTRSYMYVKKWATKSAVVLADQNVWNICANKIVDSLSQNGMTVTKLVFGGEASLVELDKLRKQCPDDTQVIIGVGGGKTMDSAKYIAHSMNLPSIICPTTASSDAATSSLSVIYTPDGQFQKYSFYPLNPNLIFIDTDVIVRAPVRFLISGIGDALSTWVETESVIRSNSTSFAGGVASIAGRYIARACKDTLEKYALSAILSNTRGVCTEAFENVVEANTLMSGLGFENGGLAAAHAIHNGMTAIHGPVHRLMHGEKVAYGTLVQVVLEDWPLEDFNNLASFMAKCHLPITLEELGIPNVTDEELLMVGRATLRPDESIHNMSKKFNPSQIADAIKAVDSYSQKWQEQTGWTERFRLPPSRHSPHLTDIHP

SEQ ID NO: 15698 - protein, 421 aa, Schizosaccharomyces pombe
MAFRGIRPSNKVAASRPDVWTLVNQATAECKVPPVSLSQGFFNYNPPKFVLDAAKKSIDEVACNQYSHTRGRPSLRKALSEAYSPYFKRTLNPDTEIVVTAGANEGFFSVFAAFLNPGDEVIVMEPFFDQYISNITMNGGVPVYVPIIPPEEGSVKPVSAGAWKLDMNKLRNAITEKTKMIVINTPHNPLGKIFSEEELNEIADLVLKHNLLVVSDEVYDRLSFVPFVRLATLRPELFKHVVTVGSGGKTFGCTGWRVGWLIGDESLIKYSAAAHTRICFAVNSPCQEALAIAFGEAEKHNYYEEYKSSYKKRFEILAKAFDQLEIPYTIPDGSYYTMANFSKLKLPKDYPFPEEIANRPRDFKLCYWILKEIGVATIPPTEFYTDEDAPVAENYLRFAFCKTFETLEEAARRLQKLKDYF

SEQ ID NO: 15699 - protein, 409 aa, Schizosaccharomyces pombe
MKSATIIGGGSHPELLHLISNRLGITPCDVSLKRFANGETSVEIRESVRDKDVFILQSGSSTVNDSLMELLIIISACKGGSAKRITAVMPYFPYSKQSKMRKYRDAITARMVANLLTVAGVDHIITLDLHASQMQGFFTRPVDNLYAEPNIAEWIRRNVDDWEEAVVVSKNPGGAKRVTSLADTLNLDFALINTDRQRSSHFSQNFEDSIMDETEATETHVTNCSVYLDRPRIHTAKYLLGHIIDDEEIITTPASVCSEDYAQEVNLYSQGGCPSDDDEEENIMSASIYAERMITLVGDVNGKTALLIDDTIENPTAFIVASEHLVKRCGAKRVIVIGTHGIFQNKCLKDLQSCEYIEQIVVTNTYPIKPQAVLECDKLTVIDISGVLAEAIRRTHNGESISFLFKKAF

SEQ ID NO: 15700 - protein, 593 aa, Schizosaccharomyces pombe
MVKRHKNTIGVWRLGKTLGTGSTSCVRLAKHAKTGDLAAIKIIPIRYASIGMEILMMRLLRHPNILRLYDVWTDHQHMYLALEYVPDGELFHYIRKHGPLSEREAAHYLSQILDAVAHCHRFRFRHRDLKLENILIKVNEQQIKIADFGMATVEPNDSCLENYCGSLHYLAPEIVSHKPYRGAPADVWSCGVILYSLLSNKLPFGGQNTDVIYNKIRHGAYDLPSSISSAAQDLLHRMLDVNPSTRITIPEVFSHPFLMGCTSLSSMDSTTPPTPSLSIDEIDPLVVDCMCVLWKKSSSKKVVRRLQQRDDNDEKYVYKVLSEILRDDMLKKQRFDENKYLSLYDLIHDNNLFTKASISTTSLVKSNVSTNSRKSSNFEDELARRVSSPLSALNQMSQSPIPIRVSSDKDYDSYACHEVVSNPSTLDDDYNYMFVCPPEEYTYSTDNVRTDSLDLQSLPTPTLEQLESVPFNRYGYVRIFPSTTLSSTASGYYTPDSLSTPEPSIDGLTNLDDVQVGGFVQGSGNQNRRPISFPVISNMQPNITNVRSASAPLCSSPVPSRRYSQYATNARYTPRKVSSGSVLRKISSFFRKD

SEQ ID NO: 15701 - protein, 146 aa, Schizosaccharomyces pombe
MNSMFRFWIPKTSISMQLRMLSTQTRQALEQAVKEDPIVLFMKGTPTRPMCGFSLKAIQILSLENVASDKLVTYNVLSNDELREGIKEFSDWPTIPQLYINGEFVGGSDILASMHKSGELHKILKEINALAPEQPKDSEEETTKKD

SEQ ID NO: 15702 - protein, 944 aa, Schizosaccharomyces pombe
MGRILIAHLFLPSSVGFSFDTVPHDEVGSKFMQKEESKDWIADTPLDESAIVSEEESDDDSLLSDLPEEIDSTNAQSNIATPSPGTVAAAISGIQPPPKTPSSDSPSLENSLSNLNDLFKSRGRHMAFSKNDGTNLSLPPSRHQSPPPSSVLASQRHHRRHDSELEEFARRASRSLSFSMNGTPQRRMTFDAEAWKNVIFKIKPSSFGNASFYNAISAATRSKQFDDHLFVGTCGIPTDSLPDSLKERISHDYITEHSSLVVYPTDTDFVGHYNHYCKNILWPTFHYQIPDNPKSKAYEDHSWANYVKVNKAFADTIVDNYEQDDMIWINDYHLLLVPEMVRERLPRAKIGFFLHIPFPSSEVFRCLATRQEILKGMLGANILGFQIPEFAYHFLQTCSRLVNIDIRKNGVVSFENRQIDVIALPISIDPGFIDRCLASPPVEHWAKVLQDRFRGKHIILSHDKLDPIRGLRSKLISFERFLQKYPEYRENTILLQVAPESLQDSEHLPHISDIVTRINSAYSNIASRHVPVILLRQKLGYAQFLALMMISDALIDNSLREGISLTSHQFIYVQRKRHRPLILSEFVGSASILNDNAIIVNPWDYSKTAEAFRTALTMSEEECQKRNKAMCNLILRHDAASWAVTFQSLIKESWKEQIDMQRIPAFTAQLIKEPYQNAQKRLILLYFEGTISTWGSQYHNVMTSLQRTINLLNMLTSDPKNTVYVFSALSCQELEQLFQRVPKLGIVAENGCFVRSPPKGDATMPVSKKEIAELWKNKVLGTDLTWMKTVSEIFEYYAERTTGAYVENKDATVILHLREAEDDEAAMWAAKECCESVNNFNVPCSATIQNDMVVCRSNKVSKRLAAEDIYSANGGDYDFIFAASNDPDDDTVFSWMKNFKQSKKEVVPFTFSVCVSEHGNSTNADAESSGVFGFLQALEKVYSA

SEQ ID NO: 15703 - protein, 334 aa, Schizosaccharomyces pombe
MTLSGKPAALLVGTLKHAHKEWEALGKYAELKTYSDGTREDFLAKCKTEFQNVKAICRTYNSKFYMGIFDKEIIDNLPPSVKFICHLGAGYETVDVAACTARGIQVSHVPKAVDDATADVGIFLMLGALRGFNQGIFELHKNNWNANCKPSHDPEGKTLGILGLGGIGKTMAKRARAFDMKIVYHNRTPLPEEEAEGAEFVSFDDLLAKSDVLSLNLPLNAHTRHIIGKPEFQKMKRGIVIVNTARGAVMDEAALVEALDEGIVYSAGLDVFEEEPKIHPGLLENEKVILLPHLGTNSLETQYKMECAVLMNVKNGIVNDSLPNLVPEQRGDIE

SEQ ID NO: 15704 - protein, 517 aa, Schizosaccharomyces pombe
MLNEPNALLRRDANSTIATVTELFPNEYSNADIAYVLLSTVVVFTVTPGIALYYAGMVRKNSALSILTQSFLVTAVVFIQWYLFGYSLACSSGSSFYGTLWQGGMNHLWLEPYIPGSTIPAIVYFPFGGLFAVATAQLFAGAMAERGRLIPSLVISFLYITLVYCPQAYWTWAPNGWLYTLGALDFAGGGPVHISSGFAALAYSLCLGRRIVVDEPDRPDSIRSTDNADLPSSSQNNCKANWKRWFGFKSVSWKNSFGRGKIAHNPPHDAGMVYIGVVLIWFAWLCFNSGTLLTVNIRTAYIMTNTLISSSFGALTWAIIDYIRYRKFSTIGICEGAIAGLVGITPACGFVFPWGAAAGGIVPALVCNFLHDLNEWIGVDETLRVFNLHGIGGIVGSIVLGVVAHPDVAASDGATVIDGGWAVHHWKQMGYQFAGFTSVAAWSFVITAIICLLVDLVPGLHIRASFEEELRGMDFVELEEQLPGQTLESKPMIIYAQEMDEPVTQGSNIKQEKQDEF

SEQ ID NO: 15705 - protein, 385 aa, Schizosaccharomyces pombe
MGLGFQEKNPVFVKEKQSPFYAVPSNYEEVEFSSIVEPMYSGIATFGRLENVECLSKRSEDFDIAFIGMPFDTGTSYRPGARFGPSSLREGSRRINTKYGAVNVPLEINPFKSWAKLVDCGDIPVTTYDILKAMDQLESAYFQLIARKPSSFTDHDGFAKNDTVLPRVLSLGGDHTIVLPILRALHRVYGQPISVIHFDSHLDTWAPGLIGDGDEADGINHGSYFYFASQEGIMSKDANIHAGIRTPISSFSDYDDDVDCGFKIIEAREIDDLGIDGIVKKIRDRVGDNLVYLSIDIDVLDPAFAPATGTPETGGWSSREMRAILRGLQGLKFVGADLVEVAPAYDVAEITSLAGAQLLFDIVSMMVKYPLVKEADLSRYMPIHK

SEQ ID NO: 15706 - protein, 570 aa, Schizosaccharomyces pombe
MSSEKVLVGEYLFTRLLQLGIKSILGVPGDFNLALLDLIEKVGDETFRWVGNENELNGAYAADAYARVKGISAIVTTFGVGELSALNGFAGAYSERIPVVHIVGVPNTKAQATRPLLHHTLGNGDFKVFQRMSSELSADVAFLDSGDSAGRLIDNLLETCVRTSRPVYLAVPSDAGYFYTDASPLKTPLVFPVPENNKEIEHEVVSEILELIEKSKNPSILVDACVSRFHIQQETQDFIDATHFPTYVTPMGKTAINESSPYFDGVYIGSLTEPSIKERAESTDLLLIIGGLRSDFNSGTFTYATPASQTIEFHSDYTKIRSGVYEGISMKHLLPKLTAAIDKKSVQAKARPVHFEPPKAVAAEGYAEGTITHKWFWPTFASFLRESDVVTTETGTSNFGILDCIFPKGCQNLSQVLWGSIGWSVGAMFGATLGIKDSDAPHRRSILIVGDGSLHLTVQEISATIRNGLTPIIFVINNKGYTIERLIHGLHAVYNDINTEWDYQNLLKGYGAKNSRSYNIHSEKELLDLFKDEEFGKADVIQLVEVHMPVLDAPRVLIEQAKLTASLNKQ

SEQ ID NO: 15707 - protein, 513 aa, Schizosaccharomyces pombe
MSDAHDTIKSLTGDASNSRRLIVVSNRLPITIKRKDNGTYDFSMSSGGLVSALSGLKKLMTFQWLGWCGQEIPEDEKPMIIQRLQDECSAIPVFLDDETADRHYNGFSNSILWPLFHYHPGEINFDEENWEAYRAANYAFAEAIVKNLQDGDLIWVQDYHLMVLPQMLRELIGDKFKDIKIGFFLHTPFPSSEIYRVLPVRNEILEGVLNCDLVGFHTYDYARHFLSACSRILNLSTLPNGVEYNGQMVSVGTFPIGIDPEKFSDALKSDVVKDRIASIERRLQGVKVIVGVDRLDYIKGVPQKFHAFEVFLEQYPEWVGKVVLVQVAVPSRQDVEEYQNLRAVVNELVGRINGRFGTVEYTPIHFLHKSVRFEELVALYNVSDVCLITSTRDGMNLVSYEYICTQQERHGALILSEFAGAAQSLNGSIVINPWNTEELANSIHDALTMPEKQREANENKLFRYVNKYTSQFWGQSFVGELQRIQHYSHPHPRRTNPILRTKSAQVLSMNSSS

SEQ ID NO: 15708 - protein, 110 aa, Schizosaccharomyces pombe
MTSIAKAFVEKAISNNPVTVFSKSFCPFCKAAKNTLTKYSAPYKAYELDKIENGSDIQAYLHEKTKQSTVPSIFFRNQFIGGNSDLNKLRSSGTLTKMIAELKENKSSIL

SEQ ID NO: 15709 - protein, 1002 aa, Schizosaccharomyces pombe
MLMKQTFLYFLLTCVVSAQFNGYVPPEQNGGDIVVPKDFYEKFGEDFIREQEESSAPLMNPVPERDEAEAPHHPKGHHEFNDDFEDDTALEHPGFKDKLDSFLQPARDFLHTVSDRLDNIFDDDEDEHVREKRPHDSADEDAPRRKHGKCKGKGKHHKGKHAKGKGKKSHPKPEDDSVFFDDERPKHHEFDDEDREFPAHHEPGEHMPPPPMHHKPGEHMPPPPMHHEPGEHMPPPPMHHEPGEHMPPPPMHHEPGEHMPPPPMHHEPGEHMPPPPMHHEPGEHMPPPPMHHEPGEHMPPPPMHHEPGEHMPPPPMHHEPGEHMPPPPMHHEPGEHMPPPPFKHHELEEHEGPEHHRGPEDKEHHKGPKDKEHHKGPKDKEHHKGPKDKEHHKGPKDKEHHKGPKDKEHHKGPKDKEHHQGPKEKHNERPEQNMQSSHELLVIEAFADLINSVPVEEIAEEFSRFLDTLGIEYYGNIPVHIQENAPKDSSIPPLFEFDDDLELSDLTPEQFAYLEMLKAEGIDPMTAFRDQSHPAKPSNAQPADSSRPYAVFSQEENGEHVNLKAFPDHTLRVKDSKPESLGIDTVKQYTGYLDVEDDRHLFFWFFESRNDPENDPVVLWLNGGPGCSSLTGLFMELGPSSINIETLKPEYNPHSWNSNASVIFLDQPINTGFSNGDDSVLDTVTAGKDVYAFLNLFFAKFPQYAHLDFHIAGESYAGHYIPQFAKEIMEHNQGANFFVASGYEMEKQYINLKSVLIGNGLTDPLVQYYFYGKMACESPYGPIMSQEECDRITGAYDTCAKLITGCYQTGFTPVCIGASLYCNNAMIGPFTKTGLNIYDIREECRDQEHLCYPETGAIESYLNQEFVQEALGVEYDYKGCNTEVNIGFLFKGDWMRKTFRDDVTAILEAGLPVLIYAGDADYICNYMGNEAWTDALEWAGQREFYEAELKPWSPNGKEAGRGKSFKNFGYLRLYEAGHMVPFNQPEASLEMLNSWIDGSLFA

SEQ ID NO: 15710 - protein, 817 aa, Schizosaccharomyces pombe
MSVYGKIPSTSFEHENTFELSGDLLDPEELKSLGVSGRIIYVLRHLPFKSSINEETREWDLSGRRGATTMYSSMNWLANSTYWQTTLVGWTGVIPTVSEKEENKDAVTRLDSQDVKRFEETYSQWNSGERSTEYVPVWLPGPEKGSETIINETRSQQSRWLAYAENVIRPLIHYKYWPSSEVDENEEQWWRDYVKMNHAFADKICEIYKPGDFIIVQDYSLFLVPQLIRNKIDDAVIGFYHHHPFPSSEIARCFPRRRAILRSVLGADFIGFEDYSYARHFISCCSRVLDLEIGHDWVNLNGNKVTVRAITVGIDVPRIIRSSGNVSVSEKLEELNKRYENMKVILGRDRLDELYGVPQKLRSFQRFLRTYPEWRKKVVLIQITISSAFKHPKLLSSIKKLVQAINQEFGTDDYTPVHHVEEQLEPADYFALLTRADALFINSIREGVSNLALEYVVCQRDRYGMVLLSEFTATSAMLHDVPLINPWDYNECAEIISNALSTPLERRKMIERESYKQVTTHTMQSWTSSLIRSLANKLAATKTDQRIPTLTPEHALSVYSKASKRLFMMDYDGTLTPIVRDPNAAVPSKKLLDNLATLAADPKNQVWIISGRDQQFLRNWMDDIKGLGLSAEHGSFVRKPHSTTWINLAELLDMSWKKEVRRIFQYYTDRTQGSSIEEKRCAMTWHYRKADPENGAFQALECEALLEELVCSKYDVEIMRGKANLEVRPSSINKGGIVKQILSSYPEDSLPSFIFCAGDDRTDEDMFRSLHKNTRINKETSFAVTIGSDKKLSIADWCIADPANVIDILADLANFTN

SEQ ID NO: 15711 - protein, 157 aa, Schizosaccharomyces pombe
MAEEEHVDFEGGEAGASLTFPMQCSALRKNGHVVIKGRPCKIVDMSTSKTGKHGHAKVHIVALDIFNGRKYEDMSPSTHNMDVPVVKRDEYQLVNIDDGYLNLMTTDGTTKDDVRLPEGELGNEIEEGFDEGRDLIITVVSAMGEETALACRDAPSS

SEQ ID NO: 15712 - protein, 365 aa, Schizosaccharomyces pombe
MSETRLFVGRIPPQATREDMMDFFKGYGQILDCKLMNGFGFVEVEDARDARDIVNDFQGKEFMGSRIVVEPARGERRRRENFRESAASKYPRPRRTGFRLIVENLSEDVSWQDLKDVMRKAGEPTFTDAHRENPGAGVVEFSTEEDMRNALTSLNGEVIKGQAVTLREDPDAANEPLPEVPSRFRSRSPPARRRYRDDYRRGGDYRRDAYRPGRDDERRYAPRGEYRRNNRDEYRRGGRDEYRRNSRSDYRRPHDDEYRRPRGDEYRPGRDEYRRSRDDGRPSHDDEYRRDAYSRSPSPRRDREENRSPAYEGSKSYSAAPEASMESSAPTESYDKPAASEEQQPLQNHSDVGNGSAEGQVAAEW

SEQ ID NO: 15713 - protein, 891 aa, Schizosaccharomyces pombe
MGRQFICSIYLPYTINFHLDELEGNHESHPAITHQEKVTQTHRDSVKIDDILTRLSISKSESGQATPVLTPQLEGMNDYFSLGPSKRTGGSMTPGLGAMSPIPGSGRSSPLYTQPRSRATSPSRVRQADRFAAPGIGAGALPIRRKRRDSLAKSVALFESARWSVERGVVGNSGLFHAVDAAVRDHGLQNPLWVGLLGMPTESLSEKTKNAISGALLVKHQSLVVYTSDSNFEGHYNHYCRKILWPSLHYQHNEIFSFFHEESNWDDYVAVNRAFADALIKNYKTGDTIWVNDYHLLLVPNMVRERIPSAIIGLFIHVSFPSSEVFRCFARRKELLQGMLGSNLIGFQTEEYKRHFLQSCSRVLYAESTFDRILLDDRYIDVYAHPIGADPVLVDKWLENPETLEVKEVLEKRYANLNIFVGCDKMDPIRGIREKLLAFEQFLYDNPEYQKNTILIQTSTFTEEQKEYGVAISDIVTRINSAFGDFSLDHLPVTILSSDLSYPQYLALLSVADAFIVTSLREGMSLTCHEFILTQRQKKSPLIVSEFIGCASMFSNGAFIVNPWSTLELSLSMKKALTLSTNERNQRYSNCLDVVLTHSASNWVTGFETKLKKSWTSQQKRDFSRLPRFTLNFIGNRYDHAKKRLLILNFDGNAVTWEGRHEFVDFHYGYMVSILSKLIADDRNIVYIASCLEEDELESLFMHVPGVGLIAENGCYVLPHYAENVHQSWIRLYKKQQMDWREPLHDIIQYYSERTPGSSLIDHGFAMEFNYVKAENRENGLRSAGELASSINETQHGCRAVPLDGRVLCEPTTISKATAANYIMTHLIKNPEELDLILVAGNNRTDESVFAWANKSKVSSFTVSMGVGNTEAKAYTDGIPSFFNVLNSLCA

SEQ ID NO: 15714 - protein, 849 aa, Schizosaccharomyces pombe
MPSGAQGNTQSAAYKRIVNVSRNFQFKAALNKDTREWTFQHRSSGTALYSAIASLGDPSSPWDAVYVASPGPVQISEGNDHTVETKIDEAAVVHRSSSIVISPEDQEIFLKKATEYYRKKNIEADIVPVWGKVQRVPQAKSSSATITPSVSNKLSTAYQSIKSEALKDGPMYADSVLWDVLHYRIPTLDGYQQHNLWKNFTRWSQYFADNIVSNYRPGDLILIHDYSLFLLPRLIRKQLSDAPIVFFLHAPFCTSEVFRCLSKRAEILKGVLASNVIAMQTDSYTRHFLSTCSNVLGLETTSTHIDTSDGFRVVVFSSHVSIDVPRVYSRCNSKPVSLKIQQLKSLYPSDKKLIVGRDQLTKACGVTHKLRAFRELLIHFPKWRGHVVLIQITSLPVGNNYSNEELKKTENLVAQINSEFGSLDYTPVIHFHQLLDPDEYYALLSVANIACVSSVRDSMNTMALEYVACQQKNKGSLILSEFSGTAELLLSAYLVNPYDYSRFAETINYCLNMTEKERERRFSSLWKQATSQSSQQWIYKLINRAAYEVKALESHMTTPLLTYNILIKPYRNAKRRLFLLDYDGTLIESARNSIDAVPTDRLLRTLKRLASDSRNIVWILSGRSQKFMEEWMGDISELGLSSEHGSAIRPPLAGSWSSCAENLDLSWKDTVRDFFQYYVERTPGSYIEEKKHSISWCYQNANTTYSKFQSLECQTNLEDMLKHYDVEISPAKSFLEVHPNYLNKGSIVRRILKRSGSVDFVFCAGDDKTDENMFEVFLPTAFSNSHLIDEIDSTEYSGSHHTDDNSDANKVENVKVATFRVHIGLTDKPTLSDYHLPAPRDLGELLHNL

SEQ ID NO: 15715 - protein, 851 aa, Schizosaccharomyces pombe
MTARNSASIPTSIRKTSENEVSGDETPAGVGNLSTKTASKTSLTFRQSSSDESTSSYSGNHHNINIQHHPNRPFRTNSSSFSPNDYSISESPSKSKKDGVHVSAVQLDNETDSEVESEVEELERELEAIEDSVYPEVRAAVNPTDDVNLPVNTWRTWVLTTIFVIVFAAVNQFFSLRYPALSISFIVAQLILFPLGKLLNLLPNWKIGYGRFSFYLNSSPFNVKEHAAITIAVSLTSSTAYATNILSAQTSFYKQNLSWGYKILIVLTSQMLGYGFAGLTRRWIVYPAAMIWPQTLVSTVLFRTLHGNSGNDIGVLKNNRISANGWTISRYRFFAYVMIGSFVFYWFPGFIFKGLSYFTVLCWIWPKNRVVNQLFGYNSGLGILPLTFDWQQVVYNSNPLASPWWVICNTFGSVVLIFWIVVPILYYKGVWFSNYLPMLSSSTFDHTGVSYNSSRVLNSDYSFNHTKYESYSPLYMPMSYSMSTALNFAAVTAIFTHCALYNGKDIWQRLWKESGKDECIHRKLMRNYKEAPQWWYATLFIVVFGLTIFTVRYYDTQCPVWALIVALLIFIVNFIPQGVLEGITNQHVGLNIITELIGGYILPGKPLANLMIKLYGFIPMRQGLEFSRDLKLAQYMKIPPRILFFVQLFATILGGITQVAVQEWMNYHIPGICTTSQSNGFTCPNGRSIYNASLIWGAIGPAKMFSKGKPYYPLIFFFLIGAVAPFITWGLRKRFPKSWIGKLNAPVLFTGPGNIPPATGINYSSWAIVGFIFNYVIRKRAIHWWRKYNYVLAAAMDSGVAVAGVVIFLCVSYPGGKITWWGNTVYTKTYDWKSVPYRSLGPNETFGYTNW

SEQ ID NO: 15716 - protein, 840 aa, Schizosaccharomyces pombe
MRAWGWVRNKFSSEDDYNDGASNKDYPDRFNEFDNSQNDHNDYTQNNAQFQNAQTTTFGRTISRVKAYYEIPEDDELDELASIPQWFKKNVTSNIFKNFLHYLKSLFPIIEWLPNYNPYWLINDLIAGITVGCVVVPQGMSYAKVATLPSEYGLYSSFVGVAIYCFFATSKDVSIGPVAVMSLITAKVIANVMAKDETYTAPQIATCLALLAGAITCGIGLLRLGFIIEFIPVPAVAGFTTGSALNILSGQVPALMGYKNKVTAKATYMVIIQSLKHLPDTTVDAAFGLVSLFILFFTKYMCQYLGKRYPRWQQAFFLTNTLRSAVVVIVGTAISYAICKHHRSDPPISIIKTVPRGFQHVGVPLITKKLCRDLASELPVSVIVLLLEHISIAKSFGRVNDYRIVPDQELIAMGVTNLIGIFFNAYPATGSFSRSAIKAKAGVKTPIAGIFTAAVVILSLYCLTDAFYYIPNAILSAVIIHAVTDLILPMKQTILFWRLQPLEACIFFISVIVSVFSSIENGIYVSVCLAAALLLLRIAKPHGSFLGKIQAANKYGSDNIANVRDIYVPLEMKEENPNLEIQSPPPGVFIFRLQESFTYPNASRVSTMISRRIKDLTRRGIDNIYVKDIDRPWNVPRQRKKKENSEIEDLRPLLQAIIFDFSAVNNLDTTAVQSLIDIRKELEIYANETVEFHFTNIRSGWIKRTLVAAGFGKPKGHAVDASVCVEVAAPLRDANLSAESSRNLSRIITPIYDDEEGNVSGHIYELDGKNNSDLSMHCQKGSNQVEIEFVEFNSRKYPFFHVDVASAVVDLQHRLLSPQKSDSFGSLKEGGTTTIKKIEN

SEQ ID NO: 15717 - protein, 427 aa, Schizosaccharomyces pombe
MSSVEVNRENADVANTNRQANLAEGYEIKELNESQKQYIRSSIPILESSGVNLTKAFYQKMLGNYPEVLPYFNKAHQISLSQPRILAFALLNYAKNIDDLTSLSAFMDQIVVKHVGLQIKAEHYPIVGHCLLSTMQELLPSDVATPAFLEAWTTAYGNLAKILIDSEKKVYQSQPWNGFVEFKVTELINESSDVKSVYLGPKDPAFRISHAHPGQYVSVLWEIPGLSHKTLREYSLSNRVDTCRNQFRISVRRVAGGVVSNFVHDNLKVGDIVGVSPPAGNFVYKRSEENVNRPLLCFAGGIGITPLIPIIETALLDGRKVNFCYSSRNYVSRPFKQWLEQLKLKYKENLKLKEFFSEESSVTKEQIVDEVMTRIINEEDLEKLDLSECDIYMLGPNNYMRFVKQELVKLGVEPNKVQSEFFGPYIP

SEQ ID NO: 15718 - protein, 572 aa, Schizosaccharomyces pombe
MKDNQQAVQLQQPTTIGHYLAVRLAQAGVKHHFVVPGDYNLGLLDKLQYNNYLEEVNCANELNCAFAAEGYARANGIAACVVTYSVGAFTAFDGIGGAYAEDLPVILISGSPNTNDIGSSHLLHHTLGTHDFSYQYEMAKKITCAAVSIQRPTEAPRLIDYAIKMALLKKKPVYIEVPTNVASQPCAAPGPASLITEPETSNQEYLQMAVDISAKIVNGKQKPVLLAGPKLRSFKAESAFLELANSLNCSVAVMPNAKSFFPESHPNYAGIYWGQASTLGAESIINWSDCIICAGTTFTDYSSNGWTSLPPKANVLHVDVDRVTVSDAEFGGVLLRDFLHELAKKVKANNASVVEYKRIRPESLEIPMENPKAALNRKEIIRQVQNLVNQETTLFVDTGDSWFGGMRITLPEKARFEIEMQWGHIGWSVPSAFGYAIGAPKRNVVVFVGDGSFQETVQEVSQMVRLNLPIIMFLINNRGYTIEVEIHDGPYNRIKNWDYAAIVEAFNAGEGHAKGFRVGNGHELAEAIRQAKENSQGPTLIECNIDQDDCSKELINWGHNVGAANGKPPAKE

SEQ ID NO: 15719 - protein, 570 aa, Phaseolus vulgaris
MCGILAVFGCVDHSQAKRARIIELSRRLRHRGPDWSGLHCHDDCFLAHQRLAIVDPTSGDQPLYNEDKTVIVTVNGEIYNHKQLRQKLSSHKFRTGSDCEVIAHLYEEYGEEFVNMLDGMFAFVLLDTRDKSFIAARDAIGITPLYLGWGHDGSTWFASEMKALSDDCERFMSFPPGHIYSSKQGGLRRWYNPHWFSEDIPSTPYDPILLRETFERAVVKRMMTDVPFGVLLSGGLDSSLVASVVNRYLKESEAARQWGSQLHTFCIGLKGSPDLKAAKEVADYLGTRHHELYFTVQEGIDALEEVIYHIETYDVTTIRASTPMFLMSRKIKALGVKMVLSGEGSDEIFGGYLYFHKAPNKKEFHEETCRKIKALHLYDCLRANKSTAAWGVEARVPFLDKEFIDVAMSIDPEWKMIRRDLGRIEKWVLRNAFDDEKNPYLPKHILYRQKEQFSDGVGYSWIDALKDHADKQVPDATMLAANFIYPENTPTTKEGYLYRTIFEKFFPKNAARATVPGGPSVACSTAKAVEWDASWSKNLDPSGRAALGVHEASYEDVVDTKIDQPKNGSL

SEQ ID NO: 15720 - protein, 235 aa, Sandersonia aurantiaca
MSGYLPFDEPNILALYKKIWKANFSFPSWFSSGAKKLIKRILDPNPHTRITIPEILEDEWFKKGYMPPHFQQGEEVNLDDIDAVFNDSKEHLVTEKKEKPESMNAFALISRSQVFDLGNLFEKQRGLIKRETRFTSQCPPNEILSKIEETAKPLGFNVRKHNYKMNLQGDKTGRKGHLSVATEVFEVAPSLHMVELRKTGGDTLEFHKFYKNFSSGLKDIVWKAEALPEQEETRS

SEQ ID NO: 15721 - protein, 513 aa, Fucus serratus
DPRVRAYFNDSQRQATKDAGSIAGLNVMRIINEPTAAAIAYGLDKKGEEKNVLIFDLGGGTFDVSVLTIEEGIFEVKATAGDTHLGGEDFDNRMVDYFLQEFKRKFRKDMRSNSRALRRLRTACERAKRTLSASTQAHIEIDSLFEGIDFNSTITRARFEDMNQDYFQKCLAPVEKVVKDAKMSKGQIHEVVLVGGSTRIPKIQQMLVDYFNGKEPCKSINPDEAVAYGATVQAGILSGQDKSDKLNSLLLLDVTPLGLGLETAGGVMTTLIKRNTTVPAKKSQVFSTYADNQPGVLIQVYEGERTMTRDNNLLGKFNLDGIPPMPRGQPQIEVTFDIDANGILNVHAVEKSTGKETKITITNDKGRLSADEIERMVEEAERYKAEDDVQKQRVEGKNALENYAYSMRNTINEEKVASQLDAADKSAIESKISETIAWLDTNQNAEKEEYEEKQKELEGVCTPIIQKMAAAGGGGMPGGMGGMPDMGGAGFPGAGAPTPEADADAGPKIEEID

SEQ ID NO: 15722 - protein, 240 aa, Medicago sativa
RGKIQIKRIENTTNRQVIFSKRRNGLLKKAKELAILCDAEVGVMIFSSTAKLYDFASTSLRSVIGRYNKSKEEHNQLGSTASEIKFGQREAAVLRQQLHNLQESHRQIMGEELSGLTVKELQGLENQLEISLRGVRMKKEQLFMDEIQELNRKGDIIHQENVELYRKVYGTKDKNGTNRVLSLTNGVGIGDDSNRTCESPAQPATETRTTTALMHSLEISVLTCKQGKWTQILISYMNGI

SEQ ID NO: 15723 - protein, 196 aa, Eleusine coracana
CPRCKSGNTKFCYYNNYSMSQPRYFCKACRRYWTHGGSLRNVPIGGGCRKPKRPGTSDAHKLGMASSSEPTGVVPPSNCTGMNFANVLPTFMSGGFDIQSSLSLTTFGSSSSSNPTALMSPGGKTSFLDVLRGGAGGLLDGSLGPNNGFYYGGHANGSSIGMLMTPPAVSFGIPSPMQQHGGLVVGGNGIGGTTSS

SEQ ID NO: 15724 - protein, 40 aa, Hordeum vulgare
YNNYNIHQPRHFCRGCQRYWTAGGSMRNLPVGAGRRKSKS

SEQ ID NO: 15725 - protein, 111 aa, Avena sativa
CPRCKSGNTKFCYYNNYSMSQPRYFCKACRLYWTHGGSLRNVPIGGGCRKPKRPGTSDAHKLGMASSSEPTGVVPPSNCTGMNFANVLPTFMSGGFDIQSSLSLTTFGSSS

SEQ ID NO: 15726 - protein, 111 aa, Panicum miliaceum
CPRCKSGNTKFCYYNNYSMSQPRYFCKACRRYWTHGGSLRNVPIGGGCRKPKRPGTSDAHKLGMASSSEPTGVVPPSNCTGMNFANVLPTFMSGGFDIQSSLSLTTFGSSS

SEQ ID NO: 15727 - protein, 36 aa, Panicum antidotale
RCNSTDTKFCYYNNYNIKQPRHFCKSCQRYWTAGGA

SEQ ID NO: 15728 - protein, 35 aa, Paspalum scrobiculatum
ILPCPRCNSMDTKFCYYNNYNIKQTRHFCKSCQRY

SEQ ID NO: 15729 - protein, 705 aa, Citrullus lanatus
MASSTVQIHGLGAPSFAAASMRKSNHVSSRTVFFGQKLGNSSAFPTATFLKLRSNISRRNSSVRPLRIVNEKVVGIDLGTTNSAVAAMEGGKPTIVTNAEGKRTTPSVVAYTKIGDRLVGQIANRQAVVNPRDTFFSVKRFIGRKMSEVDEESKQVSYRVVRDENGNVKLECPAIGKQFAAEEISAQVLRKLVDDASKFLNDKVTKAVVTVPAYFNDSQRTATKDAGRIAGLEVLRIINEPTAASLAYGFEKKSNETILVFDLGGGTFDVSVLEVGDGVFEVLSTSGDTHLGGDDFDKRIVDWLAANFKRDEGIDLLKDKQALQRLTETAEKAKMELSSLTQANISLPFITATADGPKHIETTLTRAKFEELCSDLLYRLKTPVENSLRDAKLSFKDVHEVVLVGGSTRIPAVQELVKKMTGKEPNVTVNPDEVVALGAAVQAGVLAGDVSDIVLLDVSPLSLGLETLGGVMTKIIPRNTTLPTSKSEVFSTAADGQTSVEINVLQGEREFVRDNKSLGSFRLDGIPPAPRGVPQIEVKFDIDANGILSVTAIDKGTGKKQDITITGASTLPSDEVERMVSERRKFAKEDKEKRDAIDTKNQADSVVYQTEKQLKELGDKVPGPVKEKVESKLGELKEAISGGSTEAIKEAMAALNQEVMQLGQSLYNQPGAAPGAGAGSESGPSESTGKGPEGDVIDADFTDSK

SEQ ID NO: 15730 - protein, 159 aa, Elaeis guineensis
MSDEEHHFESKADAGASKTFPQQAGTIRKNGYIVIKGRPCKVVEVSTSKTGKHGHAKCHFVAIDVFTAKKLEDIVPSSHNCDVPHVTRTDYQLIDISEDGFVSLLTDSGNTKDDLRLPTDETLLAQIKDGFAEGKDLVVTVMSAMGEEQICALKDIGPK

SEQ ID NO: 15731 - protein, 159 aa, Elaeis guineensis
MSDEEHHFESKADAGASKTFPQQAGTIRKNGYIVIKGRPCKVVEVSTSKTGKHGHAKCHFVGIDIFTAKKLEDIVPSSHNCDVPHVTRTDYQLIDISEDGFVSLLTESGNTKDDLRLPTDENLLAQIKDGFAEGKDLVVSVMNAMGEEQICALKDIGPK

SEQ ID NO: 15732 - protein, 159 aa, Elaeis guineensis
MSDEEHHFESKADAGASKTFPQQAGAIRKNGYIVIKGRACKVVEVSTSKTGKHGHAKCHFVGIDIFNGKKLEDIVPSSHNCDVPDVNRTEYQLIDISEDGFVSLLTENGNTKDDLRLPTDEPLLTQIKDGFAEGKDLVVTVMSAMGEEQICALKDIGPK

SEQ ID NO: 15733 - protein, 589 aa, Elaeis guineensis
MCGILAVLGCSDDSQAKRVRVLELSRRLKHRGPDWSGLHQYGDCFLAHQRLAIIDPASGDQPLYNEDKTIIVTVNGEIYNHEELRSQLSDHKFRTGSDCEVIAHLYEEHGENFVDMLDGIFSFVLLDARDHSFLVARDAIGVTPLYIGWGIDGSIWISSEMKGLNDDCEHFELFPPGHLYSSKEGGFKRWYNPPWYSESIPSVPYDPLVLRKAFEDAVIKRLMTDVPFGVLLSGGLDSSLVAAVTVRHLAGTKAAKQWGTQLHSFCVGLEGSPDLKAAKEVANYLGTVHHEFHFTVQDGIDAIEDVIYHIETYDVTTIRASTPMFLMSRKIKALGVKMVISGEGSDEIFGGYLYFHKAPDKEEFHRETCHKIKALHQYDCLRANKATSAWGLEARVPFLDKEFIHVAMSIDPEWKMIKPDLGRIEKWVLRKAFDDEEIPYLPKHILYRQKEQFSDGVGYSWIDGLKAHAEEHVTDRMMLNAKRIYPHNTPTTKEAYHYRMIFERFFPQNSARVTVPGGPSVACSTAKAIEWDSQWSNNLDPSGRAALGVHVSAYDPQVPTASAGKGPAKITHKKPRMVEVAAPSLTIQT

SEQ ID NO: 15734 - protein, 571 aa, Bacillus subtilis subsp. subtilis str. 168
MLTKATKEQKSLVKNRGAELVVDCLVEQGVTHVFGIPGAKIDAVFDALQDKGPEIIVARHEQNAAFMAQAVGRLTGKPGVVLVTSGPGASNLATGLLTANTEGDPVVALAGNVIRADRLKRTHQSLDNAALFQPITKYSVEVQDVKNIPEAVTNAFRIASAGQAGAAFVSFPQDVVNEVTNTKNVRAVAAPKLGPAADDAISAAIAKIQTAKLPVVLVGMKGGRPEAIKAVRKLLKKVQLPFVETYQAAGTLSRDLEDQYFGRIGLFRNQPGDLLLEQADVVLTIGYDPIEYDPKFWNINGDRTIIHLDEIIADIDHAYQPDLELIGDIPSTINHIEHDAVKVEFAEREQKILSDLKQYMHEGEQVPADWKSDRAHPLEIVKELRNAVDDHVTVTCDIGSHAIWMSRYFRSYEPLTLMISNGMQTLGVALPWAIGASLVKPGEKVVSVSGDGGFLFSAMELETAVRLKAPIVHIVWNDSTYDMVAFQQLKKYNRTSAVDFGNIDIVKYAESFGATGLRVESPDQLADVLRQGMNAEGPVIIDVPVDYSDNINLASDKLPKEFGELMKTKAL

SEQ ID NO: 15735 - protein, 869 aa, uncultured Roseobacter sp.
MNLDKFTERSRGFIQAAQTIAQREDHARLGPEHLLKALLDDKEGLASNLIARSGGVPQRVLEHLNLTLSKIAKVTGDAQVYVDGTTGKVLAEAEKLAQKAGDSFVPVERILMALCMVKSKAKEALDAGAVTAQKLNGAIEDIRQGRTADSASAEDSYEALKKYAQDLTARAREGKIDPIIGRDEEIRRAMQVLSRRTKNNPVLIGEPGVGKTAIAEGMALRIINGDVPESLRNKRLLALDMGALIAGAKYRGEFEERLKAVLNEVTSAAGDILLFIDEMHTLVGAGKGDGAMDAANLIKPALARGELHCIGATTLDEYRKYVEKDAALARRFQPVQVEEPSVTDTISILRGIKEKYELHHGVRIADAALVAAATLSNRYITDRFLPDKAIDLVDEAASRLRMQVDSKPEELDALDRDILQKQIEVEALKLEDDAASKTRLAALEKSLADLQERSSELNAQWQAERDKLASAREIKEQLDRARADLDIAKREGNLGKAGELSYGVIPELEKSLAEAEAAEGHMVEEAVRPDQIAGVVERWTGIPTSRMLEGERDKLLRMEEELHARVIGQSAAVKAVSNAVRRARAGLNDESRPLGSFLFLGPTGVGKTELTKAVANFLFDDDAAMVRIDMSEFMEKHSVSRLIGAPPGYVGYDEGGVLTEAVRRRPYQVVLFDEVEKAHPDVFNILLQVLDDGVLTDSQGRTVDFKQTLIVLTSNLGAQVLSELPEGVESSEARREVMEAVRGHFRPEFLNRLDETIIFDRLNRQDMDGIVDIQLGLLQSRLAPREISLELDASAKTWLADEGYDPVFGARPLKRVIQSALQNQLAEMLLAGEVSDGDIVPVTAGSEGLIVGDRVSGSNRLPPKDAVVH

SEQ ID NO: 15736 - protein, 279 aa, Campylobacter jejuni
MKKILLSVLTTFVAVVLAACGGNSDSKTLNSLDKIKQNGVVRIGVFGDKPPFGYVDEKGNNQGYDIALAKRIAKELFGDENKVQFVLVEAANRVEFLKSNKVDIILANFTQTPERAEQVDFCLPYMKVALGVAVPKDSNITSVEDLIDKTLLLNKGTTADAYFTQDYPNIKTLKYDQNTETFAALMDKRGDALSHDNTLLFAWVKDHPDFKMGIKELGNKDVIAPAVKKGDKELKEFIDNLIIKLGQEQFFHKAYDETLKAHFGDDVKADDVVIEGGKI

SEQ ID NO: 15737 - protein, 314 aa, Aegilops ventricosa
  misc_feature (235)..(235): Xaa can be any naturally occurring amino acid
  unsure (1)..(314): unsure at all Xaa locations
MAMGSASCISLVVLVALATAVSGQLSSTFYDTSCPRALATIKSGVAAAVSSDPRMGASLLRLHFHDCFVQGCDASVLLSGMEQNAGPNVGSLRGFGVIDSIKTQLESICKQTVSCADILTVAARDSVVALGGPSWTVPLGRRDSTTASASLANSDLPGPGSSRSQLEAAFLKKNLNTVDMVALSGAHTIGKAQCSNFRTRIYGGDTNINTAFATSLKANCPQSGGNSNLANLDTXTPNTFDNAYYTNLLSQKGLLHSDQVLFNNDTTDNTVRNFASNAAAFSSAFTTAMIKMGNIAPLTGTQGQIRLSCSKVNS

SEQ ID NO: 15738 - protein, 316 aa, Triticum aestivum
MASASCLGLVVLVAMASAASAQLSSTFYDTSCPNALATIKAGVTAALNTETRMGASLVRLHFHDCFVDGCDGSVLLADTGSFIGEQGAAPNNNSIRGMNVIDNIKTQVEAVCKQTVSCADILAVAARDSVVALGGPTWTVLLGRRDSTTASKTNAENDLPPPTFDLQNLTTLFGNKQLSMTDMVALSGAHTIGQSQCRFFRDRIYNETNINTTFATSLRANCPQSGGDSSLAPLDTATPNAFDNSYYTNLMSQKGLLHSDQVLFNGGGADNTVMSFATSAATFNSAFTTAMINMGNIAPKTGTQGQIRLVCSKVNS

SEQ ID NO: 15739 - protein, 321 aa, Triticum aestivum
MAMAMAPSLSVLLLLCLAAAASASPPLSPQFYAKSCPRALATIKSAVTAAVRSEPRMGASLLRLHFHDCFVQGCDASVLLSDTATFTGEQGAAPNARSIRGMNVIDNIKAQVEAVCRQTVSCADILAVAARDSVVALGGPSWTVPLGRRDSTTASLSLANSDLPAPSFDLANLTANFAAKGLSVTDMVALSGGHTIGQSQCRFFRSRLYNETNIDAAFATSLKANCPRTTSSGNSSLAPLDTTTPNGFDNAYYSNLMSQKGLLHSDQVLINDGRTAGLVRTYSSASAQFNRDFAAAMVRMGNISPLTGAQGQIRLSCSRVN

SEQ ID NO: 15740 - protein, 321 aa, Triticum aestivum
MAMAMAPSLSVLLLLCLAAAASASPQLSPQFYAKSCPRALATIKSAVTAAVRSEPRMGASLLRLHFHDCFVQGCDASVLLSDTATFTGEQGAAPNARSIRGMNVIDNIKAQVEAVCRQTVSCADILAVAARDSVVALGGPSWTVPLGRRDSTTASLSLANSDLPAPSFDLANLTANFAAKGLSVTDMVALSGGHTIGQSQCRFFRSRLYNETNIDAAFAASLKANCPRSTGSGNSSLAPLDTNTPNGFDNAYYSNLMSQKGLLHSDQVLINDGRTAGLVRTYSSASAQFNRDFAVAMVRMGNISPLTGAQGQIRLSCSRVN

SEQ ID NO: 15741 - protein, 313 aa, Triticum aestivum
MASSSLSAVLLLCLAVAASAQLSPTFYDTTCPNALATIKSAVTAAVNKENRMGASLLRLHFHDCFVQGCDASVLLSGMEQNAFPNVMSLRGFEVIDSIKAKLETMCKQTVSCADILTVAARDSVVALGGPSWTVPLGRRDSTNANEAVANSDLPPPFFDLVNLTQSFGDKGFTVTDMVALSGAHTIGQAQCQNFRDRLYNETNINSGFATSLKANCPQPTGSGDRNLANLDVSTPYSFDNAYYSNLKSQKGLLHSDQVLFTGTGGGTDNTVNNFASNPAAFSSAFASAMVKMGNLSPLTGSQGQVRLSCSKVN

SEQ ID NO: 15742 - protein, 203 aa, Bradyrhizobium elkanii
QIKEFASFPTLEQLPLWGFDGSSTQQAEGHSSDCVLKPVACYPDAARENGVLVMCEVMMPDGKTPHVSNKRATVLDDEGAWFGFEQEYFFYKDGRPLGFPEEGYPAPQGPYYTGVGYKNVGSVARKIVEEHLNLCLAAGINHEGINAEVAKGQWEFQIFGKGSKTAADQMWMARYLMLRLTESYGIDIEFHCKPLGDTDWNGS

SEQ ID NO: 15743 - protein, 203 aa, Bradyrhizobium yuanmingense
QIKEFASFPTLEQLPLWGFDGSSTQQAEGHSSDCVLKPVAVFPDGARTNGVLVMCEVMMPDGKTPHPSNKRATILDDSGAWFGFEQEYFFYKDGRPLGFPTAGYPAPQGPYYTGVGFSNVGDVARKIVEEHLDLCLAAGINHEGINAEVAKGQWEFQIFGKGSKTAADQMWMARYLMLRLTEKYGIDIEFHCKPLGDTDWNGS

SEQ ID NO: 15744 - protein, 203 aa, Bradyrhizobium yuanmingense
QIKEFASFPTLEQLPLWGFDGSSTQQAEGHSSDCVLKPVAVFPDGARTNGVLVMCEVMMPDGKTPHASNKRATILDDAGAWFGFEQEYFFYKDGRPLGFPTSGYPAPQGPYYTGVGFSNVGDVARKIVEEHLDLCLAAGINHEGINAEVAKGQWEFQIFGKGSKTAADQMWMARYLMLRLTEKYGIDIEFHCKPLGDTDWNGS

SEQ ID NO: 15745 - protein, 203 aa, Rhizobium leguminosarum
QIKEFDVFPTLEQLPLWGFDGSSTMQAEGRSSDCVLKPVAIYPDPARTNGALVMCEVMMPDGVTPHPSNARATILDDEDAWFGFEQEYFFYQNGRPLGFPEQGYPAPQGPYYTGVGYSNVGDVAREIVEEHLDLCLAAGINHEGINAEVAKGQWEFQIFGKGSKKAADQIWMARYLLQRLTEKYGIDIEYHCKPLGDTDWNGS

SEQ ID NO: 15746 - protein, 203 aa, Rhizobium leguminosarum
QIKEFDVFPTLEQLPLWGFDGSSTMQAEGRSSDCVLKPVAIYPDPARTNGALVMCEVMMPDGVTPHASNARATILDDEDAWFGFEQEYFFYQNGRPLGFPEQGYPAPQGPYYTGVGYSNVGDVAREIVEEHLDLCLAAGINHEGINAEVAKGQWEFQIFGKGSKKAADQIWMARYLLQRLTEKYGIDIEYHCKPLGDTDWNGS

SEQ ID NO: 15747 - protein, 203 aa, Rhizobium etli
QIKEFDAFPTLEQLPLWGFDGSSTMQAEGRSSDCVLKPVAIYPDPARTNGVLVMCEVMMPDGVTPHPSNARATILDDEDAWFGFEQEYFFYQNGRPLGFPEQGYPAPQGPYYTGVGYSNVGDVAREIVEEHLDLCLAAGINHEGINAEVAKGQWEFQIFGKGSKKAADQIWMARYLLQRLTEKYGIDIEYHCKPLGDTDWNGS

SEQ ID NO: 15748 - protein, 203 aa, Rhizobium huautlense
QIKEFDSFPTLEQLPLWGFDGSSTMQAEGRSSDCVLKPVALYPDPARTNGVLVMCEVMMPDGVTPHPSNSRATILDDEDAWFGFEQEYFFYENGRPLGFPESGFPAPQGPYYTGVGYKNVGSIAREIVEEHLDLCLAAGINHEGINAEVAKGQWEFQVFGKGSKKAADQIWMARYLLLRLCEKYGIDIEFHCKPLGDTDWNGS

SEQ ID NO: 15749 - protein, 541 aa, Arabidopsis thaliana
MLHCHYNRRKDGTPFNTSIITPPPPPVVDPPPATHRAPPVPRIPPVSGVPPAPFAPFAPLQPQQHPPPSPPLVWSPPSSDNGGGDPWNSVSGQPTLQISPPSGSGSGKFWSTQRIILVVSSVAIIVLVSGLCVTLWRCCRSKIYNRYYSGARKDLQRPYFNKPPSQPTPTMGKVSREPMVKPFDGYGAGDRKYGYPMPQRAEESRRAMPPTSYYNKDVNTPQKPLQQPPRQFQSNDTASKRAAHFPPGLNSSSSATVFTIASLQQYTNNFSEENIIGEGSIGNVYRAELRHGKFLAVKKLSNTINRTQSDGEFLNLVSNVLKLKRGHILELLGYCNEFGQRLLVYEYCPNGSLQDALHLDRKLHKKLTWNVRINIALGASKALQFLHEVCQPPVVHQNFKSSKVLLDGKLSVRVADSGLAYMLPPRPTSQMAGYAAPEVEYGSYTCQSDVFSLGVVMLELLTGRRPFDRTRPRGHQTLAQWAIPRLHDIDALTRMVDPSLHGAYPMKSLSRFADIISRSLQMEPGFRPPISEIVQDLQHMI

SEQ ID NO: 15750 - protein, 387 aa, Zea mays
MADQANQPTVLHKLGGQFHLSSSFSEGVRARNICPSFSPYERRFATRNYMTQSLWGPSMSVSGGINVPVMPTPLFANAPAEKGGKNFMIDFMMGGVSAAVSKTAAAPIERVKLLIQNQDEMIKSGRLSEPYKGIADCFKRTIKDEGFSSLWRGNTANVIRYFPTQALNFAFKDYFKRLFNFKKDRDGYWKWFAGNLASGGAAGASSLFFVYSLDYARTRLANDAKAAKGGGDRQFNGLVDVYRKTLKSDGIAGLYRGFNISCVGIIVYRGLYFGLYDSIKPVVLTGSLQDNFFASFALGWLITNGAGLASYPIDTVRRRMMMTSGEAVKYKSSLDAFQQILKKEGPKSLFKGAGANILRAIAGAGVLSGYDQLQILFFGKKYGSGGA

SEQ ID NO: 15751 - protein, 714 aa, Mycoplasma arthritidis 158L3-1
MEFSFTPNDDNKDVLKEYGRNLTDLALQNKLEPVINRDEEIRALVRILSRKTKNNPVLVGEPGTGKTAIVEGLARKIVEGQVPENLQGKDIIELDLAALIAGTQFRGQFEERLKKVTKKVEESNGNIILFIDEIHMLVGAGSTSEGTMDAANILKPLMARGQLHLIGATTLDEYREHIEKDPALERRMQKVAIEEPSIDDTIAILRGIKERYETYHEVKIEDEALVAAANLSARYISDRFLPDKAIDLIDEAASNIKTEMKYLPEPLEKINQQIARLEIEKAAISEEKTQKSKERFVEIQKELEEIKKQKEVIEKKWQAEKEDIQKLSSTKESIEELRAKLPILQSEGNYIEASKIMYVQIPELIKKQNEIEEKINSRKDPLIKELVDAEEVATIVSKWSKIPVNKLLESQKTKLMNLENVLGTRVKGQEQAIKVVSEAIQRAKANINDPNRPIGSFLFLGPTGVGKTELARTLADCLFDDENRIIRLDMSEYMEKHSVSKLIGSPPGYIGFEKGGQLTEKVRQNPYSIVLFDEIEKANSDVLNLLLQIMDNGALTDSRGKKVNFRNTIIIMTSNIGSEEILNKTLDEQRTKTLLLEKLKPEFINRIDEIVTFNSLTIDNIKDIVKLELDKLLNRVKEQQNIILKYDDEVLEYVARKSYSPTFGARPIKRFLQKNVENMLAMEIISGKIKEYSEVPITIQNEKIIIATDQTFFN

SEQ ID NO: 15752 - protein, 324 aa, Mycoplasma arthritidis 158L3-1
MKAKQNNEIVIFGMENSQDLANKIGEHLNMPIVPVQKIKFADGEELLYSNEVVRNKTVFVICNTGKPVNDNLMGLLIFIDSLKRASAKAIIVVMTYYGYARQDRKASGRQPITAKLVADLLTVAGATKIITTDLHNPSIQGFFNIPVDDLGGQFIFSNELRKRKENYVIVSPDHGGAVRARQLSELLMHDEEIAIIDKRRTAPNKSEIMGVLGNVEGKNVIVYDDIIDTGGTIINAARILKQRGAKKIIIAATHGLFSRGFQMFEDEAIIDEVIVSDSTNHDDIAHFSKLKVISMAHFLSLVIGANINKTSITEVYDAFSKGIV

SEQ ID NO: 15753 - protein, 422 aa, Mycoplasma arthritidis 158L3-1
MKFIDEVNVLVKAGKGGDGIISFRREANVDRGGPDGGNGGRGGNVYFRGDSGLNTLLAFHYQNKISAKDGESGKPKNAYGAAGADEIVKVPLGTLVYYEDNLIADVIEPKDYLIAKGGRGGRGNLMFKSAKNTAPRICENGESGEKFALRLVLKVLADVGLVGKPSAGKSSLLNALSNAKAKTADYDFTTLVPQLGMLKYYDKSCTIADLPGLIAQASEGKGLGFQFLKHIERCKVIAHVIDFGSSLKDPILDYETIKKELKDYNLNLEALPHVIIANKSDQEIFATNLKKFKKAYPTLPIVAISALYQKNLDELKAAIFKMLEQANQQTKSNVVENEIAINITLDRDALKIRKLSENVYEIESKKVLNVVEKIPVSSLDNLWRINNKLKKLGVFELIKKHNVPEGATIKIGNFEFDWSDEE

SEQ ID NO: 15754 - protein, 101 aa, Mycoplasma arthritidis 158L3-1
MFAIIETGGKQIIVKAGDTIFIEKIEGKEGDKVSFDKVLAINDKIGTPYLENAAVLAAIEKQGKAKKIVVYRHNAKSTHKRKLGHRQPYTRVKILEIKEAK

SEQ ID NO: 15755 - protein, 294 aa, Mycoplasma arthritidis 158L3-1
MNKKVCIVALIGRPNTGKSTLMNHLISYELAIVSKHAQTTRDDIKGFYNDDEYQIIFIDTPGIHKGESLLSKRLNKRAQDALKDVDLVLFLSPANEVVGKGDEFIIKTIEDAGVKNKLAIISKVDLVDDKTKLDKKAGYLKKMGFASVFGVGKGHDQSYRDLLEIIKTYAKEDEAMYPEDYISDVSMRFIAKEIIRESAIKRLFQELPHSIAVEITDFIERDKSPYIINGTIYVKKESQKGILIGHNASMIKEISVEARKKMQQIFDHSVFLKVNVKISNNWVNDEKEIKKLGY

SEQ ID NO: 15756 - protein, 397 aa, Mycoplasma arthritidis 158L3-1
MKKILVINAGSSSIKWSLFNDKLALEAKGVAQKIKLPLGILTLEYQNQKHEIELPLPSFLEAVKKLVEQWEEYHIIKDFSEISQVAFRIVNGGPNLQDTCEVNEKTIAYFKEVLDLAPVHNPGALETILAFEKLFPQAKKTMHFDTSFHRTLPRVAYTYPIDYEITKKYYIRKYGFHGLNHHYIAKKSEEIFGHKDVNIVSLHIGNGASLCAIENGKSIDTSMGFTPLDGVMMGTRCGEIDPSIIPYIAKHSGMQLDEIMKMLNEKSGMLGVSQISPDIRDIHKVKSINPQAQFALDLYVEKITNYLIKYLNKIHGKIDGIVFTAGVGENDSYVRSQVIKKINLLKLEIDEEINKDRSYSDYKLISTKNSALPIYMVRANEEQFIVTEAKNFFDAKK

SEQ ID NO: 15757 - protein, 332 aa, Mycoplasma arthritidis 158L3-1
MAGAKENKNLTKHFKIIKQIGRGGFGTVFSAVHRASGKKFAVKVLTINGPRQQIVYKRFENEIKVIKRIKSKNVVRLFGHYITPKESYMAMELVEGTDLKTQISKKRKIPLEEAIEYAKEICNGLIDIHKENVVHRDLKPSNILITYDGTIKLIDFGISLGDDSLRLTDERKLIGSVQYVSPELVLKQAEPSPQSDIYALGIVLYEMLTGKAPFTGSDHQTIALSHTKREIPRLEQVNVLVPQAVENIIIKCTAKNPDDRYVSCVELYEDLSTCLSQKRANEPRLIIGKSSKKEAFIKKVNSKAMTISLILIGAISIVIIIVLIVLHLKKII

SEQ ID NO: 15758 - protein, 393 aa, Herminiimonas arsenicoxydans
MSSHLTQLASRLDNIAPFHVMELAKMAAELERQGRHIIHMGIGEPDFTAAPSVLAAAAQAMADGRMQYTSATGLPELRAAIAAHYRDMYGVDVAPSRIIITAGASGALLLACAALVEKGAEVLMSDPSYPCNRHFVAAFDGSAKMIASGPEHRFQLSADMVQQNWGEQTRGVLLASPSNPTGTSIDEDELRKIVEVVRGKQGFTIVDEIYHGLRYDAAPFSALSLGDDVIVINSFSKYFNMTGWRLGWLVVPETLVPPIEKLAQNLFICASSLAQHAGLACFAPAAMTVYEARKAEFKRRRDYIVPALEELGFKVPVMPDGAFYVYADCSALSDDADELTIAMLNEAGVVMVPGLDFGPSTAHRYVRISYATSMENLQEAIARLRIFLSGRTQ

SEQ ID NO: 15759 - protein, 227 aa, Lotus japonicus
MDSPLTFNSSNSEFSSESSSFETNYLPFNENDPEEMLLYGMIADGANSLHHHHHHQMFDGRAMSIKEEEVSSEENGCGSSPRKEKSYRGVRRRPWGKFAAEIRDSTRNGVRVWLGTFDSAEAAALAYDQAAFAMRGSSAILNFPVDVVRESLSEMNCGDYGSEEGGSPVVALKRKHSLRRKIGVKKSKESDGRRSGMEMNNAVVFEDLGSDYLEQLLMSSDQVPCNW

SEQ ID NO: 15760 - protein, 284 aa, Lotus japonicus
MESGRLYFDNNRGNNMNTFFLGNADLGFRGRSMMSMEEGSKRRPFFSSPDELYDEEYYEEQSPEKKRRLTSEQVNLLEKSFEEENKLEPERKTQLAKKLGLQPRQVAVWFQNRRARWKTKQLERDYDVLKSSYDSLLATYDTIAKENEKLKSEVVSLNEKLQVQATEMPGEPPSDKKADPLPVDMVQIFSMKVEDHMSSGSVGSAVVDEGSPQLVVDSVDSYFPADNYVECVVAPAAERVQSEEEDGSDDGRSYLDVFVISETEQQNHENGEGLNWWGNMYYVA

SEQ ID NO: 15761 - protein, 328 aa, Lotus japonicus
MAMQTANLIEHEGIAHNFVGQLSSATSAPWWSAFGSQAVYGESCGQMKPFSLEPPISVDQLAAGKQSARGAEQVLAKGHTTQFTIFPDDCKVLGNAQKPQTTISLQSSPTDTHSRFELGFSQPMICAKYPYTDQFYGLFSTYGPQISGRIMLPLNLTTDEGPIYVNAKQYHGIIRRRQSRAKAVLDRKMTKRRKPYLHESRHLHALRRPRGCGGRFLNTKVSANGNGKTGRDVKKTGGEQLQSSGSQGSDVFQSEVGTLNSSKETNGSGPNVSGLEVTSMYSRGGFDTFSFNHLGSSVYPLADMVDCGRGIMPTKWVAAGGNSCNLNT

SEQ ID NO: 15762 - protein, 285 aa, Lotus japonicus
MHGESTYDSDLAILESIRRHLLGESDICIFGAPISNSGNPPVYVRSSSFSKLYPCLTDNWGELPLKEDDSEDMMLYGVLRDAVNEGWVPSLDSSGFLPVKSEPELFPAVQSPPERVVPAPVIPKEEVMPAAAPAKGKHYRGVRQRPWGKFAAEIRDPAKNGARVWLGTFETAEDAALAYDRAAYRMRGSRALLNFPLRVNSGEPDPVRVPSKRSLSSSSSCSSSSSSESGLTAKRRKKVVGPTVPVVTAQVGLKTEQVEESSCKVHTWRTVIGELKADVECNLLM

SEQ ID NO: 15763 - protein, 332 aa, Lotus japonicus
MAMQTVYLKEHERMGHSSVGQLSSVTSAPWWGSQSVYGDSCGQIKPFSLEFSNYVDHFAANKNPVRGAEQLFDKGLTTQFTIFSDDCKMSGEAQNLEATLSLQPSVTVAEPRNRFELGFNQPMICAKYPYMDQFYGLFSAYGPQIPGRMMLPLNLSTDDGPIYVNAKQYHGIIRRRQSRAKAVQENKLIKRSKPYMHESRHLHAMRRPRGCGGRFLNTRNSSDGNGKSGSELHKKTGGLGRHMQSSASQSSEVLQSEVGTLNSSKETNGSSPNISGSEVTSMCSLGGLDSFAVNHLGSAIHHSLADMIDGGHGIIMPTKWVGAAGSCFNLKV

SEQ ID NO: 15764 - protein, 380 aa, Lotus japonicus
MIMQKESPPRRRRFGHIHRHVWLAFLLLLIIQLSMPATAQTMAPEMEPDSNKSVATIMGIVALMFLVSGFLSLYSGKCTERQAGRLTLAHAAAGGSGHRQLNELSNGLNQEVIDTFPTFLYSHVKCLKIGKGTLACAVCLNEFEDDETLRLIPICNHVYHHSCIDLWLASHSTCPVCRASLLPITPDDTATNLPPPTVSILMPEDQEEENSLNEEQERDSENDNQKSSDHSYTEPLRRCRTTSHPIRSRSTGFLSSLLSPVDRNRHSVVVQPGEDCERFTLRLPDEVRSQMLSSTALKRAKSCVSFTRMSSGTWGYRTRSVGRFGSDHEQWGCTLTPPNFGWNWNRSVKKSPARCSGVAKDSEAGERSSDFLCPPQINMI

SEQ ID NO: 15765 - protein, 275 aa, Lotus japonicus
MKPIEGIVVTNTCPKPESMLEIKKARPQKEEAVNCPRCHSINTKFCYYNNYSLTQPRYFCKTCRRYWTEGGSLRNIPVGGGSRKNKHRSNSVISTPSTTSNKNLPDLVTPTCTPNPKIFNDGQDLNLGFPKISELVHQNNNTSFCSTTTSSTSHLSALGLLTGITSSSSSSRGLQYSFMPVPVSADPNTVYTTCGFPMHDFKPTLNFTLDGNGSDYASFQGHVQDTSTGRVLFPFEDLKQVSSTTARMDHNNDKEVQQGDSAGYWSGMLGGGGSW

SEQ ID NO: 15766 - protein, 653 aa, Capsicum annuum
MAAAAPPPPPFTKTLSHSPSSSAKSPTLLPRSTFPFTRPLLLIHRRRFTVNNVISTNHNVSLSQPPETFITRFAPDEPRKGCDVLVEALEREGVTDVFAYPGGASVEIHQALTRSNIIRNVLPRHEQGGVFAAEGYARATGFPGVCIATSGPGATNLVSGLADALLDSIPIVAITGQVPRRMIGTDAFQETPIVEVTRSITKHNYLVMDVEDIPRVVREAFFLAKSGRPGPVLIDVPKDIQQQLVIPNWDQPMRLPGYMSRLPKLPNEMLLEQIVRLISESKKPVLYVGGGCSQSSEELRRFVELTGIPVATTLMGLGAFPTGDDLSLQMLGMHGTVYANYAVDSSDLLLAFGVRFDDRVTGKLEAFASRAKIVHIDIDSAEIGKNKQPHVSICADIKLALQGLNSILEGKEAKLKKLDFSAWRQELNEQKVKYPLNYKTFGDAIPPQYAIQVLDELTDGNAIVSTGVGQHQMWAAQYYKFKKPRQWLTSGGLGAMGFGLPAAIGAAVGRPGEIVVDIDGDGSFIMNVQELATIKVENLPVKIMLLNNQHLGMVVQWEDRFYKANRAHTYLGNPANEEEIFPNMLKFAEACGVPAARVTHRDDVRAAIQKMLDTPGPYLLDVIVPHQEHVLPMIPSGGAFKDVITEGDGRCSH

SEQ ID NO: 15767 - protein, 1625 aa, Capsicum annuum
MAVNPVANVPQLLYANGQPPKILTGSKDGVFVDFVGLNCKSSKRIRRRIGYAAANRRSFINNRWNAINAVLDLERVASNISQQSASIVPKVADLDDILSERGACGVGFIANLDNKASHGIVKDALVALGCMEHRGGCGADNDSGDGSGLMTSIPWDLFNDWAEKEGIAVFDKLHTGVGMIFLPKDCNQMNEAKKVISNIFNNEGLEVLGWRSVPVDSSVVGYYAKETMPNIQQVFVRIVKEENVDDIERELYICRKLIERAVNSEIWGNELYFCSLSNQTIVYKGMLRSEVLGRFYYDLQSELYTSPLAIYHRRYSTNTSPRWPLAQPMRFLGHNGEINTIQGNLNWMQSREASLKSTVWRDREDEIRPFGNPKASDSANLDSAAELLIRSGRAPEEALMILVPEAYQNHPTLTIKYPEVLDFYNYYKGQMEAWDGPALLLFSDGKTVGACLDRNGLRPARYWRTEDNIVYVASEVGVIPMDDSKVTMKGRLGPGMMISVDLSSGQVFENTEVKKRVALSNPYGEWVKENLRSLKPMNFLSTTVIDGETILRRQQAYGYSSEDVQMVIESMAAQGKEPTFCMGDDIPLAVLSQKPHMLYDYFKQRFAQVTNPAIDPLREGLVMSLEVNLGKRRNILEVGPENASQFILPSPVLNEGELESLLKDSHLKPHVLPTFFDVGKGVDGSLKRSLYKLCEAADEAVRNGSQLLVLSDRFDELEATRPAIPILLAVGAVHQHLIQNGLRMSASIIADTAQCFSTHQFACLIGYGASAVCPYLAFETCRQWRLSTKTVNLMRNGKMPSVTIEQAQKNFCKAVKSGLLKILSKMGISLLSSYCGAQIFEIYGLGKEVVDVAFCGSKSSIGGLTLDELARETLSFWVKAFSEDTAKRLENYGFIQFRQGGEYHGNNPEMSKLLHKAVRQKSESAYSVYQQHLANRPVNVLRDLLEFKSDRSPIPVGRVEPASAIVQRFCTGGMSLGAISRETHEAIAIAMNRLGGKSNSGEGGEDPIRWKPLTDVVDGYSPTLPHLKGLQNGDTATSAIKQIASGRFGVTPTFLANADQLEIKIAQGAKPGEGGQLPGKKVSAYIARLRNSKPGVPLISPPPHHDIYSIEDLAQLIYDLHQVNPKAKVSVKLVAEAGIGTVASGVAKGNADIIQISGHDGGTGASPVSSIKHAGGPWELGLTETHQTLIENRLRERVVLRVDGGFKSGFDVMMAAAMGADEYGFGSVAMIATGCVMARICHTNNCPVGVASQREELRARFPGVPGDLVNYFLYVAEEVRGMLAQLGYEKLDDIIGHTDILRPRDISLMKTRHLDLSYILSNVGLPEWSSSMIRNQEVHSNGPVLDDVLLADPKISDAIENEKVVNKTVEIYNIDRAVCGRIAGAVAKKYGDTGFAGQLNIIFTGSAGQSFACFLTPGMNIRLIGEANDYVGKGMAGGELVVTPVENTGFCPEDATIVGNTCLYGATGGQVFVKGKAGERFAVRNSLAQAVVEGTGDHCCEYMTGGCVVVLGKVGRNVAAGMTGGLAYILDEDETLIRKVNKEIVKIQRVVAPVGQMQLKNLIEAHVEKTGSTKGSLILKDWDKYLPLFWQLVPPSEEDTPEASAEYEQAAVGQVTLQFAEIPLK

SEQ ID NO: 15768 - protein, 432 aa, Capsicum annuum
MAQILAPSAQWQMRMTKSSTDASPLTSKMWSSVVLKQNKKLAVKSSAKFRVFALQSDNATVNRMEQLLNLDVTPYTDKIIAEYIWIGGSGIDMRSKSRTISKPVQHASELPKWNYDGSSTGQAPGEDSEVILYPQAIFKDPFRGGNNILVICDAYTPAGEPIPTNKRHKAAQIFSDPKVVSEVPWFGIEQEYTLLQPNVKWPLGWPVGAYPGPQGPYYCGAGADKSFGRDISDAHYKACLYAGINISGTNGEVMPGQWEFQVGPSVGIEAGDHIWCARYLLERITEQAGVVLTLDPKPIEGDWNGAGCHTNYSTLSMREEGGFEVIKKAILNLSLRHKEHISAYGEGNERRLTGKHETASIDQFSWGVANRGCSIRVGRDTEKQGKGYLEDRRPASNMDPYVVTGLLAETTILWEPTLEAEALAAQKISLKV

SEQ ID NO: 15769 - protein, 644 aa, Arabidopsis thaliana
MGNKKLLTGGSSKTHGSGSSYRDPLLQNQEDKPKANGSENGLNDLEYGVVEAANVGFGRVFALAKPDAGKLVIGTIALLIGSTTNLLVPKFGGMIIDIVSRDVKTPEQQTESLIAVRNAVVIILLIVVIGSICTALRAWLFNSASERVVARLRKDLFRHLMHQEIAFYDVTKTGELLSRLSEDTQIIKNAATTNLSEALRNVTTALIGVGFMFTSSWKLTLLALVVVPVISVAVKQFGRYLRELSHTTQAAAAVAASIAEESFGAVRTVRSFAKESYMVSQYSKKVDETLKLGLKQAVLVGLFFGGLNAAFTLSVITVVSYGAYLTIYGSMTVGALTSFILYSLTVGSSVSSLSSLYTTAMKAAGASRRVFQILDRVSSMSSSGDKCPVGNPDGDVELNDVWFAYPSRPSHMILKGISLRLTPGSKVALVGPSGGGKTTIANLIERFYDPLKGKILLNGVSLMEISHQYLHKQISIVSQEPILFNCSVEENIAYGFDGEASFTNIENAAKMANAHEFIEAFPDKYNTVVGERGLRLSGGQKQRIAIARALLTNPSVLLLDEATSALDAESEYLVQDAMDSLMAGRTVLVIAHRLSTVKTADCVAVISDGEVAEKGTHDELLSLNGIYTNLVKRQLQSSSSVTTL

SEQ ID NO: 15770 - protein, 280 aa, Thalassiosira weissflogii
PHSFPPHSVALQVLGTFILWFGWYGFNPGSTLGISGEGVPDVAALCAVTTTIAAASGSVSAMFTDMLPSRRSTGETMYDITMCMNGALSGLVGITAGCSVVEPWAAFVIGIVAGWTYIFWSALLVKLKIDDAVDAIPVHFGNGIWGCIAVGLFAEPTRTINAFGEHGHYGRFYSWGNGSADAHLLAAQVCGVLWIIGWVTVIMLPYFLILNAIGLFRVDALEEEVGLDISHHKGAAYDMSGPSADVQEKFEISRSQRKIRFPRRTLMKQPKQATLQLLDF

SEQ ID NO: 15771 - protein, 270 aa, Geobacillus stearothermophilus
MNKISFQPAIKWSGSKRSQAWNIIKLFPKFDRYYEPFVGGASITYALNPNRGICGDICKPLIEIWKIIKSDPLSIVNEYKKRWILLQEQGHTVYYEIRDNFNKTQNPYDLFFLTRTCVNGLIRFNKDGLFNNSFHHTRKGIHPDKLHKIILNWSYRLKNIEFRHGDYRVTTEDITKNDFIYLDPPYFNTRGRYYGTIDFNEFLEFLYSLNSRGIKFALSFDGKREDVNYMVELPKDLYKRHILIESGNSSFKKVMDKDPQKVFESLYLNW

SEQ ID NO: 15772 - protein, 357 aa, Bacillus subtilis subsp. subtilis str. 168
MTSYLSDYVQQIKPSGIRKFFDLAATMEGVISLGVGEPDFVTAWNVREASILSLEQGYTSYTANAGLYSLREEISRYLSNRFDLSYSPDNELIVTVGASQALDIAIRAIVNPGEEVIIPEPCFVAYDALVSLAGGIPVHVHTTADKGFKATAADFEAAVTEKTKAILICSPSNPTGSVYSKEELNEIAEFAKKHDVIVLADEIYAELTYDEEFTSIAALPGMKERTVVISGFSKAFAMTGWRLGFAAAPSLLRDAMLKIHQYAMMCAPAMAQFAALEGLKNGMEDVEKMKKSYRRRRNLFVESLNEIGLSCHHPGGRFLCFSIYQKHGNEFKNSLPEELLTQEKVAVVSWKCVWSER

SEQ ID NO: 15773 - protein, 164 aa, Malus floribunda
  misc_feature (8)..(8): Xaa can be any naturally occurring amino acid
  unsure (1)..(164): unsure at all Xaa locations
VVGRVIGXVLDSFTATTKMSVTYNTKLVCNGLELFPSVVTAKPRVEIQGGDMRSFFTLVMTDPDFPGPSDPYLREHLHWIVTDIPGTTDATFGREVVSYEMPKPNIGIHRFVFVLFKQNQRQSINTPSSRDHFSTRSFAAENDLGLPVAAVYFNAQRETAARRR

SEQ ID NO: 15774 - protein, 164 aa, Malus fusca
VVGRVIGDVLDSFTATTKMSVTYNTKLVCNGLELFPSVVTAKPRVEIQGGDMRSFFTLVMTDPDFPGPSDPYLREHLHWIVTDIPGTTDATFGREVVSYEMPKPNIGIHRFVFVLFKQNQRQSINTPSSRDHFSTRSFAAENDLGLPVAAVYFNAQRETAARRR

SEQ ID NO: 15775 - protein, 164 aa, Malus baccata
VVGRVIGDVLDSFTPTTHMSVTYNAKLVCNGLELFPSVVTAKPRVEIQGGELRSFFTLVMTDPDCPGPSDPYLREHLHWIVTDIPGTTDAAFGREALSYEMPKPNIGIHRFVFVLFKQKRRQSINPPSSRDCFSTRSFAAENDLGLPVAAVYFNAQRESAARRR

SEQ ID NO: 15776 - protein, 164 aa, Malus floribunda
VVGRVIGDVLDSFTPTTHMSVTYNTKLVCNGLELFPSVVTAKPRVEIQGGELRSFFTLVMTDPDCPGPSDPYLREHLHWIVTDIPGTTDAAFGREALSYEMPRPNIGIHRFVFVLFKQKRRQSINPPSSRDCFSTRSFAAENDLGLPVAAVYFNAQRESAARRR

SEQ ID NO: 15777 - protein, 164 aa, Malus fusca
VVGRVIGDVLDSFTPTTHMSVTYNAKLVCNGLELFPSVVTAKPRVEIQGGELRSFFTLVMTDPDCPGPSDPYLREHLHWIVTDIPGPTDAAFGREALSYEMPKPNIGIHRFVFVLFKQKRRQSINPPSSRDCFSTRSFAAENDLGLPVAAVYFNAQRESAARRR

SEQ ID NO: 15778 - protein, 164 aa, Malus kansuensis
  misc_feature (51)..(51): Xaa can be any naturally occurring amino acid
  unsure (1)..(164): unsure at all Xaa locations
VVGRVIGDVLDSFTPTTHMSVTYNAKLVCNGLELFPSVVTAKPRVEIQGGXLRSFFTLVMTDPDCPGPSDPYLREHLHWIVTDIPGTTDAAFGREALSYEMPRPNIGIHRFVFVLFKQKRRQSINIPSSRDCFSTRSFAAENGLGLPVAAVYFIAQRESAARRR

SEQ ID NO: 15779 - protein, 164 aa, Malus prunifolia
  misc_feature (8)..(8): Xaa can be any naturally occurring amino acid
  unsure (1)..(164): unsure at all Xaa locations
VVGRVIGXVLDSFTPTTHMSVTYNAKLVCNGLELFPSVVTAKPRVEIQGGELRSFFTLVMTDPDCPGPSDPYLREHLHWIVTDIPGTTDAAFGREALSYEMPRPNIGIHRFVFVLFKQKRRQSINIPSSRDCFSTRSFAAENDLGLPVAAVYFNAQRESAARRR

SEQ ID NO: 15780 - protein, 164 aa, Malus sieboldii
  misc_feature (8)..(8): Xaa can be any naturally occurring amino acid
  misc_feature (19)..(19): Xaa can be any naturally occurring amino acid
  unsure (1)..(164): unsure at all Xaa locations
VVGRVIGXVLDSFTPTTHXSVTYNAKLVCNGLELFPSVVTAKPRVEIQGGELRSFFTLVMTDPDCPGPSDPYLREHLHWIVTDIPGTTDAAFGREALSYEMPRPNIGIHRFVFVLFKQKRRQSINIPSSRDCFSTRSFAAENDLGLPVAAVYFNAQRESAARRR

SEQ ID NO: 15781 - protein, 641 aa, Zea mays
MVYVMEQLACRLCARILALKKYCGICLKNLQHKYGGRRVCCHGCESWVHAECDENCSNLKDLQDKKYHCPYCRVKMNSTLPGKNTKISDVRKDSSAQKGSKPDKVALVCFDMEGTYEPDLELISCHCGPCKGQKFLFNEWERHAGCRSKNWRSSIKLKGSLMPFGKWIDRHQPGVCPTNPPKRSSQKMKKQKLIDLLNDPYDPVNVKWTTERCAVCRWVEDWDYNKIVICNRCQIAVHQECYGVRGKQDFTSWVCRACEKPEQKRECCLCPVKGGALKPTNVDNLWVHVTCAWFQSQVAFASDELMEPAIGILNIQPLLFMKMCVICKQIHGSCTQCYRCSTYYHAICASRAGYRMELHCLEKNGRQTTKKISYCAQHRSPNPDNVLIIQTPAGTFSSKKLVHSNGKVAASRLIRKDIPLDLPSEVKISENLSAARCRVYVRKDLKRSREGTIVHHVRGPCQHRWEEIDNLNPPREERDPESFCTFKERLCYLQKTEHGRVCFGRSGIHRWGLFARRDIQEGEMVLEYRGEQVRRSVADLREEKYRVQGKDCYLFKISEEVVVDATDKGNVARLINHSCTPNCYARIMSVGHDESRIVLIAKKKVCAGDELTYDYLFDPDEADERKVPCLCQTANCRKFMN

SEQ ID NO: 15782 - protein, 756 aa, Sinorhizobium meliloti 1021
MEFYKAFPIAVIDEDYEGKSAAGRGMRSLAEAIEKEGYRVVAGLTYEDARRLVNVFNTESCWLISVDGTESSTTRWEILAELLAAKRSRNNLLPIFLFGDDTTAEMVPAPVLRHANAFMRLFEDSPEFMARAIVRAAQNYLERLPPPMFKALMEYTLHGAYSWHTPGHGGGVAFRKSPVGQLFYTFFGENTLRSDISVSVGSVGSLLDHVGPIGEGERNAARIFGADETLFVVGGTSTANKIVWQGMVTRNDLVLCDRNCHKSILHSLIMTGATPIYLTPSRNGLGIIGPIAKEQFTPEAIAHKIVASPFASETNGKVRLMVVTNSTYDGLCYNVDGIKSALGDAVEVLHFDEAWFAYANFHEFYDGYHAISSTKPARSQEAITFATQSTHKLLAAFSQASMLHVQHAVAKQLDITRFNEAFMMHTSTSPQYGIIASCDVAAAMMEQPAGRALVQETIDEAMSFRRAVNAVRTQMQDSWWFEVWEPPIADRAPSDATSDWLLKPGDAWHGFEDLAENHVMVDPIKVTILSPGLNAGGAMLEHGIPAAVVTKFLSSRRIEIEKTGLYSFLVLFSMGITRGKWSTLITELLNFKDLYDANAPLSRALPALAAAHPDVYRAMGLRDLCEKIHDVYRSDGVPNAQREMYTVLPEMALRPADAYNRLVKGCVESVDIDELIGRTLAVMIVPYPPGIPLIMPGERITAATRSIQDYLVYARSFDRKFPGFETDIHGLRFVANPSGRRYLVDCIVEEGQDDTA

SEQ ID NO: 15783 - protein, 196 aa, Rhizobium tropici
PVPNLRGKTQIKEFADFPKLEELPLWGFDGSSTMQAEGRSSDCVLKPVAIYPDPARTNGALVMCEVMMPDGVTPHPSNSRATILDDEDAWFGFEQEYFFYKDGRPLGFPESGYPAPQGPYYTGVGYKNVGDVAREIVEEHLDLCLEAGINHEGINAEVAKGQWEFQIFGKGSKRAADQIWMARYLLLRLCEKYGID

SEQ ID NO: 15784 - protein, 196 aa, Rhizobium etli
PVPNLRGKTQIKEFDAFPTLEQLPLWGFDGSSTMQAEGRSSDCVLKPVAIYPDPARTNGVLVMCEVMMPDGVTPHPSNARATILDDEDAWFGFEQEYFFYQNGRPLGFPEQGYPAPQGPYYTGVGYSNVGDVAREIVEEHLDLCLAAGINHEGINAEVAKGQWEFQIFGKGSKKAADQIWMARYLLQRLTEKYGID

SEQ ID NO: 15785 - protein, 196 aa, Rhizobium tropici
PVPNLRGKTQIKEFDAFPTLEQLPLWGFDGSSTMQAEGRSSDCVLKPVAIYPDPARTNGALVMCEVMMPDGVTPHPSNSRATILDDEDAWFGFEQEYFFYQDGRPLGFPESGYPAPQGPYYTGVGYKNVGDVAREIVEEHLDLCLEAGINHEGINAEVAKGQWEFQIFGKGSKKAADQIWMARYLLLRLCEKYGID

SEQ ID NO: 15786 - protein, 196 aa, Rhizobium giardinii
PVPNLRGKTQIKEFETFPTLEQLPLWGFDGSSTQQAEGRSSDCVLKPVAIYPDPARTNGALVMCEVMMPDGVTPHPSNSRATILDDEDAWFGFEQEYFFYENGRPLGFPESGYPAPQGPYYTGVGYSNVGSVAREIVEEHLDLCLAAGINHEGINAEVAKGQWEFQIFGKGSKKAADQIWMARYLLLRLCEKYGID

SEQ ID NO: 15787 - protein, 196 aa, Rhizobium leguminosarum
PVPNLRGKTQIKEFDAFPTLEQLPLWGFDGSSTQQAEGRSSDCVLKPVAIYPDPARTNGALVMCEVMMPDGVTPHASNARATILDDEDAWFGFEQEYFFYQNGRPLGFPEQGYPAPQGPYYTGVGYSNVGDVAREIVEEHLDLCLAAGINHEGINAEVAKGQWEFQIFGKGSKKAADQIWMARYLLQRLTEKYGID

SEQ ID NO: 15788 - protein, 196 aa, Rhizobium gallicum
PTPNLRGKTQIKEFDAFPALEQLPLWGFDGSSTMQAEGRSSDCVLKPVAVYPDPARTNGALVMCEVMMPDGVTPHPSNSRATILDDEDAWFGFEQEYFFYENGRPLGFPEQGYPAPQGPYYTGVGYKNVGSVAREIVEEHLDLCLAAGINHEGINAEVAKGQWEFQIFGKGSKRAADQIWMARYLLLRLCEKYGID

SEQ ID NO: 15789 - protein, 196 aa, Rhizobium tropici
PVPYLFGKTQIKEFDAFPTLAQLPLWGFDGSSHMQAEGRSSDCVLKPVAIYPDPARTNGALVMCEVMMPDGVTPHESNSRATILDDEDAWFGFEQEYFFYQDGRPLGFPESGYPAPQGPYYTGVGYKNVGDVAREIVEEHLDLCLEAGINHEGINAEVAKGQWEFQIFGKGSKKAADQIWMARYLLLRLCEKYGID

SEQ ID NO: 15790 - protein, 196 aa, Rhizobium tropici
PVPNLRGKTQIKEFDAFPTLEQLPLWGFDGSSTMQAEGRSSDCVLKPVAIYPDPARTNGALVMCEVMMPDGVTPHESNSRATILDDEDAWFGFEQEYFFYKDGRPLGFPESGYPAPQGPYYTGVGYKNVGDVAREIVEEHLDLCLEAGINHEGINAEVAKGQWEFQIFGKGSKKAADQIWMARYLLLRLCEKYGID

SEQ ID NO: 15791 - protein, 196 aa, Rhizobium tropici
PVPNLRGKTQIKEFDAFPTLEQLPLWGFDGSSTMQAEGRSSDCVLKPVAIYPDPARTNGALVMCEVMMPDGVTPHESNSRATILDDEDAWFGFEQEYFFYQDGRPLGFPESGYPAPQGPYYTGVGYKNVGDVAREIVEEHLDLCLEAGINHEGINAEVAKGQWEFQIFGKGSKKAADQIWMARYLLLRLCEKYGID

SEQ ID NO: 15792 - protein, 321 aa, Elaeis guineensis
HEKTRELVAVKYIERGEKIDENVQREIINHRSLRQPNIIRFKEVILTPTHLAIVMEYASGGELFERICNAGRFSEDEARFFFQQLISGVSYCHSMQVCHRDLKLENTLLDGSMAPRLKICDFGYSKSSVLHSQPKSTVGTPAYIAPEVLLKKEYDGKIADVWSCGVTLYVMLVGAYPFEDPEEPKNFRKTIQRILGVQYSIPDYVHISPECRQLISRIFVGNPAMRITIPEIQNHEWFLKNLPADLMDDNTMSNQYEEPDQPMQSIDEIMQIIAEATIPAAGTRGLNPYLTGSIDLDDDMEDLDSDPELDVDSSGEIIYAM

SEQ ID NO: 15793 - protein, 159 aa, Solanum lycopersicum
MVRGKTQMRRIENATSRQVTFSKRRNGLLKKAFELSVLCDAEVGLIIFSPRGKLYEFASSSTQEIIRGNKRHTKDRVQPENQAGPQYLQYMQHEAANLMKKIELLETAKRKFLGEGLQSCTLQEVQQIEKQLERSVGTIRARKLQVFKEQVERLKKKKK

SEQ ID NO: 15794 - protein, 560 aa, Pseudomonas putida
MNKKNRHPADGKKPITIFGPDFPFAFDDWLEHPAGLGSIPAERHGEEVAIVGAGIAGLVAAYELMKLGLKPVVYEASKLGGRLRSQAFNGTDGIVAELGGMRFPVSSTAFYHYVDKLGLETKPFPNPLTPASGSTVIDLEGQTYYAEKPTDLPQLFHEVADAWADALESGAQFADIQQAIRDRDVPRLKELWNKLVPLWDDRTFYDFVATSRSFAKLSFQHREVFGQVGFGTGGWDSDFPNSMLEIFRVVMTNCDDHQHLVVGGVEQVPQGIWRHVPERCVHWPEGTSLSTLHGGAPRTGVKRIARASDGRLAVTDNWGDTRHYSAVLATCQTWLLTTQIDCEESLFSQKMWMALDRTRYMQSSKTFVMVDRPFWKDKDPETGRDLLSMTLTDRLTRGTYLFDNGNDKPGVICLSYSWMSDALKMLPHPVEKRVQLALDALKKIYPKTDIAGHIIGDPITVSWEADPYFLGAFKGALPGHYRYNQRMYAHFMQQDMPAEQRGIFIAGDDVSWTPAWVEGAVQTSLNAVWGIMNHFGGHTHPDNPGPGDVFNEIGPIALAD

SEQ ID NO: 15795 - protein, 584 aa, Brachypodium distachyon
MSSRPPPPPRPHLSLPPRSTAESLFTGVGDASPGPLTLASALFSSDSDADGGGGGGGGSASSGSGPTSFTQLLIGNLSQPPQQQQQQQQQQQERGRGGVARAGPAISVAPPAGAAVFTVPPGLSPSGLFDSPGLIFSPAMVCTPILTLLLPKLGFFVFALAYSPLRGLNFNWNHGGFGMSHQQALAQVTAQASHSPLRMFDHIEQPSFSAAASSSEAVQHMSSAANMAGMSEMATISNNDNAAFHSAEASQRYQVPAPVDKPADDGYNWRKYGQKVVKGSDCPRSYYKCTHPSCPVKKKVEHAEDGQISEIIYKGKHNHQRPPNKRAKDGNSSAAEHNEQSNDTASGLSGVRRDQEAVYAMSEQLSGLSDGDDKDDGESRPNEVDNGENDCKRRNIQVSSQKTLTESKIIVQTTSEVDLLDDGYRWRKYGQKVKDTLRQREVKLHAHGTNTNEHVGEAKLGIAYGFEEKRKRNDYQLLEFCESYDLFPERSYYKCTFAGCNVRKHIERASSDPKAVITTYEGKHNHEPPVGRGSNQNAGNSAPSNRSQQKGPSSMSSNQTSLTRTDFSNNNQRPIGVLQFKREE

SEQ ID NO: 15796 - protein, 358 aa, Brachypodium distachyon
MHEELMMKRSRPRVTKYHYTVSGRQEKSTLLLLLNACDEKRNYASIERTQRSISHWDNVGMVVPEDQGGAMGSSSPSSPSDTMIIACPQPMQQHQAQQQDRRLRPQHDSPLKCPRCDSAHTKFCYYNNYSLSQPRYFCKTCRRYWTKGGSLRNVPVGGGCRKNKRATRKPSSSSAVVVPVAPSPAMPMSMMLHGGRHVETSGGLHLSFSGSTMQLPSHTSAPDPLCSSLGLLDWKYDNVFSGSGGGTTFESANSEAAHFTGQGMMGIGGSRGGADCHALDALRYAASLGMGEHLALPFGAGARAERDHAVEMKPLSLEWCGEASRVPESSTISSLSGLGLWSGMISGAHHHHGSSAAI

SEQ ID NO: 15797 - protein, 378 aa, Brachypodium distachyon
MNYNFNSSVYKEVVRREGRCPWARLCDGCCTLPSVVYCYADCAYLCASCDARVHAANRVASRHERLRLTEASEHTPAVLECSADATALCAAYEAKVHYANLLTGMHQCVPVVSLPTADIPAASLLAEAAATTTFLSHKEEEVSWLLVSKESDNHNCSGNNNRSSTYFNEVDEYFDLVKYNLYYDSHIYNNQEQHGMEEQQQLQEMQKDPSEKEGSECVVPSQAAMVSKSLQSGYGLGGAEQSASVTAGVSAYTDSNNNSISFSSTEVGIVPDNTVIDMKNSSILTPAGAIDVFSGPSLQMPHHISSMDREARVLRYKEKKKTRKFEKTTRYATRKAYAEARPRIKGRFAKRSDAEIEVDQMFSTAALSDSSYSTVPWF

SEQ ID NO: 15798 - protein, 428 aa, Brachypodium distachyon
MEMNEKNDADLEKDQPSGHNQHPSFHGPGFSTEAQIDSSTNALAAMGNPFPPGLWNPPGQNFGLSETNTNAMITGHPFSSFLGMLSAAVPTYAGPSGFMDCGTGFPSLNGGNLGPMMDHPFPRNQPLGSFQNGTEPSREIEMTVDEGCKDGVSLAADRQQGDTEGSHGVDASKEFSKPGCSGGVCQDEGPSVSSAKKRKRSGQDRGVKHVQEGSQQLATVVAKQEKDNDEKDGPKRPISASRKSNGKQTEDNSDAPKEDYIHIRARSGQATNSHSLAERVRREKISERMKFLQDLVPGCSKVIGKAVMLDEIINYVQSLQRQVEFLSMKLSTVNPALDFNIERILSKDFFQSQGTPASSAFGFLPENSHHFLHQPKHSQAALHGIVNPTDAFGRVTNAQMPNNFDGEFHNVTGMPFSLFNDQESNVEP

SEQ ID NO: 15799 - protein, 461 aa, Brachypodium distachyon
MTTRGVTERLPESSQPLLPTKQRWEGDDGGAEAAAFHEFNGASFAGAVFNLSTTIVGAGIMALPATMKVLGLVPGLVMIVLAAFLTDASIELLMRFSRVVGAPSYGAVMGDAFGWWGRRLLQVCVVVNNVGVMIVYMIIIGDVLSGTSSGGEHHYGVLEGWFGTHWWNGRFFVLLVTTLGVFTPLACFKRVDSLSYTSAISVALAVVFVVITAGIAIVKLIRGQIPMPKLFPAIPDLTSVWELFTAVPVLVTAYVCHYNVHPIHNELKESSQIKPIVHTSLALCSTVYITTSFFGYLLFGESTLADVLANFDSNLGIPYSSVLNDAVRVSYAVHLMLVFPMIFHALRLNLDGLLFSSARPLSSDNRRFAVMTAVLLIVIFVSANFIPSIWDAFQFTGATAAVCIAFIFPAAITLKDAHSIAKKWDKILAVVMIVLAVASNVVAVYSDAYSIFHKKSAPSSA

SEQ ID NO: 15800 - protein, 311 aa, Brachypodium distachyon
MADHQEEGEVLRRGPWTVEEDLTLMNHVAEHGEGRWNAAARAAGLRRTGKSCRLRWLNYLRPDVKRGDFSAHEQLRILDLHSRWGNRWSKIAAQLPGRTDNEIKNYWRTRVQKHAKQLNCDAGSKAFNDAMRYLWMPRLAERAAAADIAASSCLHSNNNNSTTATSSGGGGLSPSVVPGAGAGMSCLDHRQNTTGGISPGAGSAVTTSCCRSTSSTGSSSELSQEQQQLLLHGGGGGGESSWMMQEVDDHEFWAAHMQIQPEQFIDVDQEISGWVQGFSDMVADGGCGVSGSAAAGEENSLWSLEDIWKMQ

SEQ ID NO: 15801 - protein, 931 aa, Brachypodium distachyon
MAGAARKKLVGRYEVGRTIGQGAFAKVKFAVDSDTGAAVAMKVLDKATILNHRMMHQVGSAGAGGIYLRNNVGHTENSIYTTENLISSRYIFLTEKAGVCRSLKMKKLIFTRKRLEKEGQGEQLPQITKTCYTLSPLKHNQANLISPQKCLEILLSFGSNFLLFLGPAVEISAVTLFPHIPKIVDEQSVDMPPMNMSGLCYVHIPPILNRIRSINSRAVRILLRSIDQEKNLHFCSAQALQIFSTEIKREISIMKIVRHPNIVRLNEVLAGQTKIYIILELITGGELFDKIARQGKLRENESRKYFQQLIDAIDYCHSKGVYHRDLKPENLLLDSHGNLKVTDFGLSTLSQNICLLIFQCADFGFLFLGGFQGFLHTTCGTPNYVAPEVLSKDGYDGSAADVWSCGVILYVLMAGYLPFEENDLPTLYDKITAAHFSCPDWFSSGAKSLIQRILDPNPKTRMTVEGIRADAWFKNNYVAHKRGEDENVCLDDVQAVFDNIEDKYVSEQVTHNDGGPLIMNAFEMITLSQGLDLSSLFDRQQICQDAVMNTSMKKGLLKSSLACAILGTSPVELSHLMPILSQHQEYVKRQTRFVSRKPARTIAATIQVVADSMGIKVHSYNYKIFEVAPSLFMVDVRKVAGDTLEYHRFYKNLCSKLESIIWRPIENFVALFWKKEFVFIRRTVASCHLSLRQGVAVPFVEISPTSPVEANTTRFINERRGPDAHTPQDEVSGPNQPWKVPGPSCAAMRPRKRGRPTSWLSLLRPYYLADQHRKVQLNLASSPPTEKFKPRRNCGMRKQSTGLYSRKRQGSGEEIQPQKARASETLAKARSPRISGNRYRYCIKQPSTGDDTTHVRAHAQRLQAVPQTEREWNWNSHTHRKRRGQLDIQEPEQSIYYEGRTLPNRTCYEPSSIDVHNYGTRSTGKEDTDNI

SEQ ID NO: 15802 - protein, 609 aa, Brachypodium distachyon
MVPLPETTTEAAAEEGSSSSSSKKYKEEDGSSSTLSDAWDYRGRPAVRENSGGWSSAAMILGVELNERLTTLGIAVNLVTYLTGTMHLGNAASANAVTNFLGTSFLLCLLGGFLADTFLGRYLTIAIFTAVQASGMAILTVSTAAPGLRPVACADPTGASRTCAAPSGAQLGVLYLGLYLTALGTGGLKSSVSGFGSDQFDEADPVERRVMARFFGWFFFFISLGSLLAVTVLVYVQDNVGRRWGYGICVVAVLAGLAVFLAGTRRYRFKKLAGSPLTQIAVVTAAAWTKRRLPMPSDPALLYDVDDAAGEDVVKGKGIKRRLLPHSNQYRFLDQAAIVEPSPASGKNKWACCTVTEVEEVKQVVRMLPTWATTILFWTVYAQMTTFSVSQAQSMGRRLGPFTIPSGSMTVFFVASILLTVPLYDRLVAPLARRLTGHPHGLTPLQRIAAGLALSALAMAAAALTERHRLLSSSKKPPSVFLLVPQFLLVGAGEAFAYVGQLDFFLRECPADMKTMSTGLFLTTLSLGFFLSTALVTAVHAATGSGGRPWLADDIDQGRLDYFYWLLAVLSVLNLAVFVAAARGYVYKDKRLADAGVKVNDDEGLVLHA

SEQ ID NO: 15803 - protein, 1269 aa, Brachypodium distachyon
MATVHDENHPVSLSYFFERSLSLSQHNDTDERRSTGSASPEAKVDEKPFSFFGLLCYADNVDWLLMALGTLGSAIHGMAFPIGYLLLGKALDAFGTNINDQKGMVHALYKVVPYVWYMAIATLPAGMVEISCWIYSSERQLARMRLEFLKSVLNQEVGAFDTDLTTANIITGVTNHMNIIQDAIGEKLGHFVASFSTFFAGIIIAFASCWEVAMLSFLVIPLILAIGATYTKKMNVISLSRNAIVSEVTSVVEQTLSHIKTVFSFVGENWAIKSFVRCTDNQYKLSKKEAMIKGIGLGLFQAVTFCSWALMVWIGAVAVSKRTATGGGTIAAIMSILFGAISITYAAPDLQTFNQARAAGKEVFKVIKRNPSISYGKGGTVLDKVYGEIELRGVRFAYPSRQDKPILQGFSLSIPAGKVVALIGSSGCGKSTVISLLQRFYDPTSGDILIDGHSIRKIDLKSLRRNIASVSQEPSLFSGTIKDNLRIGKMDATDDEITEAATTANVHTFISKLPNGYLTEVGERGVQLSGGQKQRVAIARAMLKDPPILLLDEATSALDSESEKLVQDALERAMHGRTVILIAHRMSTIVNADTIVVVENGRVAQNGTHQELLEKSTFYSNVCSMQNIEKEAGKRVASPSDNVIQEQTDEAYNKQHSMKQGLQNKLERSKQPKQEVRKETHPFFRIWYGLRKDDIAKILLGSSAAAISGISKPLFGYFIMTIGVAYYDPDAKRKVSKYSLIFFGAGMVTLASSILQHYIYGVIGEKAMKNLREALFSSVLRNELAWFEKPKNGVGSLTSRIVSDTSTVKTIISDRMAVIVQCISSILIATTVSMYVNWRMGLVSWAVMPCHFIGGLIQARSAKGFYGDAAIAHQELVSLASEAASNIRTVASFVYEDEIIKKAELSLQEPMRITRIESMKYGVIQGISLCLWNIAHAVALWYTTVLVQRKQATFENSIRSYQIFSLTVPSITELWTLIPMVMSAIAILNPAFDMLDRETEIVPDEPKKPSEQWLVGRTEFQDVSFNYPSRPEVTILDGFNLVIEPGQRVALVGPSGAGKSSVLALLLRFYDPHGGTVLVDNTNIRDYNLRWLRKQIGLVQQEPILFNSSIRENISYGSEESSETEIIQAAMDANIHEFISGLPKGYDTVVGDKGGQLSGGQKQRIAIARTLLKRPSILLLDEATSALDSESERVVMSSLGAKEWKNIDERSSKITSITVAHRLSTVINADMIVVMEKGKVIELGDHQTLVSADDGVYSRLFHLQSNMNN

SEQ ID NO: 15804 - protein, 1261 aa, Brachypodium distachyon
MPFIQENDYPVESSKLDSAEGEKNMSPPAPPTPETVVKKDEPFPFFGLFCYADALDWLFMMLGTMGSFVHGMSPSMSYYILGKCVDAFGNNIGDQDAIVHGLSKLIPYMWFLALITLPAGMIEISCWMYTSQRQMTRMQMAYLRSVLSQNVGAFDTDLTTANIMAGATNHMSVIKDAIGEKVSVCIPTHSLYASTIQIEAEKMGHFISNFSTFLVAIIVAFVCSWEVGMMSFLVVPMLLVIGATYAKMMNGMSMRRIALVSEATSVVEQNLSHIKTVFSFVGENSAMRSFTKCMDKQYKLSKKEAITKGLGLGMLQIATFCSYSLTIYIGAVAVTGRRPKKAGETIAAVINILSAAIYISNAAPDLQAFSQAKAAGKEVFKVIKRKPVISYESGGIISEQVIGEIEIREVDFTYPSREDKPILQGFSLAIQAGEIVALVGSSGCGKSTVISLVQRFYDPTSGDIIIDGQNIKELDLKFLRRNIGSVSQEPALFSGTIMDNLRIGKMDATDEEIIEAAKTANVHSFISKLPNQYSTEVGERGLQLSGGQKQRIAIARAILKDPPILLLDEATSALDSESEKLVQDALDRAMRGRTVILIAHRMSTIINADKIVVVENGGVAQSGTHEELLKKSTFYSSVCNMQNLEKKSGKSEERFTDHGEADQETGTYKEQSFAAHEQEKKPKPTSEQPKQGTRKRMSAFNRIFLGTLKLAPAKVLLGSTAAAVSGISRPLFAFYIITVGMTYLDPDAKRKVTKYSITLFLVGISTFFSNIFQHYIYGLVGERAMNNLREALFTAVLRNEMGWFEKPKNSVGFLTSRVVSDTSMIKTIISERMAIIVQCISSILIATGLSTGVNWRMGLVSWAMMPCHFIAGLVQVRSAKGFATDTSKSHRKLISLTSEAVSNIRTVASFVQEEEILRKADLALQEPMRISRIESVKYGVRLASFEDSVRSYQAFAMTISSITELWSLIPMVMSAITILDPALDILDRETQIVPDEPKVTCEDRIVGNVEFKDVIFSYPSRPEVIILDGFSLAIESGQRVALVGPSGSGKSTVLALLLRFYDPCNGQVLVDGKDIRTYNLKCLRKQIGLVQQEPILFNMSIRENISYGNEGASETEIVEAAMEANIHEFISSLSKGYDTIVGDKGSQLSGGQKQRIAVARTILKKPVILLLDEATSALDGESERVVMNTLGAKGWKNKGELSSKITSITIAHRLSTVTNTDVIVVMDKGEVVETGSHATLVSESNGIYSRMYHMQIKGAKD

SEQ ID NO: 15805 - protein, 136 aa, Thellungiella halophila
GNIRKGGHIVIKGRPCKVVEVSTSKTGKHGHAKCHFVAIDIFTAKKLEDIVPSSHNCDVPHVNRVDYQLIDISEDGFVSLLTDSGGTKDDLKLPTDDNLAALMKSGFEEGKDVVVSVMSSMGEEQICAVKEVGGGK

SEQ ID NO: 15806 - protein, 451 aa, Oryza sativa Japonica Group
MAQAVVPAMQCQVGAVRARPAAAAAAAGGRVWGVRRTGRGTSGFRVMAVSTETTGVVTRMEQLLNMDTTPFTDKIIAEYIWVGGTGIDLRSKSRTISKPVEDPSELPKWNYDGSSTGQAPGEDSEVILYPQAIFKDPFRGGNNILVMCDTYTPAGEPIPTNKRNRAAQVFSDPKVVSQVPWFGIEQEYTLLQRDVNWPLGWPVGGYPGPQGPYYCAVGSDKSFGRDISDAHYKACLYAGINISGTNGEVMPGQWEYQVGPSVGIEAGDHIWISRYILERITEQAGVVLTLDPKPIQADSVICFVIRLRLILQITKSMREDGGFEVIKKAILNLSLRHDLHISAYGEGNERRLTGLHETASIDNFSWGVANRGCSIRVGRDTEAKGKGYLEDRRPASNMDPYVVTALLAETTILWEPTLEAEVLAAKKLALKFLENHATFHSPVNILVEHHT

SEQ ID NO: 15807 - protein, 446 aa, Oryza sativa Japonica Group
MKLVYRNLARNGPGSVKLVPEEEDDLWHAYNLIVPGDTLQSVTVRKVLREMASGGRDAERVRLKLEIVVESVDYDKEGSVLRVRGKNITENDHVKIGQFHTVELELKRQFTLTKAHRGVGVMATIGTCQLCGDVAVALENSSLVGDIAIGDIGGGHGLCEGLCRLPEERLLFLLLQELWDWLALDTIQQACDPTASADLAVILMQEGLAHLFLIGRSYGYLNSITVTRARIETSIPRKHGPAIAGYESALKKFFEHVLQAFLKHIDFEVVQCAVIASPGFTKDQFRDYMHLEAARRDLRLIIENKQRIVLAHAPSGYKHSLKEVLDSPSVMTLIKDTKAAQEVQALKDFFNMLTNDSARACYGPKHVEIANERLAIQTLLITDNLFRNSDIATRQNYVRLVESVKKFGGTVHIFSSMHVSGEQLAQLTGIAAILRFPLPDLEDIEM

SEQ ID NO: 15808 - protein, 534 aa, Solanum tuberosum
MAASSFSFPTSSSSFMTTSFTDLLASDDYPTKGLGDRIAERTGSGVPKFKSLSPPSLPLSPPPFSPSSYFAIPPGLSPTELLDSPVLLSSSNLLPSPTTGSFPAHAFNWKSSSHQDVKQEDKNYSDFSFQPQVGTAASISQSQTNHVPLGQQAWNYQEPTKQNDQNANGRSEFNTIQSFMQNNNDQNNSGNQYNQSTREQKRSDDGYNWRKYGQKQVKGSENPRSYYKCTYPNCPTKKKVERSLDGQITEIVYKGNHNHPKPQSTRRSSSSTASSAIQSYNTQTNEIPDHQSYGSNGQMDSVATPENSSISFGDDDHEHTSQKSSRSRGDDLDEEEPDSKRWKRENESEGLSALGGSRTVREPRVVVQTTSDIDILDDGYRWRKYGQKVVKGNPNPRSYYKCTSTGCPVRKHVERASQDIRSVITTYEGKHNHDVPAARGSGSHSINRPMAPTIRPTVTSHQSNYQVPLQSIRPQQSEMGAPFTLEMLQRPNNYGISGYAKSGDSYENQVQDNNVFSRTKDEPRDDMFMESLLC

SEQ ID NO: 15809 - protein, 225 aa, Amphidinium carterae
DAEEATETARKQIADLIGADSKEIFFTSGATESNNMAVKGIAAFYQGKKKHIITTQTEHKCVLASCRRLEVEEGWEVTYLPVGKDGLIRMSDLEAAIRPDTAMVSVMYINNEIGVLQPIDEIGKLCKEKGVFFHTDAAQAVGKVPVDVNKSNISLLSISGHKMYGPKGIGALYVRRRPRVRLRPVIDGGGQERGMRSGTLATPIIVGLGEAAAVCTKEMENDSKH

SEQ ID NO: 15810 - protein, 547 aa, Arabidopsis thaliana
MGDTEKCNSDMIQRLHSSFGTTSSSIPKNPISQLDLNPNFIRSSAPQFSKPFSDSGKRIGVPPSHPNLIPPTSPFSQIPTTRQPGSHNFNPGGANHSRSMSQPNSFFSFDSLPPLSPSPFRDHDVSMEDRDSGVFNSNHSLPPSPFTRCNSTSSSSLRVGESLPPRKSHRRSNSDIPSGFNSMPLIPPRPLERSFSGGECADWSKSNPFVKKESSCKREGVGEREAMDDLFSAYMNLENIDVLNSSEADDSKNGNENRDDMESSRASGTKTNGSDTEGESSSVNESANNNMNSSGEKRESVKRRAAGGDIAPTTRHYRSVSVDSCFMEKLSFGDESLKPPPSPGSMSRKVSPTNSVDGNSGAAFSIEFNNGEFTAAEMKKIMANDKLAEMAMSDPKRVKRILANRQSAARSKERKMRYIVELEHKVQTLQTEATTLSAQLTLLQRDMMGLTNQNNELKFRLQAMEQQARLRDALNEALNGEVQRLKLAIGESSQNESERSKMQSLNAEMFQQLNISQLRQQPQQMQQQSHQQNHQNGTMATKSESNE

SEQ ID NO: 15811 - protein, 557 aa, Acidithiobacillus ferrooxidans
MPIPSVHVLTARQRCDLELLLTGAFAPLEGYLDATDWQSVIQDMRLSNGALWPIPVVLDVSEALGRFLAAGDTLRLERSDGTPLGSVAVRACYRPDKLLEASAVYGTTDPSHPGVAELLARGPYYVAGRVSAWDADTLTRAAAVEFPPEYQTPAMLQRHWSGTHPVVAFQTRNPLHHAHIAVTQAGLERAGAGARLLLHPAIGPTKPGDVEASYRMRVYRAVLGHYPKTTALLSPLPLAMRMAGPREALWHALIRRNYGATHFIIGRGHADPGAAAGGLFYPAFAAQELFARHADEMGIAGVFLPEYAYSRTRRRYVPVEEANGEALAGISGTELRWRLASREDIPEWFSPPEVIQILRQAYRGADRRGLVIWFTGLSASGKSTLAGMLARTLEADDERAVTLLDGDVVRRFLSKGLGFSREDRDENIRRIGFVASLVARHGGIAVVAAISPYRQARADARRLVEEAGGLFIEVHVATPLEICAERDPKGLYAKAVRGEITGFTGVDDPYEAPERAECVLDASLQKPPAALATLMGVLRSLGAVTDKPVVIEARKEA

SEQ ID NO: 15812 - protein, 276 aa, Sesbania rostrata
SQPIHQPSSSCTNSGISDQSVVTLGNPQMEPVSRQEDSSASVGEEDFEQTSQTTYSGGDEDDLGPEAKRWKGDNEYDGYSASDSRTVREPRVVVQTTSEIDILDDGYRWRKYGQKVVKGNPNARSYYKCTAPGCSVRKHIERAAHDIKAVITTYEGKHDHDIPAARGSAGYNMNRNSLNSNTSNVPAPIRPSAVNRYSSSSSLTSSPYNTRLPTTGNQESFPLDMLQSPGKFGYSALGRSMGSYTNHAQYSDAAYSKAREERNDDSFLQSFLSKDF

SEQ ID NO: 15813 - protein, 349 aa, Hevea brasiliensis
MTCNTCIRSVIAQGGIFSKARSQLSNIRRDLHAVLHLGYPLKLKLAINLSMMVDSGSTAKRGPVVDVHAEKDDDGGCVSGEWKSEDGKLSCGFSSFRGKRATMEDFYDIKHTKIDGQTVCMFGIFDGHGGSHAAEYLKEHLFDNLMKRPQFMENPKLAISETYQQTDVDFLDSEKDTYRDDGSTASTAVLVGNHLYVANVGDSRTVISKAGKAIPLSEDHKPNRSDERKRIESAGGVVMWAGTWRVGGVLAMSRAFGNRMLKQFVVAEPEIQDQKIDEEFELLVLASDGLWDVVPNEDAVSIAQTEEEPEAAARKLTEAAFTRGSADNMTCIVVRFHHDKADKGNAQSN

SEQ ID NO: 15814 - protein, 339 aa, Brassica nigra
MLKQESNYNISNRENNRGPRACDTCRSTICTVYCHADSAYLCNSCDAEVHSANRVASRHKRVPVCESCERAPAAFMCEADDVSLCTTCDSEVHSANPLARRHQRVPVVPITGNSCSSLATTHHTAVTEPEKRAVLVQDDEEGKEDAKETASWMFPYSDKGSHNHNNNNQNNELLFSDDYLDLADYNSSMDYKFAGQYNQPQHKQDCTVPQTNYGGDRVVPLQLEETRGNVRHKKEKITYGSSGSQYNYNDSINHNAYNPSMETDFVPEPTARETTVSHQKTPKIHQLPEPLVQILSPMDREARVLRYREKKKRRKFEKTIRYASRKAYAERRPRINGRF

SEQ ID NO: 15815 - protein, 339 aa, Brassica nigra
MLKQESNYNISNRENNRGPRACDTCRSTICTVYCHADSAYLCNSCDAEVHSANRVASRHKRVPVCESCERAPAAFMCEADDVSLCTTCDSEVHSANPLARRHQRVPVVPITGNSCSSLATTHHTAVTEPEKRAVLVQDDEEGKEDAKETASWMFPYSDKGSHNHNNNNQNNELLFSDDYLDLADYNSSMDYKFTGQYNQPQHKQDCTVPQTNYGGDRVVPLQLEETRGNVRHKKEKITYGSSGSQYNYNDSINHNAYNPSMETDFVPEPTARETTVSHQKTPKIHQLPEPLVQILSPMDREARVLRYREKKKRRKFEKTIRYASRKAYAERRPRINGRF

SEQ ID NO: 15816 - protein, 339 aa, Brassica nigra
MLKQESNYNISNRENNRGPRACDTCRSTICTVYCHADSAYLCNSCDAEVHSANRVASRHKRVPVCESCERAPAAFMCEADDVSLCTTCDSEVHSANPLARRHQRVPVVPITGNSCSSLATTHHTAVTEPEKRAVLVQDDEEGKEDAKETASWMFPYSDKGSHNHNNNNQNNELLFSDDYLDLADYNSSMDYKFTGQYNQPQHKQDCTVPQTNYGGDRVVPLQLEETRGNVRHKKEKITYGSSGSQYNYNDSINHNAYNPSMETDFVPEPTARETTVSHQKTPKIHQLPEPLVQILSPMDREARVLRYREKKKRRKFENTIRYASRKAYAERRPRINGRF

SEQ ID NO: 15817 - protein, 339 aa, Brassica nigra
MLKQEINYNISNRENNRGARACDTCRSTICTVYCHADSAYLCNSCDAEVHSANRVASRHKRVPVCESCERAPAAFMCEADDVSLCTTCDSEVHSANPLARRHQRVPVVPITGNSCSSLATTHHTAVTEPEKRAVLVQDDEEGKEDAKETASWMFPYSDKGSHNHNNNNQNNELLFSDDYLDLADYNSSMDYKFTGQYNQPQHKQDCTVPQTNYGGDRVVPLQLEETRGNVRHKKEKITYGSSGSQYNYNDSINHNAYNPSMETDFVPEPTARETTVSHQKTPKIHQLPEPLVQILSPMDREARVLRYREKKKRRKFEKTIRYASRKAYAERRPRINGRF

SEQ ID NO: 15818 - protein, 343 aa, Brassica nigra
MLKQESNYNISNRENNRGARACDTCRSTICTVYCHADSAYLCNSCDAEVHSANRVASRHKRVPVCESCERAPAAFMCEADDVSLCTACDSEVHSANPLARRHQRVPVVPITGNSCSSLATTHHTAVTEPEKRAVLVQDDEEGKEDAKETASWMFPYSDKGSPNHNNNNNNNNQNNELLFSDDYLDLADYNSSMDYKFTGQYNQPQHKQDCTVPQTNYGGDRVVPLQLEETRGNVRHKKEKITYGSSGSQYNYNDSINHNAYNPSMETDFVPEPTARETTVSHQKTPKIHQLPEPLVQILSPMDREARVLRYREKKKRRKFEKTIRYASRKAYAERRPRINGRF

SEQ ID NO: 15819 - protein, 343 aa, Brassica nigra
MLKQESNYNISNRENNRGARACDTCRSTICTVYCHADSAYLCNSCDAEVHSANRVASHHKRVPVCESCERAPAAFMCEADDVSLCTACDSEVHSANPLARRHQRVPVVPITGNSCSSLATTHHTAVTEPEKRAVLVQDDEEGKEDAKETASWMFPYSDKGSPNHNNNNNNNNQNNELLFSDDYLDLADYNSSMDYKFTGQYNQPQHKQDCTVPQTNYGGDRVVPLQLEETRGNVRHKKEKITYGSSGSQYNYNDSINHNAYNPSMETDFVPEPTARETTVSHQKTPKIHQLPEPLVQILSPMDREARVLRYREKKKRRKFEKTIRYASRKAYAERRPRINGRF

SEQ ID NO: 15820 - protein, 344 aa, Brassica nigra
MLKQESNYNISNRENNRGARACDTCRSTICTVYCHADSAYLCNSCDAEVHSANRVASRHKRVPVCESCERAPAAFMCEADDVSLCTTCDSEVHSANPLARRHQRVPVVPITGNSCSSLATTHHTAVTEPEKRAVLVQDDEEGKEDAKETASWMFPYSDKGSPNHNNNNNNNNNQNNELLFSDDYLDLADYNSSMDYKFTGQYNQPQHKQDCTVPQTNYGGDRVVPLQLEETRGNVRHKKEKITYGSSGSQYNYNDSINHNAYNPSMETDFVPEPTARETTVSHQKTPKIHQLPEPLVQILSPMDREARVLRYREKKKRRKFEKTIRYASRKAYAERRPRINGRF

SEQ ID NO: 15821 - protein, 345 aa, Brassica nigra
MLKQESNYNISNRENNRGARACDTCRSTICTVYCHADSAYLCNSCDAEVHSANRVASRHKRVPVCESCERAPAAFMCEADDVSLCTTCDSEVHSANPLARRHQRVPVVPITGNSCSSLATTHHTAVTEPEKRAVLVQDDEEGKEDAKETASWMFPYSDKGSPNHNNNNNNNNNNQNNELLFSDDYLDLADYNSSMDYKFTGQYNQPQHKQDCTVPQTNYGGDRVVPLQLEETRGNVRHKKEKITYGSSGSQYNYNDSINHNAYNPSMETDFVPEPTARETTVSHQKTPKIHQLPEPLVQILSPMDREARVLRYREKKKRRKFEKTIRYASRKAYAERRPRINGRF

SEQ ID NO: 15822 - protein, 345 aa, Brassica nigra
MLKQESNYNISNRENNRGPRACDTCRSTICTVYCHADSAYLCNSCDAEVHSANRVASRHKRVPVCESCERAPAAFMCEADDVSLCTACDSEVHSANPLARRHQRVPVVPITGNSCSSLATTHHTAVTEPEKRAVLVQDDEEGKEDAKETASWMFPYSDKGSPNHNNNNNNNNNNQNNELLFSDDYLDLADYNSSIDYKFTGQYNQPQHKQDCTVPQTNYGGDRVVPLQLEETRGNVRHKKEKITYGSSGSQYNYNDSINHDAYNPSMETDFVPEPTARETTVSHQKTPKIHQLPEPLVQILSPMDREARVLRYREKKKRRKFEKTIRYASRKAYAERRPRINGRF

SEQ ID NO: 15823 - protein, 345 aa, Brassica nigra
MLKQESNYNISNRENNRGPRACDTCRSTICTVYCHADSAYLCNSCDAEVHSANRVASRHKRVPVCESCERAPAAFMCEADDVSLCTACDSEVHSANPLARRHQRVPVVPITGNSCSSLATTHHTAVTEPEKRAVLVQDDEEGKEDAKETASWMFPYSDKGSPNHNNNNNNNNNNQNNELLFSDDYLDLADYNSSIDYKFTGQYNQPQHKQDCTVPQTNYGGDRVVPLQLEETRGNVRHKKEKITYGSSGSQYNYNDSINHDAYNPSMETDFVPEPTARETTVSHQKMPKIHQLPEPLVQILSPMDREARVLRYREKKNRRKFEKTIRYASRKAYAERRPRINGRF

SEQ ID NO: 15824 - protein, 345 aa, Brassica nigra
MLKQESNYNISNRENNRGPRACDTCRSTICTVYCHADSAYLCNSCDAEVHSANRVASRHKRVPVCESCERAPAAFMCEADDVSLCTACDSEVHSANPLARRHQRVPVVPITGNSCSSLATTHHTAVTEPEKRAVLVQDDEEGKEDAKETASWMFPYSDKGSPNHNNNNNNNNNNQNNELLFSDDYLDLADYNSSIDYKFTGQYNQPQHKQDCTVPQTNYGGDRVVPLQLEETRGNVRHKKEKITYGSSGSQYNYNDSINHNAYNPSMETDFVPEPTARETTVSHQKTPKIHQLPEPLVQILSPMDREARVLRYREKKKRRKFEKTIRYASRKAYAERRPRINGRF

SEQ ID NO: 15825 - protein, 343 aa, Brassica nigra
MLKQESNYNISNRENNRGARACDTCRSTICTVYCHADSAYLCNSCDAEVHSANRVASRHKRVPVCESCERAPAAFMCEADDVSLCTTCDSEVHSANPLARRHQRVPVVPITGNSCSSLATTHHTAVTEPEKRAVLVQDDEEGKEDAKETASWMFPYSDKGSPNHNNNNNNNNQNNELLFSDDYLDLADYNSSMDYKFTGQYNQPQHKQDCTVPQTNYGGDRVVPLQLEETGGNVRHKKEKITYGSSGSQYNYNDSINHDAYNPSMETDFVPEPTARETTVSHQKTPKIHQLPEPLVQILSPMDREARVLRYREKKKRRKFEKTIRYASRKAYAERRPRINGRF

SEQ ID NO: 15826 - protein, 342 aa, Brassica nigra
MLKQESNYNISNRENNRGARACDTCRSTICTVYCHADSAYLCNSCDAEVHSANRVASRHKRVPVCESCERAPAAFMCEADDVSLCTACDSEVHSANPLARRHQRVPVVPITGNSCSSLATTHHTAVTEPEKRAVLVQDDEEGKEDAKETASWMFPYSDKGSPNHNNNNNNNQNNELLFSDDYLDLADYNSSMDYKFTGQYNQPQHKQDCTVPQTNYGGDRVVPLQLEETRGNVRHKKEKITYGSSGSQYNYNDSINHNAYNPSMETDFVPEPTARETTVSHQKTPKIHQLPEPLVQILSPMDREARVLRYREKKKRRKFEKTIRYASRRAYAERRPRINGRF

SEQ ID NO: 15827 - protein, 347 aa, Brassica nigra
MLKQESNYNISNRENNRGARACDTCRSTICTVYCHADSAYLCNSCDAEVHSANRVASRHKRVPVCESCERAPAAFMCEADDVSLCTACDSEVHSANPLARRHQRVPVVPITGNSCSSLATTHHTTVTEPEKRAVIVQDDEEGKEDAKETASWMFPYSDKGSHNHHNNNNNNNNNNNQNNELLFSDDYLDLADYNSSMDYKFTGQYNQPQHKQDCTVPQTNYGGDRVVPLQLEETRGNVRHKKEKITYGSSGSQYNYNDSINHNAYNPSMETDFVPEPTARETTVSHQKTPKIHQLPEPLVQILSPMDREARVLRYREKKKRRKFEKTIRYASRKAYAERRPRINGRF

SEQ ID NO: 15828 - protein, 343 aa, Brassica nigra
MLKQESNYNISNRENNRGARACDTCRSTICTVYCHADSAYLCNSCDAEVHSANRVASRHKRVPVCESCERAPAAFMCEADDVSLCTTCDSEVHSANPLARRHQRVPVVPITGNSCSSLATTHHTAVTEPEKRAVLVQDDEEGKEDAKETASWMFPYSDKGSPNHNNNNNNNNNQNNELLFSDDYLDLADYNSSMDYKFTGQYNQPQHKQDCTVPQTNYGGDRVVPLQLEETGNVRHKKEKITYGSSGSQYNYNDSINRNAYNPSMETDFVPEPTARETTVSHQKTPKIHQLPEPLVQILSPMDREARVLRYREKKKRRKFEKTIRYASRKAYAERRPRINGRF

SEQ ID NO: 15829 - protein, 344 aa, Brassica nigra
MLKQESNYNISNRENNRGARACDTCRSTICTVYCHADSAYLCNSCDAEVHSANRVASRHKRVPVCESCERAPAAFMCEADDVSLCTACDSEVHSANPLARRHQRVPVVPITGNSCSSLATTHHTTVTEPEKRAVIVQDDEEGKEDAKETASWMFPYSDKGSHNHHNNNNNNNNQNNELLFSDDYLDLADYNSSMDYKFTGQYNQPQHKQDCTVPQTNYGGDRVVPLQLEETRGNVRHKKEKITYGSSGSQYNYNDSINHNAYNPSMETDFVPEPTARETTVSHQKTPKIHQLPEPLVQILSPMDREARVLRYREKKKRRKFEKTIRYASRKAYAERRPRINGRF

SEQ ID NO: 15830 - protein, 339 aa, Brassica nigra
MLKQKSNNIDGEENNRARACDTCMSTVCTVYCHADSAYLCTSCDAEVHSANRVASRHKRVPVCESCECAPAAFLCEADDASLCTACDSEVHSANAIARRHHRVPVLPVSGNSYISMETHHQTETTEAEPEKRLVIHQEEDEARETASWLLPKDKNSNQNNELLLSDEYLDLADYNSNMDNKFTGQYSHHQQEGDVPQTNYVGDRVVPIQIQESNGSLRHKQQNMTYGSSDINSGSINHNNGYDTSMETDFVPEPTTPDTADGYTTDGKIDQPPEPPVKMIIQLTPMDREARVLRYREKRKTRKFEKTIRYASRKAYAERRPRINGRFAKMGETEDYDVD

SEQ ID NO: 15831 - protein, 339 aa, Brassica nigra
MLKQKSNNIDGEENNRARACDTCMSTVCTVYWHADSAYLCTSCDAEVHSANRVASRHKRVPSGESCECAPAAFLCEADDASLCTTCDSEVHSANAIARRHHRVPVLPVSGNSYISMETHHQTETTEAEPEKRLVIHQEEDEARETASWLLPKDKNSNQNNELLLSDEYLDLADYNSNMDNKFTGQYSHHQQEGDVPQTNYVGDRVVPIQIQESNGNLRHKQQNMTYGSSDINSGSINHNNGYDTSMETDFVPEPTTPDTADGYTTDGKIDQPPEPPVKMIIQLTPMDREARVLRYREKRKTRKFEKTIRYASRKAYAERRPRINGRFAKMGETEDYDVD

SEQ ID NO: 15832 - protein, 338 aa, Brassica nigra
MLKQKSNNIDSEENNRARACDTCMSTVCTVYCHADSAYLCTSCDAEVHSANRVASRHKRVPVCESCECAPAAFLCEADDASLCTACDSEVHSANAIARRHHRVPVLPVSGNSYISMDTHHQTETTEAEPEKRLVIHQEEDEARETASWLLPKDKNSNQNNELLLSDEYLDLADYNSNMDNKFTGQYNHHQQEGDVPQTNYVGDRVVPIQIQESNGNLRHKQQNMTYSSDINSGSINHNNGYDTSMETDFVPEPTTLDTADGDTTDGKIDQPPEPPVKMIIQLSPMDREARVLRYREKRKTRKFEKTIRYASRKAYAERRPRINGRFAKIGKTEDYDVD

SEQ ID NO: 15833 - protein, 339 aa, Brassica nigra
MLKQKSNNIDGEENNRARACDTCMSTVCTVYCHADSAYLCTSCDAEVHSANRVASRHKRVPVCESCECAPAAFLCEADDASLCTACDSEVHSANAIARRHHRVPVLPVSGNSYISMETHHQTETTEAEPEKRLVIHQEEDEARETASWLLPKDKNSNQNNELLLSDEYLDLADYNSNMDNKFTGQYSHHQQEGDVPQTNYVGDRVVPIQIQESNGNLRHKQQNMTYGSSDINSGSINHNNGYDTSMETDFVPEPTTPDTADGYTTDGKIDQPPEPPVKMIIQLTPMDREARVLRYREKRKTRKFEKTIRYASRKAYAERRPRINGRFAKMGETEDYDVD

SEQ ID NO: 15834 - protein, 339 aa, Brassica nigra
MLKQKSNNIDSEENNRARACDTCMSTVCTVYCHADSAYLCTSCDAEVHSANRVASRHKRVPVCESCECAPAAFLCEADDASLCTACDSEVHSANAIGRRHHRVPVLPVSGNSYISMDTHHQTETTEAEPEKRLVIHQEEDEARETASWLLPKDKNSNQNNELLLSDEYLDLADYNSNMDNKFTGQYNHHQQEGDVPQTNYVGDRVVPIQIQESDGNLRHKQQNMTYGSSDINSGSINHNNGYDTSMETDFVPEPTTLDTADGDTTDGKIDQPPEPPVKMIIQLSPMDREARVLRYREKRKTKKFEKTIRYASRKAYAERRPRINGRFAKMGETEDYDVD

SEQ ID NO: 15835 - protein, 339 aa, Brassica nigra
MLKQKSNNIDSEENNRARACDTCMSTVCTVYCHADSAYLCTSCDAEVHSANRVASRHKRVPVCESCECAPAAFLCEADDASLCTACDSEVHSANAIARRHHRVPVLPVSGNSYISMDTHHQTETTEAEPEKRLVIHQEEDEARETASWLLPKDKNSNQNNELLLSDEYLDLADYNSNMDNKFTGQYNHHQQEGDVPQTNYVGDRVVPIQIQESDGNLRHKQQNMTYGSSDINSGSINHNNGYDTSMETDFVPEPTTLDTADGDTTDGKIDQPPEPPVKMIIQLSPMDREARVLRYREKRKTKKFEKTIRYASRKAYAERRPRINGRFAKMGETEDYDVD

SEQ ID NO: 15836 - protein, 339 aa, Brassica nigra
MLKQKSNNIDSEENNRARACDTCMSTVCTVYCHADSAYLCTSCDAEVHSANRVASRHKRVPVCESCECAPAAFLCEADDASLCTACDSEVHSANAIARRHHRVPVLPVSGNSYISMDTHHQTETTEAEPEKRLVIHQEEDEARETASWLLPKDKNSNQNNELLLSDEYLDLADYNSNMDNKFTGQYNRHQQEGDVPQTNYVGDRVVPIQIQESDGNLRHKQQNMTYGSSDINSGSINHNNGYDTSMETDFVPEPTTLDTADGDTTDGKIDQPPEPPVKMIIQLSPMDREARVLRYREKRKTKKFEKTIRYASRKAYAERRPRINGRFAKMGETEDYDVD

SEQ ID NO: 15837 - protein, 343 aa, Brassica nigra
MLKQESNWAQACDTCRSAACTVYCRADSAYLCTSCDAQIHAANRLASRHERVRVCESCERAPAAFFCKADAASLCTACDSQIHSANPLARRHQRVPILPISGCVATNHHSSETTEPENIVVVGQEEEDEAEAASWLLPSSVKNCGDNNNNNSENNRFSVGEEYLDLVDYSSSMDKRFTGQANQYQQDYNVPQRSYVADGVVPLQVGVSKGHMHHEQHNFQFGFTNVSSEAHQISNGSPIHMVSLVPESVTSDATVSHQRSPKSGTEELPEAPVQMLSPMERKARVLRYREKKKTRKFEKRIRYASRKEYAEKRPRIKGRFAKRNEVDADQAFPTVVMFDTGYG

SEQ ID NO: 15838 - protein, 336 aa, Brassica nigra
MLKQESNWAQACDTCRSAACTVYCRADSAYLCTSCDAQIHAANRLASRHERVRVCESCERAPAAFFCKADAASLCTACDSQIHSANPLARRHQRVPILPISGCVATNHHSSETTEPENIVVVGQEEEDEAEAASWLLPSSVKNCGDNNNNTENNRFSVGEEYLDLVDYSSSIDKRFTGQTNQYQQDYNVPQRSYVADGVVPLQVGVANGHMHHEKHNFQFGFTNVSSEASPIHMVSLVPESVTSDATVSHPRSPKAGTEELPEAPVQMLSPMERKARVLRYREKKKTRKFEKRIRYASRKEYAEKRPRIKGRFAKRNEVDADHALSTMVMFDTGYG

SEQ ID NO: 15839 - protein, 340 aa, Brassica nigra
MLKQESNWAQACDTCRSAACTVYCRADSAYLCTSCDAQIHAANRLASRHERVRVCESCERAPAAFFCKADAASLCTACDSQIHSANPLARRHQRVPILPISGCVATNHHSSETTEPENIVVVGQEEEDEAEAASWLLPSSVKNCGDNNNNTENNRFSVGEEYLDLVDYSSSIDKRFTGQTNQYQQDYNVPQRSYVADGVVPLQVGVSKGHMHHEQHNFQFGFTNVSSEAHQISNGSPIHMVSLVPESVTSDATVSHQRSPKAGTEELPEAPVQMLSPMERKARVLRYREKKKTRKFEKRIRYASRKEYAEKRPRIKGRFAKRNEVDADQAFPTVVMFDTG

SEQ ID NO: 15840 - protein, 342 aa, Brassica nigra
MLKQESNWAQACDTCRSAACTVYCRADSAYLCTSCDAQIHAANRLASRHERVRVCESCERAPAAFFCKADAASLCTACDSQIHSANPLARRHQRVPILPISGCVATNHHSSETTEPENIVVVGQEEEDEAEAASWLLPSSVKNCGDNNNNNNNNNISENNRFSVGEEYLDLVDYSSSIDKRFTGQTNQYQQDYNVPQRSYVADGVVPLQVGVANGHMHHEKHNFQFGFTNVSSEASPIHMVSLVPESVTSDATVSHPRSPKAGTEELPEAPVQMLSPMERKARVLRYREKKKTRKFEKRIRYASRKEYAEKRPRIKGRFAKRNEVDADHALSTMVMFDTGYG

SEQ ID NO: 15841 - protein, 342 aa, Brassica nigra
MLKQESNWAQACDTCRSAACTVYCRADSAYLCTSCDAQIHAANRLASRHERVRVCESCERAPAAFFCKADAASLCTACDSQIHSANPLARRHQRVPILPISGCVATNHHSSETTEPENIVVVGQEEEDEAEAASWLLPSSVKNCGDNNNNTENNRFSVGEEYLDLVDYSSSIDKRFTGQTNQYQQDYNVPQRSYVADGVVPLQVGVSKGHMHHEQHNFQFGFTNVSSEAHQISNGSPIHMVSLVPESVTSDATVSHQRSPKAGTEELPEAPVQMLSPMERKARVLRYREKKKTRKFEKRIRYASRKEYAEKRPRIKGRFAKRNEVDADQAFPTVVMFDTGYG

SEQ ID NO: 15842 - protein, 335 aa, Brassica nigra
MLKQESNWAQACDTCRSAACTVYCRADSAYLCTSCDAQIHAANRLASRHERVRVCESCERAPAAFFCKADAASLCTACDSQIHSANPLARRHQRVPILPISGCVATNHSSETAEPENIVVVGQEEEDEAEAASWLLPSSVKNCGDNNNNSENNRFSVGEEYLDLVDYSSSIDKRFTGQTNQYQQDYNVPQRSYVADGVVPLQVGVANGHMHHEQHNFQFGFTNVSSEASPIHMVSLVPESVTSDATVSHPRSPKAGTEELPEAPVQMLSPMERKARVLRYREKKKTRKFEKRIRYASRKEYAEKRPRIKGRFAKRNEVDADHALSTMVVFDTGYG

SEQ ID NO: 15843 - protein, 338 aa, Brassica nigra
MLKQESNWAQACDTCRSAACTVYCRADSAYLCTSCDAQIHAANRLASRHERVRVCESCERAPAAFFCKADAASLCTACDSQIHSANPLARRHQRVPILPISGCVATNHHSSETTEPENIVVVGQEEEDEAEAASWLLPSSVKNCGDNNNNNNSENNRFSVGEEYLDLVDYSSSMDKRFTGQSNQYQQDYNVPQRSYVADGVVPLQVGVANGHMHHEQHNFQFGFTNVSSEASPIHMVSLVPESVTSDATVSHPRSPKAGTEELPEAPVQMLSPMERKARVLRYREKKKTRKFEKRIRYASRKEYAEKRPRIKGRFAKRNEVDADHALSTMVVFDTGYG

SEQ ID NO: 15844 - protein, 339 aa, Brassica nigra
MLKQESNWAQACDTCRSAACTVYCRADSAYLCTSCDAQIHAANRLASRHERVRVCESCERAPAAFFCKADAASLCTACDSQIHSANPLARRHQRVPILPISGCVATNHHSSETTEPENIVVVGQEEEDEAEAASWLLPSSVKNCGDNNNNNNNSENNRFSVGEEYLDLVDYSSSMDKRFTGQSNQYQQDYNVPQRSYVADGVVPLQVGVANGHMHHEQHNFQFGFTNVSSEASPIHMVSLVPESVTSDATVSHPRSPKAGTEELPEAPVQMLSPMERKARVLRYREKKKTRKFEKRIRYASRKEYAEKRPRIKGRFAKRNEVDADHALSTMVVFDTGYG

SEQ ID NO: 15845 - protein, 345 aa, Brassica nigra
MLKQESNWAQACDTCRSAACTVYCRADSAYLCTSCDAQIHAANRLASRHERVRVCESCERAPAAFFCKADAASLCTACDSQIHSANPLARRHQRVPILPISGCVATNHSSKTTEPENIVVVGQEEEDEAEAASWLLPSSVKNCGDNNNNNNNNSENNRFSVGEEYLDLVDYSSSIDKRFTGQSNQYQQDYNVPQRSYVADGVVPLQVGVANGHMHHEQHNFQFGFTNVSSEAHQISNGSPIHMVSLVPESVTSDATVSHPRSPKAGTEELPEAPVQMLSPMERKARVLRYREKKKTRKFEKRIRYASRKEYAEKRPRIKGRFAKRNEVDADHALSTMVVFDTGYG

SEQ ID NO: 15846 - protein, 335 aa, Brassica nigra
MLKQESNWAQACDTCRSAACTVYCRADSAYLCTSCDAQIHAANRLASRHERVRVCESCERAPAAFFCKADAASLCTACDSQIHSANPLARRHQRVPILPISGCVATNHSSETAEPENIVVVGQEEEDEAEAASWLLPSSVKNCGDNNNNSENNRFSVGEEYLDLVDYSSSIDKRFTGQTNQYQQDYNVPQRSYVADGVVPLQVGVANGHMHHEKHNFQFGFTNVSSEASPIHMVSLVPESVTSDATVSHPRSPKAGTEELPEAPVQMLSPMERKARVLRYREKKKTRKFEKRIRYASRKEYAEKRPRIKGRFAKRNEVDADHALSTMVVFDTGYG

SEQ ID NO: 15847 - protein, 338 aa, Brassica nigra
MLKQESNWAQACDTCRSAACTVYCRADSAYLCTSCDAQIHAANRLASRHERVRVCESCERAPAAFFCKADAASLCTACDSQIHSANPLARRHQRVPILPISGCVATNHHSSETTEPENIVVVGQEEEDEAEAASWLLPSSVKNCGDHNNNNNSENNRFSVGEEYLDLVDYSSSMDKRFTGQSNQYQQDYNVPQRSYVADGVVPLQVGVANGHMHHEKHNFQFGFTNVSSEASPIHMVSLVPESVTSDATVSHPRSPKAGTEELPEAPVQMLSPMERKARVLRYREKKKTRKFEKRIRYASRKEYAEKRPRIKGRFAKRNEVDADHALSTMVVFDTGYG

SEQ ID NO: 15848 - protein, 339 aa, Brassica nigra
MLKQESNWAQACDTCRSAACTVYCRADSAYLCTSCDAQIHAANRLASRHERVRVCESCERAPAAFFCKADAASLCTACDSQIHSANPLARRHQRVPILPISGCVATNHSSKTTEPENIVVVGQEEEDEAEAASWLLPSSVKNCGDNNNNNNNNSENNRFSVGEEYLDLVDYSSSIDKRFTGQSNQYQQDYNVPQRSYVADGVVPLQVGVANGHMHHEQHNFQFGFTNVSSEASPIHMVSLVPESVTSDATVSHPRSPKAGTEELPEAPVQMLSPMERKARVLRYREKKKTRKFEKRIRYASRKEYAEKRPRIKGRFAKRNEVDADHALSTMVVFDTGYG

SEQ ID NO: 15849 - protein, 339 aa, Brassica nigra
MLKQESNWAQACDTCRSAACTVYCRADSAYLCTSCDAQIHAANRLASRHERVRVCESCERAPAAFFCKADAASLCTACDSQIHSANPLARRHQRVPILPISGCVATNHSSKTTEPENIVVVGQEEEDEAEAASWLLPSSVKNCGDNNNNNNNNSENNRFSVGEEYLDLVDYSSSIDKRFTGQSNQYQQDYNVPQRSYVADGVVPLQVGVANGHMHHEQHNFQFGFTNVSSEASPIHMVSLVPESVTSDATVSHPRSPKAGTEELPEAPVRMLSPMERKARVLRYREKKKTRKFEKRIRYASRKEYAEKRPRIKGRFAKRNEVDADHALSTMVVFDTGYG

SEQ ID NO: 15850 - protein, 336 aa, Brassica nigra
MLKQESNWAQACDTCRSAACTVYCRADSAYLCTSCDAQIHAANRLASRHERVRVCESCERAPAAFFCKADAASLCTACDSQIHSANPLARRHQRVPILPISGCVATNHHSSETTEPENIVVVGQEEEDEAEAASWLLPSSVKNCGDNNNNSENNRFSVGEEYLDLVDYSSSIDKRFTGQTNQYQQDYNVPQRSYVADGVVPLQVGVANGHMHHEKHNFQFGFTNVSSEASPIHMVSLVPESVTSDATVSHPRSPKAGTEELPEAPVQMLSPMERKARVLRYREKKKTRKFEKRIRYASRKEYAEKRPRIKGRFAKRNEVDADHALSTMVVFDTGYG

SEQ ID NO: 15851 - protein, 338 aa, Brassica nigra
MLKQESNWAQACDTCRSAACTVYCRADSAYLCTSCDAQIHAANRLASRHERVRVCESCERAPAAFFCKADAASLCTACDSQIHSANPLARRHQRVPILPISGCVATNHSSKTTEPENIVVVGQEEEDEAEAASWLLPSSVKNCGDNNNNNNNSENNRFSVGEEYLDLVDYSSSIDKRFTGQSNQYQQDYNVPQRSYVADGVVPLQVGVANGHMHHEQHNFQFGFTNVSSEASPIHMVSLVPESVTSDATVSHPRSPKAGTEELPEAPVQMLSPMERKARVLRYREKKKTRKFEKRIRYASRKEYAEKRPRIKGRFAKRNEVDADHALSTMVVFDTGYG

SEQ ID NO: 15852 - protein, 338 aa, Brassica nigra
MLKQESNWAQACDTCRSAACTVYCRADSAYLCTSCDAQIHAANRLASRHERVRVCESCERAPAAFFCKADAASLCTACDSQIHSANPLARRHQRVPILPISGCVATNHSSKTTEPENIVVVGQEEEDEAEAASWLLPSSVKNCGDNNNNNNNSENNRFSVGEEYLDLVDYSSSIDKRFTGQSNQYQQDYNVPQRSYVADGVVPLQVGVANGHMHHEQHNFQFGFTNVSSEASPIHMVSLVPETVTSDATVSHPRSPKAGTEELPEAPVQMLSPMERKARVLRYREKKKTRKFEKRIRYASRKEYAEKRPRIKGRFAKRNEVDADHALSTMVVFDTGYG

SEQ ID NO: 15853 - protein, 256 aa, Bambusa oldhamii
MRIQCDACEGAAATVVCCADEAALCARCDVEIHAANKLASKHQRLPLDAALPAALPRCDVCQEKAAFVFCVEDRALLCRDCDEPIHVPGTLSGNHQRYLATGIRVGFGSVCSANVGTHASCLPPKGGSKPPSVVAACGVPKPVPAAAQEVPSSPFFPPSGWAVEDLLQLSDYESSNKKESPLGFTELEWFADIDLLHDHAPAKGGSTAAEVPDLFTSPQPATNAGFYKTSGARQNKKPRVELPDDEDDYFIVPDLG

SEQ ID NO: 15854 - protein, 540 aa, Candidatus Phytoplasma mali
MQKQSNFIKKIMMEDLKKKKYHQIITRFPPEPNGFLHLGHARAIFINFELAKFFNGKTNLRYDDTNPTKEDKIYVNSILEDIKWLGYKPNKILFASDYFLEMYERALKLIKKDKAFVDDLSSKEIFQTRGNLIEPGQNSRYRKRSIEENLNLFQKMKEGFYKNGEKVLRAKIDMKSSNINLRDPVLYRILHAKTLKNVNWFIFPTYDYAHPLEDAIEKISHSLCSLEFENHRVLYDWVIKETEMSHIPTQIEFGKLNITNFILGKRNLKFLVENNLVNGWSDPRMPTLSGLRRKGYTPDSIKNFLLNIGLSKTNFKVKKSMLESFVRDDLQSKTFKMMAVINPLKVTITNYPLNKKEILEFQENNDYLFPTKKIFFSREIYIEKEDFQIKKPDIKYKRLFLNGEVRLLHAYFIKIYDVIKNNHGEVIELLATYDPKTKSGSGFNERKPNGTIHFVEVNTSQKAKFNFFTSMYKNETPQDLKSEFNFKSLETKFGFLDSSVKNFKHLDKFQFIRNGYFVFDKTEEKILNFNEIISLKKSYK

SEQ ID NO: 15855 - protein, 615 aa, Candidatus Phytoplasma mali
MTKTNKIIGIDLGTTNSCVSVMEGGEAKVITNAEGGRTTPSVVAFKGNNIMVGEIAKRQAITNPNTIISIKRHIGETKYTVSVNGNKYTPQEISAMILQNLKKTAEDYLGSEVTQAVITVPAYFNDAQRQATKDAGKIAGLEVKRIINEPTAAALAYGIDKNNQKEQIVLVFDLGGGTFDVSILNLADGTFEVLSTSGDNKLGGDDFDQRIVDYLVKEFKKENLVDLSKDKMALQRLKDSAEKAKKELSGVSSTQISLPFITMSESGPLHLENNLTRAKFDELTIDLVQRCLGPVKSALSDAKLTRDKIDQVLLVGGSTRIPAVQELVKKEIQKTPNKGINPDEVVSMGAAIQGGILSGDVKDILLLDVTPLSLGIETLGNVFTKLIERNTTIPTSKTQVFSTAADNQPAVDIHVLQGERTLSTDNKTLGRFQLTDIPPAPRGTPQISVTFDIDANGIVSVKAKDLGTNKEQKIVITGSGTLSEEEIKRMIKEAEENAETDRLKKELIDIKNEADTLIFQTKKALVDLKDDVEVQEKEKIESKIKELEEVISKDDVNIIKDKINALSQDAQNIAIKAYQKTQNKTANDDKNPSSNDNKDEKIKDDVVDADFEEKK

SEQ ID NO: 15856 - protein, 421 aa, Candidatus Phytoplasma mali
MYFIDEAINEIKAGNGGNGVVSFRKEKYVPLGGPDGGNGGKGGSIFFIGEQSENNLLKLKYQKHLKAKNGENGKNKNKHGANAENIYIKVPLGTIIYNLQNEITGEILKHGEILTIAKGGRGGKGNKSLATFKNPVPKYAEKGGIGESFKIKTELKILADVGLIGYPSVGKSTLISIISDAKPKIADYPFTTLKPYLGMVYVDNESFIVADLPGLIPNAHLGKGMGIKFLKHIERCRILIHMCDMSKSNPLQDIENLNQELKIYNKNLLKKPQIIIANKMDIIGAKTKLIELQKKILNKNIIPTSLLKNQNLKILKYKMLEMIKKNVVNLPLCENSSFKTYTLEEEKPDFVIKKDNQGFFVVKGEKIEKFFYKTDFNNEEATKKFAIFLKKIGVEEELIKKGVYFSKNKIKICDRVFEFIT

SEQ ID NO: 15857 - protein, 102 aa, Candidatus Phytoplasma mali
MFAIIKNGSKQFRVFEGQEIFVEKISLMEKSNYEFKEILAIGGKNNILGQPFVSGAKVQAQIIKHGRAKKIIVFKYKSKKKYRCKQGHRQNYTKLLITKIIA

SEQ ID NO: 15858 - protein, 85 aa, Candidatus Phytoplasma mali
MSEKETKHCTEKIKGVCRWFNKDKGFGFLQKLDSDSQDIFFHQTDIKCEGFRSLDEGEEVEFTLVQGEKGPQAIEIVRFTKQSIK

SEQ ID NO: 15859 - protein, 293 aa, Candidatus Phytoplasma mali
MKFKSGFITILGRPNVGKSTLINVLVKQKISIVSDKPNVTINKIIGVCNDIDSQLVFIDTPGFNNRKFLLSKRMDESSLKSIYGVDVILFLITDILNSSEKKILSNIQKHKKPIIIVINKIDNFKNKSQIDKIILDCLKYFKFDDIIPISAINSQNLLPLKNSILSYLKEGPKYYPSDMVTDQKKDRLIAELVREKIFFYCRQEIPYSVGTMVERMNYINDDFIEVWVLILIEKLSQKKILIGSKGEKLKQVSINTAKEIQNILNIKVRLNLWIKTKPKWRENIYLLKQLGYY

SEQ ID NO: 15860 - protein, 391 aa, Candidatus Phytoplasma mali
MKIISVNAGSSSLKFKLFDMPKEELIFSGLIEKIGDQKSIFSLSYGNTKKETIMPVLNHQQAVKLLLDSLQINKIIDNLEEIKGVGHRIVQGGELFKDSVVLTEENILKIESLNDLAPLHNYANVLGIKAFEKNIPNIFQVGVFDTTFHQTIKQENFSYAIPYEWYQKYKIRKYGFHGISYKYVSNRTSEILANKDSKIIVCHAGNGVSLCAIEGNNSVDTSMGFTPLEGVPMGTRSGNIDPTIIEFISYKENKSIKEIMNILNKKSGFLGVSGVSNDARDIEISLQNGNKRSLLAHDVQIKRICDYIGSYYFLLKGIDALVFTAGMGENSSLFRKKIIQRLSFLGVFLDDEFNNSKGERIISTSNSFFKVLVIPTNEEIEIVREVCKIKN

SEQ ID NO: 15861 - protein, 388 aa, Floydia praealta
PYEVPMTAAGALQSYKLAAKAIARLQSLPSGSMDRLCDTLVQEVYELTGYDRVMAYKFHEDDHGEVVSEITRPGLEPYLGLHYPATDIPQAARFLFMKCKVRMICDCHSKHAKVLQDEKLTFDLTLCGSTLRAPHSCHLQYMENMGSIASLVMAVVINEGNEESESSGSLQPQRRKRLWGLVVCHNTTPRFVPFPLRYACEFLIQVFAIHVNKEIELENQILEKNILRTQTLLCDMLMRDVPLGIVSQSPNIMDLVKCDGAALLYKNKIWLLGLTPTEFQIHEIATWLSNSHMDSTGLSTDSLYDAGFPGSLSLADVVCGMAAVWINSNDLLFWFRSPTAAEVQWGGAKHDPNDKDDVRRMHPRSSFKAFLQVVKTRSLPWKDYEMDA

SEQ ID NO: 15862 - protein, 388 aa, Lambertia formosa
PYEVPMTAAGALQSYKLAAKAIARLQSLPSGSMDRLCDTVVQEVYELTGYDRVMAYKFHDDDHGEVVSEITKPGLEPYLGLHYPATDIPQAARFLFMKCKVRMICDCHAKHVRVLQDEKLTFDLTLCGSTLRAPHSCHLQYMENMSSIASLVMAVVINEGNEESESSGSLQSQKRKRLWGLVVCHNTTPRFVPFPLRYACEFLIQVFAIHVNKEIELENQILEKNILRTQTLLCDMLMRDAPLGIVSQSPNIMDLVKCDGAALLYTNKIWLLGLTPTESQIHEIATWLSNSHMDSTGLSTDSLYDAGFPGSLSLADVVCGMAAVRINSNDMLFWFRSPTAAEVQWGGAKHDPNDKDDGRRMHPRSSFKAFLEVVKTRSLPWKDYEMDA

SEQ ID NO: 15863 - protein, 388 aa, Roupala montana
PYEVPMTAAGALQSYKLAAKAIARLQSLPSGSMDRLCDTVVQEVYELTGYDRVMAYKFHEDDHGEVVSEITKPGLEPYLGLHYPATDIPQAARFLFMKCKVRMICDCHAKHVKVLQDEKLTFDLTLCGSTLRAPHSCHLLYMENMGSIASLVMAVVINEGNEESESSGSLQPQKRKRLWGLVVCHNTTPRFVPFPLRYACEFLIQVFAIHVNKEIDLENQILEKNILRTQTLLCDMLMRDAPLGIVSQSPNIMDLVKCDGAVLLYRNKIWSLGLTPTESQIHEIATWLSNSHMDSTGLSTDSLYDAGFPGSLSLADVVCGMAAVRINSNDMLFWFRSPTAAEVQWGGAKHDPNDKDDVRRMHPRSSFKAFLEVVKARSLPWKDYEMDA

SEQ ID NO: 15864 - protein, 388 aa, Carnarvonia araliifolia
PYEVPMTAAGALQSYKLAAKAIARLQSLPSGSMDRLCDTVVQEVYELTGYDRVMAYKFHEDDHGEVVSEITKPGLEPYLGLHYPATDIPQAARFLFMKCKIRMICDCHAKHVKVLQDEKLTFDLTLCGSTLRAPHSCHLQYMENMSSIASLVMAVVINEGNEESESSGSLQPQKRKRLWGLVVCHNTTPRFIPFPLRYACEFLIQVFAIHVNKEIELENQILEKNILRTQTLLCDMLMRDAPLGIVSQSPSIMDLVKCDGAALLYKNKIWLLGLTPTESQIQGIATWLSNSHMDSTGLSTDSLYDAGFQGALSLADVVCGMAAVRINSNDMLFWFRSPTAAEVQWGGAKHDPNDKDDGRRMHPRSSFKAFLEVVKTRSLPWKDLRWTP

SEQ ID NO: 15865 - protein, 388 aa, Banksia serrata
PYEVPMTAAGALQSYKLAAKAIARLQSLPSGSMDRLCDTVVQEVYELTGYDRVMAYKFHEDDHGEVVSEITKPGLEPYLGLHYPATDIPQAARFLFMKCKVRMICDCHAKHVKVLQDEKLTFDLTLCGSTLRAPHSCHLQYMENMGSIASLVMAVVINEGNEESESSGSLQPQKRKRLWGLVVCHNTTPRFVPFPLRYACEFLIQVFAIHVNKEIELENQILEKNILRTQTLLCDMLMRDAPLGIVSQSPNIMDLVKCDGAVLLYKNKIWLLGLTPTESQIHEIATWLSNFHMDSTGLSTDSLYDAGFPGSLSLADVVCGMAAVRINSNDMLFWFRSPTAAEVQWGGAKHDPNDKDDGRRMHPRSSFKAFLEVVKTRSLPWKDYEMDA

SEQ ID NO: 15866 - protein, 388 aa, Cardwellia sublimis
PYEVPMTAAGALQSYKLAARAIARLQSLPSGSMDRLCDTVVQEVYELTGYDRVMAYKFHEDDHGEVVSEITKPGLEPYLGLHYPATDIPQAARFLFMKCKVRMICDCRAKHVKVLQDEKLTFDLTLCGSTLRAPHSCHLQYMENMSSIASLVMAVVINEGNEESESSGSLQPQKRKRLWGLVVCHNTTPRFVPFPLRYACEFLIQVFAIHVNKEIELENQILEKNILRTQTLLCDMLMRDAPLGIVSQRPNIMDLVKCDGAALLYKNKIWLLGLTPTESQIHEIASWLSNSHMDSTGLSTDSLYDAGFQGSLSLADVVCGMAAVRINSNDMLFWFRSPTAAEVQWGGAKHDPNDKDDGRRMHPRSSFKAFLEVVKTRSLPWKDYEMDA

SEQ ID NO: 15867 - protein, 387 aa, Euplassa inaequalis
YEVPMTAAGALQSYKLAAKAISRLQSLPSGSMDRLCDMVVQEVYELTGYDRVMTYKFHEDDHGEVVSEVTKPGLESYLGLHYPATDIPQAARFLFMKCKVRMVCDCRAKHVKVLQDEKLTFDLTLCGSTLRAPHSCHLQYMENMSSIASLVMAVVINEGNEESESSGSLQPQKRKRLWGLVVCHNTTPRFVPFPLRYACEFLIQVFAIHVNKEIELENQILEKNILRTQTLLCDMLMRDAPLGIVSQSPNIMDLVKCDGAALLYKNKIWLLGLTPTESQMHEIAAWLSNSHMDSTGLSTDSLYDAGFPGYLSLADVVCGMAAVRINSNDMLFWFRSPTAAEIQWGGAKHDPNDKDDGRRMHPRSSFKAFLEVVKTRSLPWKDYEMDA

SEQ ID NO: 15868 - protein, 388 aa, Gevuina avellana
PYEVPMTAAGALQSYKLAAKAIARLQSLPSGSMDRLCDTVVQEVYELTGYDRVMTYKFHEDDHGEVVSEITKPGLEPYLGLHYPATDIPQAARFLFMKCKVRMICDCRAKHVKVLQDEKLTFDLTLCGSTLRAPHSCHLQYMENMSSIASLVMAVVINEGNEESESSGSLQPQKRKRLWGLVVCHNTTPRFVPFPLRYACEFLIQVFAIHVSKEIELENQILEKNILRTQTLLCDMLMRDAPLGIVSQSPNIMDLVKCDGAALLYKNKIWLLGLTPTESQIHEIAAWLSNSHMDSTGLSTDSLYDAGFPGYLSLADVVCGMAVVRINSNDMLFWFRSPTAAEIQWGGAKHDPNDKDDGRRMHPRSSFKAFLEVVKTRSLPWKDYEMDA

SEQ ID NO: 15869 - protein, 388 aa, Macadamia integrifolia
PYEVPMTAAGALQSYKLAAKAIARLQSLPSGSMDRLCDTVVQEVYELTGYDRVMAYKFHEDDHGEVVSEITKPGLEPYLGLHYPATDIPQAARFLFMKCKVRMICDCHAKHVKVLQDEKLTFDLTLCGSTLRAPHSCHLQYMANMSSIASLVMAVVINEGNEESENSGSLQPQKRKRLWGLVVCHNTTPRFVPFPLRYACEFLIQVFAIHVNKEIELENQILEKNILRTQTLLCDMLMRDAPLGIVSQSPNIMDLVKCDGAALLYKNKIWLLGMTPTESQIHEIATWLSNSHMDSTGLSTDSLYDAGFPGSLSLADLVCGMAAVRINSNDMLFWFRSPTAAEVQWGGAKHDPNDKDDARRMHPRSSFKAFLEVVKTRSLPWKDYEMDA

SEQ ID NO: 15870 - protein, 369 aa, Macadamia ternifolia
  misc_feature (7)..(7): Xaa can be any naturally occurring amino acid
  unsure (1)..(369): unsure at all Xaa locations
LQSYKLXAKAIARLQSLPSGSMDRLCDTVVQEVYELTGYDRVMAYKFHEDDHGEVVSEITKPGLEPYLGLHYPATDIPQAARFLFMKCKVRMICDCRAKHVKVLQDEKLTFDLTLCGSTLRAPHSCHLQYMENMSSIASLVMAVVINEGNEESENSGSLQPQKRKRLWGLVVCHNTTPRFVPFPLRYACEFLIQVFAIHVNKEIELENQILEKNILRTQTLLCDMLMRDAPLGIVSQSPNIMDLVKCDGAALLYKNKIWLLGLTPTESQIHEIATWLSNSHMDSTGLSTDSLYDAGFPGFLSLADVVCGMAAVRINSNDMLFWFRSPTAAEVQWGGAKHDPNDKDDARRMHPRSSFKAFLEVVKTRSLP

SEQ ID NO: 15871 - protein, 382 aa, Macadamia jansenii
PYEVPMTAAGALQSYKLAAKAIARLQSLPSGSMDRLCDAVVQEVYELTGYDRVMAYKFHEDDHGEVVSEITKPGLEPYLGLHYPATDIPQAARFLFMKCKVRMICDCRAKHVKVLQDEKLTFDLTLCGSTLRAPHSCHLQYMENMSSIASLVMAVVINEGNEESENSGSLQPQKRKRLWGLVVCHNTTPRFVPFPLRYACEFLIQVFAIHVNKEIELENQILEKNILRTQTLLCDMLMRDAPLGIVSQSPNIMDLVKCDGAALLYKNKIWLLGLTPTESQIHEIATWLSNSHMDSTGLSTDSLYDAGFPGFLSLADVVCGMAAVRINSNDMLFWFRSPTAAEVQWGGAKHDPNDKDDARRMHPRSSFKAFLEVVKTRSLPWK

SEQ ID NO: 15872 - protein, 388 aa, Brabejum stellatifolium
PYEVPMTAAGALQSYKLAAKAIARLQSLPSGIMDRLCDTVVQEVFELTGYDRVMAYKFHEDDHGEVVSEITKPGLEPYLGLHYPATDIPQAARFLFMKCKVRMICDCCAKHVKVLQDEKLTFDLTLCGSTLRAPHSCHLRYMENMSSIASLVMAVVINEGNQESENSGSLQPQKRKRLWGLVVCHNTTPRFVPFPLRYACEFLIQVFAMHVSKEIELENQILEKNILRTQTLLCDMLMRDAPLGIVSQSPNIMDLVKCDGAALLYKNKIWLLGLTPTESQIHEIATWLSNSHMDSTGLSTDSLYDAGFPGSLSLADVVCGMAAVRINSNDMLFWFRSPTAAEVQWGGAKHDPNDKDDSRRMHPRSSFKAFLEVVKTRSLPWKDYEMDA

SEQ ID NO: 15873 - protein, 388 aa, Nelumbo lutea
PYEVPMTAAGALQSYKLAAKAIARLQALPSGCMDRLCDTVVQEVFELTGYDRVMAYKFHEDDHGEVVSEITKPGLEPYLGLHYPATDIPQAARFLFMKNKVRMICDCRAKHVKVLQDEKLPFDLTLCGSTLRAPHSCHLQYMENMDSIASLVMAVVVNEGDEEGEASGSSQQQKRKKLWGLVVCHNTTPRFVPFPLRYACEFLIQVFAIHVNKEIELENQILEKNILRTQTLLCDMLMRDALLGIISQSPNVMDLVKCDGAALLYKNKIWQLGTTPTEFQIHDIASWLSEYHMDSTGLSTDSFYDAGFPGALSLGDAVCGMAAVRITSKDMLFWFRSHTAAEVRWGGAKHDPDEKDDGRRMHPRSSFKAFLEVVKTRSLPWKDYEMDA

SEQ ID NO: 15874 - protein, 368 aa, Platanus occidentalis
LQSYKLAAKAIARLQSLSSGSMDRLCDTVVQEVYELTGYDRVMAYKFHEDDHGEVVSEITKPGLEPYLGLHYPATDIPQAARFLFMKNKVRMICDCRAKHVKVLQDEKLTFDLTLCGSTLRAPHSCHLQYMENMGSIASLVMAVVVNEEDEEGESSGSSQPQKRKRLWGLVVCHNTTPRFVPFPLRYACEFLIQVFAIHVNKELELESQILEKNILRTQTLLCDMLMRDAPLGIVSQTPNIMDLVKCDGAALLYKNKIWRLGLSPTEFQIRDIASWLCNYHMDSTGLSTDSLHDAGFPGALSLGVVCGMAAVRITSKDMPFWFRSHTAAEVRWGGAKHDPGEQDDGRRMHPRSSFKAFLEVVKTRSLP

SEQ ID NO: 15875 - protein, 331 aa, Rhodococcus sp. DK17
MTFTVSVAADRVECRPDQPILDAFLRGSVWMPNSCNQGTCGTCKLRVVSGSVDHGRSPEDTLTQADREQGFALACQATPCSDTVVERLDTAPAGTVHALRDLIGTVSAIEDVARDTRRVLVTLDSPLEFSAGQYVELRVPGTDHGRQYSMANTPGESKQLEFHIRRQPGGVATDGWVFGTLSVGERVEMTGPLGDFRLDPEDEGPMILLGGGTGLAPLKSMVRQALTVTPERAIHLYHGVREAADLYDVDLFREWERAHPGFRYVPCLSDSTWSGRTGFVTDTFVEDFDTCRGYSGYLCGPPAMVDAGVKAFKRRRMAPRRIFREKFTPAA

SEQ ID NO: 15876 - protein, 217 aa, Cupriavidus taiwanensis
MSSASASGRQLSAAVLLDKDGTVLHDVPCNVDPARMRLAPGAPAALRLLGGLGVPLVVVTNQPGVAHGLHTEAELVPVRDRLAAMFAEHGAVLAGFLYCPHHPEGRVAPYARACLCRKPMPGMLLQAAAAWRLDLARSWMIGDILNDVEAGNRAGCTTVLVDCGNETEWQLSPARQADYVVRTLDAAARLVVARMRAADPAGAAASKAASPSHAEAP

SEQ ID NO: 15877 - protein, 313 aa, Cupriavidus taiwanensis
MPAPQIVQVGPLAPQTNAILQQQYGAAALWQQADALAWARGEGQQVRVVVTSARHGCSAALIDALPRLEAIVSFGVGYDAIALDAARARGIQVSNTPDVLNDCVADLAFGLLLDAARGIAHGDRFVRAGRWPQGGFPLTTRVSGKKLGIVGLGRIGEIVARRAQGFDMEIAYHNRRPRQGAPWRFEADLKALAAWADFLVVATVGGPSTAGLVSRDILDALGPRGILVNVSRGSVVDEAALVAALAEGRLGGAGLDVFQDEPNVPPALLAMDHVVLAPHVASGTHETRAAMTALTLQNLDAFLAGGKVLTPVL

SEQ ID NO: 15878 - protein, 307 aa, Cupriavidus taiwanensis
MKDVNHERTSSSPRIGWIGIGAMGRPMCLNLLKAGHALTVFDKVPTQCEPVVAAGANAALSARDAAAQSDVVFSTIFDDSSLRALFLSDGGIAAAAAAGQVFVDMSTVSPEASAEVAEALAQRGASWLRAPVSGTVSLAASAQLSCFVSGPREAFAAVQPLLACLTARQSYVGGGDEARVIKLMINMMVFMSTAVLGEGLAFGERAGLDRALMVDAINDSIVGSAHYRTKADKLKQREYGAAGPISLVVKDLDLALAVARDNAVALPISSLVRQYLGMMQQRDLSHLDIAALADVPAWSSAPDGEAR

SEQ ID NO: 15879 - protein, 123 aa, Cupriavidus taiwanensis
MTAIHKILIVDDSPTEALFMSDLLGKRGFKVAVASNSEQAFARLQAEAFDLILMDVVMPGQNGYQATRAIKRDDRFKDIPVIMCTSKGLDTDRIWGMRQGASDYIVKPVDGEELLGKIAALAH

SEQ ID NO: 15880 - protein, 303 aa, Cupriavidus taiwanensis
MQTLHPHRSATRRALAAATLLLAAGAVHAADGDTLKKIKDSGVISLGYRESSIPFSYTDGKEVMGYSHEILLQIVDKVKSELKMPNLQVRLTPITSQNRIPLVQNGTIDIECGSTTNNLERQKQVAFSNSLFVYGIKMLTKKDSGVKEFADLKDRNVVTTAGTTGERLLVKMNGEKAMNMNLISTKDHGQSFLILETGRAAAFVMDEPLLYGERTKAKNAADWVVVGAPLQTENYACMFRKDDPSFKKLADGVIADLQTSGRAEKLYNKWFMAPIPPRGINMNYPLSADMKALFAAPNDKAYQ

SEQ ID NO: 15881 - protein, 764 aa, Cupriavidus taiwanensis
MTQSSLPVPTATAADEPWQAEAGSWLRPGETVLAGLALDLDARLHFTQGWLVVTDQRIVAHAPGEKIVREWNIAPALRLSHTDHAGVGTLELSGPAGRLATWRYTLGYNPAALRLADQFEAQRDAAASRPASGGGEVLCPTCKAPLPPDEEQCPQCSRELETPPSTWALLRLWRFARPYRWQLLGGFLLTLLSTAATLVPPYLTMPLMDKVLIPFQNGVPIDYGLVRLYLAGLLGAALVAWSLGWARTYLLARVSERIGADLRTTTYEHLLKLSLEYFGGKRTGDLMARIGSESDRICVFLSLHLLDFATDVLMILMTAVILVSINPWLALVTLVPLPFIAWMIHLVRDRLRHGFEKIDRIWSEITNVLADTIPGIRVVKAFAQEKREVTRFREANKHNLAINDRVNAVWSLFTPTVTLLTEIGLLIVWVFGIWQVSHSAITVGVLVAFLTYISRFYTRLDSMSRIVSVTQKAAAGAKRIFDILDHVSSVPEPARPARLDRVEGAIDMSDLGFRYGNRAVIRGLNLSIAPGEMIGLVGHSGSGKSTLVNLICRFYDVSEGAIRVDGVDIRSLPVSEYRRHIGLVLQEPFLFFGTIADNIAYGKPDATREEIIAAARAAHAHEFILRLPHGYDSLVGERGQALSGGERQRISIARALLINPRILIMDEATSSVDTATEKEIQKALDNLVQGRTTIAIAHRLSTLRKADRLVVMDRGQIVEVGSHDELLLREGAYYKLYQAQARNVDTEDDDAEAPIQIPETAHAQ

SEQ ID NO: 15882 - protein, 226 aa, Cupriavidus taiwanensis
MRPAFDPESLPVIDTDLRNGALSAPRLQVDFIRHRFQAPPAWAPELTDESRVYDRSRGLRDAAVLVPLVERSDGLTVLLTQRNANLSAHAGQISFPGGRQESWDVNRIDTALRETEEEVGLARDYVEVLGALPDYITGTGFHVSPVVGLVRDGFTLRPDASEVADVFEVPLAFLMDPSHHERRLFRWVDGERMFYAMPYPRENGGQRFIWGATAGMLRNLYHLLAA

SEQ ID NO: 15883 - protein, 591 aa, Cupriavidus taiwanensis
MTTSKPPISPGAAVPSSMASRLWSYLRPELRIFIGAILAMAVVAASEGVIPKVVNDLLDKGFGGDYAGTLWHVPAILTGVALIRGVAQFASGYLLNLISNRVLLKMRLQMFERLLQAPASFYHRNTAASLINAVIFEVNQVLQILTSVFITLVRDSLTVVALLIYLFYTNWRLTLIVAVILPVIGYLMSKINRRLRKLNRDHQTYTNNAAYVVEEAVGGYKVVKLHGGESYELQRFRTVAERLKNYSMRMAVAGGLNQPVTAFLAALALSVIITIAMVQAQANQTTVGGFTGFVMAMLLLISPLKHLTDINQPLTRGITAAEMIFRLIDEPVEPQDGGKPLARARGELAFEQVGFRYGEAPRAALEGIDLRVSPGEVVALVGPSGSGKTTLVNLVPRFFDPTSGRILLDGVPLTELALKDLRNQIAFVSQDVVLFNDTVAANVAYGAQPGSEIDMDRVERALAAAYLTETVKGLPEGVQTNIGDNGMKLSGGQRQRLAIARALYKDAPILILDEATSALDSESERQVQAALEELMKGRTTLVIAHRLSTIENADRIAVLDHGRVAETGTHAQLLAANGLYAGLHRIQFASH

SEQ ID NO: 15884 - protein, 773 aa, Cupriavidus taiwanensis
MSSKNSGDAPQHAPNSPEAQLRLAALEYHRSPTKGKIQVTATKALSNQRDLSLAYSPGVAYACEEIAKDPATAAEYTSRANLVAVVTNGTAVLGLGDIGPLAGKPVMEGKGCLFKKFAGIDVFDIELDARDPDKIVEIVAALEPTLGGVNLEDIKAPECFYIEQKLRERMNIPVFHDDQHGTAIISTAALLNGLKIVGKDIAKVKVAVSGAGAAAIACLDTMVSLGVTRENISVVDSKGVIYVGRDANMEANKARYAQDTSARTLADIVKGADVFLGCSTAGVLTAEMVKTMADQPIILALANPEPEIRPEVAKAARPDCIIATGRSDYPNQVNNVLCFPYIFRGALDCGATKITEAMKLACVKAIAELAEAELNDAVAAAYGGRELKFGPDYIIPTPFDQRLIEKIAPAVAKAAEESGVATRPIKDLEAYRQQLSTYVYHTGLIMKPVFSAAKAAPKRVAYAEGEEERVLRAVQSVVDEGLARPILIGRPHVIQMRIDKAGLRLKPGVDFELINPEDDPRYRAYHEAYHALRGRDGVTPDMAKVALRRSNTLIGTMLMHMGDADALLCGTVGRFEAHLEHVRDVIGLAPGAHVFAAMNALMLEKYTLFITDTFVNDDPSAEQLAAITQLAAEEIARFGLQPKVALMSHSMFGSSTRPSARKMREAAQILAREAPHLEVEGEMQGDAALVEDVRRHFLPSTKLAGSANLLVMPTLDAANIAFNLLKITGGQGVTVGPILLGAAKPVHILNPQATTRRIVNMTAVAVAECNALR

SEQ ID NO: 15885 - protein, 587 aa, Cupriavidus taiwanensis
MNMPSAEFSHADSNSSAAPEMIGAEILVHALAEEGVEYVWGYPGGAVLYIYDELHKQKKFEHILVRHEQAAVHAADGYARATGKVGVALVTSGPGVTNAVTGIATAYLDSIPMVVITGNVPTHAIGQDAFQECDTVGITRPIVKHNFLVKDVRDLAATIKKAFFIASTGRPGPVVVDIPKDVSRNACKYEYPKSIDMRSYNPVNKGHSGQIRKAVALLQNAERPYIYSGGGVVLANASDELRQLAALTGHPVTNTLMGLGAFPGTHKQFVGMLGMHGTYEANMAMQNCDVLIAIGARFDDRVIGNPSHFTSQARKIIHIDIDPSSISKRVKVDIPIVGNVKDVLQELIAQIKASDVKPKREALARWWEQIEQWRSVDCLKYDRSSEIIKPQYVVEKIWELTHGDAFICSDVGQHQMWAAQFYKFNEPRRWINSGGLGTMGVGLPYAMGIKKAFPEKEVVTITGEGSIQMCIQELSTCLQYDTPVKICSLNNGYLGMVRQWQEIEYDNRYSHSYMDALPDFVKLAEAYGHVGMRVEKSSDVEPALREAFRLKDRTVFLDFQTDPTENVWPMVQAGKGISEMLLGAEDL

SEQ ID NO: 15886 - protein, 390 aa, Cupriavidus taiwanensis
MSADTTLAPLTPPPSRLPGVGTTIFTVMSALAAEKNAVNLGQGFPDFECDPGIVDAVAAAMRAGHNQYPPMAGVPRLRQAIAAKIASLYGHQYSWDSEITVTAGATQGILTAILCAVHPGDEVIVLEPCYDSYLPAIELAGATAVPVALEAPAFRVPFDKLAAAITPRTRMILINTPHNPTGTIWRAGDMDQLAQILAGTDILLLSDEVYEHMVYDGQRHESVSRHPELARRSFVISSFGKTYHVTGWKVGYVAAPAALMAEFRKVHQFNVFTVNTPVQHGLADYMADAAPYLQLSAFYQAKRDFFRAGLAASRFKLLPSDGTYFQCVDYSAISDLSEADFAMWLTREIGVAAIPVSAFYSQPRESGVVRFCFAKKEETLALALERLGKL

SEQ ID NO: 15887 - protein, 195 aa, Cupriavidus taiwanensis
MSQIDHAALAQLFTEARTHNVWQDRHVDDAVLHQIYEAMKFGPTAANSSPARIVFVKSAAEKARLVDCVSAGNVDKTRSAPVTAIIAFDTAFHDQLPKLFPHADARSWYAGNDEKIARDALMNSSLQGGYFILAARAFGLDCGPMGGFDADKVNAAFFPDGKWKVNFLCNLGYGVADKLYPRGPRLSFDEACRVV

SEQ ID NO: 15888 - protein, 405 aa, Cupriavidus taiwanensis
MSTPHFPIYMDYSATTPVDPRVADKMIPYLREQFGNPASRSHAYGWDAERAVEEAREQVAALVGADPREIVWTSGATESDNLAIKGAANFYSGKGKHIITVKTEHKAVLDTTRELERQGFEVTYLDVKENGLLDMDVFKQALRPDTILVSVMLVNNEIGVIQDVEQIGEICREKGIIFHCDAAQATGKVAIDLNKLKCDLMSFSAHKTYGPKGIGALYVRRKPRVRIEAQMHGGGHERGMRSGTLATHQIVGMGEAFRIAREEMATENERIRMLRDRLWNGLSDMEEVYLNGDLEHRVPHNLNVSFNFVEGESLIMAIKDVAVSSGSACTSASLEPSYVLRALGRNDELAHSSIRFTVGRFTTEQEIDYTVELLKSKIGKLRDLSPLWEMFKDGVDLNSIQWAAH

SEQ ID NO: 15889 - protein, 417 aa, Cupriavidus taiwanensis
MALIVHKYGGTSMGSTERIKNVAKRVAKWHRAGHRVVVVPSAMSGETNRLLGLAKEISPQPDPRELDMLASTGEQASVALLAIALHGEDIDAVSYTGWQVPVKTDSSYTKARIESIDDERILADLDAGRVVVITGFQGIDDDGNITTLGRGGSDTSAVAIAAAIEADECLIYTDVDGVYTTDPRVVEDARRLDQITFEEMLEMASLGSKVLQIRSVEFAGKYRVKTRVLSSLTDPLMPLEQEMHSGTLITFEEEDSTMEAAVISGIAFARDEAKITVLGVPDKPGIAYQILGPVADANIDVDMIIQNQSVDGKTDFTFTVPRGEYQRALAILNDGVKAHIGAGSVSGDPKVSKVSVVGVGMRSHVGIASKMFRTLSEEGINIQMISTSEIKISVLIDEKYMELAVRALHKAFELEQA

SEQ ID NO: 15890 - protein, 479 aa, Cupriavidus taiwanensis
MNPSAIAMTSPQDSFLALCRAALGPQHVLTDTADQAPYLTDWRKRYRGEALAVLRPGTAAEVAEVVHACHAHRIAMVPQGGNTGLCGGATPVADTPQVVISLQRLNRIRQVDPLNNTITVEAGVVLQQLQEVAREHGRLFPLSLAAEGSCTIGGNLSTNAGGTAVLRYGNTRELCLGLEVVTPAGETWHGLRGLRKDNTGYDLRDLFIGAEGTLGIITAAVMKLFPLPRASVTALAAVQSPRAALALLAIAQSHAGAMLTGFELMSALSMTLVTRHFPQLRYPFAQMHPQLVLLELSDSESEAHARGIFEAMMSAAFDAGVVADAVVAESVQQSHDFWNLREHIPLAQVEDGKNIKHDIAVPVSRVADFIECTDALLQNAFPGARMVTFGHLGDGNLHYNVAPPEGTDHDAFLAHQDQVNRIVHDSVRSHNGSISAEHGLGQLKREENRHYKSEVELAMMRAIKGALDPLGLMNPGKVV

SEQ ID NO: 15891 - protein, 599 aa, Cupriavidus taiwanensis
MPMPAPTTGSLLPRLFPWSQRVDPTTLRADLVAGLLGAVLVLPQGVAFATLAGLPPQYGIYSAVVPCIVAALFGSSWHVMSGPTNANSLALFAMLSPLAFAGSPAYIGLALAVTIVVGVMQLAVGTLRLGSLANFISPSVLLGFTCGAATLIGLYALKDLFGLSVPTGTSAFGVLRHLFEHAGTINWDAAMVGAVTLAVTLLCKRLWRRLPFMLLGLLAGYGVALWLNQAGGHHVNVVGPIPSALPHFQVPDVDWRKLPDLLGIAAALTIVALGQSISIAKAVALRSGQHIDANREFIGQGLSNIAGGFFSGYISCGSLNRSVPNFEAGARTPLASVFSALWLVALVAVSAPLLAQIPMAAIAAMLLLVAWGLLDIARLRRIFTLSRTEFAIAIGTFAATLVIRLEMAVLLGTVLSLVAYLYRTSRPAVRSLVPDADDPGRRFTPLDELRRPQPECPQLKLLRMEGAIYFGAVQYVTDRLHWLRTVNAGQTHLLAMTKSMNFIDLAGAEMWEYELSERRALGGDLYFHRPRTQVLQTWAQTGFTDKLGADHVFPTKRQALHTIIGQLSPEVCAGCTVRLFEECASRPGATAAPAASAQP

SEQ ID NO: 15892 - protein, 414 aa, Cupriavidus taiwanensis
MGAPDIIKQHLIDPEICIRCNTCEDTCPIDAITHDDRNYVVRADVCNGCNACLSPCPTGAIDNWRTMLRGQAYPIEAQLLWDELPAEVPLPELDIADEAAPATTGGGTAAADGAAIQAVETSRHTSPRAPWSAAHPYVNLHGVRAPVTATVAGNYRLTAADASSDIHHIVLDLGTHFFPILEGQSIGIVPPGTDAAGKPHYIRMYSVASPRDGERPGYNNLALTVKRVDQDHDGKPVRGVASNYLCDLAKGDTVQVVGPFGSTFLMPNHAEASVMMICTGTGSAPMRAMTERMRRNVAQFNGRRLLFFGARNAAELPYFGPLLKLPRDFLEIHFAFSRDPATPRRYVQDAIREARDSVAALLGDANGHVYICGLKGMEEGVLAAFETVCASAGLNWKALETTMKAEGRLHIETY

SEQ ID NO: 15893 - protein, 393 aa, Cupriavidus taiwanensis
MTDVVIVSAARTAVGKFGGSLAKIPAPELGAIVIKAALERAGIQPEQVSEVIMGQVLTAGSGQNPARQASIKAGLPAMVPAMTINKVCGSGLKAVMLAANAIMSGDAEIVVAGGQENMSAAPHVLPGSRDGFRMGDTKLVDTMIVDGLWDVYNQYHMGITAENVAKEYGITREAQDEFAVGSQNKAEAAQKAGKFDEEIVPVLIPQRKGDPVAFKTDEFVRHGATLDSMAGLKPAFDKAGSVTAANASGLNDGAAAVVVMSAAKAKELGLTPLATIKSYANAGVDPKVMGMGPVPASKRALSRAGWTPQDLDLMEINEAFAAQALAVHQQMGWDTSKVNVNGGAIAIGHPIGASGCRILVTLLHEMKRRDAKKGLASLCIGGGMGVALAVERN

SEQ ID NO: 15894 - protein, 394 aa, Cupriavidus taiwanensis
MTREVVVVSGVRTAIGTFGGSLKDVAPAELGALVVREALARAQVSGDDVGHVVFGNVIQTEPRDMYLGRVAAVNGGVSINAPALTVNRLCGSGLQAIVSAAQTILLGDADVAIGGGAESMSRAPYLAPAARWGARMGDAGLVDMMLGALHDPFHRIHMGVTAENVAREYDISRTQQDEAALESHRRASAAIKAGYFKDQIVPVVTKGRKGEVTFDTDEHVRHDATMDDMTKLKPVFVKENGTVTAGNASGLNDAAAAVVMMERAEAERRGLKPLARLVSYGHAGVDPKTMGIGPVPATKIALERAGLQVSDLDVIEANEAFAAQACAVSKALRLDPAKVNPNGSGISLGHPIGATGALITVKALHELQRVQGRYALVTMCIGGGQGIAAIFERI

SEQ ID NO: 15895 - protein, 312 aa, Cupriavidus taiwanensis
MNARHEKYQRLIDYCKTMPATPTAVAHPCDQASLEGAVEAARLGLIAPILVGPRARIEDAARAAGIDIREYPIVDAEHSHASAAAAVQLVRESKAEALMKGSLHTDELMGAVVKGDSGLRTARRISHCFVMDVPGHADALIVTDAAVNIAPTLAEKADILQNAIDLAHALRVDEVRVAILSAMETVNPKVPSTLDAAALCKMVDRHQITGAVVDGPLALDNAINLAAARIKKIDSPVAGRANVLLVPDLDAGNMLAKSLTFLAGADAAGIVLGARVPIILTSRADSVTTRLASCAVAALVARARRESGQVAG

SEQ ID NO: 15896 - protein, 396 aa, Cupriavidus taiwanensis
MAELILVLNAGSSSIKYCAYDTHDDALRLVLRGSIDGLYTAPAFRAMDGTGAEIEARQWDAGSELGHEGAIAFLADFLRAHGEGHSLSAVGHRVVHGGVRLTRPARVTEALLAELDTLCPLAPLHQPHNLKPIRILAERRPELPQVACFDTAFHRAQPEVAQAFALPAEVTGRGVRRYGFHGLSYEYIAGVLPSVDAAAAAGRTVVAHLGNGSSMCALVGGRSVASTMGFTAVDGLPMGTRSGSLDPGVILYLISELGMEARAIEDLIYRKSGLLGVSGVSSDMRALLASDDPRARFAIELYTYRIARELGSLAAAAQGLDALVFTAGIGEHAAPIRERVCQLAAWLGVSIDAAANDSDGPRISLASSRVPVWVVPTNEELMIARHTREILAAQDR

SEQ ID NO: 15897 - protein, 292 aa, Cupriavidus taiwanensis
MKIAFLGLGTMGLPMAANLLKAGYAVRGWNRSPMPVARLAALGAQSAATPVEAVADADVLISMLADDAATRATLLDAQALRALRRGAIHVNMATISVALAAELAALHQSQGVDYVAAPVLGRVNVAEAGQLNILVAGKAEAIASVQPLLDVLGQKTWQLGERPEQANAAKLAVNFMIASAIGTMGEAVALAHGHGVDKAGFLELVTSTAFAAPVYKGYGQAIAEERFEPAGFKLALGLKDVRLALEAAEQANVPLPLASTLRDTHIESLAHGDGHLDWAALSRTSARRAAQA

SEQ ID NO: 15898 - protein, 464 aa, Cupriavidus taiwanensis
MSLFRTKDIDAMLAQRHVAALKKVLGPVDLVLMGIGAIIGTGIFVLTGTGALTAGPALTVSFVIAALACGFAALCYAEFASAIPVSGSIYTYSYATLGEIVAWMIGWDLLLEYGLATSAVSVGWSGYFQSLMAGFGMKLPAALTAAPGSVPGVHTVLNLPACLIMLAITWVVSYGVRESARVNNLMVAVKIGVVLLFIAVGVWHVQPANWQPFAPFGFTGIFNAAALVFFAFIGFDAVTSAAEEVRNPRRDLPIGIIGSLAVCTVLYVVVAAIMTGIVPFAKFAGVDHPVSLALQFAGQNWVAGFVDLGAILGMTTVILVMTYGQTRVIFAMSRDGLLPERLSSVHPVHATPYFATWTVGLVFAAIAAFVPLNVLAELINIGTLAAFTLISVAVLVLRKTRPDLPRAFRCPGVPVVPLLSIGFCLFLMAHLQALTWAAFLVWLALGLVIYFAYARRNAVLHGGA

SEQ ID NO: 15899 - protein, 570 aa, Cupriavidus taiwanensis
MSQDNTKLRERNGGQILVEQLRIQGVRRVFLVPGESYLPCIDALYDHQDAITPIVCRQESGAGYMAEAHGKLTGAPGVCFVTRGPGATNASIAVHTAFQDSTPMILFVGQVGNDFYEREAFQEIDYRRMFGQMAKWVAQIDRTDRIPEFIARAFAVATSGRPGPVVLALPEDTLWGKATVADMPRYVRSHAAPAPHALASLAAMLEQAERPFLMIGGSGWTPEAMRQMEGFAERFGLPVGLAWRRLECFDNHHPNYAGHVGWGMGEALRARIRESDLLIAVGTRMGEATTEGYTVVESPLPRQRLVHVYPDPEELGRVFRAEVPVVADVVSFAAAVDGLRPAREHNRAALVERARRDYLDSQKALPAPGPLNLNQAACVVRERLPEDACITVGAGNYAVFPHTYYRYKGVGTSLAPTVGSMGYGLPAAISAKLEHPERTVVCYAGDGCFQMNLQELGVAMQYRLGIVVLVFNNGIWGTIRAHQEREFPGRTIALGFENPEFAELARAYRGYGEVVASDAEFGPALDRALDFASTHSMPALLELRYDPDGIAPGMTLSGIRAAALARQAAG

SEQ ID NO: 15900 - protein, 392 aa, Cupriavidus taiwanensis
MQQAVIVDAIRSPMGRSKPGSAFTELHATELLAQVLKALVERNRLDPGLVDDVITGCVTQAGEQSAGPGRVAWLAAGFPEHVPATTIDRKCGSSQQAVHFAAQGIMAGAYDIVIACGIESMSRVPMGSARIGQNPYGPSMEARYAPGLVSQGVAAELVAAKYELSREQMDSYSARSHELAAAARESGAFRREIVGISTPNGVVEHDETIRPGTSVEKLGTLQASFRNDELSARFPQIGWNVTAGNASQISDGAAAMLLMSEAMAQRLGLKPRARFVAFDVCGDDPIAMLTAPIPASQRAIKKSGLKLEQIDHYEINEAFACVPLAWQRALGADPARLNPRGGAIALGHPLGASGVRLMTTMLHALEDSGQRYGLQSMCEAGGMANATIIERL

SEQ ID NO: 15901 - protein, 862 aa, Cupriavidus taiwanensis
MRLDKLTTRFQEALAEAQSLALANDNQYIDPQHVLRALLSQDDGAAKALLARAGVNVQGLQTALDAAIKRLPQVQGTNEVQIGRDLVNLLNATEKEALKRGDQFIASELFLLAVSDDKGDAGRIARENGLNRKSLESAIQAVRGGESVNSAEAEGQREALKKYTIDLTERARIGKLDPVIGRDDEIRRAIQILQRRTKNNPVLIGEPGVGKTAIVEGLAQRIVNGEVPESLKNKRVLVLDMAGLLAGAKYRGEFEERLKAVLNDVAKDEGQTIVFIDEIHTMVGAGKAEGAIDAGNMLKPALARGELHCIGATTLDEYRKYIEKDAALERRFQKVLVDEPTVEATIAILRGLQEKYELHHGVEITDPAIVAAAELSHRYITDRFLPDKAIDLIDEAAARIKMEIDSKPEAMDKLERRTIQLKIEREAVKKETDEASLKRLDLIEQEIARLEKEYADLDEIWKAEKGAAQGTAALKEEIEKVKLEIAKLQREGKLDKVAELQYGKLPGLEGKLKAATDAEASEQKQPNKLLRTQVGAEEIAEVVSRATGIPVSKMMQGEREKLLKMEERLHARVVGQDEAVRLVSDAIRRSRAGLADENKPYGSFLFLGPTGVGKTELCKALAEFMFDSEEHLIRIDMSEFMEKHSVSRLIGAPPGYVGYEEGGYLTEAVRRKPYSVVLLDEVEKAHPDVFNVLLQVLDDGRLTDGQGRTVDFKNTVIVMTSNLGSQIIQSMAGEPQEAIKGAVWQEVRTHFRPEFLNRIDEVVVFHALDQKNIESIARIQLQRLQARLARMDMTLEVSDHALEKIASAGYDPVFGARPLKRAIQQQIENPVARAILEGKFAAKDVVPVDYADGEFTFGRKLD

SEQ ID NO: 15902 - protein, 411 aa, Cupriavidus taiwanensis
MKPIQKSNKLNNVCYDIRGPVLEKAKQMEEEGHKIIKLNIGNLAVFGFDAPEEIQQDMMRNLPNSAGYSDSKGIFAARKAIMHYTQQKNIEGVGLDDIYVGNGASELIVMAVNALLNTGDEVLVPAPDYPLWTAAVSLSGGTPVHYICDEANEWMPDPADIRARITPHTKAIVIINPNNPTGALYSDELLLEIVAIAREHGLIIFADEIYDKVLYDGNTHTSIASLSTDVLTVTFNGLSKNYRSCGYRAGWMVVSGDKRPAIDYIEGLNMLSSMRLCANVPGQWAIQTALGGYQSINDLVAEGGRLRRQRDLAYELITAIPGVTCVKPKAALYLFPKLDLSMYPVQDDQEFIYELLQESKVLLVQGSGFNWARPDHFRIVFLPHEEDLREAIGRIARFLEAYRKRHGKAAA

SEQ ID NO: 15903 - protein, 627 aa, Cupriavidus taiwanensis
MNNNLFQKAAIWLVIALVLFTVFKQFDKPRAQDSVTYSQFMDDAKNGKVSRVDVQGRNLVVSPKEGAKYTIISPGDIWMVGDLMKYGVQVTGKADDEPNVLVQALYYLGPTLLIIVFWFYMMRQMQGGGKGGAFSFGKSRARLIDENQNAVTFQDVAGCDESKEEVVELVDFLKDPQKFQKLGGRIPRGVLLVGPPGTGKTLLARAIAGEAKVPFFSISGSDFVEMFVGVGAARVRDMFENAKKQAPCIVFIDEIDAVGRHRGAGMGGGNDEREQTLNQMLVEMDGFEANSGVIVIAATNRADVLDKALLRPGRFDRQVYVGLPDIRGREQILKVHMRKVPIGNDVDASVIARGTPGFSGADLANLVNEAALFAARRNKRVVDMQDFEDAKDKIYMGPERKSTVMREEERRATAYHESGHAVVAKLLPKADPVHKVTIMPRGWALGVTWQLPEHDKYSKYKDSMLEEVAILFGGRAAEEVFLNAMSTGASNDFERATKIARDMVTRFGMSDSLGAMVYVDTEQDGMFGKLSSKTVSEATQQKVDAEIRRIIDEQYALAKRLLEENRDKVEAMTNALMEWETIDADQVNDIMAGKPPRPPRSASGPNGGGSTPSGGSPVAPTNAPATA

SEQ ID NO: 15904 - protein, 311 aa, Cupriavidus taiwanensis
MTESTHPQQDAADTPAAAFRCGTVAIVGRPNVGKSTLMNALVGQKISITSRKAQTTRHRIVGIQTTDDAQYVFVDTPGFQTRHASALNRSLNRAVTSTLSSVDLILFVVEAGYYGADDEKVLSLLPKNTPVLLVANKLDRIGENRSEVMMPFLEKMGQLFPFREVVPMSAKTRDHIARLFEIIRPYLPEGEPMYDADAMTDRSERFLASEIIREKVFRWTGDELPYTSTVVIDKFETEGRLRRVFATILVERDAHKAMIIGNKGSKLKQISTEARLDMEKLFDGKVYLEMWIKVKSGWADNEAGLRAYGYE

SEQ ID NO: 15905 - protein, 331 aa, Cupriavidus taiwanensis
MKPSVLVTRAIYPEVIAHLAQYFDVDDNQQDAVLDAAALKARLAGKAGVLANAADRIDAGVIAGLPALRAVCNMAVGYNNLDLPALTAAGIVATNTPDVLTETTADFGWALLMATARRVTEAEHYLRAGKWQRWSYDMLVGMDLHGSTLGILGMGRIGQALARRAGGFGMNVLYHNRSQLPAETERALNARYVSKEDLLRQSDHLLLVLPYGPQSHHAIGAAELALMKPTATLVNLARGGIVDDAALARALRDKRIFGAGLDVFEGEPSVHPDLLTVPNVVLTPHIASASEKTRRAMAMLAADNLIAALDQGPQAGHPPTVINPEVMAHRR

SEQ ID NO: 15906 - protein, 427 aa, Cupriavidus taiwanensis
MTNNVSAMPAAKAAARGATPGQSLKNAITAAVMTAILTIPILGLQLKLEGYKVVLEPHWRPVWLAVAAVFLFQLFKPVLTRAGSAVRLPALPQLGAQQQRVAVWVLLAVGLVWPFFGSRGAVDVATLALIYVILGLGLNIVVGYAGLLDLGYVGFYAVGGYTYALLNQYFGLTFWECLPIAAAMSAGFGFLLGFPVLRLRGDYLAIVTLGFGEIIRLLLNNLTSLTGGPDGVSGIPKPSVFGIEMARSASVEGTRTFHELIGLDYASQHMVIFLYLIALLLVGFTLFVTSRLIRMPMGRAWEALREDEIACRSLGLNPTRIKLSAFTLGASFAGLGGAFFAARQGLVNPESFTFIESALVLAVVVLGGMGSQLGVILAAILLTVLPEVARGFAEYRMLIFGLVMVLMMMWRPQGLLPASRPHVELPR

SEQ ID NO: 15907 - protein, 624 aa, Cupriavidus taiwanensis
MTQHDIRAEQAIASATDASITSDAAQSPLDKLDALLNPSPAVEAPAAASGFAALGLDAAILRALSDLNYNTPTPVQAQAIPAFLAGRDLLVSSQTGSGKTAAFMLPAIQRISEMPAPQRATEPAKRMKGKRPRPAPAQPALLVLTPTRELALQVTEAAAKYGRNLRRIVCASILGGMPYPKQLAMLAKMPDILVATPGRLLDHIDAGRIDLSALQMLVFDEADRMLDMGFADDIDAIVNATPASRQTLMFSATLDARIAQLASRQLKDPQRIEIAAARADQSHIEQRLHFTDDMSHKERLLDHLLRDASLKQAIVFTATKRDADSLAERLSDTGFSAGALHGDMTQGARNRTLTALRRGNLRVLVATDVAARGIDVPDITHVVNFDLPKQAEDYVHRIGRTGRAGRSGIAINLVNHNDMFQWRRIERFTNQRVDASVIEGLEPRRAPKPRSGFGGKPGGGRSDFRGNGGGYRGGERSFGDRKFGGDSRTGFGERKFSGESRGFGNRTEGARPFGDDNRGGFGNREGGYRGQGGGYRGAGDGARGFGNRDGGRPFGDDPRGGFGNRDGNRGFGENRGNGGGYRGNGGNGEGRSFGNRDGNRGFGGGFGGNAGNGSNRNSRSRYER

SEQ ID NO: 15908 - protein, 511 aa, Cupriavidus taiwanensis
MCRVRLPPIPIPMTTTNAPEPTTAVPTAVQTFDSFGLDARILRALSEQGYTSPTPIQAQAIPVVLLGKDVMGAAQTGTGKTAGFALPIIQRLLPLANASASPARHPVRALMLTPTRELADQVYDNVARYAKHTDLRSTVVFGGVDMNPQTDALRRGVEILVATPGRLLDHVQQKSVNLSQVQMLVLDEADRMLDMGFLPDLQRIINLLPAQRQTLLFSATFSPEIKRLASSYLKQPVTIEVARSNSTNENVRQAVYQVEDGHKQAAVVHLLKQRAEQSQSRQCIVFVNSKIGCSRLARHLEREGINAAAIHGDKTQTERMQTLDGFKSGTIDALVATDVAARGLDIPDMPCVINFDLPYSAEDYVHRIGRTGRAGASGDALSIYVPGNDERLLSDIEKLIKRSIPRGKLEGFDPTGERARQADSERRRERNDLRRARGADSEDRPRRHDHGASRQAFRASDDPFFSRPYEPSPSSAAQAKAADEVAAALTRGRQAPKRPVAALLGGVPRKS

SEQ ID NO: 15909 - protein, 585 aa, Cupriavidus taiwanensis
MSHDNKPTDSNPAASNFLRSIIDQDLAAGTYAGRQDKQGEPLPTVITRFPPEPNGYLHIGHAKSICLNFGLARDYGGRCHLRFDDTNPVKEDTEYVESIIDAVHWLGFSWDSEGKDGQKQPHLYYASDYFDQLYAFAETLIERGAAYVDSQSAEQIAASRGNFSEPGKPSPFRDRSVEENLQLFRDMRAGKYADGEHVLRAKIDMAAPNIVMRDPVLYRIRHAHHHRTGDKWCIYPMYDFTHCISDALENITHSLCTLEFENNRPLYDWVLEHLRDSGVFRDPLPHQYEFARLNLTYAITSKRKLKQLVDEQRVDGWDDPRMPTLVGVRRRGYTPESIQLFCDRVGVAKADSWIDMSTLEGSVRDDLDGRAARGVAVLDPLKLIIDNYPEGQSEECSAPVHPKKPELGKRVFPLSRELWIEREDFNETPPKGYFRLFPGNKVRLKYGYVIECTGVDKDADGNVIAVHASYLPDTKSGTPGADSVKVKGVIHWVSAAHAYEAEVRLYDRLFNDPNPDAGGKNFLDALNPDSKQVITAYLEPGLREAQPEDRFQFERHGYFVADRSDSTPGKPVFNRIVGLKDSWGK

SEQ ID NO: 15910 - protein, 393 aa, Cupriavidus taiwanensis
MDLQHLATASRLANIDAFHVMELAKQAAALERAGRHIVHMGIGEPDFTAAEPVVRAAEAAMRRGVTQYTGALGIHPLREAIAGYYQTAYGLDIPARRVIVTAGASGALLLACAVLVEIGAEVLMPDPSYPCNRHFVAAFDGVARMIPSGPAERFQLTAAQVEAHWGEQTRGVLLASPSNPTGTSILPDELARILQAVRARNGFAILDEIYQGLSYDAPPVSALSLDPNVVTVNSFSKYFNMTGWRLGWLVVPEALVEAFEKVAQNLFICASAVAQYAALACFTPEALAVYDERKAEFRRRRDLIVPALESLGLRVPVRPDGAFYVYADCRGVNHPAAGDADRLTQAMLHDAGVVMVPGQDFGPHTARDYIRISYATSRENIEEAMARLDKLFR

SEQ ID NO: 15911 - protein, 560 aa, Cupriavidus taiwanensis
MYQYDQYDQRIVAERVAQFRDQVRRRLSGELTEEEFLPLRLQNGLYMQRHAYMLRVAIPYGLLSSKQMRKLAHIAREYDRGYGHFSTRQNIQYNWMELERVPDVLAELASVEMHAIQTSGNCVRNITTDHFAGVAPDESVDPRVLAELLRQWSTFQPEFAFLPRKFKIAISASADDRAVVQMHDIGVYAYKNADGEVRLRILAGGGLGRTPILGTVIKDDLPWQHMLTYIESAIRVYNRYGRRDNKYKARIKILVKAIGADKFAQEVEEEWQHSKDGPATLTQAEFDRVAQYFTPPAYEKLADTDASYEKHLLEDKAFARWVSRSVHGHKVPGYAAVTLSTKPGLVSPPGDATDAQMETVADLADQFGFGELRVAHEQNLVLPDVKKQDLYALWQLAKKAGLATPNIGLLTDIIACPGGDFCSLANAKSIPIAQAIQDRFDDLDYVHDLGEISLNISGCINACGHHHVGNIGVLGVDKDGSEWYQVTLGGAQGNQTALGKVIGPSFSAEEMPDVVSRIIDTFVANRIEDERFIETLSRIGIAPFKERVYADKQPRERAEA

SEQ ID NO: 15912 - protein, 68 aa, Cupriavidus taiwanensis
MASGIVKWFNDAKGFGFIKPDEGEEELFAHFSAIQMAGFKTLKEGQRVSFEVVQGPKGKQATNIQDAS

SEQ ID NO: 15913 - protein, 647 aa, Cupriavidus taiwanensis
MGKIIGIDLGTTNSCVAILEGNTPKVIENSEGARTTPSIIAYMEDGEILVGAPAKRQAVTNPRNTLYAVKRLIGRKFEEKEVQKDIGLMPYSIVKADNGDAWVSVRDQKLAPPQVSAEVLRKMKKTAEDYLGEPVTEAVITVPAYFNDSQRQATKDAGRIAGLDVKRIINEPTAAALAFGLDKNEKGDRKIAVYDLGGGTFDISIIEIADVDGEKQFEVLSTNGDTFLGGEDFDQRIIDYIIGEFKKDQGVDLSKDVLALQRLKEAAEKAKIELSSSQQTEINLPYITADASGPKHLNLKMTRAKLESLVEELITRTIEPCRTAIKDAGVKVSDIDDVILVGGMTRMPKVQEQVKEFFGKEARKDVNPDEAVAVGAAIQGSVLSGDRKDVLLLDVTPLSLGIETLGGVMTKMITKNTTIPTKHAQVFSTADDNQPAVTIKVYQGEREMATGNKLLGEFNLEGIPPAPRGTPQIEVSFDIDANGILHVGAKDKATGKENRITIKANSGLSEDEIQRMVKDAEANAEEDKKARELADARNQADALIHSTRKAVTEYGDKLEAGEKEKIEAAIKELEDAARGGDKTEIDAKVNALSEASQKLGEKVYADMQAKAGEQGAAGAAGAGAQQQAQPQDDNVVDAEFKEVNDKK

SEQ ID NO: 15914 - protein, 375 aa, Cupriavidus taiwanensis
MTMYIGIPQETRAGETRVAATPETVKKYVAQGHKVVVQAGAGLGASQPDGAYEAVGATIGSAADALGAQLVLKVRAPDAAELAQMKPGAVLVGMLNPFDAENNARMSAANITAFALEAAPRTTRAQSMDVLSSQANIAGYKAVLLAAHHYQRFMPMLMTAAGTVKAARVLILGAGVAGLQAIATAKRLGAVIEASDVRPAVKEQIESLGAKFLDVPFLTDEEREIAQGVGGYARPMPPDWMKRQAELVHQRAIQADIVITTALIPGRKAPVLLQEATVAQMKPGSVVVDLAAAQGGNCPLTVADQVVNHNGVILIGHTNLASMVAADASALYARNVLDFLKLVVDKDGQFTLNLEDDIVAACLMCRDGQVVREAA

SEQ ID NO: 15915 - protein, 120 aa, Cupriavidus taiwanensis
MQRIMLRAKLHRVTVTQADLNYEGSCGIDQDLLDAADMKEFEKIELYNVNNGERFSTYIIKGERGSGEISLNGAAARRAHLGDQLIICTYAPMTDEEIATYKPKVILVNEKNGIKEIKKV

SEQ ID NO: 15916 - protein, 773 aa, Cupriavidus taiwanensis
MTSPQSPSQDDLKQQQREALRKAALEYHEFPTPGKISVTPTKPLSNQRDLALAYSPGVAAACEEIVSDPANSFRYTARGNLVAVITNGTAVLGLGDIGAAASKPVMEGKAGLFKKFAGIDVFDIEIDEKDPEKLVQIIAALEPTFGGINLEDIKAPECFYVERKLREKMKIPVFHDDQHGTAIVVAAAIINGLKVVGKDIAKVKLVASGAGAAALACLDLLVDIGLPIENIWVTDLAGVVYEGRTELMDPEKARFSQKTDKRKLGEVIDGADIFLGLSAAGVLKQDMVQRMADKPLVLALANPNPEIAPELVKEVRPDAVMATGRTDYPNQVNNVLCFPFIFRGALDCGATTITREMEIAAANALAELARQEQSDIVATAYGIQDLSFGPEYLIPKPFDPRLIVKVAPAVAEAAMKSGVAARPIEDMDAYRLQLQQFVYHSGTVMKPIYAAARKVEMDKKRIVFAEGEEERVLRAVQVIVDEKLANPILIGRPAVLQHRIERFGLRLRAGVDFTVVNPEHDERFRDYSDAYYRMMARQGITPQYAKLEMRRRTTLIGAMLVHKGEADGMICGTVSNTAAHLRYIDQVLGGTNKVYAAMNGLVLPGRQIFLVDTHVNVDPSAEELAAITLMAAEELKRFGIEPKVGLLSHSNFGSSEAPSARKMRETLAILREQAPDLEIDGEMHGDCALDQKLRDQLVPDGTLKGEANLLVCPNIDAANISYNLLKVAAGNNVAIGPILLGVKAPVHILTPSATVRRIVNMTSLVVVDAAAKR

SEQ ID NO: 15917 - protein, 365 aa, Cupriavidus taiwanensis
MKFIDEARIEAIAGNGGNGSASFRREKFVPFGGPDGGDGGRGGSVFAVADRNINTLIDFRYAKKHVARNGENGRGSDCYGAAGEDITLRMPVGTLITDMDTGEVIADLTEHGQRVCLAEGGMGGWGNLHFKSSTNRAPRQQVDGKPGERRMLKLELKVLADVGLLGMPNAGKSTFISHISNARPKVADYPFTTLHPNLGVVRVDHEQSFVVADIPGLIEGAAEGAGLGHQFLRHLQRTGLLLHIVDLAPFDEAVDPVAEARAIVNELKKYDETLYEKPRWLVLNKLDMVPEDERAAKVKDFLKRYKWKGPVFQISALTGEGCRELIYAIKDHLQAIKAEEAAALAEPDIRLDDRLHNVDQDQREA

SEQ ID NO: 15918 - protein, 353 aa, Cupriavidus taiwanensis
MNATALQSRPMTEPAGQEGATPAAPILELRGVSKRFVKSLDAAARIANLFGAHAREEVVHAVDRVDLSIRAGEVVGLVGESGCGKSTLGRMAVGLHSLTEGERLWRGTNLDRLPPDKRREKQLAIQMIFQDPYASLNPRLRVLDIVGEAPVVHGLIGRGEQKGYVEDMLVRVGMDPTVLRRFPHQFSGGQRARIGIARALAVKPEFLVCDESVAALDVSIQAQVLNLFMRLREELNLTYLFISHDLGVVKHISDRVVIMYLGRVVESAPTEDVFATPNHPYTQALLAEAPKLEVARKTYVAIRGEIPSPLNPPSGCHFHPRCPHAMPRCREEQPLLKEIAPLRFSACHLNDMK

SEQ ID NO: 15919 - protein, 103 aa, Cupriavidus taiwanensis
MSDVQQQIDQIVKGNPVVLFMKGTAQFPMCGFSGRAIQILKACGVDAPTTVNVLDDEGIRQGIKEYANWPTIPQLYVNGEFIGGSDIMMEMYQNGELQTLLKG

SEQ ID NO: 15920 - protein, 367 aa, Cupriavidus taiwanensis
MTPQFHPLRVAQVRPETADTISIAFEVPDALRDAYRFTQGQFLTLKAPVDGKDLRRSYSICSAVQDYDAHGELRVAVKLVEDGLFSSHLHDSIAPGQLIDVMTPDGRFHVPLDAGAARHYVAFAAGSGITPVLSLVRTTLQAEPHSRFTLVYGNRNVDSIIFSEALEDLKNQYMARFTLYHVLSRQPQEVDLLHGRLDHARVTAFLQTLIPVDDIDAAFVCGPASMIDEVEAALRDAGLDPHRIHAERFGVPLAQTRRKPAAHPGHVDDAGHAGTAELVVVLDGKQHSMRLPLEDANVLDTALAAGLDLPYACKGGVCCTCRAKVLEGKVEMEKNYTLEPWEMDKGFVLTCQARALTPRVVVSYDER

SEQ ID NO: 15921 - protein, 406 aa, Cupriavidus taiwanensis
MLSAASRPYIDASVPVLREHGLAITTHFYREMFADRPELTQLFNMGNQANGSQQQSLASAVFAYAANIDNAAALGPVVERIVHKHAAVGITPAHYPIVGRHLLGAISAVLGEAATPPLLAAWDEAYWLLAGELIAAEARLYQRTGVAAGELMPVRVVRREAQGAQVVALTLAAADGQPLREFRPGQYISVEARLDHGTRQLRQYSLSAEAGLPTWRISVKREDGDQATPAGAVSNWLHANAHEGAELRVSAPFGEFTPALESRRPLVLLSGGIGITPMLSVLRTLAAQGSQRPVLFAHAARDGHHHAHRADLQWARERMPGLVTHISYEFPQAGDAAGRDYDHAGTMPLTDMLRQPDLQRFIDGRFYLCGPLGFMQAQRHALLSAGVPVAHIEREVFGPDLLDDLL

SEQ ID NO: 15922 - protein, 306 aa, Cupriavidus taiwanensis
MANQRNVGFIGLGIMGAPMAGHLRAAGHTLFVHDVNPAPQALVDAGVTVCTSAEEVAKRADIIIIMVPDTPHVEAVLFSEKGVAAAFKAAGKEASYSKIVVDMSSISPIATKDFAARINKLGASYLDAPVSGGEVGAKAASLTIMVGGPQEAFDQVKPLFELMGKNITLVGGNGDGQTTKVANQIIVALNIQAVSEALLFASKAGADPAKVREALMGGFAASRILEVHGDRMVKRTFDPGFRIELHQKDLNLALQGAKALGVALPNTATAQELFNTCSANGLGKQDHSALCRAIEIMSNHQIANAK

SEQ ID NO: 15923 - protein, 171 aa, Cupriavidus taiwanensis
MADKAKRKAAGEGSKKTASDRIEVRQSGVHGKGVYAIAPIAEGERVIEYKGEHISWKKALERHPHDPSDPNHTFYFSLDDGSVIDAKYGGNRARWINHACEPNCEAREKKGRVFIHALRDIAQGEELFYDYGLVIDARYTAKLKKEFECRCGSPQCRGTMLAPKEKKKKAK

SEQ ID NO: 15924 - protein, 559 aa, Cupriavidus taiwanensis
MDIKRTILWVIFSMSLVLLYDNWQRANGHASMFFPSTTQQQAASAPAASGAAAQGDVPKANVQPATGTSAAPAAGAAPQAAAQPTGEKIVVTTDTVRAEIDTAGGIVSRLELLKEHEKDGKPVVLFERDNVRTYMARSGLIGGDLPNHTTVFTAAPGPRALDGAEQVQVVLTGEKNGVKLVKTYTFRKGSYVVDSKFDVTNAGTAPVSPTLYLELARDGSKVEQSQFYSTFTGPAIYTDADKYHKLSFEDIAKGKATVPAAANNGWVAMVQHYFASAWIPQTGKEHSFYVQQIDPNLYRVGIQQPLGELAPGATVSTDARLFAGPQEEHMLEKIAPGLELVKDYGWLTILAKPLFWLLEKLHGFLGNWGWSIIALTVLIKLVFFPLSAASYKSMGKMKDLQPRMTSIRERYKNDPQKMNQEMMALYRTEKVNPLGGCLPIVIQIPVFIALYWVLLSSVEMRGAPWLGWIHDLSVPDPFYILPIVMAVSMFVQTKLNPTPPDPVQAKVMMIMPLVFSVMFFFFPAGLVLYWVVNNILSIAQQWQINRMLGKGKAAVVAKS

SEQ ID NO: 15925 - protein, 318 aa, Cupriavidus taiwanensis
MSAHQSLTLRVQAMRFEARGVVSIELQDPEGKPLPEYSPGAHIDLHLGNGLVRSYSLCGAPETRNRYTVGVLLDRGSRGGSRYVHEQLRVGATLTVGAPRNNFELDESAAHTVLVAGGIGVTPIVCMARRLAELGRSFTLIYCARSRVEAAFVDTLSAYGDAVRFHFDDEAGAPPDLNAMLCGQDAQTHFYCCGPGPMLNAFEAACAAHAYPNVHIERFAADPSTEAVQEGEYVVQLSRTGSLVKVPSGKSLLDALLDSGVEVEYSCREGVCGSCETAVLEGCPDHRDSVLSNSERASNKTMMVCVSGCKGSRLVLDL

SEQ ID NO: 15926 - protein, 378 aa, Cupriavidus taiwanensis
MPLKIGINGAGIGGLAAAIALRKLGMEAVVYEQAPRFARVGADINLTPNAVRALDGLGVGEALRETAARPSHRISRMWDTGAETSRLPMREEAEQRYGAPQLTMHRADLMTALEAAVPAASVRLDHKAVAVEARADGATLRFANGAQEDVDVLVGADGIHSTVRTALFGQESPIFTGVVAYRAVVPAGRLAGVPNLGAFTKWWGPDAATQIVTFPLNRGRDIFIFATVAQEAWRHESWTTPGRVEDLRSAYAGFHPEARALLDACDDVLISALYVRDPLPAWSAGPVTLMGDACHPMMPFMAQGAGMAIEDGVVLARCLADAAGDGAAGVPAALARYQAARHARTSRIQIGSRSNAWLKEGGNADWVYDYDAWNVALG

SEQ ID NO: 15927 - protein, 391 aa, Cupriavidus taiwanensis
MAEAYIVAAVRTAGGRKGGKLSGWHPADLAAQVLDALVERTGADPALVEDVIMGCVSQVGEQAGNVARNAILASRLPESVPGTSVDRQCGSSQQALHFAAQAVMSGAMDVVIAAGVESMTRVPMGLSSQLPAKNGFGVPKSPGVEARYPGVQFSQFTGAEMIARKYELSREQLDAYALQSHQRAIAATRAGRFSAEILPVEVRTADGANGEMHTTDEGIRYDATLESIGSVKLIAEGGRVTAASASQICDGAAGLMVVNEAGLKKLGVKPLARVHSMTVIGHDPVVMLEAPLPATEVALKRAGLRIGDIDLFEVNEAFAPVPLAWLKATGADPERLNVHGGAIALGHPLGGSGAKLMTTLVHALHTHGKRYGLQTMCEGGGLANVTIVERL

SEQ ID NO: 15928 - protein, 302 aa, Cupriavidus taiwanensis
MSKIGFIGLGVMGKPMVRHLLDGGHAVFAHSRSGVPQDLQDAGVKACASAEDVAKQSETIILMLPDTPDVEKVLFGERGVADGLADTAGGVTVIDMSSISPIATREFARCIEAIGADYIDAPVSGGEVGARAGTLSIMAGGKQEVFDRVLPILQLMGKNITRVGAAGDGQVAKVANQVIVALTIEAVSEALVLAARAGADPARVREALMGGFASSRILEVHGERMIRRTFDPGFRIALHQKDLELALSTARELGVGLPNTASCQQLFNVCNGLGGAAWDHSGLVRAIEHLSSFAIGDTPSAG

SEQ ID NO: 15929 - protein, 311 aa, Cupriavidus taiwanensis
MKRICISEFMDPAAVQALTPGFDLRYEPGWVDRRGDLLEVLDGAHALVVRNRTQVDAALLARAPALRVVGRLGVGLDNIDVAACRERGIRVIPAAGANARSVAEYVVTTAAALLRGAYLSSAEVADGRWPRARLSEGREALGKTLGLIGFGDIGRQTAALARAFGMSVIACDPMLPADDPVWSATGVACVTLDALLAQADAVSLHVPLVEATRNLIDVGRLAAMKSGAVLVNTARGGVVDEAALADALRAGHLAGAALDVFASEPLPADSALRGVPNLILTPHVGGVTREANARVSMLIAREVRQSLEQMP

SEQ ID NO: 15930 - protein, 464 aa, Cupriavidus taiwanensis
MHSSNNDGTLKRGLKNRHIQLIALGGAIGTGLFLGIAQTIKMAGPSVLLGYAIAGIVAFFIMRQLGEMVVDEPVAGSFSYFADKYCGHFAGFLSGWNYWVLYILVSMAELSAVGIYVQYWWPEIPTWVSALAFFVIINAINLASVKSFGEMEFWFSIIKVAAIIGMIGFGGYLLLSGNAGPQASVANLWQHGGFFPNGMGGLVMAMAVIMFSFGGLELVGITAAEADSPEKTIPKATNQVIYRILIFYVGALAVLLSLYPWENVVTGGSPFVLIFHALNSNWVANVLNVVVLTAALSVYNSGVYCNSRMLYGLARQGNAPKALLKVNQRGIPLTALAFSAVATAACVVINYFMPGKAFELLMGLVVSALIINWAMISLIHLKFRADKRKAGQATAFQSWGYPLTNYLCLVFLAGILVVMYLTEGLRISVYLIPVWLAVLGVSYLVRQKKAGAALQAGVAAQQLR

SEQ ID NO: 15931 - protein, 320 aa, Cupriavidus taiwanensis
MTEVIALARNVVATEIQALDRMSSRFDAGFEKAVEIILQARGRVVVVGMGKSGLIGKKIAATMASTGTPAFFVHPGEAFHGDLGMIKPIDVVLMISNSGETEELIRILPFLEHQENPAIAMTGNVRSTLARHADVVLDISVQREACNNNLAPTSSTTATLVMGDALAVVLAVKRDFQPADFARFHPGGSLGRKLLTRVADVMHKDNLPVCRPDASFRDVVHVINRGRLGMALVMDGEQLQGVITDGDVRRAFDSDRDYKAIMARHIMSNAPKTVSPGERFADAEARIHAARIGALVVKDEAGKVVGILQIHDLASDEPSV

SEQ ID NO: 15932 - protein, 576 aa, Cupriavidus taiwanensis
MEPQDISPSVRREVSKPPGWLRWLPGLLMLKSYQPAWLPRDIAGGLVLTTMLVPVGIAYAEASGVPGVYGLYATIIPLLAYAVFGPSRILVLGPDSALAAPILAVVLQLSGGDPGRAVLVASMMAVVSGAFCIILGLLRLGFITELLSKPIRYGYMNGIALAVLVSQLPKLFAISVEDAGPLRELLSLGQAIAAGQANWTSFAVGAGSLVLILLLKRFERVPGILIAVIVATLLVSALHLDQAGVKVLGTIPQGLPGFVVPWLSGVDLVEILLGGCAVALISFADTSVLSRTYAARTNTRVDPNQEMVGLGAANLAAGFFQGFPISSSASRTPVAEAAGAKTQLTGVVGALAVAALLMFAPNLLQYLPNSALAAVVIAAAIGLFEVADLKRIYRIQQWEFWLSMVCFAAVAVFGAIPGIFLAVVIAVIEFLWDGWRPHFAVLGRVEGLRGYHDTKRYPHAARIDGLVLFRWDAPLFFANAELFQQRLMEAIEESPTPVRRVVVAAEPVTSVDVTSADMLRELGGILRERGIALHFAEMKDPVRDKLRRFELLEAIGDRNFHPTVGSAVDDYLGKSP

SEQ ID NO: 15933 - protein, 258 aa, Cupriavidus taiwanensis
MPCSMCCQMAGACPERAAGRAGQGAGQGAAGARPAQRMVRLRKGEFLYLLGDPVTSVYAIRVGTIKTHVTTEDGRTQVVAFHFPGDMVGLDSLVRPHYASYATALEDTKLCLFTVDTPYLGPAMPAPLGRQLLLALDGQLQRARAVQTMLALMTAEERLVTFLLWLADGFALRGFSSSAFVLRMSREEIGSYIGLTLETVSRQFSRLAESGWITVRHRTITLVDKAALRAIAARPMILAHAPVPRLPRSRGESAQAED

SEQ ID NO: 15934 - protein, 281 aa, Cupriavidus taiwanensis
MLAPAQARAQSPVLDKIRDAGTIVLGYRESALPFSFADDKGQPAGYAVDLCLRAAEAARQKLGLKDLKVRWMPLTPQNRIPAVVNGLVDLDCAPNTNSLERQKQVAFSVSHYVSTVRMLVRADSGIRSFGDLRGKTVVTSAGSTGDRHVRRFKGQYGYHDVYAKDHGESFLLLESGRAQAFVMDDVLLAGLRARAKDPSQYVIVGPALSVEQNALMLSKADPEWKRLVDQTLATTFAGPEVVALQQRWFQQPIGSRGINLALAPSGEVRAAWKHPSDAVTE

SEQ ID NO: 15935 - protein, 292 aa, Cupriavidus taiwanensis
MRVAFLGLGVMGFHMAGHLVARGHEVTVYNRTAARAQAWVDRFGGKSAATPAQAVRDAQVACSCVGNDDDLRAVLTGRDGAFFGAPSGCIFVDHTTASANVARELYTAAGERGLHFVDGPVSGGEVGAEKGILTIMCGGDAEAFARAEPVIAAYARAVTRIGESGAGQLAKMVNQISIAGLIQGLSEAIAFGERAGLDMRLVLDVISKGAAGSWQLENRGPTMIDNKFDFGFAVDWMRKDLGLCLDEARRNGASVPVTALVDQFYADLQQMGCGRADTSSLIKRLRQHSDKA

SEQ ID NO: 15936 - protein, 519 aa, Cupriavidus taiwanensis
MPMTIGVPREVHPGERRVAATPDSVRELLKLGYQVVVETGAGQEASFSDDDYRAAGAAIVDAASLWASVDVVVKVRPPQVHPSLGVEEAALLKKHATLIGFVWPAQQMPMLERLAQRGATVLAMDCVPRISRAQKLDALSSMANMAGYRAVIEAAHAFGRPFAGQITAAGKIPPARVLVIGAGVAGLAAIGAARSLGAVVRAFDTRPVVRQQIESLGAEFLTVEIEEDGSGSGGYAKEMSTAFIEAEMRLFAEQAREVDIIITTALIPGKPAPRLLEAGTVALMRAGSVVVDLAAEQGGNCVLTVPGESVRRDGVTIIGYTDLPSRMAAQASQLYGTNIRHLLSELTPGKDGQLVVDMDDEMIRGATVLHQGAVTWPPPPLTVAVPQQQVPAEVPVPSEVEPPRSRTGTTVVALALAAAALLGLGAVAPPDFMAHFTVFVLAIFVGYQVVWNVTAALHTPLMSVTNAISGIIVVGALVQLGKPSLLTAVIAGCAVLVATINIAGGFLVTQRMLKMFQRD

SEQ ID NO: 15937 - protein, 402 aa, Cupriavidus taiwanensis
MRRAAIVTPLRTPVGTFGGSLRPVPVEELAATAVRAVVERSGIDPARIDDVVFAQSYANSEVPCVGRWAALQAGLPVEVPGMQLDRRCGGGLQAIVTASMMVQSGAADVVIAGGVESMSNIEYYTTDMRWGARSGNVRFFDRLDRGRERSQPVERFGKISGMIETAENLARDYGISREAADAFAVRSHQRAAAAWEAGRFDAEIVPVQVPQRKGDPVAFTRDEGFRPQTTLDSLAKLRVLMPNGTVTAGNASQQNDASAACLIVAEDKLAELGLTPMASLVGWAAAGCEPSHMGIGPVPAVKKLLARLNLTLDQMDLVELNEAFACQVLAVLKGWDWQDQDTIEQKLNVNGSGISLGHPIGATGVRILATLLHELQRRGGRYGLETMCIGGGQGIAAVFERY

SEQ ID NO: 15938 - protein, 344 aa, Cupriavidus taiwanensis
MKPILRIIDRARAAPRRIVLCEADDPRILQAAQRAVQEGIARIVLVGDPRQINAAAAIHGIALEGMTLVDPATSALTPSFAQQLFALRQKKGMTLDEAKRAVLDPLSFANLMVRLGHADGSVAGAAHTTADVVRNAIQLIGLAPGFRLVSSFFLMMLCEPFHTLKGGLIFSDCGLVVDPDAEALADIAMAAADSARALLNDEPRVAMLSFSTSGSAHHAAVDKVVAATERVRAQRPGLAIDGDVQLDAAIVAEIAARKVAHSQVNGHANVLVFPSLEAGNIGYKLAERVGGAKAIGPMLQGLNKPANDLSRGCSADDVFHVIAVTVVQAQATAAQAPKGEQAAA

SEQ ID NO: 15939 - protein, 333 aa, Cupriavidus taiwanensis
MSYRIQVAETEQVFFVERGETLLQAAQRAGVALRHDCQLGGCGTCRIRLLDGQVRYDEEPFGLAPDEAAAGYALACQAQPQADLVISTARDDEACAEPARHRAVVRAVRPLSADVLHVELEVPGAGTLDYRPGQYLKLLSSEGLARSFSMASVPRDGRIDLHVRRIPGGAFTDGILPRMRAGDAIEVELPLGSFFYRARDYRPLLMVATGTGLAPIKAILESLMDDPDCPPVSLYWGMRQAQDLYLHGEIPAWGDRLYDFRYAPVLSRAGADWQGRRGYVHDAALADLGDLSEYAIYLCGSPDMIRDARAAFIAHGASPDHLYADSFTFQHPC

SEQ ID NO: 15940 - protein, 478 aa, Cupriavidus taiwanensis
MIQQPSSGNGLSHGLKQRHMTMIALGGVIGAGLFVGSGVVIKSAGPAAVLSFLITGLLVVLVMRMLGEMACAMPGGGGFYEYAREAWRDRPAVGNLAGFLTGWMYWYFWVIVVALEAVAGADLVRYWLPDVPNWIISLVLLVMLTLTNLVSVKSFGEFEFWFASIKVAAIMVFLFVAGVYVLGLAPGSHGMEVANLTANGGFMPNGIVPVLTGAVAATGFYFGAEIVTIAAAETAEPQKAVAKATSSVITRVLVFYVGSILLVVCLVPWNSTSIATPYVSALNVMGVPAAAQIMNAIVLTAVLSALNSGLYASSRMLFALTRRGDAPQSLARVSRNGVPVRAILVATLFGYGAVVMSYVSPDTVFAFLVNSYGTVAIFVYILIAISQLRLRSRLEREAPGQLRVRMWCYPYLTYVAILGMLGIVVAMAFIPDQRTPLALGVISLLILLIAYGARQLFRRGAEPVVPLAEMPRPDLHKY

SEQ ID NO: 15941 - protein, 358 aa, Cupriavidus taiwanensis
MSKFHELTVASVTRETRDAVAVTFAVPDELADAYRYVQGQHLTLRAGIDGEDVRRSYSICSAVQDAQLRVAIKRVDGGLFSNWAIEQLQPGMKLEVMPPSGHFHVPLSATHAKHYVAFAAGSGITPMLSIIKTTLQAEPDSRFTLFYGNRASSSVLFKEELEDLKDTYLQRFNLVFVLSREQLDIDLFNGRIDGDKVNALLKHWVRPQDIDVAFICGPHSMMEEVSQALLDNGVDKTRIKRELFATSIPAARPAAHAHKQVGQQQCEVTVIQDGRTRSFTLEKNKETVLDAALAQGIELPYSCKGGVCSTCRCKRIEGEVDMDVNFALEDYEVARGFILSCQSYAVSDRLVIDFDQET

SEQ ID NO: 15942 - protein, 426 aa, Cupriavidus taiwanensis
MDMAEIQVIKQHLIDPEICIRCNTCEATCPVGAITHDSRNYVVDADKCNLCMACISPCPTGSIDNWRDMPKLRAYSVEEQLTWDALPEPLSPEQLADLAPGADMQSAVPEIPAASPLAGTVEEAFSTARYGATVPPWSAAHAYTNLYGAKSASKTITATVTGNVRVTEVGREYDTHHIVLDFGTTPFPVLEGQSIGIVPPGTDASGRPHHARQYSIASPRNGERPGYNNLSLTIKRVLQDHDGNPVRGIGSNYMCDLKVGDKVEVIGPFGASFLMPNHPRSNIVMICTGTGSAPMRAMTEWRRRLRKAGKFDSGKLMLFFGARSKEELPYFGPLQNLPKDFIDINLAFSRTPGQPRRYVQDLMRERAADLAALLASPDTYFYVCGLKSMEEGVVLALRDVAQQAGLHWESLAEGLKREGRLHLETY

SEQ ID NO: 15943 - protein, 67 aa, Cupriavidus taiwanensis
METGTVKWFNDSKGFGFITPDAGGNDLFAHFSEIQGSGFKSLAEGQKVRYVAGVGQKGPAATKIEPI

SEQ ID NO: 15944 - protein, 317 aa, Cupriavidus taiwanensis
MTDTLRVRVGRVEPLAAGIKRFTLQPCDGGALPAFDSGSHVVVHMDGGRLRNAYSLTSTLGEPGHYQIAVRLEEASRGGSRFMHEQVREGDELHIGTPGNLFSLDHGAGRHLLIAGGIGITPFMTHIQALAAHGAAFELHYCFRNTQSAAFLDVLPATLLPGQLHRYESDNGTLLDIAALIAAQPADTHVYVCGPAPLNDAVVNAARAAGWDPARIHFEQFRNEVDATGGAFEAVLQKSGKTLQVGADESLLRAIEKAGIKVDCMCREGICGSCETAIVEGEADHRDQYLSDAEKAAQKTMMLCVSRCKGQRLVLDL

SEQ ID NO: 15945 - protein, 404 aa, Cupriavidus taiwanensis
MLRVRTPPMNLDLLASLLTAVVVLLIGTLVNRSVGVLSRYNIPDPVTGGLLFAIVASTALATVNFRVVIDPGMKPVLLLMFFGGVGLCADLRMLRRGGKALVIFLIILLPYIVVQNVVGVAMARVLDLHPIFGLVGGSITLVGGHGTGAAYAERFAEVNNLQAVMDLSMTVATVGLIVGGIIGGPVAQYLISRYRLRSTTREAGDTEEEAAAVSAITTVGALASLAGILAAVIGGRWIAAQMPTGAITIPGFLWCMMLGIAIRNLLPFAGMRFDDRATDLITNVCLSLFLVMTMMALDLADVALSAGPFLLIIAMQVVFIILYVVLVCFRFMGRDYEAAVSSAAFIGFNMGSTATAMANMRAITARYGPAPTSFLITPLAGAFFVDLMNAFVLTMMLALPLIGG

SEQ ID NO: 15946 - protein, 276 aa, Cupriavidus taiwanensis
MPALPFLRIAAAAALSCLAVNAAWADATLDRIKQRGKVSIGVLVGGSLFGSIDPVTQQLVGWNPDLARDLAKRLGVEAELVPVQPSNRVQFLQQGKVDLLIASMEYNAERGELLGHAPTPFYRVGGTAAVLKRSGIAKWDDLRGKTVCASQGSSYVKPLQEQYGAQVRGFKTSAESLLALRGGQCVAAVHDATLIHPLVRSNADWTDYAAPIPAEILPAPSVVWTRKGETDTIAAVDKIVQEWHRSGWLIATEKRLGITPPQPLLPELQARFKNAS

SEQ ID NO: 15947 - protein, 311 aa, Cupriavidus taiwanensis
MNGKDVIIVTGADLAPEAVALLGDYELVFAGKKPQAAELAALARQHNPVGIIVRYGSVTAEVMDAAPALKVISKHGSGIDVIDQKAAAERGIAVRAAVGANAAAVAEHAWALILACAKSVPQLNARMRAGHWDKSVHKTIELNGRTLGIVGLGEIGRRVAVTGVAMGMRVIAFDPYAKTVPAGVTLVSELKQLYQAADVVSLHCPLTEENRGMLNRETLSWFKDGAILVNTARGGLIDEPALAEALDGKLYAAGLDSFAIEPMVVPHPFQQLPNVILSPHIGGVSDAAYVNMGVGAANNVLAVLQGSAAAV

SEQ ID NO: 15948 - protein, 459 aa, Cupriavidus taiwanensis
MSASAEHLQRGLGERHIRLMALGSAIGVGLFLGAGNAIKMAGPAIMLAYLIGGAMIFLIMRALGEMAVHNPVAGSFCRYAQDHMGPLAGYLTGWNYWFLWLVTCVAEITAVAIYMGMWFPDVPRWIWALAALAAMGSVNLMAVKAYGEFEFWFAMIKIVTIVLMLIGGGAMIVFGFGNGGVATGISNLWAHGGFMPNGASGVLMSLQMVMFAYLGVEMIGLTAGEARNPKKSIPDAINSVFWRILIFYVGALFVILALYPWNEIGAQGSPFVLTFERLGIKTAAGIINFVVLTAALSSCNGGIFSTGRMLYNLSLQGQAPAAFATVDRNGVPRRALLVSIAALLAGVLLNYLVPEKVFVWVTAISTFGAVWTWAIILVTQIQFRRGLSAAERKALAFRMPFWPYGSYIALAFLALVVALMAYFPDTRVALYVGPGWLVLLTICYYALDMRSRGPVSYRA

SEQ ID NO: 15949 - protein, 67 aa, Cupriavidus taiwanensis
METGTVKWFNDAKGFGFITPDEGGNDLFAHFSAIEGSGFKSLKEGQKVRYVKAMGQKGEQATKIQAL

SEQ ID NO: 15950 - protein, 311 aa, Cupriavidus taiwanensis
MSAASTPRTIVGFVGLGQMGKPMALNLAHDDTDLLVTSKVRDAYPELHAAGARTIDGVAGLAGADIVFLSLPGTAAVLEVLFSDGGLASHLRPGSIVVDTSTIEHGATMDIHARLRAAGIEFLDAPVSGMQSRAEAGTLTVMCGGAARTFEAVKPWLERLGNNILYMGEAGSGQLAKLVNQLLFDIHCAALAEILPMSRRMGLDPEKVASVINSGTGRSYASEFFLPRILGRHFSDGYPLNAAYKDLVSAAELGARHCIPMPVLAAATATYQMSLLAGHGTSDKGAMTRFFEDMLAVQFSAAAPYTEKQHG

SEQ ID NO: 15951 - protein, 441 aa, Cupriavidus taiwanensis
MTTILQHIPTGQRVGIAFSGGLDTSAALLWMRQKGAVPYAYTANLGQPDEPDYDDIPRRAKAYGAEEARLVDCRAQLVAEGIAALQCGAFHISTAGITYFNTTPIGRAVTGTMLVAAMKEDGVNIWGDGSTFKGNDIERFYRYGLLTNPGLQIYKPWLDQQFIDELGGRAEMSEFMRQNGFDYKMSAEKAYSTDSNMLGATHEAKDLEHLDSGIRIVQPIMGVQFWRDDVEVKREEVTVRFEEGQPVALNGQTFANAVDLFMEANRIGGRHGLGMSDQIENRIIEAKSRGIYEAPGLALLFIAYERLITGIHNEDTIEQYRDNGRRLGRLLYQGRWFDPQAIMLRETAQRWVAGAITGEVTIELRRGNDYSILNTTSPNLTYKPERLTMEKGESMFTPLDRIGQLTMRTLDIVDTREKLQTYAKTGLLSTQVSASLPKLED

SEQ ID NO: 15952 - protein, 67 aa, Cupriavidus taiwanensis
MQTGIVKWFNDAKGFGFIKPDAGGDDLFAHFSEIRAEGFKSLQENQRVQFEVKNGPKGLQAANITPL

SEQ ID NO: 15953 - protein, 250 aa, Vitis labrusca x Vitis vinifera
MESLGVRKGAWIQEEDVLLRKCVEKYGEGKWHLVPLRAGLNRCRKSCRLRWLNYLKPDIKRGEFALDEVDLMIRLHNLLGNRWSLIAGRLPGRTANDVKNYWHSHHFKKKVQFQEEGRDKPQTHSKTKAIKPHPHKFSKALPRFELKTTAVDTFDTQVSTSSKPSSTSPQPNDDIIWWESLLAEHTQMDQETDFSASGEVLIASLWTEETATQTKGPMDGMVEQIQGGEGDFPFDVGFWDFPNTEVNHLI

SEQ ID NO: 15954 - protein, 302 aa, Zea mays
MASVTYIDDSHAEVIDPPKNEEMLDATELVGDHIQNSPKPNVASYGNVRELLECPVCLSAMYPPIHQCSNGHTLCSGCKPRVHNRCPTCRHELGNIRCLALEKVAASLELPCKYQNFGCLGIYPYYCKLKHGSQCQYRPYTCPYAGSECTVAGDIPYLVNHLKDDHKVDMHNGSTFNHRYVKSNPHEVENATWMLTVFSCFGQYFCLHFEAFQLGMAPVYIAFLRFMGDDAEAKNYSYSLEVGGSGRKVTWQGVPRSIRDSHRKVRDSYDGLIIQRNMALFFSGGDRKELKLRVTGRIWKEQ

SEQ ID NO: 15955 - protein, 356 aa, Brassica oleracea var. italica
MSLLTDLVNLDLSDNTEKIIAEYIWVGGSGMDMRSKARTLPGPVTDPSKLPKWNYDGSSTGQAPGEDSEVILYPQAIFKDPFRRGNNILVMCDTYTPAGEPIPTNKRHAAAQIFSNPDVVAEVPWYGIEQEYTLLQKDVKWPVGWPIGGFPGPQGPYYCSVGADKSFGRDIVDAHYKACLYAGINISGINGEVMPGQWEFQVGPSVGISAADEVWIARYILERITEIAGVVVSSDPKPIPGDWNGAGAHTNYSTKSMREEGGYEIIKKAIDKLGLRHKEHISAYGEGNERRLTGHHETADINTFKWGVANRGASIRVGRDTEKEGKGYFEDRRPASNMDPYTVTSMIAETTLLWNP

SEQ ID NO: 15956 - protein, 658 aa, Sonchus asper
MAAVPSPNTPVSAKPPSISHPFQPRSALLPRFALPISSNPQKRHRLHISNVLSDSKPATATATATTRSPDPDEPFVSRFAPDQPRKGSDVLVEALEREGVKHVFAYPGGASMEIHQALTRSNTIRNVLPRHEQGGVFAAEGYARALGKPGVCIATSGPGATNLVSGLADALLDSVPIVAITGQVLRRMIGTDAFQETPIVEVTRSITKHNYLVLDVEDIPRVVHEAFYLATSGRPGPVLIDVPKDIQQQLVVPKWDEPKRLSGYLSRLPKPPNDAHLEQIIRLITESKRPVLYTGGGCLDSSVELCRFVELTGIPVASTLMGLGAYPASGDLSLQMLGMHGTVYANYAVDKSDLLLAFGVRFDDRVTGKLEAFASRAKIVHIDIDSAEIGKNKQPHVSICGDIKIALKGLNEILEKRSEMRNLDFSSWRQELDEQKLTHPLSFKTFGDAIPPQYAIQVLDELTGGKAIISTGVGQHQMWAAQFYKYNRPRQWLTSGGLGAMGFGLPAAIGAAVARPDCIVVDIDGDGSFMMNVQELATIRVENLPVKILLLNNQHLGMVVQWEDRFYKANRAHTYLGNPSNESEIFPNMLKFAEACDIPAARVTKIGDLRAAIQKMLETPGPYLLDVIVPHQEHVLPMIPAGGGFMDVITDGDGRMKH

SEQ ID NO: 15957 - protein, 658 aa, Sonchus asper
MAAVPSPNTPVSAKPPSISHPFQPRSALLPRFALPISSNPQKRHRLHISNVLSDSKPATATATATTRSPDPDEPFVSRFAPDQPRKGSDVLVEALEREGVKHVFAYPGGASMEIHQALTRSNTIRNVLPRHEQGGVFAAEGYARALGKPGVCIATSGPGATNLVSGLADALLDSVPIVAITGQVPRRMIGTDAFQETPIVEVTRSITKHNYLVLDVEDIPRVVHEAFYLATSGRPGPVLIDVPKDIQQQLVVPKWDEPKRLSGYLSRLPKPPNDAHLEQIIRLITESKRPVLYTGGGCLDSSVELCRFVELTGIPVASTLMGLGAYPASGDLSLQMLGMHGTVYANYAVDKSDLLLAFGVRFDDRVTGKLEAFASRAKIVHIDIDSAEIGKNKQPHVSICGDIKIALKGLNEILEKRSEMRNLDFSSWRQELDEQKLTHPLSFKTFGDAIPPQYAIQVLDELTGGKAIISTGVGQHQMWAAQFYKYNRPRQWLTSGGLGAMGFGLPAAIGAAVARPDCIVVDIDGDGSFMMNVQELATIRVENLPVKILLLNNQHLGMVVQWEDRFYKANRAHTYLGNPSNESEIFPNMLKFAEACDIPAARVTKIGDLRAAIQKMLETPGPYLLDVIVPHQEHVLPMIPAGGGFMDVITDGDGRMKH

SEQ ID NO: 15958 - protein, 86 aa, Nicotiana glutinosa
RRIRRPFSVAEVEALVEAVEHLGTGRWRDVKMRAFDNADHRTYVDLKDKWKTLVHTASIAPQQRRGEPVPQDLLDRVLAAHAYWSQ

SEQ ID NO: 15959 - protein, 392 aa, Methylosinus trichosporium
HGEKSQQAFLRMRTLNWYDVKWSKTSLNVNESMVLSGKVHVFSAWPQAVANPKSSFLNAGEPGPVLVRTAQFIGEQFAPRSVSLEVGKDYAFSIDLKARRAGRWHVHAQINVEGGGPIIGPGQWIEIKGDMADFKDPVTLLDGTTVDLETYGIDRIYAWHFPWMIAAAAWILYWFFKKGIIASYLRISEGKDEEQIGDDDRRVGAIVLAVTILATIIGYAVTNSTFPRTIPLQAGLQKPLTPIIEEGTAGVGPHVVTAELKGGVYKVPGRELTIQVKVTNKTDEPLKLGEYTAAGLRFLNPDVFTTKPEFPDYLLADRGLSTDPTPLAPGETKTIEVKVQDARWDIERLSDLAYDTDSQIGGLLMFFSPSGKRYATEIGGPVIPKFVAGDMP

SEQ ID NO: 15960 - protein, 592 aa, Prosthecochloris aestuarii DSM 271
MCGIAGELRFDSAAASSTTVDAMLGILEPRGPDAQGVFAHNRICFGHRRLKIIDLSDCASQPMVDSALGLVLVFNGAVYNYRELCTELVGKGYSFFSQSDTEIIIKAYHAWGEDCVGHLQGMFAFAIWERDTGRTFFARDRLGIKPLYFTEDNASMRFASSLPALLKSGAVDTAIDPAALDCYMSFHSVVPAPWTIFRGIRKLPPATTMMVEPDGRKQQRTYWQPDYSRSDEERRRSAGEWIDAVHDALKLAVQRRLVADVPVGVLLSGGLDSSLVVGLLSELVQRHLSTFSVGFEDVAEEEGNEFRYSDIIAERYSTDHHKIFVDHRELQTHLSDCVRAMSEPMVSHDVIGFYLLSREVSQHVRVVQSGQGADEVFAGYHWYPPMMNTPPTEAYSTYSGVFFDRDFNEYRQAVNSSFITEDHAAAFVRNHFAMPGAEEPIDKALRLDSTIMLVDDPVKRVDNMTMAWGLEARVPFLDHELVELAAKIPAEYKVKDGGKYVLKEVGRRIIPHEVIDRPKGYFPVPALKYLEGEYLDMAKNILNQDAAKQRKIFNREYVDMLLNAPQDHITPLRGSKLWQITLLEYWLQEQGL

SEQ ID NO: 15961 - protein, 699 aa, Prosthecochloris aestuarii DSM 271
MANNLFKPQNPYKNDPDNNNEKKPKFSLVYYVVIILILVGLQLAFFWSGSSQEITYSTFRKYITENKIESVKIAPERIYVKLKPGVVPVTAASENGKAPAIVNPESSKESQDVYVNPVRDEELIPLLENQGISYKGIPGNNWIAELLQWILPFGLLIGIYFFVFRRMGGPGSQFMNIGKNKAALYENLDEHTRITFKDVAGLDEAKGEVMEVVDFLKDPKKYTKLGGKLPKGVLLVGPPGTGKTLLAKAVAGEADVPFFSISGSDFVEMFVGVGAARVRDLFRQAKEKAPCIIFIDEIDAVGRSRGKGAMMGTNDERENTLNQLLVEMDGFATDKGVILMAATNRPDVLDTALLRPGRFDRQIMVDKPDLKGRIDILKVHTKSLSLSTDVNLKVLASQTPGFAGAEIANAANEAALLASRKGKQSIEMKDFEDAIERVVAGLEKKNKVINPQEKRIVAYHEAGHAIISWLLAENDAVQKISIVPRGMSALGYTLNLPLEDRYLMTKTELFSRICGLLGGRIAEDIVFNEISTGAQNDLEKVTEIAYNMVVVYGMSEKLGNISYYESNNPYYGGPGVDKKYSDHTARLIDEEVHDTISRAEQAVREILTKNRDRLEALAQELLRKEVVQYCQIEEILGKRPAGNGPEHIDRECDEHVVQAEATDTPAEKQSNEDPVSKEERLKLEAAVEEIRKKRESSES

SEQ ID NO: 15962 - protein, 819 aa, Prosthecochloris aestuarii DSM 271
MNVLKFGGTSIENGKRIRNVLNIIRDAMHDGPVIVVVSAIRKVTDLLLDAALTACRGGGDYKEKLVDIERLHTALVEDLLTGEKAEDVQRYLCGVLSELGDVLHGVSLLRELSEKSSALIMSFGERFSAYIISSYLSQEGVAASYVDARGMIVTDTSHGDARVDMEASALQIRERLNNADSIPVVTGYIGSAPDGTVTTLGRGGSDYTATIIGSVLGAGEIQIWTDVDGFFSADPKRVRDAYALPFISYAEAMELSHAGAKVLHPYAVHPAMKAGIPITIRNSMNPGAPGTRIEKLSSEEAVSARPVTGLSSISDIVLLNISGSGMVGVPGIASRLFSCLARHMINIIFISQASSEQSISLAINALQASKAQMALDDEFAVELGSRQIESLTVRQDISMIAVVGKSMSGHPGVSAHLFETLGKNGINVIAVAQGANEMNISFVIDSHDEDKALNCVHESFFLSRRKVHVFIAGTGTISSSLIGQIRDHHETLSVGKNLDIVVCGMANTRMMALNNEGIDLNDWQSALQPREGERTIGDYLARIRSRNLHNTIFVDCTASADVAAAYPELLRSNISVVTANKLGMAGSWDLYETINDALNSSNAKFLYETNVGAGLPIINTLNDLRNSGDKILKIEGVLSGTLSYIFNELRKGGAFSRIVRQARDAGFTEPDPREDLSGADFARKFLILGRELGFRINYEDIQCESLVPDHLMGQMPVEEFLEKLACVDEEYDDMNRKAAAEGMTIAYAGEINGGKAKISVKMLPLSNPVAGLNGTENMVVFTTDRYFDTPLVVKGPGAGGEVTAGGVFADILRIASYLV

SEQ ID NO: 15963 - protein, 849 aa, Prosthecochloris aestuarii DSM 271
MEGNFSNRVQDVIRLSREEALRLGHDYIGTEHFLLGLIKEGEGIAARILRNLSIDLFKLKEKIEESTQQKIASAQMGNVPLTKQAEKVLKITYLEAKICKSNIIGTEHLLLSILKGEDNIAAQILEQFGVTYDTVKDELVTITGGKSESGDPSMEGAFSGGSERSQKKADPKKGERTKTPVLDNFGRDITRLALEDKLDPIIGREKEIERVAQVLSRRKKNNPVLIGEPGVGKTAIAEGLALKIVQRKVSRILYDKRVVALDLAALVAGTKYRGQFEERMKALMNELERSRDVILFIDELHTIIGAGGASGSLDASNIFKPALARGELQCIGATTLDEYRQYIEKDGALDRRFQKIMVEPTSVDETIQILHNIKSKYESHHHVHFDDNAIEKAVKLAERYITDRYLPDKAIDVMDEAGARVHLSNIHVPQNILDLEKAIEEVKAEKNKVVRMQNFEEAAMLRDKEKNLLDSLEDAKQEWEEQAAETVYDVTETDISSVVAMMTGIPVVKVAQSESQKLLNMEDALRKEVIGQDEAIRKITKAIQRTRAGLKDPMRPIGSFIFLGPTGVGKTELAKALTRYLFDSEDALIRADMSEYMEKFSVSRLVGAPPGYVGYEEGGQLTEKVRRKPYSVVLIDEIEKAHPDVFNILLQVLDEGVLTDGLGRKVDFRNTIIIMTSNIGAKDIKSIGAGMGFSPGDGGDSSYKSMKSTVEDALKRVFNPEFLNRIDDTIVFHQLEKKHIFDIIDITSGKLFKRLHEMGIDVEIEEKAKEFLVDKGYDQKFGARPLKRALQRYVEDPLAEEMLKGKFSEGSRIKITFDEKSGELKFKNARKTKRQEPLDEELTDGKPGN

SEQ ID NO: 15964 - protein, 647 aa, Prosthecochloris aestuarii DSM 271
MKVYLRFLRYLAPSKSRISLVVIVSMITSLLSVVSIYSILPLLNTLFTSSSTVSQETQITAPVPPPTDQAPEKSVSKIKAKPFNQNIFNIDEAKESIKIFFEKLFYAESKQGMLLKVCLFLIFAFALKNLFIYINKQLIYSIETKTTKRLRDDVFENIIEMQLDYFNKQRVGSLMHHVNHEVQMVNNTISTSLVSFLQAPFSVIVFLVVLLSLNWQLTLFALADVGLIFIIIRTVGVRLKKLAKGFEREMGNMNSILQEKFNGIKVIKASAFEDVEFARFKSFTTDFRRRMIKINRLRNIISPLNETLLIAAIAMVLWFGGIQVFEGRMEGNELLLFAFTLYSVMGPMKSFSEAYTQIQRGMVAAESLFSVLGTEPDIQNGSRPINGFSHSIRFEDVCFKYNKSNSAPYVLDHVSFEVRKGEMVALVGQSGSGKSTVVDLLLRFYDVHSGKITIDGVDIRQLDYKQLRRMIGVVSQEVILFNDSIEQNIGYGVHGQAPHENIVKAAKLANAHAFIEEKPLKYKTQIGDRGIQLSGGQRQRLAIARAMVKNPELLIFDEATSALDNESEKIVQKAIDHALENRTAIVVAHRLSTVKNADRIIVMERGHIAESGSHDELMSNNGLYKMYHDIQFSGTAKEKKESSSHKR

SEQ ID NO: 15965 - protein, 129 aa, Prosthecochloris aestuarii DSM 271
MRLHLLKSKIHNAIVTSGDLEYEGSITIDSQLLELADMLPNEKVLCVNNNNGERFETYIIKGKAGSREIQLNGAAARCALPGDEIIIMTFAEIEAEKAKDFKPMILIVDHQNNPKRRHLVGEEDTPLPH

SEQ ID NO: 15966 - protein, 323 aa, Prosthecochloris aestuarii DSM 271
MSSAQSIISSAKTILRQEAAAIENIAGLLRESFADAVFSMYNCKGKVIVSGMGKSGIIGQKIAATLASTGTTALFMHPADAAHGDLGVVNSGDIVICLSKSGLTEELNFILPALHHRGVTIIAIVGNPRSFLAEKANIVLDVSVCQEACPFDLAPTTSTTAMLAMGDALAISLMREKQFTPNDFALTHPKGSLGKQLTMKVADLMTSGKAVPLVTEEASVTDMILEMTSKRFGVSGVTNRDGKLSGIFTDGDLRRLIQRGVDFSSLSALDVMSPSPKTVSANALAKTSLEMLETYRITQLMVCDNDERPVGIIHIHDLVTQGL

SEQ ID NO: 15967 - protein, 95 aa, Prosthecochloris aestuarii DSM 271
MPIKSKVKWFDGKKGYGFILNPEGGEDIFVHFSAIVSDLTFKVLNQDADVEFELDQTQKGLQARNVRELSAGTIMEQPSVAAHSGISPGQSNGQQ

SEQ ID NO: 15968 - protein, 640 aa, Prosthecochloris aestuarii DSM 271
MGKIIGIDLGTTNSCVAVMQGTQPTVIENSEGYRTTPSMVAFTKNGERLIGHAAKRQAITNAKNTVFSIKRFMGRKFDEVPNEKKIAPYKVVNINGEARVEIDDKNYSPQEISAMILQKMKQTAEDFLGEKVTEAVITVPAYFNDAQRQATKDAGKIAGLEVKRIINEPTAAALAYGLDKKKENEKVAVFDLGGGTFDISILELGDGVFEVKSTDGDTHLGGDDFDQTIIDFLADEFKKQEGIDLRTDAIALQRLKEAAEKAKIELSSRTDTEINLPFITATQEGPKHLVVNLTRAKFEALASTLFDNIMAPCKRAIKNAKVNISEIDEVVLVGGSTRIPKVQELVKELFKREPNKSVNPDEVVAVGAAIQGGVLTGEVSDVLLLDVTPLSLGIETLGGVMTKLIEANTTIPTKKQEVFSTAADNQTSVEVHVLQGERPMASDNKTLGRFHLGDIPPAPRGMPQVEVAFDIDANGILHVSAKDKATGKEQSIRIEAGGKLNDAEIEKMKNDAKAHAEEDAKRKEEVETKNAADSLIFSTEKQLQELGDKIPADKKAPLESALDRLKEAHKSGSADAIKPAMDEVNTIWNDIASQLYQAADAPGSGTPNPEAESGKQESSGKTDGQVDAEYEVIDGNDKDK

SEQ ID NO: 15969 - protein, 406 aa, Prosthecochloris aestuarii DSM 271
MGYSGDITGIEFDLGIKTLERWLIKPEKTMNIALGIPKERLNDERRVAISPAGARILVENGMRVMIEHDAGKASNLSDEDYSDAGCTITDSLEKLYDESNIIVKVSPPQNHELPLFKPSQMLISALHLGAIHRPMMKMFLEKNITALGFEFIQTRDGDLPIVRTLSEIAGSLAIQTAAKYLETGYGGSGILLGGIAGVPPARITIIGAGTVGLFAAQDALGLGAQVTVIDKEINRLRRFEAFFNRHIVTAITNDHYIAELAKESDVMIGALSPKQKFIKPIVSEEVIKSMRQGSVIIDVSIDQGSCFETSRHTTHTNPIFVKHGVTHYCVPNIPSAVAKTATFAMTNTLLPFLMKLNAHETITDILWNSHSLRKGTYAFKGYITQKNLAELTALPYREIDMLLATG

SEQ ID NO: 15970 - protein, 236 aa, Prosthecochloris aestuarii DSM 271
MSEPFILVVEDDHNLAKLLKYNLEKAGYKCQHALSGEEALDLLKSKSYDIMLLDIMLPGMDGFEVCRKVRQHQLYKDLPIIMLTAKGEEIDKVLGFELGIDDYVVKPFSPRELNLRIRAILKRDRRGKREIQEVMTCDGLEVDISRHRVSLEGRELTLTLMEFKLLVVLLKRRGQAQSRETLLSDVWDVDKSINTRTIDTHITRLREKLGQTGRLIKTVRGLGYKLEAPGEGSDEK

SEQ ID NO: 15971 - protein, 556 aa, Prosthecochloris aestuarii DSM 271
MYKPKLFVLLRELNRERLMNDIVSGILVGIVALPLAIAFAIASGVSPEKGLITAVIGGFLVSLLGGSRVQIGGPTGAFIVIIYSIVQQYGVNGLMLATIMAGIILVFMGLAQFGSLIKFIPYPVIVGFTSGIAVIIFSTQIKDFLGLDTGTLPPDFLDKWATYIAHISTVHLPTFLIGLLSLSIILLWPKVSRKIPGSIIAIIATTTMVQLLHLDVATIETRFGDIPSTIAMPSIPVFDLATIQQLIMPATTIAILAAIEALLSAVVSDGMIGGRHKSNMELIAQGVANIASPLFGGIPVTGAIARTATNVKNGGRTPVAGIVHALTLLCIMLLFASWAKLIPMATLAAILIVVAWNMSEYHVFLRLLKSPKSDIIVLMTTFGLTIIFDLTIAIEVGLLLAVILFMQRMSGITNIEVITRELKDREEESDDPNTIITRTIPDGVEVYEINGPFFFGAAAKFKESMLIIEKPPSVRILRMRNVPVIDATGLNMLRELVSDSKKRGTQTVISGIHPEPLAALKQYGLLKEIGKENVFSHIDQALERAAQLSVSRGPDK

SEQ ID NO: 15972 - protein, 401 aa, Prosthecochloris aestuarii DSM 271
MSKEKIALAYSGGLDTSVMIKWLKDKYDAEIVAVTGNLGQEKEVENLEEKAIATGASSFAFLDLRKEFVESCIWPALKAGALYEDVYPLATALGRPLIAKALVDIALENNCTMLAHGCTGKGNDQVRFEVTFASLAPQLAVLAPLREWEFTSREAEIAYAMEHNIPVSATKKSPYSIDENIWGISIECGVLEDPMTPAPEDAYQITTSPEKAPDKAAVIDIEFEQGVPVALDGKAMEGLDLIVELNKVGAAHGVGRLDMVENRVVGIKSREIYEAPAATILHFAHRELERLTLEKSVFQYKKNVSQDYANLIYNGTWFSPMREALDGFIEATQKTVTGLVRVKLFKGSVTLLGRTSPWSLYNEDLATYTEADTFNHKAAEGFIHLYGLGLKTWSEVKANNS

SEQ ID NO: 15973 - protein, 447 aa, Prosthecochloris aestuarii DSM 271
MSKNSHAISLVEAVSMAVGTMIGASIFSIFGLGAEIAGQNLPMAFFLSGMLAFMVAYSYAILGRQIISNAGPISFLLKGIGDNVLTGTLAVLMWLSYVISIALFVKGFSGYLLPFINIESTPLAIGLTEAGIIMFFTLLNTYGSQAVGKLELYIVAVKLSILLIFIVLGMSSIHLSSIVPSLTPKGTEGMLMGSIVFFLSYMGFGLITNASENIDNPFVNVPRAIYISISIVIMVYVLVSVVALGNLAIPDLVKAQDNALAVAARPFLGQTGFALLSVGALFSIASALNATLYGGANIAYSLAKDGELPGIFERKIWFGSSEGLYITAGLGLFFALLFDIGAIASITSTIYTIIYLCVMISHYRIAGTYGGSRPLIFIFSCTMAVVLIGLMSYQYMTSKITFFATIATFFGALLIEYLYRYGRKRRFGIINNLSDTSQALHPARKDI

SEQ ID NO: 15974 - protein, 253 aa, Prosthecochloris aestuarii DSM 271
MLSIENLHVSINGAPVLQGINLRIGKGETVILFGPNGSGKTTLLYTIMGIGNYTVTKGSIVYKGTDITDLPPFERARLGIGMSMQRPPSIHGLKTRELVTMCAAEREVDVEKLAEKVNMQNFLDRDINLGFSGGEIKRSEILQLMAQKPELVLFDEPESGVDVENMALVGAMARELLEGSSEPDESHSMITLAKKRVTSGLIITHTGYILDYITADRGHVLYNGTLCCSDNPKRILDHLHRFGYKECIRCLTQ

SEQ ID NO: 15975 - protein, 339 aa, Prosthecochloris aestuarii DSM 271
MSNNAVSPSHETPLRLQNFHITFFAIVLGMAGFSLAVQKVGGQNGTGLLPILETPATVLLYITIALFALVALIYLLKIVKYPSSLRKEFNHPVKINFFPLIAKIFLVLSVAYLDRDMQISFYLWSIGAVLQFIASIAIISIWIRHTHFKIEQMTPGWFIPIVGSLIVPIAGVPHGFIEISWFFFSVGLIFWIALFTIVMYRMFFHAPIPDRLLPTLFILFAPPAIAFIAYVKLAGLMGHDGAGLDAFARILYYFSLFMFILILFKVQILAKINFFLSWWAYSFPLAAKTLATIVMLHMTHSLFYKNLALFELGLLALVIVILIVVTINAIAKGEICVED

SEQ ID NO: 15976 - protein, 441 aa, Prosthecochloris aestuarii DSM 271
MKSAGKEGKATIGFFGAVAIGIGGMVGGGIFAVLGEAVSLAHGSTSLAFIIAGSVAIVTAFAYARLSVAFPGRGGTVLFIDRAFGNNLASGSVNLMLWLSYLVTIALYANAFASYAETFFHGGGGLPFLRHLLISAAILLPTFINLTNASFVSRSETVIVLFKLLLLIVIIGFSLPAVGVVAVLPTELTLLPSIATAGMVIFVAYEGFELIANASDDVRNPGNTLPAAFFSSVVIVIMLYVIIGYVTVGAVPEKELLRAKDYALAVAARPSLGETGFTIVAIAALLATFSAINATIYGNARLGYFLARDGELPKVFDRQLWNEPVTGVLVTACISLLIANTLDISSIAVIASASFLLVFALVNASAAALTKEINGRRWIHVLGAVCCGVSLSVLLVHAVLSDFSAIVVFLVFIVVSVLFEWIYGKTARGHFLGRPYDAGKT

SEQ ID NO: 15977 - protein, 442 aa, Prosthecochloris aestuarii DSM 271
MKRHVKAPILLTLGLLLAGVISGPPLFAAEATDAASVNAYAIDNMFLFLCAVLVLFMQAGFALVESGLNSAKNTVNILFKNMMDLGLGVILFYIIGYGLMYPGDAFSGGWFGFSGFGIGVESPEAVGGNLHPAVDFLFQVAFAATAATIVSGAVAGRMKFEAYLIYSAVITAFVYPISGFWKWGGGWLNELGFYDFAGSLVVHALGGFAALAAAIVLGPRIGRFNADGSPNAMPGHNLALSTLGVFILLIGWFGFNPGSQLAIAGAANTDIVMIIATNTLLAAAAGSVLAMIFAWILFKKPDLTMAMNGLLGGLVGITANCDSVTYNEALIIGAVAGILVVLGVKLLDMLKIDDPVGAWPVHGLNGVWGGLATGIFGGHPMVAQIIGSIAIPVWGFVTMLVLFLILKMMGILRVSREDEMKGLDISEHEEEAYHGFQIFSTQ

SEQ ID NO: 15978 - protein, 378 aa, Prosthecochloris aestuarii DSM 271
MRITGLAKKMKAEGKDIVSLSAGEPDFPTPLFVSQAGIEAIDSGFTRYTANSGIAELKSAVIAKLKRDNQLDYTPDEVIVSNGGKQTLINAILALCQEGDEVIIPAPYWVSFPEMVRLAGASPVTVPTSIENGYKMTPEDLENAITDKTKLFILNSPSNPSGAVYNEQEVTALMQVLEGRGIFVISDEMYDKIVYGDVKPYSPARIEAMRDWVLVSNGVSKTYAMTGWRIGYLAGPKWIIKACDKIQSQTTSNPNSIAQKAAAAALNGDQQVVEDRRLEFEKRRDYMYKALNEIPGITASLPEGAFYIFPSVKGVLGKTFNGRYLANSSDVAEYLLLDHYVATVPGDAFGAPENLRLSYAASISELEEAVRRIRKAFE

SEQ ID NO: 15979 - protein, 317 aa, Prosthecochloris aestuarii DSM 271
MAKPIKIFAGRSNTALAEKIADYLDMPLCDAKVENFSDGEISVNYFESIRGSDMFIIQSTNPPADNLMELLIMIDAARRSSAARITAVIPYYGYARQDRKDRPRVAITAKLVANLLTKAGANRILTMDLHAPQIQGFFDIPFDHLYSSVVLIDHIRSMELDNLVVASPDVGGVKLARAFAEALGTDLVIVDKRRPKANVAEVMNIIGDVNGKNVLLVDDMIDTAGTLVNAAKAIQDAGGKKIYSAATHGILSGPAIERINASVLEKVILTDSVVTGHAPSGKIEEVTVSNLFGEAIKRIYDDNSVSCLFDSKNIKKK

SEQ ID NO: 15980 - protein, 583 aa, Prosthecochloris aestuarii DSM 271
MKNLLHLKKYLFRYRKNLVYGIACIIFTNIFAVLAPRYIGAAVDLMGESFTMDMILRKTGLYVLFAALSGIFLFLVRQNIIVASRKIEFDLKNDYYAHLQTLSRSFYNNTSTGELISRGTNDLNAVRDFLGPGIMYSINTFFRLFFAVIAMLLISPQLTLFALIPAPLLSYSVYRIGKSMQKKTRSIQESYAGITNLVQENISGIRVIKSYTRENEEIERFRKLNEEYYDKNLSLAKLQAMFFAFLTALLALSLIPVIWMGGINFIEGTMTIGDIAQFVIYVSMLSWPIISIGWVTNIIQKAASAQTRLNEIFNAKPDITDSTATEPPKEQSTSLLSFRNVSFSYPGNETHQVLDGISFDIAKGSKVAIVGATGSGKSTLVNLIPRIYDPLKGSILIGGRDIRTIALSELRSRIGFVPQTNFLFSETIANNINYGNKNEETDMVIEASRIASLYEDVMGFPDKFETMLGEKGINLSGGQKQRTCIARALAWKPEILVLDDALSAVDTSTEATIFKALLEKLPDTALLLISHRISTVKNCDTIIVLKDGVIAESGSHDELLAKNSLYAELYNQQLLEDEISSLN

SEQ ID NO: 15981 - protein, 393 aa, Prosthecochloris aestuarii DSM 271
MSIVMAVNTGSSSIRFALYRMDQGEIPLYTGALTSIASKDAMFSVIDSDGHALIREAVCVADHGAACEHVFGWLHDSNTLRPDAVGHRIVHGGPLYSSPQVVSPALVESLHGLVVFAPQHLPQALQALDHASRLFPGSTQVACFDTAFHRSMPDVARLYALPEEVRRHGVQRYGFHGLSYQYLMSELERTVGTEIARGRLVLAHLGHGASMAAVKEGRSIDTTMGFSPAGGLVMSTRSGDLDPGVLLFLLEQEHMDAAAITTMINSGSGMLGLSGISGDMQMLLDAVGDSHRARQAVDLFCYQAKKTIGAFAAAMGGLDSVIFTGGIGEHSAVIRQRLCSGLGFLGIELDDGRNHHHEPVISGEASRVDIRVMATNEELMIARLVAAELSAHE

SEQ ID NO: 15982 - protein, 187 aa, Prosthecochloris aestuarii DSM 271
MASSVRAAFIDRDGVINEERNYVYKIQDFVLLPGVLEALKIFQDTGFLLIVVTNQAGIARGYYDSKAVEELHFYMRSLFSDSGIMIDKIYYCPHHREGIVKKYAIDCNCRKPAPGMLIQAVNEFNINTAQSVLIGDKISDIQAGRRAGVGCNVLVESGHPFETSTRFLADYVVADLLAAAQLFSMRS

SEQ ID NO: 15983 - protein, 660 aa, Prosthecochloris aestuarii DSM 271
MAQQEKKRDQIRNKFKPVKGDENSQFGLFGGGGDGNGDGGPRIPKVLIYMMVGLVFVFLFQRFFGSNAGPEITYNEYRKVLGTNSVTMVTVETFPDRSALLIGKMKSQSGLKLVDGSTVMTDNFSVRVPDFPMDQVDKLADSGIEVTVRDGTNELNNFLILLAPWIIFAFIYFFIFRRMNMQNGGAQKNIFSFGKSRAKLMSDFDVSVKFEDVAGVDEAIEELKETVEFLMSPEKFQKIGGKIPKGVLLLGPPGTGKTLLAKAIAGEAKVPFFSISGADFVEMFVGVGAARVRDLFETAKKNAPCIVFIDEIDAVGRSRGAGVGGGHDEREQTLNQLLVEMDGFTTKDNVILIAATNRPDVLDTALLRPGRFDRQITIDKPDIRGREAILKIHSRKTPLTDDVDLKAVAQSTPGFSGADLANLINESALLASRKGQTEINSDNFDEARDKILMGPERRSMYISEEQKKITAYHESGHVLVAKFTKGSDPIHKVTIIPRGRSLGQTAYLPMEDRYTHNREYLIAMITYALGGRVAEELIFNEISTGAANDIEKATDIARKMVRNWGMSDKLGPINYGNGHKEVFLGKDYSHVREYSEETALQIDVEVRNIIMECMENAQRILSENKIILQTLAEELIEKEALSGEEIDSIIDSVATNPAAT

SEQ ID NO: 15984 - protein, 307 aa, Prosthecochloris aestuarii DSM 271
MSDHDNFSCGYAAIIGPPNAGKSTLLNRLLDHKLSIVTPKSQTTRKKITGIYHNEDCQIIFLDTPGIMIDPMHMLHEAMLKTTRETLREADVVVALIPAVRKETLFDREFTKQLFHDWLTREKKPVVAVLNKCDLLSKAEQKEALAMIRKELKPEKAMALSALQGTHVDDLVEALQPFLPMDEPLYPEDILSTAPERFFVSEIIREKIFLQYGKEIPYATEVVIDEFKEQHEEDPTRKDLIRCSVVVERDTQKHILIGKKGSALKKLGQASREEIEKFLDRPVFLEIFVKVRPNWRRKKGMLKSYGY

SEQ ID NO: 15985 - protein, 316 aa, Prosthecochloris aestuarii DSM 271
MGFLSKLFGKKEVELKRPQVREDENLIRTLEGHQDRVLGVRFSPDGKKLVSGSFDEKVMLWDVATGAPLHTMSGHDTWVECVDYSPNGDRVASGSTDSTVRIWDPAPGKCVHLCKGHDTAVRMVAFSPDGKTLASCSRDTLIKLWDVETGRELKTLSGHISYIECVAWSNDGKRLVSCGEETVIRIWDVASGKNTASYATGDSLSHTACFSPDDSLIALCGRDAKVKILDAASGEIKHTLEGHDDGARSVCFSPDGTKAASVANDEKVILWDVVTGRLIHTYRGHVLEVQSVDISPDGTTIVSSSDDRKIKLWKLV

SEQ ID NO: 15986 - protein, 401 aa, Prosthecochloris aestuarii DSM 271
METRRVYLDHNATTPLHPEVKKEMIEAMEMFGNPSSMHAFGREAHANIEHARQSVAGFIGAHEDELVFVGSGSEANNTVLSLFACASNLCIPGFKARQTIITSRIEHPCVLETSQCLAHRGTTVKLLDVDRYGRIDIDQLKEYLSDDVGLVSVMTANNEIGTLQDISEIGRLAHENGSLMHTDAVQAFGKMPLDVDELGVDFLTMSAHKIYGPKGIGALYVRKGTPYCPFIRGGHQEKGRRAGTENTLGIMGLAKAVEMRALEMEDEARRFAAMKEVLVKGIEERIDNALFNGHPELSMPNTVNVSFPGAEGEAILLYLDLAGIAVSTGSACASGSLDPSHVLLATGSSAERAHGSIRISMGRETTMEEIEYVLDVLPGVISRIRSMSTAYIKGEEHVAAK

SEQ ID NO: 15987 - protein, 198 aa, Prosthecochloris aestuarii DSM 271
MLRKIKVLFLDRDGTINHDIGTYVTSRQQFRLIDRAAEAVRVAKAAGFEIVIVTNQAGIAKGIVTPEAIDDVHEYMRDLFCLDNASFDRVYYCPSHPDYPHPLYDRFSDCRKPGTGMVERAIAEYRACGCEVDLGHSFFIGDKTIDVECALRAGLRPVLVRTGHGEESLCREKNLLPEYVADDLYDAVAGYILSQQLT

SEQ ID NO: 15988 - protein, 327 aa, Prosthecochloris aestuarii DSM 271
MKFVDSARIVVKAGDGGNGCVSFRREKYVPKGGPDGGDGGRGGHVYLRANSQLATLLDFRYKKNYEALRGVHGQGSKKAGKTGKDIVINVPCGTLVKNSVSGEVICDLVEDGEEFLLARGGDGGRGNPHFTTSTRQAPRYAEPGGKGEELKVDLELKLMADVGLVGFPNAGKSTLISVLSAARPKIADYPFTTLVPNLGIVQYGEYKSFVMADIPGIIEGAAEGKGLGIQFLRHIERTKVLAVLVSGDGEDPVGEYRLLLGEMERFDPALLQKPRIIVVTKMDVVDEAFSLPDFEDDVPLIPVSSITRSGLEELRNALWNTINPSIP

SEQ ID NO: 15989 - protein, 439 aa, Prosthecochloris aestuarii DSM 271
MQFDPNKFTVKAQEALQAAATLAGSRQHQQIEPEHLLQVMLSDSGNIAVQIVSKLGANTANLLSAVDREIERLPKVTGASATGQYVSQELGTVFDAALKEAERLKDEYISSEHLFMAMAEAGVRVSRMLQDAGVNRNAVLKVLTTIRGSQRVTSQTAEDTYNSLKKYSRNLNDLARKGKLDPVIGRDEEVRRVLQILTRRTKNNPVLIGEPGVGKTAIAEGIAQRIVAGDVPENLRSKQIAALDIAQLIAGAKFRGEFEDRLKAVVKEVQDANGEVILFIDELHLLVGAGSAEGAVDAANILKPALARGELRCIGATTLDEYRKYIEKDAALERRFQTVIVDQPSVEDTISILRGLKEKYEIHHGVRVKDSAIVAAAELSNRYISDRFLPDKAIDLIDEASSRLRLEIDSDPEELDRVNREIRRLEIEREALKRELGSE

SEQ ID NO: 15990 - protein, 409 aa, Prosthecochloris aestuarii DSM 271
MLVTLSAVLVFVGVIVLLVYLLNIAARKLLPQGRVTISINDDDDKEFSVTPGRTLLSTLSDEKIFIPSACGGGGTCGMCKCKITEGGGQVLPTELNHVSRAEVKEDVRLSCQVKVRESMKVYLPEEIFSIRQWECTVLSNNNVATFIKELVLELPSDETLGFKAGGYIQIDIPAYRQIPFSDFDIGSEYRSDWDHFNMWNLNATNGDSTFRAYSMASHPAEGNVVKLNVRIATPPPKLFDSAPPGVGSSYIFNLKPGDKVRISGPYGEFFIKDTDREMVYIGGGAGMAPMRSHLFHLFRTLKTTRKVSFWYGARSRKEMFYDDEFLAIASEFPNFSYNVALSDPQPEDNWEGPTGFIHNVLYENYLKNHEEPEEIEYYMCGPPVMISSVEKMLYNLGVEKEMIAYDEFS

SEQ ID NO: 15991 - protein, 440 aa, Prosthecochloris aestuarii DSM 271
MNSSDTKKRLEEIEKQLADLNEEQRRIKARWDAEKELIHASRKLKSELEDLRIQAEEYERSGDYGKVAEIRYGKITQLEKELQANKEKIEQKQASGELLMKEEIDAEDIADIVSKWTGIPVSKMLQSERQKLLHIEAELHERVIGQDNAVRAVSEAVKRSRAGMGDEKKPIGSFIFLGPTGVGKTELARTLADYLFDDEDAMIRIDMSEYMESHTVSRLVGAPPGYVGYEEGGQLTEAVRRKPFSVVLLDEIEKAHPDVFNILLQILDDGRLTDSKGHTVNFKNTIIIMTSNIGAQMIQSEMEKMSGVNREEVLETLQDKLFQLLKQQVRPEFLNRIDEIILFTPLTQEDIAKIVTIQFDLIRKLALRQNITLTLSDEALSWLASAGFDPAFGARPLKRVMQRQITNKLSELILAGTVHEGNSVNVTAENGEIALVIAGS

SEQ ID NO: 15992 - protein, 471 aa, Prosthecochloris aestuarii DSM 271
MAVMKFGGTSVGTASAMRRAMAIVADVKKKKSAPLVVLSACSGMTNLLIEIAGAAGEGRLGDALAMAEEVRLHHLSIAGELVKDPVRSAALQEKIEGYVNELEMLVKGVDIVGELTARSFDTFCSFGELLSTTVFSEAMLDAGHACSWVDARSVMITDDNFGTARPLEGRCEENVHSVIKPLLDAGTIVVTQGFIGASADGKTTTMGRGGSDFTAALLGAWLPSDQIQIWTDVDGVMTCDPRIVPQARSIRVLTFSEAAELAYLGAKVLHPDTIAPAVKQNIPVYVLNSLHPDAKGTVITNDPDILDGMSYGGLVKSIAVKKGQCIVNFRSNRMLGRHGFLIEFFNVFARAGVSVEMISTSEVSVSLTVSDTAAVDGLVRELAGMGEVELEHNVATVSVVGDNLRMSRGVAGRIFSALKDVNIRMISQGASEINVGFVVEEREVPKAVENLHHEFFSHDDTRGIFETPAGK

SEQ ID NO: 15993 - protein, 223 aa, Prosthecochloris aestuarii DSM 271
MKFFIDTANLDEIKAAAELGLLDGVTTNPSLIAKIVADPANFTYEDFKKHIAAICEIVDGPISAEVTTLEAEEMIREGEDLASIHENVVVKCPVTLEGLKAIRHFSSEGIRTNATLVFSPSQALLAAKAGATYVSPFIGRLDDISTDGMALVEQIVAIYDNYGYHTEVIVASVRHPQHVVEAALAGADIATIPFGVIKQLVRHPLTDAGLTKFMEDASVMKKS

SEQ ID NO: 15994 - protein, 584 aa, Prosthecochloris aestuarii DSM 271
MDRNSVIGLVLISLIMIVWMQFMAPEKKPLQDIDKPAVSLQEEVSPVSDIPAAAATPESYGEFSAMSDGEEKLLTVDNEYFTAVLSSRGATLKSMMLKKHLDSSREQFNLIRKNDSGALSLFFLTQAGKQIDTRDLYFSTAVTESQVTVGADNQFSVTYRLDVAPEKNIVITYTFSGDSYAIGYDISMNGFASEIAGNEFQLQWDGGLVHSEKNDDDELHNSWAAAYMGGSLLKLDASDQSKTYREEQSGVAGWVAARTKYFVAAMIPSSETEGVYLAGKRLAGEPFENYTTALKFRVPSDESSFKESLRLYVGPIDYNVLNALGVNLEKIMDFGWDWLTRPFAEYIILPIFDLLNKFIGNYGLIIIIFAFLIKLVTYPLTMASTKSMKKMSALQPMMKEIQEKYKDNPAKLQSELGRIYKEAGVNPLGGCLPVVLQMPLLFAMFYVFRSSIQLRQHGFLWANDLSVPDSILDFGFSIPLYGDHIALFPILMAVAVFLQQKITPTAQTNDQMKAMIYIFPVMMLLFFNNMPAGLGLYYLMFNVFSIAQTWYINKTASTDDLPALSPVVAAPPKAPKKKKNARKR

SEQ ID NO: 15995 - protein, 234 aa, Solanum tuberosum
MDQQLPPINFPVDFPVYRRNSSFSRLIPCLTETWGDLPLKVDDSEDMVIYGLLKDALSVGWSPFSFTAGEVKSEPREEIESAPEFVPSPVETTAAPAAETPKGRHYRGVRQRPWGKFAAEIRDPAKNGARVWLGTYETAEEAAIAYDKAAYRMRGSKAHLNFPHRIGLNEPEPVRVTAKRRASPEPVSSSENGSMKRRRKAVRKCDGGVESRSSAIQIGCQIEQLTGVHQLLVI

SEQ ID NO: 15996 - protein, 527 aa, Mycobacterium tuberculosis
LPVVLIADKLAPSTVAALGDQVEVRWVDGPDRDKLLAAVPEADALLVRSATTVDAEVLAAAPKLKIVARAGVGLDNVDVDAATARGVLVVNAPTSNIHSAAEHALALLLAASRQIPAADASLREHTWKRSSFSGTEIFGKTVGVVGLGRIGQLVAQRIAAFGAYVVAYDPYVSPARAAQLGIELLSLDDLLARADFISVHLPKTPETAGLIDKEALAKTKPGVIIVNAARGGLVDEAALADAITGGHVRAAGLDVFATEPCTDSPLFELAQVVVTPHLGASTAEAQDRAGTDVAESVRLALAGEFVPDAVNVGGGVVNEEVAPWLDLVRKLGVLAGVLSDELPVSLSVQVRGELAAEEVEVLRLSALRGLFSAVIEDAVTFVNAPALAAERGVTAEICKASESPNHRSVVDVRAVGADGSVVTVSGTLYGPQLSQKIVQINGRHFDLRAQGINLIIHYVDRPGALGKIGTLLGTAGVNIQAAQLSEDAEGPGATILLRLDQDVPDDVRTAIAAAVDAYKLEVVDLSS

SEQ ID NO: 15997 - protein, 524 aa, Mycobacterium tuberculosis
LPVVLIADKLAPSTVAALGDQVEVRWVDGPDRDKLLAAVPEADALLVRSATTVDAEVLAAAPKLKIVARAGVGLDNVDVDAATARGVLVVNAPTSNIHSAAEHALALLLAASRQIPAADASLREHTWKRSSFSGTEIFGKTVGVVGLGRIGQLVAQRIAAFGAYVVAYDPYVSPARAAQLGIELLSLDDLLARADFISVHLPKTPETAGLIDKEALAKTKPGVIIVNAARGGLVDEAALADAITGGHVRAAGLDVFATEPCTDSPLFELAQVVVTPHLGASTAEAQDRAGTDVAESVRLALAGEFVPDAVNVGGGVVNEEVAPWLDLVRKLGVLAGVLSDELPVSLSVQVRGELAAEEVEVLRLSALRGLFSAVIETFVNAPALAAERGVTAEICKASESPNHRSVVDVRAVGADGSVVTVSGTLYGPQLSQKIVQINGRHFDLRAQGINLIIHYVDRPGALGKIGTLLGTAGVNIQAAQLSEDAEGPGATILLRLDQDVPDDVRTAIAAAVDAYKLEVVDLSS

SEQ ID NO: 15998 - protein, 528 aa, Mycobacterium tuberculosis
VSLPVVLIADKLAPSTVAALGDQVEVRWVDGPDRDKLLAAVPEADALLVRSATTVDAEVLAAAPKLKIVARAGVGLDNVDVDAATARGVLVVNAPTSNIHSAAEHALALLLAASRQIPAADASLREHTWKRSSFSGTEIFGKTVGVVGLGRIGQLVAQRIAAFGAYVVAYDPYVSPARAAQLGIELLSLDDLLARADFISVHLPKTPETAGLIDKEALAKTKPGVIIVNAARGGLVDEAALADAITGGHVRAAGLDVFATEPCTDSPLFELAQVVVTPHLGASTAEAQDRAGTDVAESVRLALAGEFVPDAVNVGGGVVNEEVAPWLDLVRKLGVLAGVLSDELPVSLSVQVRGELAAEEVEVLRLSALRGLFSAVIEDAVTFVNAPALAAERGVTAEICKASESPNHRSVVDVRAVGADGSVVTVSGTLYGPQLSQKIVQINGRHFDLRAQGINLIIHYVDRPGALGKIGTLLGTAGVNIQAAQLSEDAEGPGATILLRLDQDVPDDVRTAIAAAVDAYKLEVVDLS

SEQ ID NO: 15999 - protein, 646 aa, Herbaspirillum seropedicae
MGKIIGIDLGTTNSCVAVMEGNQPKVIENSEGARTTPSIIAYQEDGEILVGAPAKRQAVTNPKNTIYAAKRLIGRKFTEKEVQKDINLMPYQIVAADNGDAWIGVRDKKLAPPQISAEVLRKMKKTAEDYLGEEVTEAVITVPAYFNDAQRQATKDAGRIAGLDVKRIINEPTAAALAFGLDKAEKGDRKIAVYDLGGGTFDVSIIEIADVDGEKQFEVLSTNGDTFLGGEDFDQRLIDYIIDEFKKINGLDLSKDAIALQRIKASAERAKIELSSSQQTEINEPYIAMANGAPVHLNLKITRAKLESLVEELIAKTIEPCRTAIKDAGVKVSDIDDVILVGGMTRMPKVIEKVKEFFGKDPRRDVNPDEAVAVGAAIQGSVLSGDRKDVLLLDVTPLSLGIETMGGVMTKMIKKNTTIPTKFSQVFSTADDNQPAVTIKVYQGEREMAVGNKPLGEFNLEGIPPAPRGTPQIEVTFDIDANGILHVGAKDKATGKENKITIKANSGLNEEEIEKMVRDAEANAEEDKRLKELAETRNQGDALVHSTKKALGEYGDKLEAGEKDVIEAAIKNLEEALKGDDKAAIDAKTEALSTAAQKLGEKMYADQQAQAAAAGGAAGAAGAQAGAAGAAPKDDNVVDADFKEVK

SEQ ID NO: 16000 - protein, 332 aa, Klebsiella pneumoniae
MSGGHMRDILPVVVDGLWRQGAKNLAVRLVSAEGQPLPAWTPGAHIDLHLPCGLIRQYSLTGSPAERDRYLLCIARESQSRGGSRYIHDTLRPGQPLMISAPRNHFPLHEGGHVVLLAAGIGITPLLAMAHARAASGASFTLHYYVSRAQEAAFATEIARQLTGGICQIHCSDEGQSPRQRLAQDLGAPDADTRVYFCGPPGFMARVRDTARAVGWEEAQLHSEAFQPPAPTAASAASAADGTFTITLASTGERWPVPGDKTIAQVLQEHGVAVPLSCEMGICGACLTPVREGTVDHRDTVQSEAEKQAAEQHIALCCSRSLSANLVIDLAG

SEQ ID NO: 16001 - protein, 314 aa, Triticum aestivum
MAMGSASCISLVVLVALATAASGQLSSTFYDTSCPRALAAIKSGVAAAVSSDPRMGASLLRLHFHDCFVQGCDASVLLTGMEQNAGPNVGSLRGFGVIDNIKTQLESICKQTVSCADILTVAARDSVVALGGPSWTVPLGRRDSTTASASLANSDLPGPSSSRSQLEAAFLKKNLNTVDMVALSGAHTIGKAQCSNFRTRIYGGDTNINTAFATSLKANCPQSGGNTNLANLDTMTPNAFDNAYYTNLLSQKGLLHSDQVLFNNDTTDNTVRNFASNAAAFSSAFTTAMIKMGNIAPLTGTQGQIRLSCSKVNS

SEQ ID NO: 16002 - protein, 129 aa, Arachis hypogaea
RNINAPTRTYVRDAKAMAATPADVKEYPQSYVFVIDMPGLKSGDIKVQVEDDNVLIISGERKRDEEKEGAKYLRMERRVGKFMRKFVLPENANTDAISAVCQDGVLTVTVQKLPPPEPKKPNTIEVKIA

SEQ ID NO: 16003 - protein, 179 aa, Arachis hypogaea
MEKQGQEHVQQQQQQQALKCPRCDSSNTKFCYYNNYSLSQPRHFCKACKRYWTRGGTLRNVPVGGGCRKNTKRLKRQSSSSIDATPSPSSSSTHPPASNINPLFYGVPSSNNNNNNNNSCDLLNLPSFPGFRVSSGYDNDVQPHLSGLGFSSGIMSNMEATGFGSNESNSFLSAYNSIF

SEQ ID NO: 16004 - protein, 187 aa, Arachis hypogaea
MALPNTFTFSPPSLNPFKPSSSSSSYIIKFFTCSFPVPRTTITTPNAFSFNTGPIRPNISSIRATSSSSSSSSSSSSSFGSRLEETIKKTVSGNPVVVYSKTWCSYSSEVKALFKKLGVEPLVFELDEMGPQGPQLQKVLERLTGQHTVPNVFIGGKHIGGCTDTLKLYRKGELEPLLSEATAKGKD

SEQ ID NO: 16005 - protein, 157 aa, Arachis hypogaea
MSLLSDLINLNLSESGTKKIIAEYIWIGGSGMDIRSKARTISGPVSDPSKLPKWNYDGSSTGQAPGEDSEVILYPQAIFKDPFRRGENILVICDAYTPAGEPIPTNKRHNAAKIFSHPDVASEEPWYGIEQEYTLLQKDINWPLGWANWVATLGPQG

SEQ ID NO: 16006 - protein, 231 aa, Arachis hypogaea
LPLPEFLQTQQTHPSSVRAILCNPRQPVTADVIRSLPSLGIVATTTVGADHIDTAECRRRGIQVVTLGSQFAPDVADMAVALLIDVMFKISAGDRFAKKSIHFKPWSFPSGSKLGGKRVGIIGLGRIGGEVAKRLEAFDCIIMYHSRNKNPSVSYTFYSNVVDLASNSDVLILCCPLTEQTKYIVNKEVMLALGKGGIIVNVGRGALIDEKELVQCLMKGEIRGAGLDVFE

SEQ ID NO: 16007 - protein, 153 aa, Arachis hypogaea
MKGAKSKAESKRGDAKLAVNKKGTPATKGGRKTGKGKAAKDPNKLKRPPSAFFVFMEEFRKQFNKDHPENKAVSAVGKAAGAKWKQMSDAEKAPYVAKSEKRKQDYEKNMRAYNKKQAEGPTGGDEEESDKSISEVNDEDDDEDGSGEEDDDE

SEQ ID NO: 16008 - protein, 190 aa, Arachis hypogaea
MELPNQAPEEGSSQHHQKKMGRGKIEIKRIENTTNRQVTFCKRRNGLLKKAYELSVLCDAEVALVVFSSRGRLYEYANNIVRGTIERYKKASAASSNTESVSEANTQFYQQESSKLRRQIRDIQNLNRHILGEALSSLSLKELKNLESRLQKGLSRVRSRKHETLFADVEFMQKREIELQNHNNYLRAKI

SEQ ID NO: 16009 - protein, 495 aa, Artemisia annua
MKSILKAMALSLTTSIALATILLFVYEFATRSKSTKKSLPEPWRLPIIGHMHHLIGTTPHRGVGDLARKYGSLMHLQLGEVPTIVVSSPKWAKEILTTYDISFANRPETLTGEIVLYHNTDVVLAPYGEYWRQLRKICTSELLSVKKVKSFQSLREEECWNLVQEIKASGSGRPVNLSENVFKLIATILSRAAFGKGIKDQKELTEIVKETLRQTGGFDVADIFPSKKFLHHLSGKRARLTSLRKKIDNLIDNLVAEHTVNTSSKTNETLLDVLLRLKDSAEFPLTSDNIKAIILDMFGAGTDTSSSTIEWAISELIKCPKAMEKVQAELRKALNGKEKIHEEDIQELSYLNMVIKETLRLHPPLPLVLPRECRQPVNLAGYNIPNKTKLIVNVFAINRDPEYWKDAEAFIPERFENSSATVMGAEYEYLPFGAGRRMCPGAALGLANVQLPLANILYHFNWKLPNGVSYDQIDMTESSGATMQRKTELLLVPSF

SEQ ID NO: 16010 - protein, 398 aa, Paulinella chromatophora
MIQLNQGFELSLKQMHRPLSELIYLDASATSPPAPEVLQVMSISYQKAWGNPSSLHSPGIKAAESLERSRQVIAKALGAVPNQVVFCSGGTESIHLALFGTAIFLPPGRLVISDVEHPIVNAVAHKLSQKGWTIQRWPVNSEGKVQLTYLDEILSPPTRLVSIVWGQGEVGTIQPVEKIGQACHERGIIFHTDAVQVLGHKTINWSKLPIDLLSFSAHKLHGPRGIGGFLRRSIIPCQPQFSGGGQESGLRSGTESVALAVGFASALDLMVNRLERNGEVDPLELWRNRLMAKLLLIQGIKLTGHPYLRLPYHISLLVKNSRGNPINGNRIVQILGNKGIAVSSGTACNSGTSRGSQVLQSMGYDEEDSLAGLRLTLGPWHAKDSFSELIQSIYNLTV

SEQ ID NO: 16011 - protein, 629 aa, Paulinella chromatophora
MKQNWRLIALWLLPFGLIILLGTQVFSNNNVVQARSNGPNLSTNTAIGRMSYGRFLEYIETDRITAVDIYDGGRNAIVEVVDPDLKTRVQKLRVDLPGLTPELIDNLKEEHISFDIHPARTTPIYLGVLGNLLFPFLLISLLIFLARRSSGGPGGPGQAMQFGKTKARFLMESETGIMFNDVAGVDEAKQDLEEIVTFLKTPDKFTSLGAKIPKGALLVGPPGTGKTLLAKAVAGEAGVPFFALSGSEFVEMFVGVGASRVRDLFKRAKENSPCMIFIDEIDAVGRQRGSGVGGGNDEREQTLNQLLTEMDGFEGNSGIILLAATNRVDVLDSALLRPGRFDRQVNVDPPDINGRLSILKVHSRNKKLAPGVSLEAIARRTPGFSGADLANLLNEAAILTARRRKSSTTLIEIDDAVDRIIAGMEGKPLADGANKRLIAYHEVGHALVGTLVKQHDPVQKVTLIPRGQAQGLTWFSPDEDQTLVSRGQLKARIMGALGGRAAEAVVFGHSEITTGAGSDIQQVASLARQMVTRFGMSNLGPVSLESQEMSLGRDGMSDAIAKRIDDQVREIVQNLYDDTISLIKANRSCMDCVVELLIEKETLDGNEFRAVVSEFAEIPDKERFSPLIE

SEQ ID NO: 16012 - protein, 248 aa, Paulinella chromatophora
MMAPAPAKETILIVDDEASIRRILEARLSMIGYQVVTASDGAEALEAFHRCEPDLVVLDVMMPRLDGYGVCQELRKESDVPIVMLTALGDVADRITGLELGADDYLIKPFSPKELEARIRCVLRRVEKDQTAGIPNSGVIQVGDLRIDTNKRQVFRNDERIRLTGMEFSLLELLVSRSGEPFSRGEILKEVWGYTPERHVDTRVVDVHISRLRSKLEDDPANPELILTARGTGYLFQRIVEAVVSEGT

SEQ ID NO: 16013 - protein, 952 aa, Paulinella chromatophora
MFKYEQFTRTTLVSDPNHFSEAGWNLLLVAQNVARRWHHCYLDVEHVLEVLFNDSRYVHWIGCLPIDIDAVLDQIEAFSLDQPFNEYNEELFMGDALELLLETSDKYRRKWKSRVLDIPHILHALPSDIRIAKKIFIEIGLSEKMILRNLCKLTIPPIPVLKPRSSFSNTDALSSEQNWVDSAQVKTIPKSSIPTIQIKSKAKSNVPVKTIVKSTVAERGTKLSAPSGIQNTNSNDDLKLERVSSALEDFGRDLTAAARTKLLDPVIGRDGEIRQLIQVLSCRGKNNPVLIGSPGVGKTATVESLAQKIVEGDVPDSLKGLRLIALDLGALIAGAKLRGQFEERFRSVLNEINAPDSSVVLFIDELHTIVSNDRSNLDISSLLKPALARGELRCIGASTPEAYRRTIEKDLALNRLFQQVLIKEPSQDLSIEILRRLKIRYELYHGVTITDAAVIAANRLSSRYISDRCLPDKAIDLIDEAAAQLRIEITSKPRIIKEIEEEIRCLEVAFFESETEPIIDQAQLQRKQDIATQKLVNLEGKWQSEKRHLLSLSRLQEENEHLKYELLQAEQAGDLEKFSRLKYHDAIDIQERRAQTEQALQKIRRSGNSLLKQQVEESDIANIVARWTGIPVQRLLAGERQKLLELEHHLGEKVIGQPEAVFAVAAAIRRARAGMKNPNRPVGSFLFLGPTGVGKTELAKALAAALFDEEEALVRLDMSEFMERNAVARLLGAPPGYVGYEEGGQLTEAVRQRPYAVVLLDEVEKAHPDVFNLLLQVLDDGRLTDSQARTVDFRHTVIVMTSNLAGRAILDRSRKEKSKLADDACEAAVESALLKQFRPEFINRIDEVIRFRPLELVDLQHIARLQLAELGDLLLEQGLRLEISESVVYKLAQQSYEPEYGARPLRRILRRQLENPLATELLEDRFRDATGVRVYSDDINNKEKLIFLPQYS

SEQ ID NO: 16014 - protein, 285 aa, Paulinella chromatophora
MTSLFETDGTIYMGSKSNPAKCNVALFGVPYDGTTSYRPGTRFGPVAIKDVSNGLETYDPQINLDLEEINFIDLGLINIPVGAPEPMIKSVRTATDTILRQGLKPLMLGGEHSISSGAVAAVAHKYPDLVLLQLDAHADLRTEWLGNKHSHACAMRRCLDVLPSKNLLQLAIRSGSREEFVELNHNKRLVPMLDIEKYLKPLRGKPLYVTVDLDWFDPAVMPGTGTPEPGGFIWVDFTLIVNELLNHKLVGADVVELAPLLDPTGCSSILASKVTRTLLLLLGRS

SEQ ID NO: 16015 - protein, 629 aa, Paulinella chromatophora
MGKVVGIDLGTTNSCVAVIEGGKPTVIANAEGFRTTPSVVAYTKGQDQLVGQIAKRQAVMNPENTFYSVKRFIGRRVDEITDESKEVSYSIEKSGASVKVKCPILNKQFAPEEISAQILRKLADDAGKYLGEKVTQAVITVPAYFNDSQRQATKDAGKIAGLEVLRIINEPTAAALAYGLDKKSNERILVFDLGGGTFDVSVLEVGDGVFEVLSTSGDTHLGGDDFDKVIVDHLADTFKANEGIDLRQDKQALQRLTEAAEKAKIELSSATQSELNLPFITATPEGPKHLALNLTRAKFEELASKLIDRCRVPVEQSLKDAKLSTSEIDEIVMVGGSTRIPAIKELVKRITGKDPNQTVNPDEVVAVGAAIQGGVLAGEVKDILLLDVTPLSLGVETLGGVMTKMIPRNTTIPTKKSETYSTAVDGQTNVEIHVLQGEREMAADNKSLGTFRLDGIPAAPRGVPQIEVTFDIDANGILSVTAKDKGSGKEQTISITGASTLSDSEVDKMVKDAEINASSDKEKRERIDLKNQAETLIYQSEKQLTEMGDKIGAESKEKVMNASTQLKEALGKEDYESIKTLLSDLQQALYSAGSSVYQGGGTSASDSSQASSTSTGAEDVIDAEFTESK

SEQ ID NO: 16016 - protein, 590 aa, Paulinella chromatophora
MALLVQKFGGTSVGSIERIQAIARRIAIKHKEGHSLVIVVSAMGDTTDELMHMAHRISATPPKREVDMLLATGEQVAIALLSIALNSIGIAAVSLTGFQVGILTECAHGRARILKINTERIFKYLKAGQVIIVAGFQGTSSNDGTPEITTLGRGGSDTSAVALAAALGADACEIYTDVLGILTTDPRKVKNAQLINKISCDEMLELASLGAAVLHPRAVEIARNYGVILSVRSSWSLLPGTLLIGGSSKPMSKEGLELAKAVDQAELIQDQALVIIARLPDIPGITATLFEELSKAKLNVDLIVQTSFKNGTQDISFTLKNKQLKRALKICQKILRILDTTEVTIRTKAEMAKLSISGVGIMNRHGIAALLFENLAKAGINLRIIATSEVKISCLIHSKEGGKALNIALKTFGLNYSQYKSKPKNLNLPEVRGVVLDRNQIQISVRNVPDYPEVPALICRILADEVISIDAISQLEHLKNYNSNCSRDISFTLHRSDCSRAKDILNKLLIKWPEAKLDIGPAIARVSAVGAGMPNIPGIAARMFRSLATAGIHIQMITTSEIRISCMVHEVDGVDALQSIHSCFGLGKIN

SEQ ID NO: 16017 - protein, 393 aa, Paulinella chromatophora
MNQAIATNLHSQENDGLIEPHGGQLIDLMITENQKSILKIGVDHVIECSHRNACDLELLIVGGFSPLNGFMNENDYNSVVESHRTSLGLLFGLPIVMDTDRKDVEVDNRILLTYQGRDLAIMDVETKWEPDKAKEALNCYGTSSIEHPAVRMITSERGRFYLGGKIIGIELPSRVFPCKTPFQVRATLPPNEDVVAFQCRNPIHRAHYELFTRALHANNVSDQAVVLVHPTCGPTQGDDITGEVRFQTYERLAAEVDNPRIHWAYLPYSMHMAGPREALQHMIIRKNYGCTHFIIGRDMAGCKSSVTSKDFYGPYDAQNFATTVAPELGMQTVPSLNLVYTKEKGYVVADEAEKEGLHIQKLSGTEFRKMLRNGEEIPEWFAFRSVVEVLRAS

SEQ ID NO: 16018 - protein, 264 aa, Paulinella chromatophora
MISPDAELLLEITDLHAQVENQPILKGVNLRIRAGEIHAIMGRNGSGKSTLSKILAGHPAYTVTDGSIIYRGNDLTQLSPEERARAGIFLGFQYPIEIPGVSNLEFLRVATNARRLGKGEEELDTFDFEDLVQEKIKIVQMDPTFLERSVNEGFSGGEKKRNEILQMALLEPVLSILDETDSGLDIDALRIVAKGVNQLATADSAIVLITHYQRLLEIITPDYVHVMAGGRILRTGGNLLALELEKIGYDWVDKELAALETFQT

SEQ ID NO: 16019 - protein, 329 aa, Paulinella chromatophora
MQFIDQARIMVYAGRGGDGIVAFRREKYVPAGGPSGGDGGRGGNVIFEADSNLQTLLDFKYKRIFYAEDGNRGGPNRCSGVSGSNLVIKVPCGTEVRHLGSGILLGDLTEPSQQLMIAFGGRGGLGNAHYLSNRNRVPEKFTLGREGEEWPLQLELKLLAEVGIIGLPNAGKSTLIGNLSAAKPKIADYPFTTLIPNLGAVYRPNGDSIIFADIPGLILGAANGAGLGYDFLRHIERTRLLVHLIDSSAKDLVHDLIVVEGELIAYGHGLADRPRIVVLSKIELLSGEELHQFSQALRMVSGCKILVISSAILSSIEFLKTQIWQQLGT

SEQ ID NO: 16020 - protein, 381 aa, Paulinella chromatophora
MRVTTASYRQSDTRTFTLVVVGLSIGKQRQAEKHFTVPFSQLQAFVKLITSRGGKIKAVISSSDTNPRSESIRIPATVTTSPAKPAHHDVPVNLYKPKDPFVSTVIDNYSLLSPGAIGRVNHITFDLSGGNLRYVEGQSIGIIPDGTDVNGKPHKLRLYSIASSRHGDNLQGNTISLCVRQLQYEKDGETINGVCSTFLCDIKPGAKTKMTGPVGKEMLLPADEMANVIMLATGTGIAPMRTYLRRMFEPGERSKNPEYQFRGKAWLFMGAPTTANLLYDDDFNRYQSEFPENFRYTKAISREQQNTSGGRMYIQDRVTEHADEIFGMIEDSRTHVYMCGLRGMEPGIDQAMTAAAQAKGFNWAELRPQLKKAERWHVETY

SEQ ID NO: 16021 - protein, 337 aa, Paulinella chromatophora
MLTSAVTSFLTAERAEQQDKTPQDSRRLRIFSGTSNPTLASEIANYLGVPAGPKVCKHFADGELYIQIQESIRGCDVFLVQPTCAPVNDNLMELLIMVDACRRASARQITAVIPYYGYARADRKTAGRESITAKLVANLLVKSGVDRVLAMDLHSAQIQGYFDIPCDHIYGSPVLVDYLATRSLGEIVVVSPDVGGVARARAFAKQMNDAPLAIIDKRRYEHNVAESLTVIGNVKNKTAILIDDMIDTASTICQGARLLRKQGAARVIACATHAVFSPPAIERLSEVGLFEEVLVTNSIPIRSERDFPQLQVLSVANMLGEAIWRIHEESSVSSMFR

SEQ ID NO: 16022 - protein, 461 aa, Paulinella chromatophora
MKFYEFNIKRKSKIALHLPAHGRGPGLAPGLKWLLNCRPATWDLPELPAIGGPLESKGVVAYSQRIMAERWGADHCWYGVNGATSMLQVALMAMTSPGDRVLMPRNIHRSLINGCILARLKPILFNIPFDPYTGLWQLPDAENFEKILIKIGHIAAVVLIHPTYQGMAGNLTSLVEKSHQKGLTVLVDEAHGSYFAVVPDELPKSALASGADLVVGSLHKSAGGISQSAVLWLQHERVKASRVELALYWLQTSSPSAALLASGEAALNYLASEPGYRNLKRSMKLGHQLRTDLSCAGFPLVVNQDPLRLVLHTAGLGITGLEADSWLMAKGLIAELPEPGCLTFSLGLSPDKRLAKVMLPILENFQEQLLGLPLSPFMIPPFPDTIELELCADIAWCPKKEVISLEVATGRIATETLCPYPPGIPILYPGERIDAKRTLWLQQQHSLWPMQIPSMISVIVE

SEQ ID NO: 16023 - protein, 367 aa, Paulinella chromatophora
MKGVINKNTIAPKRILRGAGAWCAGVSTIVTIGNRPLVLSKGTATIRLREDLINGLRTSGLRVHLAALQFDCCEEDLQPIECNARENRCNSVIAIGGGKVLDAGKLLALRLGLQCVMVPTSAATCAGWTALSNLYSSQGAFKRDIELLSCPDLLIFDYNFIFNAPARTLASGISDAIAKWYEASISSINSVDGLVQHAVQHARVLRDQLLREGVEAMQNPGSEAWIRTIEACGLTAGLIGGLGGARCRTVAAHAIHNALTQLELTHHTLHGEKVGFGILVQLWLEEVVGRNKIAGVARRDLILFFNDIGIPINLDQLGLTQISLKELRSICNFAIKPGSDLHHLPFLVTEEDLLIALVSASKDLSSK

SEQ ID NO: 16024 - protein, 631 aa, Paulinella chromatophora
MTKTTVRSPLTCSIEPEESSSVDSLSVPADEHIAMTSIEITDEADHNCTNNNKTDRNQDASGFADFGLNAEILQAVTEKGYKQPSPIQAAAIPELMLGRDLVGQAQTGTGKTAAFALPLLARMDPDQRSPQVLVLAPTRELAVQVADSFSTYAAHLPHIRVLPVYGGADFRDQINRLKRGIQVVVGTPGRVMDHMRQGTLDLSGLRVLVLDEADEMLRMGFIDDVEWIIEQLPKQRQVVLFSATMPTEIRRISLNYLNNPAEITIRQKGSDASRIRQRYLMVHAPHKLEALNRVLEAETGEGVIIFGRTKAITVTIAESLELTGHDVAVLNGDVAQSQRERTIERLRKGSINILVATDVAARGLDVDRVSLVINYDIPFDSEAYVHRIGRTGRAGRTGDAILFLTPRERRFLGGLERAVGRPIEPMDVPSNATINQNRLNRLHQSLVGMINTNKSPSEEEALLAELLFKIGNDLACTPSRLALAALQIAVSPNPLLVQGDEKWLRPAVGRDIDRTGGRERRDRNGNISTNSRGTSQRQNGRRENDFSTTDMHMDHFRIEVGWRDHVKPGNIVGAIANEAGIQGRMIGRIQIFDDYSTIDLPKGMPEGVFQSLKYLKVMNKELQISRQNLSN

SEQ ID NO: 16025 - protein, 107 aa, Paulinella chromatophora
MDDSLKQRIDGLVNSSPVFVFMKGNKLMPQCGFSNNIVQIFNSLGIPFETFDVLSDMEIRQGVKDYSEWPTIPQIYIKGEFIGGSDIIIEMYHSGELREKLEIALSC

SEQ ID NO: 16026 - protein, 857 aa, Paulinella chromatophora
MHLKAEKFTDKAWTAILESEECARKYQNQQIETEHLFSALMGDQELCKRILERSGANLKELKGSIQSFIERQATLKGAIENIYLGNSLNILLDEANNEKTTFEDSFISVEHLLLAIAKDKRCGEKLLAQQKLNYAELKRVIQSIRGNQKVTTQTPEETYESLERYGRDLTKAALDGKLDPVIGRDEEIRRTIQILSRRTKNNPVLIGEPGVGKTAIVEGLAQRIVNGDVPAALQNRQLIALDMGALIAGAKYRGEFEERLKAVLKEVTASQGKIILFIDEIHTVVGAGATGGSMDASNLLKPMLARGELHCIGATTLDEHRRHIEKDAALERRFQQVLVNQPTVEDCISILRGLKERYEVHHGVRIADGALVAAAVLSSRYIADRFLPDKAIDLVDESAARLKMEITSKPEEIDEIDRKILQLEMEKLSLRRESDNASKDRLERLDYELGDLNQQQMFLKSQWQKEKQAIEELSSIKEEIEQVQLQIDQAKRSYDLNRAAELEYGTLVALQKKLREKEGLLVEDTDKTNKLLLREEVTEDDIAEVISKWTGIPISKLVQSEMERLLQLEVNLHSRIIGQDQAVRSVADAILRSRSGLADPNRPIASFLFLGPTGVGKTELSKALAAQLFDSDQAIIRIDMSEYMEKHTVSRLIGAPPGYVGYEAGGQLTEAIRRRPYAVILFDEVEKAHPDVFNVMLQILDEGRVTDSQGRTVDFTNSVLILTSNISSQSILDLAGDENRHLEMENLVNDALRVYFRPEFLNRLDETIVFHSLRENELRQIVGLQIKRLNKRLEDRKLQLNLSDGALDWIVDIGYDPVYGARPLKRVIQKELETPIAKAVLAGKVATGDSIYIKIND

SEQ ID NO: 16027 - protein, 590 aa, Paulinella chromatophora
MDSLHRHSVKHIFGYPGGAILPIYDALHKAESRGWLRHILVRHEQGGAHAADAYARATGRVGVCFGTSGPGATNLVTGIATAQMDSVPMLVITGQVPRFAIGTDAFQETDIIGITLPIVKHSWVVRDPAEIGRIVAEAFLIAASGRPGPVLIDVPKDVGQEEFDYSPVNPSSVIPVGFTYPLSPDPKAIEKAINLIKEARRPLLYVGGGVITGGAHVSIKQLAEQYQIPVTTTLMGKGAFDERHPLSVGMLGMHGTAYANFAVTECDLLIAAGARFDDRVTGKLDTFAPRARIIHLEIDPAELGKNRLPDVAVLGDVAESLNLMVQAKGPTALETNTHLWLERIQEWKTRYPLVIPSPNGVIYPQEVLLALRDLAPEAHITTDVGQHQMWAAQYLRNGPRQWISSAGLGTMGFGMPAALGVQTALLDAQVICITGDASILMNIQELGTLAQYQLPVKIIIVNNHWQGMVRQWQESFYSERYSASDMLDGMPDFVALAGAFGVHGIHISNRTQLRNGLQRALEHSGPVVVDVHVRRGENCYPMVPPGKSNAQMVGLPNDSELSPDSKRKCSGCGSTMASDHVFCYNCGGKL

SEQ ID NO: 16028 - protein, 154 aa, Lupinus luteus
MGVLTDVQVALVKSSFEEFNANIPKNTHRFFTLVLEIAPGAKDLFSFLKGSSEVPQNNPDLQAHAGKVFKLTYEAAIQLQVNGAVASDATLKSLGSVHVSKGVVDAHFPVVKEAILKTIKGVVGDKWSEELNTAWTIAYDELAIIIKKEMKDAA

SEQ ID NO: 16029 - protein, 1512 aa, Rhodobacter sphaeroides
MTIYDEAWVKAEEAKGAWLDANGLYKAEDEHASCGVGLVVSISGTPSRKVVESGIAALKAVWHRGAVDADGKTGDGAGIHVQIPVKFFYDQIRRTGHEPTCTKLVAVGQVFLPRTDLSGQERCRTIVESEVLRMGHYIYGWRHVPVDTSVLGEKANATRPEIEQILIRCEKDIDDEQFERELYIIRRRIEKAAQAGSIQGLYLCSLSCRSIIYKGMMLAEQVATFYPDLQDERFESSFAIYHQRYSTNTFPQWWLAQPFRMLAHNGEINTLKGNINWMKSHEIRMASSAFGDAAEDIKPIVPAGSSDSGALDAVFEVMVRSGRSAPMVKTMMVPEAWSKTTTDMPKAWADMYAYCNAVMEPWDGPAALAMTDGRWVCGGLDRNGLRPMRYVVTGDGMLIAGSEAGMVPVDEMNVREKGALGPGQLIAVDMAEGKLYHDAELKDTLAASQPFGDWIEKVVDLNAILADVPEQRMFAPAELRKRQIAAGFSVEEIEQVLVPMAEDGKEMIASMGDDTPPAVLSSVYRPLSHFFRQNFSQVTNPPIDSLRESRVMSLKTRFGNLKNVLDEHSSQTEILILESPFVANSEFETMLSQFGTNVATIDCTFPADHHHDALRHGLERIRAEAEDAVRSGAAHIVLTDQNQGPGAVPMPMILATSAVHSWLTRKGLRTFTSINVRSAECIDPHYFAVLIGCGATTVNAYLAQDTIADRIERGLLEGSLNDAMRRYRDAINAGLLKIMSKMGISVISSYRGGLNFEAVGLSRAMVAEYFPGMHSRISGIGTSGIQHKLEQIHAKGWLGGSDVLPIGGFYKARRSGEKHAWEASTMHMLQQACDRASYDIWKQFSATLRANPPIHLRDLLDIKTLGRPVPIEEVESITSIRKRFVTPGMSLGALSPEAHKTLNIAMNRIGAKSDSGEGGEDPAHFVPEPNGDNPSAKIKQVASGRFGVTAEYLNACEELEIKVAQGAKPGEGGQLPGMKVTELIARLRHSTPGVTLISPPPHHDIYSIEDLAQLIYDLKQINPRAKVTVKLVAASGVGTIAAGVAKAKADVILISGHNGGTGASPGTSIKYAGLPWEMGLTEAHQVLAMNNLRDRVTLRTDGGLRTGRDIVMAAMMGAEEYGIGTAALIAMGCIMVRQCQSNTCPVGVCTQDKKLREKFTGSADKVVNLITFYAQEVREILASIGARSMDEIIGRADLLTQVSRGAAHLDDLDLNPLLITVDGSNRITYDRSKPRNAVPDTLDAEIVKDGARFFEDGEKMQLSYAVRNTHRTIGTRASSHIVRKYGMRNNLQPDHLTVKLTGSCGQSLGAFAAKGLKIEVAGDANDYVAKGLSGGTIVVHPQMESPLVAAENTIIGNTVLYGATDGFLFAAGRAGERFAVRNSGAKVVVEGCGSNGCEYMTGGVAVILGRIGANFGAGMTGGMAYLYDPSGVAEDFMNLETLVTCAIGHPHWEAQLKGLIERHVRETGSRHAARILNDWETERANFLQVCPKEMLVHLPFPLSDEPQAVPAE

SEQ ID NO: 16030 - protein, 533 aa, Saccharomyces cerevisiae
MSEITLGKYLFERLKQVNVNTIFGLPGDFNLSLLDKIYEVDGLRWAGNANELNAAYAADGYARIKGLSVLVTTFGVGELSALNGIAGSYAEHVGVLHVVGVPSISAQAKQLLLHHTLGNGDFTVFHRMSANISETTSMITDIATAPSEIDRLIRTTFITQRPSYLGLPANLVDLKVPGSLLEKPIDLSLKPNDPEAEKEVIDTVLELIQNSKNPVILSDACASRHNVKKETQKLIDLTQFPAFVTPLGKGSIDEQHPRYGGVYVGTLSKQDVKQAVESADLILSVGALLSDFNTGSFSYSYKTKNVVEFHSDYVKVKNATFLGVQMKFALQNLLKVIPDVVKGYKSVPVPTKTPANKGVPASTPLKQEWLWNELSKFLQEGDVIISETGTSAFGINQTIFPKDAYGISQVLWGSIGFTTGATLGAAFAAEEIDPNKRVILFIGDGSLQLTVQEISTMIRWGLKPYLFVLNNDGYTIEKLIHGPHAEYNEIQTWDHLALLPAFGAKKYENHKIATTGEWDALTTDSEFQKNSVI

SEQ ID NO: 16031 - protein, 643 aa, Cryptococcus curvatus
MSKAIGIDLGTTYSCVAVWQQDRVEIIANDQGNRTTPSYVAFTDSERLIGDAAKNQVAMNPYNTVFDAKRLIGRKFEDAEVQSDMKHWPFKVISRLASLHQVEYARGEEFSPEEISSMVLIKMKETAEAYLGGTVSKAVVTVPAYFNDSQRQATKDAGTIAGLEVLRIINEPTAAAIAYGLDKKSEGEKNVLIFDLGGGTFDVSLLTIEEGIFEVKATAGDTHLGGEDFDNRLVNHFVQEFKRKNKKDITSNARALRRLRTACERAKRTLSSAAQTSIEIDSLYDGIDFYTSITRARFEELCQDLFRSTMEPVEKVLRDSKIDKSSVNEIVLVGGSTRIPKIQKLVSDMFSGREPNRSINPDEAVAYGAAVQASILNGETSEATQDLLLLDVAPLSLGIETAGGIMTPLIKRNTTVPTKKSEIFSTYADNQPGVLIQVYEGERAKTKDCNLLGKFELSGIPPAPRGVPQIEVSFDVDANGILNVNASDKTTGKSNRITITNDKGRLSKEEIERMLAEAEKYAAEDKEVAERVQAKNALESYTYSLKSTLSENADKFSAEDKETLQKAVDDCIKFLDTADSASKDEIESHQKELEALSGPIMQRFYCSTGGAPGGAPGGAPGGFPGAGGPGASHEDGPSVEEVD

SEQ ID NO: 16032 - protein, 288 aa, Bacillus subtilis
MLFEKLKEAEGLLTSGTSGPSINRELLEHAPKLKVVSNQSVGYDNFDIEAMKERGVVGTHTPYTLDDTVADLAFSLILSSARRVAELDRFVRAGKWGTVEEEALFGIDVHHQTLGIIGMGRIGEQAARRAKFGFDMEVLYHNRHRKQETEDSIGVKYAELDTLLEQSDFILLITPLTDETYHMIGEREFKLMKNSAIFVNISRGKTVDEKALIRALQEGWIRGAGLDVYEKEPVTQDNPLLQLDNVTLLPHIGSATAKVRFNMCKQAAENMLAAIQGQTPKNLTREFQ

SEQ ID NO: 16033 - protein, 243 aa, Zea mays
MGRGRVELKRIENKINRQVTFAKRRNGLLKKAYELSVLCDAEVALIIFSNRGKLYEFCSGQSITKTLERYEKNSYGGPDTAVQNKENELVQSSRNEYLKLKARVDNLQRTQRNLLGEDLGPLGVKELEQLEKQLDSSLRHIRSTRTQHMLDQLTDLQRREQMLCEANKCLRRKLEETSNQVHGQVWEHGANLLGYERHSPQQQAPSHVGNGLFFHPLEAAAEPTLQIGFAPEHMNNFMPTWLP

SEQ ID NO: 16034 - protein, 363 aa, Zea mays
MALLSDLINLDLSGRTGKIIAEYIWVGGSGMDVRSKARTLSGPVDDPSKLPKWNFDGSSTGQAPGDDSEVILWDPFRKGQNILVMCDCYEPNGEPIPSNKRHGAAKIFSHPDVKAEEPWFGIEQEYTLLQKDTKWPLGWPLGGYPGPQGPYYCAVGADKSYGRDIVDAHYKACLYAGIDISGINGEVMPGQWEFQVGPAVGVSAGDQLWVARYILERITEIAGVVVSFDPKPIPGDWNGAGAHTNYSTKSMRSDGGYEVIKKAIGKLGLRHREHIAAYGDGNERRLTGRHETADINTFVWGVANRGASVRVGRDTEKEGKGYFEDRRPASNMDPYVVTSLIAETTMLWEPSHSNGDGKGAAAP

SEQ ID NO: 16035 - protein, 448 aa, Zea mays
MPFRSIVRDVRDGFGSLSRRGFEVRFLSHRRGKSHGAVHELHDPVLVVQSSCWASLPPELLRDVIERLETSEDTWPSRKHVVACAAVCRTWREMCREIVKSPEFSGKITFPVSLKQPGPRDGTIQCFIKRDTSTQIYSLYLSFSSAVPVENGKFLLSAKRNCRATYTEYIISINSGDTSRCTSNNTYIGKLRSNFLGTKFVIYDTHPPYNGTSQTVAGKTSQRFYSKKGSTKVSCRWYSIAQISYELNVLGTRGPRRMNCVMHSIPASCLEAGGSVPCQPDSIAAHSVGGSFSSVSLSKSSTMDHSMHFTSSRLSDAITGDGIVNRGQALNDADDEECKDMPLILRNKAPRWHEQLQCWCLNFRGRVTVASVKNFQLVAATQPAAGALTPSQAAPQPAPPPPPDQEKVILQFGKVGKDIFTMDYCYPLSAFQAFAICLSSFDTKLACE

SEQ ID NO: 16036 - protein, 260 aa, Zea mays
MAAASTSLPLGFSSHHRPTPRIRPQPQSQSQPLKAKPLNPLRFSLALTPATAKPRLAAMPDDVAVANFVEKDWSFLESAGANLQRALASGALSPASRVLALTPTASFVRSLLASSPCELLVAAHESMYVLAGVKEAHDEVRCFHLEGGGGGRGGGVVEAVPERFDDFDVVFVCYFPGMGVSAGALLKSLAKRCSKGARVVMFLDQGRQNFEQQRREHPDVVTSDLPSIAFLEKAASGNKYEITEFVDEPSFYLAVLQFQG

SEQ ID NO: 16037 - protein, 565 aa, Zea mays
MAAPALRITARLGLALDGATAARRREASAPVAVPAAPWLKKAAVRCQRAVGAAVAEKKDAPVSVAQDRSGDGGAAPELTVVMKFGGSSVASAERMREVADLILSFPEEHPVVVLSAMGKTTNKLLMAGEKAVGCGATNVSELDELSFVKELHLGTLDQLGLDRSIVCGLLDELEQLLKGIAMMKELTLRTRDYLVSFGECMSTRIFAALLNKIGVKARQYDAFDLGFITTDDFTNADILEATYPAVARRLHVEWINDPAIPIVTGFLGKGWRSGAITTLGRGGSDLTATTIGKALGLREIQVWKDVDGVLTCDPNIHPKAKPVPYLTFDEAAELAYFGAQVLHPQSMRPAREGDVPVRVKNSYNRRAPGTLITKARDMSKTVLTSIVLKSNITMLDIVSTRMLGQYGFLAKVFSIFEDLGISVDCVATSEVSISLTLDPSKLWSCELVQHKNELDDVIEELEKIAVVHLLQNRSIISLIGNVQRSSLILEKAFNVLRRNGVNVQMISQGASKVNISLVVHDSEAKQCVQALHSAFFENGFLLEADELDVLHDGFTSHSNGTIHSH

SEQ ID NO: 16038 - protein, 466 aa, Zea mays
MLLAAVTCRAARVKEPAPSAGASPPPPPQALTKEAHKYFDHAVVTVRAGDGGHGAVLAMPPAPSADAAKPRGRFNRGEKKSKKVSYKRNYDGSVALPTGGHGGDVVVYADEAEETLLRFHEKARYCAKRGGNVGAAGGTLSSRMHSGFAGETLRIPVPVGTVVKRKKGAVLADLAHHCDEVLVARGGQGGISLIDVPEYKRRKAMALSPNIMRDTSDKVLTHGQPGEEVSLELILRVVADVGLVGLPNAGKSTLLSAITLARPDIADYPFTTLMPNLGRLGGDPALGALQFSSEATLADLPGLIEGAHLGKGLGRNFLRHLRRTRVIVHVVDAAADDPVNDYKIVREELRMYNPQYLERPYVVVLNKIDLPKAQDRLSALVLEISSIGCEEGHEQSGSKDNLNGRVSDHQVLSEAKAEGVEKELGDYPRPEAVVAASVLRHIGIDEMLKEIRAALRKCFDHKLPEH

SEQ ID NO: 16039 - protein, 563 aa, Zea mays
MAKALLGGLSAILVVAVVVGVVATVTRSGKKAGDNFTVPGEASLATSGKSVKSLCAPTLYKESCEKTLSQATNGTENPKEVFHSVAKVALESVQTAVEQSKSIGEAKASDSMTESAREDCKKLLEDAADDLRGMLEMAGGDIKVLFSRSDDLETWLTGVMTFMDTCVDGFVDEKLKADMHSVLRNATELSSNALAITNSLGGILKKMDLGMFSKDSRRRLLSSEQDEKGWPVWMRSPERKLLASGNQPKPNAIVAKDGSGQFKSIQQAVDAVPKGHQGRYVIYVKAGLYDEIVMVPKDKVNIFMYGDGPKQSRVTGRKSFADGITTMKTATFSVEASGFICKNMGFHNTAGAERHQAVALRVQGDLAAFYNCRFDAFQDTLYVHARRQFFRNCVVSGTIDFIFGNSAAVFQNCLIITRRPMDNQQNSVTAHGRTDPNMKSGLVIQNCRLVPDQKLFPDRFKIPSYLGRPWKEFSRLVIMESTIADFVKPEGYMPWNGDFALKTLYYAEYNNRGPGAGTSKRVNWPGFHVIGRKEAEPFTAGPFIDGAMWLKYTGAPHILGFKF

SEQ ID NO: 16040 - protein, 530 aa, Zea mays
MKKLQGLLELRTVTNEMVRLIETATAPVLAVDIAGNINGWNKKAAELTGLPVMEAIGRPLIDLVVADSVEVVKQILDSALQGIEEQNLEIKLKTFHEQECCGPVILMINSCCSRDLSEKVIGVCFVAQDLTRQKMIMDKYTRIQGDYVAIIKNPSELIPPIFMINDLGSCLEWNKAMQKITGMKREDAINKLLIGEVFTLHDYGCRVKDHATLTKLSILMNAVISGQDPEKLLFGFFGTGGKYIESLLTVNKRTNAEGKITGALCFLHVASPELQHALEVQKMSEQAATNSFKELTYIRQELRNPLNGMQFTYNLLKPSELTEDQRQLVSSNVLCQDQLKKILHDTDLESIEQCYMETNTVEFNLEEALNTVLMQGIPLGKEKRISIERDWPVEVSHMYIYGDNIRLQQVLADYLACALQFTQPAEGHIVLQVIPKKENIGSGMQIAHLEFRIVHPAPGVPEALIQEMFQHNPGVSREGLGLYISQKLVKTMSGTLQYLREADTSSFIILIEFPVAQLSSKRSKPSPSKF

SEQ ID NO: 16041 - protein, 480 aa, Zea mays
MCGILAVLGCSDCSQARRARILACSRRLKHRGPDWSGLYQHEGNFLAQQRLAIVSPLSGDQPLFNEDRTVVVVANGEIYNHKNVRKQFTGAHSFSTGSDCEVIIPLYEKYGENFVDMLDGVFAFVLYDTRDRTYVAARDAIGVNPLYIGWGSDGSVWMSSEMKALNEDCVRFEIFPPGHLYSSAAGGFRRWYTPHWFQEQVPRTPYQPLVLREAFEKAVIKRLMTDVPFGVLLSGGLDSSLVASVTKRHLVKTDAAGKFGTELHSFVVGLEGSPDLKAAREVADYLGTTHHEFHFTVQDGIDAIEEVIYHDETYDVTTIRASTPMFLMARKIKSLGVKMVLSGEGSDELLGGYLYFHFAPNREELHRETCRKVKALHQYDCLRANKATSAWGLEVRVPFLDKEFVDVAMGMDPEWKMYDKNLGRIEKWVLRKAFDDEEHPYLPEHILYRQKEQFSDGVGYNWIDGLKAFTEQQVDGRRRS

SEQ ID NO: 16042 - protein, 591 aa, Zea mays
MCGILAVLGVAEVSLAKRSRIIELSRRLRHRGPDWSGLHCHEDCYLAHQRLAIIDPTSGDQPLYNEDKTVVVTVNGEIYNHEELKAKLKTHEFQTGSDCEVIAHLYEEYGEEFVDMLDGMFSFVLLDTRDKSFIAARDAIGICPLYMGWGLDGSVWFSSEMKALSDDCERFITFPPGHLYSSKTGGLRRWYNPPWFSETVPSTPYNALFLREMFEKAVIKRLMTDVPFGVLLSGGLDSSLVASVASRHLNETKVDRQWGNKLHTFCIGLKGSPDLKAAREVADYLSTVHHEFHFTVQEGIDALEEVIYHIETYDVTTIRASTPMFLMSRKIKSLGVKMVISGEGSDEIFGGYLYFHKAPNKKEFHEETCRKIKALHLYDCLRANKATSAWGVEARVPFLDKSFISVAMDIDPEWKMIKRDLGRIEKWVIRNAFDDDERPYLPKHILYRQKEQFSDGVGYSWIDGLKDHASQHVSDSMMMNAGFVYPENTPTTKEGYYYRMIFEKFFPKPAARSTVPGGPSVACSTAKAVEWDASWSKNLDPSGRAALGVHDAAYEDTAGKTPASADPVSDKGLRPAIGESLGTPVASATAV

SEQ ID NO: 16043 - protein, 323 aa, Zea mays
MRNDTRLRIFSGTANPSLSQEIASYLGLELGKITIKRFADGEIYVQLQESVRGCDVFLVQPSCPPANENLMELLIMIDACRRASAKNITAVIPYFGYARADRKSQGRESIAAKLVANMITEAGANRVLVCDLHSSQAMGYFDIPVDHVYGQPVILDYLASKTICSDDLVVVSPDVGGVARARAFAKKLSDAPLAIVDKRRQGHNVAEVMNLIGDVRGKVAVMMDDMIDTAGTISKGAELLHQEGAREVYACCTHGVFSPPAIERLSSGLFQEVIITNTIPLKEEKSFPQLTILSVANLLGETIWRVHDDCSVGHEPYSSLDID

SEQ ID NO: 16044 - protein, 250 aa, Zea mays
MASRRCLLRFLSIRLVPQRSQPLAPISTATRTLTSLSEALGSPAPRALASPRLYYPSRCHFATRSSGDEDDGEDEEEHYDDEGSDGEWGDDEEVVAAKKPSGKTEEEKVAEAAEIGYKVLGPLGADDKPFKPYEPVFAVVQIGSHQFKVSNGDSIFTERLKFCDVNDKLVLNRVLMLGSQAQTVIGRPILPDAAVHAVVEEHALDAKVIIFKKKRRKNYRRTKGHRQELTKLRITNIEGIDKPEAAAVAT

SEQ ID NO: 16045 - protein, 349 aa, Zea mays
MPMTPLECDMAPAASRNKHLSRSWPLPRCGLLVLVLALAATAAVGSAQLSSEDYYDASCPAALLTIRTAVSTAVLLEPRMGASLLRLHFHDCFVQGCDASVLLDDTASFTGEKGAGPNAGSLRGFDVIDNIKMLLELLCPQTVSCADILAIAARDSVAQLGGPSWAVPLGRRDATTASASLANSDLPGPTSSLNGLLNAFSNKGLSSTDMVALSGAYTVGRAQCKNCRARIYNDTDIDASFAASLRASCPAQAGAGDGALEPLDGSTPDAFDNAYFGDLLSQRGLLHSDQALFGGGGGGGGATDGLVSAYASNAGQWGADFAAAMVKMGSISPLTGTDGEIRVNCRRVN

SEQ ID NO: 16046 - protein, 279 aa, Zea mays
MRPVFCGNLDYDVRISEVERLFGKYGRVERVDLKTGFAFVYMEDERDAEDAISRLDGIDFGRKGRRIRVEWTKEDRTVGRKSSSRRSPTNTKPTKTLFVINFDPINTRIRDLERHFDKYGRVANVRIKKNFAFIQFEIQEDATRALEGTNGSHFMDRVISVEYALRDDDEKGERGNGYSPDRRGRERSPGRRRSPSPYGRGRERGSPDYGRSKERGSPDYGRGGRSPDNGRGVSPAGGGRGDHARGGGRSPDYDRQRREASPPGYDRSPSRSPGREARE

SEQ ID NO: 16047 - protein, 484 aa, Zea mays
MADSRRSVVYDAEGGDDHERQGTAWTATSHIVAAVVGSGVLALAWTVAQLGWVVGPLVLVGFSCVTYYTSALLADCYRYPDPVHGAVNREYIDAVRCYLDRKNVVLCGCAQYVNLWGTLVGYTITASASMIAIKRVNCFHRDGYGAAGCNPSGSTYMVVFGLFQLLLSQLPSLHNIAWLSVVAVATSLGYSFISLGLCSAKWASHGGHVRGTLAGAAAVAGRADDDKQAAFNVLLALGNIAFSYTFADVLIEIQDTLRSPPAENRTMKRASAYGLAITTVFYLALGCTGYAAFGDHAPGNILTGFAFYEPFWLVDAANVCVVLHLVGAYQVFAQPIFARLESCVACRWPDAKLINATYYVRVPPCLLLLRTSSSSSPPPTLAVAPLKLVLRTIVIMFTTLVAMLVPFFNAVLGLIGALGFWPLSVYFPVSMHMARLNIRRGEIRWWMLQAMSFVCLLISVAASIGSVHDIVHNLKAAAPFNTAN

SEQ ID NO: 16048 - protein, 272 aa, Zea mays
MDPSAVSFDSGGTRRGGGAQMLLFGGGGSANSDGFFRGVPMAVLGMDDATRVGKRPFFTTHEELLEEEYYDEQAPEKKRRLTAEQVQLLERSFEEENKLEPERKTELARRLGMAPRQVAVWFQNRRARWKTKQLETDYDRLKAAYDALAADHQGLLADNDNLRAQVISLTEKLQGKETYPSATTAAQEVDQPDEHTAVSGTEELLAQQLKDNLHSSGDCTGHGTLSSEEDDGGVVSDEGCSFALPDAMFAAGFTHHGAEEVQLANWTSMFWN

SEQ ID NO: 16049 - protein, 386 aa, Zea mays
MAKPVSIQVWNPSGKYRVVSTKSMPGTRWIRLLTDNDCRLEICTEHKTILSVDDILALIGDRCDGVIGQLTEDWGDVLFSALKRAGGTVFSNMAVGYNNVDVEAANRNGIAIGNTPGVLTETTAELAASLSLAAARRIVEADQFMRAGLYDGWLPHLFVGNLLKGQTVGVIGAGRIGSAYARMMIEGFKMNLIYYDLYQATRLENFVTAYGQFLKANGEEPVTWKRAATMEDVLREADVISLHPVLDKTTYHLINPERLAIMKKEAVLVNASRGPVIDEAALVEHLKANPMFRVGLDVFEDEPYMKPGLADMKNAVVVPHIASASKWTREGMATLSALNVLGKIKGYPVWGNPNQVEPFLQENLTPPPACPSIVNAKQIGLPSAKL

SEQ ID NO: 16050 - protein, 451 aa, Zea mays
MALSRRLLPLFLRRGASIPTRALSTAVAPAAVASEEDEAAVTVKGVRISGRPLYMDMQATTPVDPRVLDAMLPFYLSRYGNPHSRTHLYGWESDAAVEDARARVASLVGADPREIFFTSGATECNNIAVKGVMRFYRERRRHVITTQTEHKCVLDSCRYLQQEGFEVTYLPVRKDGLVDLAQLEDAIRPDTGLVSVMAVNNEIGVVQPLEEIGRICKEKGVPFHTDAAQALGKIPIDVNRMGIGLMSLSGHKIYGPKGVGALYLRRRPRIRVEPQMNGGGQERGIRSGTVPTPLVVGFGAACEIAAQEMDYDHRRVSALQQRLLDGIRAQVDDVVINGSMEHRYPGNLNLSFAYVEGESLLMGLKEVAVSSGSACTSASLEPSYVLRALGVEEDMAHTSIRFGMGRFTTDEEVDRAIELTVHQVKKLRDMSPLYEMAKAGIDLKSIEWSQH

SEQ ID NO: 16051 - protein, 368 aa, Zea mays
MAAVTAAAVSLPSSSSSPAAAKAKASASASPSSPCGHLQFPRRHGGPRAVRLRVQVSTAETAEAEPVKKLEKVSKKQEEGLVTNKYKPKEPYVGRCLLNTRITGDQAPGETWHMVFSTEGEVPYREGQSIGVIADGEDKNGKPHKLRLYSIASSALGDFGDSKTVSLCVKRLVYTNDQGEVVKGVCSNFLCDLKPGAEVKITGPVGKEMLMPKDPNATIIMLATGTGIAPFRSFLWKMFFEEHEDYKYTGLAWLFLGVPTSDTLLYKEELEKMKEMAPDNFRLDFAVSREQTNAAGEKMYIQTRMAEYKEELWELLKKDNTYVYMCGLKGMEKGIDDIMLDLAAKDGINWLDYKKQLKKSEQWNVEVY

SEQ ID NO: 16052 - protein, 301 aa, Zea mays
MCLLREMEDHYVHPKSKSNHGSLSGNGYEMKNPGHEVCDRDSSSESDRSHPEASAVSESSLDEHTSTQSDNDEDHGKDNQDTLKPVLSLGKEGSAFLAPKIDYNPSFAYIPYTADAYYGGVGVLTGYAPHTIVHPQQNDTTNSPVMLPAEPAEEEPIYVNAKQYHAILRRRQTRAKLEAQNKMVKGRKPYLHESRHRHAMKRARGSGGRFLNTKQQPQEQNQQYQASSGSMCSKTIGNSVISQSGPICTPSSDAAGASAASQDRGCLPSVGFRPTANFSEQGGGGSKLVVNGMQQRVSTIR

SEQ ID NO: 16053 - protein, 176 aa, Zea mays
MQGVGHNDDKVLVLAATNTPYALDQAVRRRFDKRIYIPLPDLKARQHMFKVHLGDTPHSLTESDFESLARRTDGFSGSDVAVCVKDVLFEPVRKTQDAMFFFKADGDMWMPCGPKQPGAVQTTMQELASKGLAAKILPPPISRADFEKVLSRQRPTVSKKDLEVHERFTKEFGEEG

SEQ ID NO: 16054 - protein, 285 aa, Zea mays
MPTSEVWSLSDFEISKYIAEGRFGKVYLAREKQSGYVVALKVIFKAKLKKHRFHAHLRREIEIQQSLDHPNVLRLFTWFHDEERVVLVLEYAARGELYKVLRAAGRFTERTSATYVASLAGALAYCHKKQVIHRDIKPENLLIDIEGRLKIADFGWAARSNAKRHTLCGTIDYLAPEMVEKRAHDHAVDNWTLGILCYEFLYGSPPFEADEQDDTLRRIVRVDLAFPSSPCVSSEAKDLISKLLVKDSSKRLCLEDIMKHPWIKKNADPSGSCIKQKDVTRSKLL

SEQ ID NO: 16055 - protein, 163 aa, Zea mays
MPGQWEFQVGPSVGISSGDQVWVARYILERITEIAGVVVTFDPKPIPGDWNGAGAHTNYSTESMRKEGGYEVIKAAIEKLKLRHKEHIAAYGEGNERRLTGRHETADINTFSWGVANRGASVRVGRETEQNGKGYFEDRRPASNMDPYVVTSMIAETTIVWKP

SEQ ID NO: 16056 - protein, 361 aa, Zea mays
MYCSSFYSAIKRVNCFHRDGYGAAGCNPSGSTYMVVFGLFQLLLSQLPSLHNIAWLSVVAVATSLGYSFISLGLCSAKWASHGGHVRGTLAGAAAVAGRADDDKQAAFNVLLALGNIAFSYTFADVLIEIQDTLRSPPAENRTMKRASAYGLAITTVFYLALGCTGYAAFGDHAPGNILTGFAFYEPFWLVDAANVCVVLHLVGAYQVFAQPIFARLESCVACRWPDAKLINATYYVRVPPCLLLLRTSSSSSPPPTLAVAPLKLVLRTIVIMFTTLVAMLVPFFNAVLGLIGALGFWPLSVYFPVSMHMARLNIRRGEIRWWMLQAMSFVCLLISVAASIGSVHDIVHNLKAAAPFNTAN

SEQ ID NO: 16057 - protein, 401 aa, Zea mays
MASNGIAPRDVCVVGVARTPLGGFLGALSSLPATKLGSIAIEAALKRANVDPALVQEVFFGNVLSANLGQAPARQAALGAGIPNTVVCTTVNKVCASGMKATMFAAQSIQLGINDIVVAGGMESMSNAPKYIAEARKGSRFGHDTLVDAMLKDGLWDVYNDCAMGMCAELCADNHALTREDQDAFAIQSNQRGIAARDSGAFAWEIVPIEVPVGRGKPPVLIEKDESLDKFDPAKLKKLRPSFKENGGTVTAGNASSISDGAAALVLVSGQKAQELGLQVLARIRGYADAAQAPELFTTTPALAIPKAISNAGLESSHVDFFEINEAFSAVALANQKLLGIPSEKINVHGGAVSLGHPLGCSGARILVTLLGVLREKGGKIGVAGVCNGGGGASALVLELA

SEQ ID NO: 16058 - protein, 455 aa, Zea mays
MAKALLSSSLLPALPGAAGGSRSAARPMLLPPLRLRRGRRGASACEVRAGLHGLDSVGGPHLQAALERAEAALYTLADAAVAAADTAAGAGADAGQAAAVQKNSGWFGFISEALEVVLKVLKDGLSAVHVPYSYGFAIILLTIIVKAATLPLTKKQVESTLAMQNLQPQIKAIQQRYAGNQERIQLETARLYKQAGVNPLAGCFPTLATIPVWIGLYQALSNVANEGLLTEGFFWIPSLGGPTTIAARQSGSGITWLFPFVDGHPPLGWHDTICYLVLPVLLVASQYVSMEIMKPPQSDDPSQKNTMLILKFLPFMIGWFSLSVPSGLSIYWFTNNVLSTAQQVWLRKMGGAKPVVTEGGSGIITAGRAKRSNAQPAGERFRQLKEEENRRKFSKALAAGDSDASSSTYDMDDEESDETIEEGGPVEEASTSSDKKLPNYSGKKGKRSKRKRMVQ

SEQ ID NO: 16059 - protein, 380 aa, Zea mays
MAQAVVPAMQCRVGVKAAAGRVWSAGRTRTGRGGASPGFKVMAVSTGSTGVVPRLEQLLNMDTTPYTDKVIAEYIWVGGSGIDIRSKSRTISKPVEDPSELPKWNYDGSSTGQAPGEDSEVILYPQAIFKDPFRGGNNVLVICDTYTPQGEPLPTNKRHRAAQIFSDPKVAEQVPWFGIEQEYTLLQKDVNWPLGWPVGGFPGPQGPYYCAVGADKSFGRDISDAHYKACLYAGINISGTNGEVMPGQWEYQVGPSVGIEAGDHIWISRYILERITEQAGVVLTLDPKPIQGDWNGAGCHTNYSTKTMREDGGFEEIKRAILNLSLRHDLHISAYGEGNERRLTGKHETASIGTFSWGVANRGCSIRVGRDTEAKGKGRQ

SEQ ID NO: 16060 - protein, 624 aa, Zea mays
MAASRALLPSPQVSPASARVRLAAAVPSSLTLAARGGAGAGARLRVRCAILSSPAPVAPTESRPVRRISPSAPDGALRPKPAVLVAEKLSEAGLAVLRQFADVECAYGMSPAELLAKAAQFDALIVRSGTKVTREVLEAGQGRLRVVGRAGVGIDNVDLQAATEVGCLVVNAPTANTIAAAEHGIALLASMARNVSQADAALKAGKWQRNKYVGVSLVGKTLAVMGFGKVGSEVARRAKGLGMHVIAHDPYAPADRARALGVELVSFDEAIARADFISLHMPLIPTTSKIFNDESFAKMKTGVRIINVARGGVIDEDALVRALDSGKVAQAALDVFTVEPPPKDSKLVLHENVTVTPHLGASTVEAQEGVAIEIAEAVVGALRGELAATAVNAPMVPAEILSELAPYVSLAEKLGRLAVQLVAGESGIKGVKVVYTTARGPDDLDTRLLRAMVTKGLVEPVSSTFVNLVNADYTAKQRGLRLTEERVAHDSPAAEAPLESVQVRLSHVQSKFAGAISDGGDDIVLEGRVKYGVPHLTLVGPYEVDVSLEGNLILCRQIDQPGMIGKVGNILGDTNVNINFMSVGRTFRGKQAIMAIGVDEEPDKDTLEKIGAIPAIEEFVFLEL

SEQ ID NO: 16061 - protein, 663 aa, Zea mays
MDRVRGSAFLLGVLLAGSLFAFSVAKEETKKLGTVIGIDLGTTYSCVGVYKNGHVEIIANDQGNRITPSWVAFTDSERLIGEAAKNQAAVNPERTIFDVKRLIGRKFQDKEVQRDMKLVPYKIINKDGKPYIQVKIKDGENKVFSPEEISAMILGKMKDTAEAYLGKKINDAVVTVPAYFNDAQRQATKDAGVIAGLNVARIINEPTAAAIAYGLDKKGGEKNILVFDLGGGTFDVSILTIDNGVFEVLATNGDTHLGGEDFDQRIMEYFIKLIKKKYSKDIGKDNRALGKLRREAERAKRALSNQHQVRVEIESLFDGTDFSEPLTRARFEELNNDLFRKTMGPVKKAMEDAGLEKSQIHEIVLVGGSTRIPKVQQLLKDYFNGKEPNKGVNPDEAVAFGAAVQGSILSGEGGDETKDILLLDVAPLTLGIETVGGVMTKLIPRNTVIPTKKSQVFTTYQDQQTTVSIQVFEGERSMTKDCRLLGKFDLNGIPSAPRGTPQIEVTFEVDANGILNVKAEDKGTGKSEKITITNEKGRLSQEEIDRMVREAEEFAEEDKKVKERIDARNQLETYVYNMKNTVGDKDKLADKLEAEEKEKVEEALKEALEWLDDNQSAEKEDYEEKLKEVEAVCNPIVSAVYQRSGGAPGGDADGGVDDDHDEL

SEQ ID NO: 16062 - protein, 525 aa, Zea mays
MGDPCVAGTFRWDGLTCSYAISDPPKITALNMSFSGLTGDISSAFANLKAVQSLDLSHNNLTGSIPSSLSQLPSLTTLDLTGNQLSGPIPSSLLKRIQDGSLNLIYADNPDLCTNAGDSCQTAPQGKSKLVIYYVAVPMALIVVALAVLLCCLLRRRKTRGLADVSVKPRDKTPTSLASMAADEHRLSSLRLENRRFTYEDLEMITDSFKRVIGRGGFGYVYEGFLEDGTQVAVKMRSQSSNQGAKEFLTEAQILTRIHHKNLVSMVGYCKDGVYMALVYEYMSEGSLQEHIAGKRLTWGQRLRIALESAQGLEYLHRGCNPPLIHRDVKTSNILLNAKLEAKVADFGMSKALDRDTYASTNTLVGTPGYVDPEYLETMQPSTKSDVYSFGVVLLELVTGRPPILHSPQPTSVIQWARQHLARGDIEVVVDASMGGNHDVNSVWKAAEVALQCTEQASAQRPTMGDVVAQLLECLDLEKGRSANESFCDGDDSGSATASLSHSSAFVTGRIFGTVSMVETGPATR

SEQ ID NO: 16063 - protein, 304 aa, Zea mays
MRSLLTRLFTSTHIVMASSSFSSSPSRRLVHLTRHLVSSSSGELSSVGAPAAAASDADPVKSPRSTASRVHAAVLVCLFEDPSSGPRVLLTKRASSLSSHSGEVSLPGGKVDDGDADPKATALREAKEEIGLDPALVSVVTVLEPFLSKNGLTVVPVIGMVPDKALYKPVLNKAEVEDIFDAPLEMFLKFSTCIASTGRPPEDKTDELDGHRYPRPVFRLRGRWQEVRDLGLDCAHPDTRSGSHFREETIIRRASQTQICRCTCCWHWQVESLMEHKLDVRGLFGFGTWCMNLVIVELYMFLTM

SEQ ID NO: 16064 - protein, 113 aa, Zea mays
MALAKAKEIVASAPLVVFSKTSCPFCVRVKQLFEKLGASYKAIELDKESDGAELQNALKEWTGQRTVPNVFINGKHIGGCDDTMALNNDGKLVPLLTEAGAIAGSASKTTITA

SEQ ID NO: 16065 - protein, 589 aa, Zea mays
MALATPLRLRRHLLLPAGPSPATHRALSLRRGRLLPASLSAAAGGRPTVLVTETLGSAGLDLLRAFANVDCSYELTAEELRAKVSLVDALVVRSGTQVTREVFEAARGRLRVVGRAGVGIDNVDLQAATEAGCLVVNAPTANTVAAAEHAVALLAAVARNIAPADASLKAGKWQRGKYVGVTLVGKTLAVMGFGKVGPEVARRARGLGMDVVAHDPYAAADRARAVGVDLVSFDEAISTADFISLHMPLTPSTAKLFNDETFARMRKGVRIINVSRGGVVDEEALLRALDNGTVSQAALDVFTEEPPPRDSKLVQHENVTVTPHLGASTIEAQEGVALEIAEAVIGALRGDLAATAVNAPMVPAEVLSELSPYVVLAEKLGRLVVQLVAVGSGIKGVRVVYSSARDPDDLDTRLLRAMVTKGIVEPISSAFVNIVNADYVAKQRGLRIVEERVFLDGPPEVPLDSIQVHLANVESKFAGALSDAGHICVEGKVRDGGASHLTLVGSLSVDVSLEGNLILCGQLDHPGIIGRVGSILGKMNVNVSFMSVSRTAPGKQAIMAIGVDEEPGKEALKLIGDTPSVEEFVFLKL

SEQ ID NO: 16066 - protein, 342 aa, Zea mays
MERYEVIRDIGSGNFGVTKLVRDVRTKELFAVKFIERGQKIDEHVQREIMNHRSLKHPNIIRFKEVVLTPTHLAIVMEYAAGGELFERICSAGRFSEDEARFFFQQLISGVSYCHSMQVCHRDLKLENTLLDGSVAPRLKICDFGYSKSSVLHSQPKSTVGTPAYIAPEVLSRKEYDGKVADVWSCGVTLYVMLVGAYPFEDPDDPKNFRKTITRILSVQYSIPDYVRVTMECGHLLSRIFVGNPEQRITIPEIKKHPWFLKNLPIEMTDEYQQSMQLADMNTPGQSLEEVMAIIQEARKPGDAMNLAGQLPCLGSVDLDDIDFDDIDDIDTENSGDFVCAV

SEQ ID NO: 16067 - protein, 363 aa, Zea mays
MCGGAILANLREPAPRRLTERDIWQQKKKLKRGGGGGRRSFAAEDDEDFEADFEVFEADSSDSDLELREGTDDDVVEIKPFTAKRTFSSDGLSTMTSAVARSAKRKRKNLYRGIRQRPWGKWAAEIRDPQKGVRVWLGTFNSPEEAARAYDAEARRIRGKKAKVNFPDAPAVGQKHRSGSASAKASKSSFGQKPIVKVAMNNLANTNASFFQSASYPSNLFVQHGNMPFVPAMNSTASVDDLIMNLHSDQGSNSFGCSDLGWENDTKTPDITSIAPISTIAEGDESAFVDSNSNSSFVLPALENSAVDLTDGLTDLESYMRFLLDGGPSDSVDSLLNLDGSQDVGSDMDLWSFDDMPIVGDFF

SEQ ID NO: 16068 - protein, 228 aa, Saccharum officinarum
MVTVREEMRKGPWTKQEDMQLVCTVRLFGDRRWDFIAQVSGLNRTGKSCRLRWVNYLHPGLKHGRMSPQEERLIIELHARWGNRWSRIARRLPGRTDNEIKNYWRTHMRKKAQERKMSLSSPSSSSSSLTYQACLLDTVRVIGMGSGDTHNGSCVTSALENTQSAMDGYPMDQIWKEIEAPQAPSLLGIAEGKEKTCSSIPCHLPSPAMWDYKYPEVFWKMEDQEIMM

SEQ ID NO: 16069 - protein, 371 aa, Shewanella sp. PA-43
MIIGIPTEIKNHEYRVGMVPSSVRELTIKGHEVFVQSNAGMGIGFTNQDYLNVGAAILETAEEVFAQSDMIVKVKEPQAVERAMLREDQILFTYLHLAPDMPQTEDLLKSKAVCIAYETVTDDRGGLPLLAPMSEVAGRMSIQAGARALEKSLGGRGMLLGGVPGVEPAKVVIIGGGMVGTNAAQMAVGMGADVVVLDRSIDALRRLNVQFGSPVKAIYSTADAIERHVIEADLVIGGVLVPGAAAPKLVTRDMITRMKPGSAIVDVAIDQGGCVETSYATTHQDPTYIIDDVVHYCVANMPGAVARTSTFALNNATLPYIIKLANLGYKSALLQDKHLLNGLNAIHGKLVCKEVAEAFNLEYTEPKSLLD

SEQ ID NO: 16070 - protein, 139 aa, Populus tremula x Populus tremuloides
MATRIRLPSILATAVTLTVLAASLTWAAGSPEATFVKKTISSHQIVIFSKSYCPYCKKAKGVFKELNQTPHVVELDQREDGHDIQDAMSEIVGRRTVPQVFIDGKHIGGSDDTVEAYESGELAKLLGVASEQKDDFKLE

SEQ ID NO: 16071 - protein, 136 aa, Corynebacterium glutamicum ATCC 13032
MLRTILGSKIHRATVTQADLDYVGSVTIDADLVHAAGLIEGEKVAIVDITNGARLETYVIVGDAGTGNICINGAAAHLINPGDLVIIMSYLQATDAEAKAYEPKIVHVDADNRIVALGNDLAEALPGSGLLTSRSI

SEQ ID NO: 16072 - protein, 67 aa, Corynebacterium glutamicum ATCC 13032
MAQGTVKWFNGEKGFGFIAPNDGSADLFVHYSEIQGSGFRNLEENQPVEFEVGEGAKGPQAQQVRAL

SEQ ID NO: 16073 - protein, 1510 aa, Corynebacterium glutamicum ATCC 13032
MKPQGLYNPAHEHDACGVAFIADIHGRPSRSIVDRALEALRNIDHRGAAGAEKNTGDGAGILMQIPDGFYREVSGIELPEAGEYATGIAFLPRGRMAMMDAQKEIERIAKQEGADVLGWRMVPFDSRDLGSMAEEAMPSFAQIFLTVPGKSGEDLDRVMFFIRKRCERELGTTNGRDTVYFPSLSSRTIIYKGMLTTLQLEGFFEDLGDARLESAIAIVHSRFSTNTFPSWPLAHPYRFVAHNGEINTVRGNENWMRAREALIKNDKLGNLSSVLPICTPEGSDTARFDEALELLHLGGYSLPHAVAMMIPQAWEHNKTLSPELRDFYEYHSCLMEPWDGPAALAFTDGRFVGAVLDRNGLRPGRITITDSGLVVMASESGVLDLREESVVKRTRVQPGRMFLVDTAEGRIVEDEEIKQKLSEAQPYGEWIRDNFVHLDRLPQTRYNYMAHSRAVLRQRVFGITEEDVDLLLLPMARQGAEAIGSMGSDTPIAALSQRPRMLYDFFAQRFAQVTNPPLDSIREKPVTSMFTLLGAQSDVLNPGPDAARRIRLESPIIDNHELATLINANAHGEWDSFGAAVISGLYPVAHHGAGMKAAIARVRREVSEAIRNGKTLIVLSDRESDERMAPIPALLLTSAVHQYLVQQRTRTQCSLVVESGDAREVHHLAMLIGFGADAINPYMAFETIDELRMKGQLGDLSLDEASRNYIKAATTGVLKVMSKMGIATVSSYRGAQLADVTGLHQDLLDNYFGGIASPISGIGLDEVAADVEARHRSAFLPRPEEHAHRELDLGGEYKWRREGEYHLFNPETIFKLQHATRSGSYEIFKDYTRKVDDQSTRLGTIRGLFEFSTDRKPISVSEVEPVSEIVKRFSTGAMSYGSISAEAHEVLAIAMNRLGGMSNSGEGGEDARRFDVEPNGDWKRSAIKQVASGRFGVTSHYLNNCTDIQIKMAQGAKPGEGGQLPPNKVYPWVAEVRITTPGVGLISPPPHHDIYSIEDLAQLIHDLKNANPRARIHVKLVAEQGVGTVAAGVSKAHADVVLISGHDGGTGASPLTSLKHAGGPWELGLAETQQTLLLNGLRDRIRVQCDGQLKTGRDVVIAALLGAEEFGFATAPLVVEGCIMMRVCHLDTCPVGIATQNPDLRSKFTGKAEHVVNFFTFIAQEVREYLAQLGFRSIDEAVGQAQVLRKRSGIPADSRAAHLDLSPIFHRPETPHFPTQDVRCTKTQEHSLEKALDNAFIDKASDTITRAAAGVETSIVIDSSISNVNRSVGTMLGSAVSRVAGAQGLPDGTITLNLQGCAGNSFGAFIPRGITINLTGDANDFVGKGLSGGKIVIKPSAQAPKQLKNNPNIIAGNVLGYGATSGELFIRGQVGERFCVRNSGATAVVEGIGNHGCEYMTGGRVLVLGPVGENFGAGMSGGIAYLANSPDLNQKINGELVDVVPLSADDLTWADELIARHRELTGSETKLRAQDLVKIMPRDFQKVLNIIETAHAEGQDPAIKIMEAVS

SEQ ID NO: 16074 - protein, 421 aa, Corynebacterium glutamicum ATCC 13032
MALVVQKYGGSSLESAERIRNVAERIVATKKAGNDVVVVCSAMGDTTDELLELAAAVNPVPPAREMDMLLTAGERISNALVAMAIESLGAEAQSFTGSQAGVLTTERHGNARIVDVTPGRVREALDEGKICIVAGFQGVNKETRDVTTLGRGGSDTTAVALAAALNADVCEIYSDVDGVYTADPRIVPNAQKLEKLSFEEMLELAAVGSKILVLRSVEYARAFNVPLRVRSSYSNDPGTLIAGSMEDIPVEEAVLTGVATDKSEAKVTVLGISDKPGEAAKVFRALADAEINIDMVLQNVSSVEDGTTDITFTCPRSDGRRAMEILKKLQVQGNWTNVLYDDQVGKVSLVGAGMKSHPGVTAEFMEALRDVNVNIELISTSEIRISVLIREDDLDAAARALHEQFQLGGEDEAVVYAGTGR

SEQ ID NO: 16075 - protein, 227 aa, Corynebacterium glutamicum ATCC 13032
MEGVQEILSRAGIFQGVDPTAVNNLIQDMETVRFPRGATIFDEGEPGDRLYIITSGKVKLARHAPDGRENLLTIMGPSDMFGELSIFDPGPRTSSAVCVTEVHAATMNSDMLRNWVADHPAIAEQLLRVLARRLRRTNASLADLIFTDVPGRVAKTLLQLANRFGTQEAGALRVNHDLTQEEIAQLVGASRETVNKALATFAHRGWIRLEGKSVLIVDTEHLARRAR

SEQ ID NO: 16076 - protein, 247 aa, Corynebacterium glutamicum ATCC 13032
MRNYPDLPHDFPGQNTELTPAKAPVWMHRLLDRIHTGRMANPLDGAETLGDTDSEKRAAVLMLFSGSETSFDLPNDASVLLTHRTPTMRSHAGQIAFPGGRIDPTDTNAVDCAFREAWEETGLDRRTATPLAQLNEVHIRATGYPVYPILGHWHTPSPVAVASPHETDEVFDAPLYDLIDPKNRLMVGWREWHGPAFRINDYIIWGFTGGLLSAILDTAGWATEWDTDRIFDLENTLSTSRNNERMR

SEQ ID NO: 16077 - protein, 67 aa, Corynebacterium glutamicum ATCC 13032
MAQGTVKWFNPEKGFGFIAPSDGSADVFVHYSEIEGNGFRTLEENQLVEFEIGEGAKGLQAQAVRAI

SEQ ID NO: 16078 - protein, 453 aa, Corynebacterium glutamicum ATCC 13032
MSNRHLQLIAIGGAIGTGLFMGSGKTISVAGPSVILVYAIIGFMLFFVMRAMGELLLANLNYKSLRDAVSDILGPGAGFVTGWTYWFCWIATGMADIVAITGYTQYWWPEIPLWLPGVLTIALLFALNLAAVRLFGEMEFWFAIIKIVAIVSLIVVGLFMVVTAFESPNGTTAQFNNLIEHGGFFPNGITGFLAGFQIAIFAFVGIELAGTAAAETENPTKTLPRAINSIPIRIVVFYVLALAVIMMVTPWDQVRADNSPFVQMFALAGIPAAAGIINFVVITSAASSANSGIFSTSRMLYGLSLEGAAPKRWSRLSKNLVPARGLTFSVICLIPAVGLLYAGGTVIEAFTLITTVSSVLFMVVWSYILVAYIVYRRNSPELHKKSIFKMPGGVVMAVVVLVFFAAMLVVLSLEPDTRAALIATPVWFIILGIGWLSIGGAKGAKHRSQITSH

SEQ ID NO: 16079 - protein, 387 aa, Corynebacterium glutamicum ATCC 13032
MSNDFVVSRLRPFGETIFATMTQRAVEAGAINLGQGFPDEDGPRRMLEIASEQILGGNNQYSAGRGDASLRAAVARDHLERFDLEYNPDSEVLITVGATEAITATVLGLVEPGDEVIVLEPYYDAYAAAIALAGATRVAVPLQEVENSWDVDVDKLHAAVTKKTRMIIVNSPHNPTGSVFSKKALKQLAGVARAYDLLVLSDEVYEHLVFDDQKHVSVAKLPGMWDRTVTVSSAAKTFNVTGWKTGWALAPEPLLEAVLKAKQFMSYVGATPFQPAVAHAIEHEQKWVSKMSKGLELKRDILRTALDKAGLKTHDSMGTYFIVADIGDRDGAEFCFELIEKVGVAAIPVQAFVDHPKKWSSKVRFAFCKKEETLREAAERLKGIKKL

SEQ ID NO: 16080 - protein, 584 aa, Corynebacterium glutamicum ATCC 13032
MEDAQPEQITATEELAGLLENPTNLEGKLADAEEEIILEGEDTQASLNWSVIVPALVIVLATVVWGIGFKDSFTNFASSALSAVVDNLGWAFILFGTVFVFFIVVIAASKFGTIRLGRIDEAPEFRTVSWISMMFAAGMGIGLMFYGTTEPLTFYRNGVPGHDEHNVGVAMSTTMFHWTLHPWAIYAIVGLAIAYSTFRVGRKQLLSSAFVPLIGEKGAEGWLGKLIDILAIIATVFGTACSLGLGALQIGAGLSAANIIEDPSDWTIVGIVSVLTLAFIFSAISGVGKGIQYLSNANMVLAALLAIFVFVVGPTVSILNLLPGSIGNYLSNFFQMAGRTAMSADGTAGEWLGSWTIFYWAWWISWSPFVGMFLARISRGRSIREFILGVLLVPAGVSTVWFSIFGGTAIVFEQNGESIWGDGAAEEQLFGLLHALPGGQIMGIIAMILLGTFFITSADSASTVMGTMSQHGQLEANKWVTAAWGVATAAIGLTLLLSGGDNALSNLQNVTIVAATPFLFVVIGLMFALVKDLSNDVIYLEYREQQRFNARLARERRVHNEHRKRELAAKRRRERKASGAGKRR

SEQ ID NO: 16081 - protein, 571 aa, Corynebacterium glutamicum ATCC 13032; identical to SEQ ID NO: 319

SEQ ID NO: 16082 - protein, 325 aa, Corynebacterium glutamicum ATCC 13032
MTAHWKQNQKNLMLFSGRAHPELAEAVAKELDVNVTPMTARDFANGEIYVRFEESVRGSDCFVLQSHTQPLNKWLMEQLLMIDALKRGSAKRITAILPFYPYARQDKKHRGREPISARLIADLMLTAGADRIVSVDLHTDQIQGFFDGPVDHMHAMPILTDHIKENYNLDNICVVSPDAGRVKVAEKWANTLGDAPMAFVHKTRSTEVANQVVANRVVGDVDGKDCVLLDDMIDTGGTIAGAVGVLKKAGAKSVVIACTHGVFSDPARERLSACGAEEVITTDTLPQSTEGWSNLTVLSIAPLLARTINEIFENGSVTTLFEGEA

SEQ ID NO: 16083 - protein, 358 aa, Corynebacterium glutamicum ATCC 13032
MLYLDNAATTSVRNEALEAMWPYLTGAFGNPSSPHEVGRLASAGLEDARTRVARIIGGRPTQVTFTSGGSEANNLAIKGACLANPRGRHLITTPIEHDSVLETAAYLERFHDFEITYLSPDHTGLISPEGLRKAVRPDTTLISIGYANNEVGTIQPIAELAAVSSTPFHTDAVQAAHLTFDLGVDALSLSGHKFGAPKGIGVLWSKLPLEPVIHGGGQEKGRRSGTENVAGAIAFATALELARAESYPDLGEFIEEVLTIPGAHLTGHPRMRIDGHASFLFDSIGSETVLLELERQGIVCSPGSACGSGEVSHVLLALGLEEDQARTAVRCTFSTTHSREDALVAASALKSAVALIRG

SEQ ID NO: 16084 - protein, 1247 aa, Corynebacterium glutamicum ATCC 13032
MKTEQSQKAQLAPKKAPEKPQRIRQLISVAWQRPWLTSFTVISALAATLFELTLPLLTGGAIDIALGNTGDTLTTDLLDRFTPSGLSVLTSVIALIVLLALLRYASQFGRRYTAGKLSMGVQHDVRLKTMRSLQNLDGPGQDSIRTGQVVSRSISDINMVQSLVAMLPMLIGNVVKLVLTLVIMLAISPPLTIIAAVLVPLLLWAVAYSRKALFASTWSAQQKAADLTTHVEETVTGIRVVKAFAQEDRETDKLDLTARELFAQRMRTARLTAKFIPMVEQLPQLALVVNIVGGGYLAMTGHITVGTFVAFSSYLTSLSAVARSLSGMLMRVQLALSSVERIFEVIDLQPERTDPAHPLSLPDTPLGLSFNNVDFRGILNGFELGVQAGETVVLVGPPGSGKTMAVQLAGNFYQPDSGHIAFDSNGHRTRFDDLTHSDIRRNLIAVFDEPFLYSSSIRENISMGLDVSDEQIEHAARLAQAHDFIDRLPNKYEEVIGERGLTLSGGQRQRIALARAFLAHPKVLVLDDATSAIDASTEDRIFQALREELHDVTILIIAHRHSTLELGDRVGLVEDGRVTALGPLSEMRDHARFSHLMALDFQDSHDPEFTLDNGSLPSQEQLWPEVSTEKQYKILAPAPGRGRGMSMPATPELLAQIEALPAATEETRVDAGRLRTSTSGFKLLSLFKQVRWLVVAVIALLLVGVAADLAFPTLMRAAIDNGVQAQSTSTLWWIAIAGSVVVLLSWAAAAINTIITARTGERLLYGLRLRSFVHLLRLSMSYFERTMSGRIMTRMTTDIDNLSSFLQSGLAQTVVSVGTLIGVVTMLAITDAQLALVALSVVPIIIVLTLIFRRISSRLYTASREQASQVNAVFHESIAGLRTAQMHRMEDQVFDNYAGEAEEFRRLRVKSQTAIAIYFPGLGALSEIAQALVLGFGALQVTRGDISTGVLVAFVLYMGLMFGPIQQLSQIFDSYQQAAVGFRRITELLATQPSVPDLGTNRHARQAATQPLLLDDVTFGYSDDPILDNVTVQIEPGTTVAVVGPTGAGKSTVVKLLSRLYDPNEGAVKAGEIDIKDFPTADWRRTIGTVPQEAHLFSGSIADNIGYGCREASTSKIEAAARRVGALNAIAAIPDGFNHQVGERGRNLSSGQRQLIALARAELIEPSIMLLDEATSTLDPATEAVILNASDRVTKGRTSIIVAHRLATAKRADRILVVEQGRIIEDGSHDALLSANGTYARMWHLMA

SEQ ID NO: 16085 - protein, 468 aa, Corynebacterium glutamicum ATCC 13032
MNASPAPTRSFKGLRARHIHFIALGSAIGTGLFYGSAGAIQAAGPSVLLVYLLGGAVVYFMLRALGEMAVHHPVRGSFAVYTRAHLGGWAGYITGWMFAFEMLIVCLADLTAIGIYMNFWFPGTPQWTWVVATLLIVGGANLASVRWFGELEFIFTIIKVTAVVAMIVGGAAILAFGLGANAEVAGVSNLWEHGGFFPNGVEGMIAAFILVLFAFGGTEIIGVAGSEAEDPEKSIPKAVNTVPVRILLFYVGAILVILALNPWPSITGEESPFVQIFDTLGVNWAAGLLNAVVITAALSAINADLFGAGRVLTGLAKENLAPKAMGKIAKNGVPVMTTTIMIIVLIVGVILNAVLPERVFEIVASLATFATVYVWLMILLAQVGSRRNMPADEVKSLKFPVPFYPFGQYFAILFIAFTFGIMVWYDNYHLPLAVGVGFLVLMTILYYATGRPKAIAPIDYEELDPRRD

SEQ ID NO: 16086 - protein, 732 aa, Corynebacterium glutamicum ATCC 13032
MSNTENVNGDVEQPNNVISSESQETPQGDSASADFALETPTNTVEDAPASEGSEEITRVADTSEDADSADADNASNVINENEDSSEGANQPSNESSSTEAKSGFDALGLPERVLDAVRKVGYETPSPIQAQTIPILMEGQDVVGLAQTGTGKTAAFALPILARIDKSVRSPQALVLAPTRELALQVADSFQSFADHVGGLNVLPIYGGQAYGIQLSGLRRGAHIVVGTPGRIIDHLEKGSLDISGLRFLVLDEADEMLNMGFQEDVERILEDTPDEKQVALFSATMPNGIRRLSKQYLNNPAEITVKSETRTNTNITQRFLNVAHRNKMDALTRILEVTEFEAMIMFVRTKHETEEVAEKLRARGFSAAAINGDIAQAQRERTVDQLKDGRLDILVATDVAARGLDVERISHVLNFDIPNDTESYVHRIGRTGRAGRTGEAILFVTPRERRMLRSIERATNAPLHEMELPTVDQVNDFRKVKFADSITKSLEDKQMDLFRTLVKEYSQANDVPLEDIAAALATQAQSGDFLLKELPPERRERNDRRRDRDFDDRGGRGRDRDRGDRGDRGSRFDRDDENLATYRLAVGKRQHIRPGAIVGALANEGGLNSKDFGRITIAADHTLVELPKDLPQSVLDNLRDTRISGQLINIERDSGGRPPRRFERDDRGGRGGFRGDRDDRGGRGRDRDDRGSRGGFRGGRDRDDRGGRGGFRGRDDRGDRGGRGGYRGGRD

SEQ ID NO: 16087 - protein, 524 aa, Corynebacterium glutamicum ATCC 13032
MSDNTWFIIAIVIYMLVMVLIGYWSYRKTEKYDDYMLAGRGLNPFVAAMSAGASDMSGWLLMGLPGALFVTGMSELWIAVGLTIGAWANWMWVAPRLRSYSEISANSITLPSFFENRLRDKSRALRIIAALIIIVFFTFYISSGMVAGGVYWESTFGGDYLLGMAIVAGVTVLYTFIGGFLAVSYTDAVQGTIMFFSLIIVPVMAYFALANPMDIWSFANSNDYGPHTDGIGNPTYFSMISGISAAAIIGNLGWGLGYFGQPHIVVRFMALRTPAEAKQGRRIGISWMIICLIGATFTAIISTVFFAQNPDANITDTRAYESIFLDLARMLFHPLIAGLILTAVLAAIMSTMSSQLLVTASSLIEDLLKVVKKDSLSERTLIMLSRATVIILAIIAAAMAINPSDSILGLVGFAWAGFGSAFGPIILASLYWKRLNAAGAISGMITGAIVSIAWGMSPLSDTLYEIIPGFALATIVMVVVSLLTKEPSEEILNEFETAKDLAAAVESNEDVDFADAAQKLSKES

SEQ ID NO: 16088 - protein, 376 aa, Corynebacterium glutamicum ATCC 13032
MNTFYLDHAATTPMREVAAAAWMENAQALNPASQYGSGRKARSVADSAREEIASLLGCEPIEVVFTASGTEADNLAVQGLFHASPLNRIISTPIEHPGILETVKALELGGAEAELMPIGPDGRVSSFEALDKPAAVATMMWANNETGAIQPVSEFIAAAQASGTPTHIDAVQVVGHLPVNFDELGATTLAASAHKFGGPRGVGLLLVRRSPAPSAVLHGGGQERGIRPGTLDVAGAAATAAALREAVAELDGEATRLRGLKKMLLDAILHTIPNVLVHTTEPSLPGHLHLSFPGAEGDSLIMLLDSLRIEASTGSACSNGVNRASHVLLAMGISETDARGAIRFTLGRTTTEESIKAVIAVIEDVVTRARTAGMAF

SEQ ID NO: 16089 - protein, 626 aa, Corynebacterium glutamicum ATCC 13032
MNVAASQQPTPATVASRGRSAAPERMTGAKAIVRSLEELNADIVFGIPGGAVLPVYDPLYSSTKVRHVLVRHEQGAGHAATGYAQVTGRVGVCIATSGPGATNLVTPIADANLDSVPMVAITGQVGSGLLGTDAFQEADIRGITMPVTKHNFMVTNPNDIPQALAEAFHLAITGRPGPVLVDIPKDVQNAELDFVWPPKIDLPGYRPVSTPHARQIEQAVKLIGEAKKPVLYVGGGVIKADAHEELRAFAEYTGIPVVTTLMALGTFPESHELHMGMPGMHGTVSAVGALQRSDLLIAIGSRFDDRVTGDVDTFAPDAKIIHADIDPAEIGKIKQVEVPIVGDAREVLARLLETTKASKAETEDISEWVDYLKGLKARFPRGYDEQPGDLLAPQFVIETLSKEVGPDAIYCAGVGQHQMWAAQFVDFEKPRTWLNSGGLGTMGYAVPAALGAKAGAPDKEVWAIDGDGCFQMTNQELTTAAVEGFPIKIALINNGNLGMVRQWQTLFYEGRYSNTKLRNQGEYMPDFVTLSEGLGCVAIRVTKAEEVLPAIQKAREINDRPVVIDFIVGEDAQVWPMVSAGSSNSDIQYALGLRPFFDGDESAAEDPADIHEAVSDIDAAVESTEA

SEQ ID NO: 16090 - protein, 294 aa, Corynebacterium glutamicum ATCC 13032
MTHILFDSRRFLQLGAFASLSTALAGAARYVTSTSNNEPADNTPLTIGYVPIAGSAPIAIADALGLFKKHGVNVTLKKYSGWSDLWTAYATEQLDVAHMLSPMTVAINAGVTNASRPTELSFTQNTNGQAITLASKHYGSVNSAADLKGMVLGIPFEYSVHALLLRDYLVSNAVDPIADLELRLLRPADMVAQLTVEGIDGFIGPGPFNERAISNGSGRIWLLTKQLWDKHPCCAVAMAKEWKAEHPTAAQGVLNALEEASAILSNPAQFDSSARTLSQEKYLNQPATLLDGPS

SEQ ID NO: 16091 - protein, 530 aa, Corynebacterium glutamicum ATCC 13032
MSQNGRPVVLIADKLAQSTVDALGDAVEVRWVDGPNRPELLDAVKEADALLVRSATTVDAEVIAAAPNLKIVGRAGVGLDNVDIPAATEAGVMVANAPTSNIHSACEHAISLLLSTARQIPAADATLREGEWKRSSFNGVEIFGKTVGIVGFGHIGQLFAQRLAAFETTIVAYDPYANPARAAQLNVELVELDELMSRSDFVTIHLPKTKETAGMFDAQLLAKSKKGQIIINAARGGLVDEQALADAIESGHIRGAGFDVYSTEPCTDSPLFKLPQVVVTPHLGASTEEAQDRAGTDVADSVLKALAGEFVADAVNVSGGRVGEEVAVWMDLARKLGLLAGKLVDAAPVSIEVEARGELSSEQVDALGLSAVRGLFSGIIEESVTFVNAPRIAEERGLDISVKTNSESVTHRSVLQVKVITGSGASATVVGALTGLERVEKITRINGRGLDLRAEGLNLFLQYTDAPGALGTVGTKLGAAGINIEAAALTQAEKGDGAVLILRVESAVSEELEAEINAELGATSFQVDLD

SEQ ID NO: 16092 - protein, 401 aa, Corynebacterium glutamicum ATCC 13032
MTNRIVLAYSGGLDTTVAIPYLKKMIDGEVIAVSLDLGQGGENMDNVRQRALDAGAAESIVVDAKDEFAEEYCLPTIKANGMYMKQYPLVSAISRPLIVKHLVEAGKQFNGTHVAHGCTGKGNDQVRFEVGFMDTDPNLEIIAPARDFAWTRDKAIAFAEENNVPIEQSVKSPFSIDQNVWGRAIETGYLEDLWNAPTKDIYAYTEDPALGNAPDEVIISFEGGKPVSIDGRPVSVLQAIEELNRRAGAQGVGRLDMVEDRLVGIKSREIYEAPGAIALIKAHEALEDVTIERELARYKRGVDARWAEEVYDGLWFGPLKRSLDAFIDSTQEHVTGDIRMVLHAGSITINGRRSSHSLYDFNLATYDTGDTFDQTLAKGFVQLHGLSSKIANKRDREAGNN

SEQ ID NO: 16093 - protein, 448 aa, Corynebacterium glutamicum ATCC 13032
MTTFLELKLPDEIVRELRSQGITEAFPIQEAAIPDALAGKDVLGRGPTGSGKTFTFGLPMITRLARSGASKPGRPRGLVLVPTRELAAQVRERLDDPARVMGLRVLEVVGGVNINRNITALATPVDILVATPGRAQDLINQKKLSLADVSVTALDEADQMADMGFLPQVKKLMDLTPKNGQRLLFSATLDGDVSKLVDRYLHNPITHSTAPVQAAVDTMEHYRLLVGGRDPRNSVVLSIAAREGKTIMFMRTKHGVDRQVKKLRRVGVNAVGIHGDKGQSTRTNALAGFADGSIPVLVATDIAARGIDVDDVSLVVHVDPPAEHKAYLHRAGRTARAGTSGTVVTLVMDEQIKEVRELFQKAGVTAAEVKVNENSPELAKITGARRPSGVALPAPGQQQPKREQKNTHNRSDSRGSSRNPRRRGQSGSRSTGRSNPRRQTSRKDGPKS

SEQ ID NO: 16094 - protein, 252 aa, Corynebacterium glutamicum ATCC 13032
MSTLEIRNLHAQVLPSDESAEPKEILKGVNLTINSGEIHAIMGPNGSGKSTLAYTLGGHPRYEVTAGEVLLDGENILEMEVDERARAGLFLAMQYPTEIPGVSVANFLRSAATAIRGEAPKLREWVKEVRTAQEALAIDPEFSNRSVNEGFSGGEKKRHEVLQLDLLKPKFAIMDETDSGLDVDALRIVSEGINSYKQETEGGILMITHYKRILNYVKPDFIHVFANGQIVTTGGAELADKLEADGYDQFIK

SEQ ID NO: 16095 - protein, 452 aa, Corynebacterium glutamicum ATCC 13032
MDPSDLAWILAAFALVSLMFPGLSLLYGGMLGGQHVLNTFMMVMSSLGIISLVYIIYGHGLVLGNSIGGWGIIGNPLEYFGFRNIMEDDGTGDLMWAGFYILFAAISLALVSSGAAGRMRFGAWLVFGVLWFTFVYAPLAHWVFAIDDPESGYVGGWMKNVLEFHDFAGGTAVHMNAGASGLALAIVLGRRHSMAVRPHNLPLILIGAGLIVAGWFGFNGGTAGGANFLASYVVVTSLIAAAGGMMGFMLVERVFSGKPTFFGSATGTIAGLVAITPAADAVSPLGAFAVGALGAVVSFWAISWKKGHRVDDSFDVFAVHGMAGIAGALFVMLFGDPLAPAGVSGVFFGGELSLLWREPLAIIVTLTYAFGVTWLIATILNKFMTLRITSEAEYEGIDRAEHAESAYHLNSNGIGMATRTNFGPEIPEETVPDAVQVGVDKQKIADTRKASK

SEQ ID NO: 16096 - protein, 295 aa, Corynebacterium glutamicum ATCC 13032
MSAKRTFTRIGAILGATALAGVTLTACGDSSGGDGFLAAIENGSVNVGTKYDQPGLGLRNPDNSMSGLDVDVAEYVVNSIADDKGWDHPTIEWRESPSAQRETLIQNGEVDMIAATYSINAGRSESVNFGGPYLLTHQALLVRQDDDRIETLEDLDNGLILCSVSGSTPAQKVKDVLPGVQLQEYDTYSSCVEALSQGNVDALTTDATILFGYSQQYEGDFRVVEMEKDGEPFTDEYYGIGLKKDDQEGTDAINAALERMYADGTFQRLLTENLGEDSVVVEEGTPGDLSFLDAS

SEQ ID NO: 16097 - protein, 640 aa, Corynebacterium glutamicum ATCC 13032
MCGLLGILTANGNAEAFVPALERALPCMRHRGPDDAGTWHDADAAFGFNRLSIIDIAHSHQPLRWGPADEPDRYAMTFNGEIYNYVELRKELSDLGYAFNTSGDGEPIVVGFHHWGESVVEHLRGMFGIAIWDTKEKSLFLARDQFGIKPLFYATTEHGTVFSSEKKTILEMAEEMNLDLGLDKRTIEHYVDLQYVPEPDTLHAQISRLESGCTATVRPGGKLEQKRYFKPQFPVQKVVKGKEQDLFDRIAQVLEDSVEKHMRADVTVGSFLSGGIDSTAIAALAKRHNPDLLTFTTGFEREGYSEVDVAAESAAAIGAEHIVKIVSPEEYANAIPKIMWYLDDPVADPSLVPLYFVAAEARKHVKVVLSGEGADELFGGYTIYKEPLSLAPFEKIPSPLRKGLGKLSKVLPDGMKGKSLLERGSMTMEERYYGNARSFNFEQMQRVIPWAKREWDHREVTAPIYAQSRNFDPVARMQHLDLFTWMRGDILVKADKINMANSLELRVPFLDKEVFKVAETIPYDLKIANGTTKYALRRALEQIVPPHVLHRKKLGFPVPMRHWLAGDELFGWAQDTIKESGTEDIFNKQAVLDMLNEHRDGVSDHSRRLWTVLSFMVWHGIFVENRIDPQIEDRSYPVEL

SEQ ID NO: 16098 - protein, 305 aa, Corynebacterium glutamicum ATCC 13032
MSFTDTPDGFRSGFVSFVGRPNTGKSTLTNALVGEKIAITANQPETTRHPIRGLVHRDNAQIIVVDTPGLHRPRTLLGERLNEAVKDTYADVDLIGFTVPANEKIGPGDRWILEAVRKVSPKTPILGIITKADSVSRDLVAAQLMAVHELLGGNSEVVPVSSTSGENVETLIKVMTDLLPEGPKFYPDDHITDEDTNTRIAEAIREAALSGLKNELPHSVAVEVDEILPDPERNGVLAVHAIIYVERVGQKDIIVGHKGQRLGRIIHTSRQDIIKILGQNVFLDLRIKVLKNWQSDPKALNRLGF

SEQ ID NO: 16099 - protein, 615 aa, Corynebacterium glutamicum ATCC 13032
MSSNIAITTEPEGKNKKGLKSDPFIFSISVGFIVVFVIATIALGEKARTTFSAIAGWLLENLGWMYIGGVSLVFIFLMGIFASRYGRVKLGDDDDDPEHTLIVWFCMLFAGGVGAVLMFWGVAEPINHAFNVPMANEESMSEAAIVQAFAYTFYHFGIHMWVIMALPGLSLGYFIYKRKLPPRLSSVFSPILGKHIYSTPGKLIDVLAIVGTTFGIAVSVGLGVLQINAGMNKLWSTPQVSWVQLLIILIITAVACISVASGLDKGIKLLSNINIAMAVALMFFILFTGPTLTLLRFLVESFGIYASWMPNLMFWTDSFQDNPGWQGKWTVFYWAWTICWSPYVGMFVARISRGRTVREFIGGVLALPAIFGVVWFSIFGRAGIEVELSNPGFLTQPTVVEGDVPAALFNVLQEYPLTGIVSAFALVIIVIFFITSIDSAALVNDMFATGAENQTPTSYRVMWACTIGAVAGSLLIISPSSGIATLQEVVIIVAFPFFLVQFVMMFSLLKGMSEDAAAVRRVQTRQWEKTDTPEKLEEHSSQPAPGYDDEGNPLPMPALEHDEDGNIVIPGNVVIEGDLGVVGDVVDDPEEAQEMGSRFKIVEQTRPQSRDEYDI

SEQ ID NO: 16100 - protein, 630 aa, Corynebacterium glutamicum ATCC 13032
MSTNSGNNLPESQESPEEPHYPHDTHPGLVPGISVDAQRNKFGLDKTVFGVTAALILAFIAWGISSPDSVSSVSSTMFSWAMTNTGWLLNFVMLIGIGTMLYIAFSRYGRIKLGTDEDEPEFSRFSWIAMMFGAGIGVGIFFFGPSEPLWHYLSPPPHTVEGSTPESLHQALAQSHFHWGLSAWGLYALVGGALAYSSYRRGRVTLISSTFRSLFGEKTEGIAGRLIDMMAIIATLFGTAATLGLSAIQVGQGVQIISGASEITNNILIAIIAILTIGFIISSVSGVSKGIRYLSNLNISLTLGLVLFVFITGPTLFLLNLIPSSVLEYGSEFLSMAGKSLSWGEETIEFQAGWTAFYWAWWIAWTPFVGMFIARISRGRTLREFALITMAIPSFILILAFTIFGGTAITMNRENVDGFDGSSSKEQVLFDMFSNLPLYSITPFILIFVLAVFFVTSADSASVVMGTMSSQGNPAPNKLIVVFWGLCMMGIAVVMLLTGGESALTGLQNLTILIAIPFALVLIVMAIAFIKDLSTDPAAIRQRYAKAAISNAVVRGLEEHGDDFELSIEPAEEGRGAGATFDSTADHITDWYQRTDEEGNDVDYDFTTGKWADGWTPESTEEGEVDAKKD

SEQ ID NO: 16101 - protein, 501 aa, Corynebacterium glutamicum ATCC 13032
MNRFIDRVVLHLAAGDGGNGCVSVHREKFKPLGGPDGGNGGHGGDIILEVTAQVHTLLDFHFHPHVKAERGANGAGDHRNGARGKDLVLEVPPGTVVLNEKGETLADLTSVGMKFIAAAGGNGGLGNAALASKARKAPGFALIGEPGEAHDLILELKSMADVGLVGFPSAGKSSLISVMSAAKPKIGDYPFTTLQPNLGVVNVGHETFTMADVPGLIPGASEGKGLGLDFLRHIERTSVLVHVVDTATMDPGRDPISDIEALEAELAAYQSALDEDTGLGDLSQRPRLVVLNKADVPEAEELAEFLKEDIEKQFGWPVFIISAVARKGLDPLKYKLLEIVQDARKKRPKEKAESVIIKPKAVDHRTKGQFQIKPDPEVQGGFIITGEKPERWILQTDFENDEAVGYLADRLAKLGIEDGLRKAGAHVGANVTIGGISFEWEPMTTAGDDPVLTGRGTDVRLEQTSRISAAERKRASQVRRGLIDELDYGEDQEASRERWEG

SEQ ID NO: 16102 - protein, 512 aa, Corynebacterium glutamicum ATCC 13032
MTHQVALAFEDGITRFIDCEDDQTVADAAYQARINIPFDCRDGACGTCKAFCESGDFDEGDYIDDALSEDEAADGYCLPCQMTPKTDLILQIATTSVLAKTGASTFDGELKEINHFSDSTIGIEIELENRQDLAFLPGQYMNIQVPGSDQTRSYSFSCAQDSGNVQFLIKVTPGGLMTTYLTDHAKVGDKLTLTGPMGSFFLREPVRPILLLAGGTGLAPILAILEKLSRDELLDVPIRLVYGANFTHDLVELDRLDAFKDKFDFDYITVLSDKDTEHPRKGYVPAHLTGEYEPDEDTDVYLCGPPPMVEAVRQFLGTLEHPPLDFYYEKFTSAAAPAAGKPEITVETSEVAEDFNLVEVSTPGMSSGEVHSSATQLQARMALELGALELAINKLGERDIERFRNLADIANSFIDGDKFIDAVKFTEANADFHEFLFRRANNEALLAAYQNLQVVQEMNATLPGAEWIDPAIATEHLALVDAVSQNDLETARTIIREHAEHGIDTMVKALEK

SEQ ID NO: 16103 - protein, 485 aa, Corynebacterium glutamicum ATCC 13032
MDDSNSFVVVANRLPVDMTVHPDGSYSISPSPGGLVTGLSPVLEQHRGCWVGWPGTVDVAPEPFRTDTGVLLHPVVLTASDYEGFYEGFSNATLWPLFHDLIVTPVYNTDWWHAFREVNLKFAEAVSQVAAHGATVWVQDYQLLLVPGILRQMRPDLKIGFFLHIPFPSPDLFRQLPWREEIVRGMLGADLVGFHLVQNAENFLALTQQVAGTAGSHVGQPDTLQVSGEALVREIGAHVETADGRRVSVGAFPISIDVEMFGEASKSAVLDLLKTLDEPETVFLGVDRLDYTKGILQRLLAFEELLESGALEADKAVLLQVATPSRERIDHYRVSRSQVEEAVGRINGRFGRMGRPVVHYLHRSLSKNDLQVLYTAADVMLVTPFKDGMNLVAKEFVANHRDGTGALVLSEFAGAATELTGAYLCNPFDVESIKRQMVAAVHDLKHNPESAATRMKTNSEQVYTHDVNVWANSFLDCLAQSGENS

SEQ ID NO: 16104 - protein, 344 aa, Corynebacterium glutamicum ATCC 13032
MHAFRRPPPLTTRVGAALLAATLLASCTPTPVEPAETLTALDPDAGPPLPPDSSIEAPGEKEPIVEVIENWPGSLRPDDLTPEERVPGIVNRGRIIVGVDQSQNLLSFRDPVTGELRGFEVELAREISRDIFGDPNKVDFRFVGSSDRLRSLDQGDVDIVIRSVTITDERAKLVEFSTPYLRTQTRMLTMESSGITSIADLPGHTICVTDGSTSLQRARTIAPEASILKTRNWSDCLMALQQHQAQVILGDDVILSGIAAQDPYTEILDTSLDSHSYGVAAASTTAETDSSGLIRQVNYTIERIRTDRMWWTMFDDWFGPYLWSYGPPQLQYMPEEEGTENDEG

SEQ ID NO: 16105 - protein, 397 aa, Corynebacterium glutamicum ATCC 13032
MALALVLNSGSSSIKFQLVNPENSAIDEPYVSGLVEQIGEPNGRIVLKIEGEKYTLETPIADHSEGLNLAFDLMDQHNCGPSQLEITAVGHRVVHGGILFSAPELITDEIVEMIRDLIPLAPLHNPANVDGIDVARKILPDVPHVAVFDTGFFHSLPPAAALYAINKDVAAEHGIRRYGFHGTSHEFVSKRVVEILEKPTEDINTITFHLGNGASMAAVQGGRAVDTSMGMTPLAGLVMGTRSGDIDPGIVFHLSRTAGMSIDEIDNLLNKKSGVKGLSGVNDFRELREMIDNNDQDAWSAYNIYIHQLRRYLGSYMVALGRVDTIVFTAGVGENAQFVREDALAGLEMYGIEIDPERNALPNDGPRLISTDASKVKVFVIPTNEELAIARYAVKFA

SEQ ID NO: 16106 - protein, 461 aa, Corynebacterium glutamicum ATCC 13032
MSDTPTSALITTVNRSFDGFDLEEVAADLGVRLTYLPDEELEVSKVLAADLLAEGPALIIGVGNTFFDAQVAAALGVPVLLLVDKQGKHVALARTQVNNAGAVVAAAFTAEQEPMPDKLRKAVRNHSNLEPVMSAELFENWLLKRARAEHSHIVLPEGDDDRILMAAHQLLDQDICDITILGDPVKIKERATELGLHLNTAYLVNPLTDPRLEEFAEQFAELRKSKSVTIDEAREIMKDISYFGTMMVHNGDADGMVSGAANTTAHTIKPSFQIIKTVPEASVVSSIFLMVLRGRLWAFGDCAVNPNPTAEQLGEIAVVSAKTAAQFGIDPRVAILSYSTGNSGGGSDVDRAIDALAEARRLNPELCVDGPLQFDAAVDPGVARKKMPDSDVAGQANVFIFPDLEAGNIGYKTAQRTGHALAVGPILQGLNKPVNDLSRGATVPDIVNTVAITAIQAGGRS

SEQ ID NO: 16107 - protein, 852 aa, Corynebacterium glutamicum ATCC 13032
MSSFNPTTKTNEAMQAALQQASSAGNPDIRPAHLLAAILEQTDGVAAPVLMATGVDPKEILAEAKKLVASYPKASGANMANPNFNRDALNAFTAAQELAGELGDEYVSTEVLLAGIARGKSDAADLLTNKGATYDAIKEAFPSVRGSQRVTTQDPEGQFQALEKYSTDLTKLAREGKIDPVIGRDQEIRRVVQVLSRRTKNNPVLIGEPGVGKTAIVEGLARRIVAGDVPESLKGKTLISLDLGSMVAGAKYRGEFEERLKAVLDEIKGANGEVVTFIDELHTIVGAGASGESAMDAGNMIKPLLARGELRLVGATTLNEYRKYIEKDAALERRFQQVYVGEPTVEDAIGILRGLKERYEVHHGVRIQDSALVAAAELSNRYITSRFLPDKAIDLVDEAASRLRMEIDSSPQEIDELERIVRRLEIEEMALSKESDAASKERLEKLRSELADEREKLSELKARWQNEKTAIDDVREMKEELEALRSESDIAERDGNYGRVAELRYGRIPELEKQIEDAESKVEVNENAMLTEEVTPDTIADVVSAWTGIPAGKMMQGETEKLLNMERVLGNRVVGQLEAVTAVSDAVRRSRAGVADPNRPTGSFLFLGPTGVGKTELAKAVAEFLFDDDRAMIRIDMSEYGEKHSVARLVGAPPGYVGYDQGGQLTEAVRRRPYTVVLFDEVEKAHPDVFDILLQVLDEGRLTDGQGRTVDFRNTILILTSNLGAGGTREQMMDAVKMAFKPEFVNRLDDVVIFDRLSPEQLTSIVDIQIKQLTDRLAGRRLNLRVSDSAKAWLAERGYDPAYGARPLRRLIQQAIGDTLAKELLAGNVRDGDGVLVDVADGGQKLDVSRAV

SEQ ID NO: 16108 - protein, 561 aa, Corynebacterium glutamicum ATCC 13032
MTTTTGSARPARAARKPKPEGQWKIDGTEPLNHAEEIKQEEPAFAVKQRVIDIYSKQGFSSIAPDDIAPRFKWLGIYTQRKQDLGGELTGQLPDDELQDEYFMMRVRFDGGLASPERLRAVGEISRDYARSTADFTDRQNIQLHWIRIEDVPAIWEKLETVGLSTMLGCGDVPRVILGSPVSGVAAEELIDATPAIDAIRERYLDKEEFHNLPRKFKTAITGNQRQDVTHEIQDVSFVPSIHPEFGPGFECFVGGGLSTNPMLAQPLGSWIPLDEVPEVWAGVAGIFRDYGFRRLRNRARLKFLVAQWGIEKFREVLETEYLERKLIDGPVVTTNPGYRDHIGIHPQKDGKFYLGVKPTVGHTTGEQLIAIADVAEKHGITRIRTTAEKELLFLDIERKNLTTVARDLDEIGLYSSPSEFRRGIISCTGLEFCKLAHATTKSRAIELVDELEERLGDLDVPIKIALNGCPNSCARTQVSDIGFKGQTVTDADGNRVEGFQVHLGGSMNLDPNFGRKLKGHKVIADEVGEYVTRVVTHFKEQRHEDEHFRDWVQRAAEEDLV

SEQ ID NO: 16109 - protein, 386 aa, Corynebacterium glutamicum ATCC 13032
MIVSTQPITDRSALSAEHAEVIKATLPLVGGKINEITPVFYNKMFAAHPELIANTFNRGNQKQGDQQKALAASIATFATMLVTPDAPDPVQLLSRIGHKHVSLGITADQYDIVHEHLFAAIVEVLGAETVTAPVAEAWDAVYWIMANVLIGFENNLYASNDLEPGDVFREVTVTAKKQLSATVWEYTLAGELVAPEPGQYTSIGVVLDDGARQLRQYSLLGGSDTEYRIAVEDNGEVSGFLRDRVSVGDKIEATIAAGDLVLNKDTNPVVLISQGIGSTPMVGMLAGMNPERDVVVLHADQAESTYAQVEEVQGLVEKLPKAAFEIFYRDNDQWLEVAGRIPSGASVYLCGGVEFLKNVREQIEALDEQPRDVNFELFAPNDWLIS

SEQ ID NO: 16110 - protein, 422 aa, Corynebacterium glutamicum ATCC 13032
MLDILIYPVSGVMKLWHLLLHNVAGLDDSLAWFFSLFGLVITIRAIIAPFTWQMYKSGRTAAHIRPHRAALREEYKGKYDEASIRELQKRQNDLNKEYGINPLAGCVPGLIQIPIVLGLYWALLRMARPEGGLENPVFQSIGFLTPEEVESFLAGRVSNVPLPAYVSMPTEQLKYLSTTQAEVLSFVLPLFITAAILTAINMAMSMYRSFQTNDYASGFSNGMLKFMIVMSILAPIFPLSLGLTGPFPTAIALYWVSNNLWTLLQTIIMMVILERKYPLTDDFKVHHLEQRDIYRAKQKEKRIFLWTRRKNRALMILTPWNASTLHATNVELTKTRTAEINEAKQARKEIANKRRETQREMNRAAMQRLKQRRAEVKAKKKGLIDASPNEDTPSENEETKLSSPQVEPTTTAEPNREPSQED

SEQ ID NO: 16111 - protein, 203 aa, Corynebacterium glutamicum ATCC 13032; identical to SEQ ID NO: 468

SEQ ID NO: 16112 - protein, 212 aa, Rhizobium yanglingense
EPARQTQIKEFDAFPALEQLPLWGFDGSSTMQAEGRSSDCVLKPVAVYPDPARTNGALVMCEVMMPDGVTPHPSNSRATILDDEDAWFGFEQEYFFYENGRPLGFPEQGYPAPQGPYYTGVGYKNVGSVAREIVEEHLDLCLAAGINHEGINAEVAKGQWEFQIFGKGSKRAADQIWMARYLLLRLCEKYGIDIEFHCKPLGDTDWNGSGMR

SEQ ID NO: 16113 - protein, 208 aa, Rhizobium leguminosarum
TAWQDADQEFDAFPTLEQLPLWGFDGSSTQQAEGRSSDCVLKPVAIYPDPARTNGALVMCEVMMPDGVTPHASNARATILDDEDAWFGFEQEYFFYQNGRPLGFPEQGYPAPQGPYYTGVGYSNVGDVAREIVEEHLDLCLAAGINHEGINAEVAKGQWEFQIFGKGSKKAADQIWMARYLLQRLTEKYGIDIEYHCKPLGDTDWNGS

SEQ ID NO: 16114 - protein, 207 aa, Sinorhizobium meliloti
GKTQIKEFDAFPTLEQLPLWGFDGSSTQQAEGRSSDCVLKPVAVYPDPVRTNGALVMCEVMMPDGKTPHPSNTRATVLDDESAWFGFEQEYFFYKNGRPLGFPEQGYPAPQGPYYTGVGYKNVGDIARQIVEEHLDICLAAGINHEGINAEVAKGQWEFQVFGKGSKKAADEVWLARYLLLRLTEKYGIDVEFHCKPLGDTDWNGSG

SEQ ID NO: 16115 - protein, 209 aa, Sinorhizobium meliloti
GKTQIKEFDAFPTLEQLPLWGFDGSSTQQAEGRSSDCVLKPVAVYPDPVRTNGALVMCEVMMPDGKTPHPSNTRATVLDDESAWFGFEQEYFFYKNGRPLGFPEQGYPAPQGPYYTGVGYKNVGDIARQIVEEHLDICLAAGINHEGINAEVAKGQWEFQVFGKGSKKAADEVWLARYLLLRLTEKYGIDVEFHCKPLGDTDWNGPGMQ

SEQ ID NO: 16116 - protein, 211 aa, Rhizobium yanglingense
ARQTQIKEFDAFPALEQLPLWGFDGSSTMQAEGRSSDCVLKPVAVYPDPARSNGALVMCEVMMPDGVTPHPSNSRATILDDEDAWFGFEQEYFFYENGRPLGFPEQGYPAPQGPYYTGVGYKNVGSVAREIVEEHLDLCLAAGINHEGINAEVAKGQWEFQIFGKGSKRAADQIWMARYLLLRLCEKYGIDIEFHCKPLGDTDWNGGAMQA

SEQ ID NO: 16117 - protein, 516 aa, Arachis hypogaea
MGYETRKLSDEYEVSEILGRGGFSVVRKGIKKSSSDEKTHVAIKTLRRVSVFSTTPGCLPRERSNMGFPTWRQVSVSDALLTNEILVMRKIVENVSPHPNVVDLYDVYEDSNGVHLVLELCSGGELFDRIVAQDRYSETEAATVIRQIAAGLEAIHKANIVHRDLKPENCLFLDKRKDSPLKIMDFGLSSVEEFTDPVVGLFGSIDYVSPEALSQGKITTKSDMWSLGVILYILLSGYPPFIAQSNRQKQQMIMNGNFSFYEKTWKGISQSAKQLISSLLTVDPSRRPSAQELLSHPWVIGDVAKDVQMDPEIVSRLQSFNARRKLRAAAIASVWSTTVFLRTKKLKSLIGSYDLTEEEIESLRIHFKKICGNGDNATLSKFEEVLKAINMPSLIPLAPRIFDLFDNNRDGTVDMREILCGLSSLKNSKGDDALRLCFQMYDADRSGCITKEEVASMLRALPDDCLPVDITEPGKLDEIFDRMDANSDGKVTFEEFKAAMQRDSSLQDVVLSSLRP

SEQ ID NO: 16118 - protein, 317 aa, Corynebacterium glutamicum ATCC 13032
MLNFIYWPISAILWFWHKAFSFVLSPDSGITWALSIMFLTFTVRMVLVKPMVNTMRSQRKMQDMAPKMQAIREKYKNDQQKMMEETRKLQKEVGVNPIAGCLPMLVQIPVFLGLFHVLRSFNRTGSGVGQLEMTVEQNANTPNYIFGVDEVQSFLRADLFGAPLSSYITMPADAFDAFLGLDVSRLNIALVAAPMILIIVVATHMNARLSVNRQEARKAAGKQQAASSDQMAMQMQMMNKMMLWFMPATILFTGFIWTIGLLVYMMSNNVWTFFQQRYIFAKMDAEEAAEEEEKRAAKRTTAPKPGVKPENPKKRKK

SEQ ID NO: 16119 - protein, 363 aa, Arachis hypogaea
MAVELMMGGYRNDNSSSGGFATSKAEENAVQEAASGLESVEKLIRLLSQTQHQHFNASSSSSAVNSDATLSIERDCKAVADVAVSKFKRVISLLGRTRTGHARFRRGPLHAPFQSQTEPFSQEHRVFHATPLQQIPPPPPPPPPPPPPQLQPQLPSLVNHHLIPKNGVLERSSSSKTINFSYSSAANSFLSSLTGDAAAGESKQQHHQQQPSLSSPAPAFQITNLSQVSSAGKPPLSSSSLKRKCSSENLGSGKCGSSSSRCHCSKKSRKMRLKRVVRVPAISLKMADIPPDDYSWRKYGQKPIKGSPHPRGYYKCSSVRGCPARKHVERALDDPSMLVVTYEGEHNHSLTAADATNLILESS

SEQ ID NO: 16120 - protein, 286 aa, Zea mays
MSTSEVWSLSDFEISKYIGEGRFGKVYLAREKQSGYVVALKVIFKAKLQKYHFHAHLRREIEIQQSLDHPNVLRLFTWFHDEERVVLVLEYAARGELYKVLRAAGRFTERTSATYVASLAGALAYCHKKQVIHRDIKPENLLIDIEGRLKIADFGWAARSNAKRHTLCGTIDYLAPEMVEKKAHDHAVDNWTLGILCYEFLYGSPPFEADEQDDTLRRIVRVDLAFPSSPCVSSEAKDLISKLLVKDSSKRLCLEDIMKHPWIKKNADPSGSCIKQKDVTRSKVKR

SEQ ID NO: 16121 - protein, 604 aa, Zea mays
MCGILAVLGCADEAKGSSKRSRVLELSRRLKHRGPDWSGLRQVGDCYLSHQRLAIIDPASGDQPLYNEDQSVVVAVNGEIYNHLDLRSRLAGAGHSFRTGSDCEVIAHLYEERGEEFVDMLDGVFSFVLLDTRHGDRAGSSFFMAARDAIGVTPLYIGWGVDGSVWISSEMKALHDECEHFEIFPPGHLYSSNTGGFSRWYNPPWYDDDDEAVVTPSVPYDPLALRKAFEKAVVKRLMTDVPFGVLLSGGLDSSLVAAVAVRHLAGTEAARRWGTKLHSFCVGLEGSPDLKAAREVAEYLGTLHHEFHFTVQDGIDAIEDVIYHTETYDVTTIRASTPMFLMSRKIKSLGVKMVISGEGSDELFGGYLYFHKAPNKEGLHRETCRKVKALHQYDCLRANKATSAWGLEARVPFLDKEFINAAMSIDPQWKMVRPDLRRIEKWVLRKAFDDEEQPFLPKYILYRQKEQFSDGVGYSWIDGLKTHAASNVTDKMLSNAKFIFPHNTPTTKEAYYYRMVFERFFPQKSAILTVPGGPSVACSTAKAIEWDTQWSGNLDPSGRAALGVHLAAYEHQHDPEHVPAAIATGSGKKPRTIRVAPPGVAIEG

SEQ ID NO: 16122 - protein, 185 aa, Zea mays
MARSLSTALVRGLMRSSRASTSAAVSRPAIQQFMNYSSGLSCTPNANGDSVTTRVAADHDTHQDFQPTSKSSDMSFSDIVAQDVKEHPVVIYMKGYPDAPRCGFSALAVKVLQQYGVPISARDILSDLKLKESVKAYSNWPTFPQIFIKGEFVGGSDIILTMHQKGELKELLGDIAQKAEQSGSS

SEQ ID NO: 16123 - protein, 208 aa, Zea mays
  misc_feature (119)..(119): Xaa can be any naturally occurring amino acid
  unsure (1)..(208): unsure at all Xaa locations
MASDRVLGTVKWFNGTKGFGFITPDDGSEDLFVHQSSIKSDGYRSLNDGDAVEYTVGSGNDGRAKALDVTAPGGGPLAGGERPDGGNGGGRGGYGGGDRGYGGGGDRGYGGGGDRGYGXGDRGYGGGGDRGYGGDRGYGGGGGYGGGYGGGGGGGGRGCFKCGEEGHMARDCSQGGGYGGGGGGGRGSECYNCGQEGHISRDCPNKRR

SEQ ID NO: 16124 - protein, 301 aa, Zea mays
MCLLREMEDHSVHPKSKSNHGSLSGNGYEMKNPGHEVCDRDSSSESDRSHPEASAVSESSLDEHTSTQSDNDEDHGKDNQDTLKPVLSLGKEGSAFLAPKIDYNPSFPYIPYTADAYYGGVGVLTGYAPHAIVHPQQNDTTNSPVMLPAEPAEEEPIYVNAKQYHAILRRRQTRAKLEAQNKMVKGRKPYLHESRHRHAMKRARGSGGRFLNTKQQLQEQNQQYQASSGSMCSKTIGDSVISQSGPICTPSSDAAGASAASQDRGCLPSVGFRPTANFSEQGGGGSKLVVNGMQQRVSTIR

SEQ ID NO: 16125 - protein, 219 aa, Zea mays
MARPCSSSSSAAARLLLLLAAVAAALQAAGAAPPVASGFIRKSCRATQYPSVCEQSLAAYGGSPPPRSPRELAHAALAVSADRARAASAYVGRLCGSRSGSGDGSPRRGAGAKKGSAAAGPVRDCLENLADSVGHLRDAAQEIGGAGMARAGTRAFRWHLSNVQTWCSAALTDENTCLDGLSSRAVDAATRAAVRGRVVEVAQVTSNALALVNKVGPGY

SEQ ID NO: 16126 - protein, 234 aa, Zea mays
MSANVGESTSGVSSSDAAGGSFECNICFELPQEPIVTLCGHLFCWPCLYRWLHIHAHSPECPVCKALVEEDKLVPLYGRGKDRVDPRSKNMPEGEIPHRPTGQRPATAPRADANSNFANANANPWFPGTGVPLANARWGNYAFSAAFGGLFPMLSFQVHGFPDAAAYAQPAGFHYGYGHGHGHGFHHGGHMGQAQAHGVHRQAPLGQQQQQADIYLKALLFMIVILVLASLLAF

SEQ ID NO: 16127 - protein, 535 aa, Zea mays
MASDPSTFSPIGVDAMGGGYFMAGSSSYGGGGIMSAEVPHFHHPGVLLDQGGFGFGGLGNAAVVGGAATAADLGAHYAANNIVLASFASQLLANAPAPPRDDRAGGRTPPDEMDEELYGVAGCDSRVAASLRCPSQSGAMAVWSSPSSSKKPYGIWTSAGGPAHEPYHLAAAGLSDAGGLRYPLAACSGGNASAAAASELSLTLCSNSIASSDSALNATEQCSSGASRSALTELPRARSRMALHFAAVVARSRYAAVVQDLLNDVVGHMLDGVADVTDDSCSGIGSVGAPSAVSSNRFMASTEDAGARWGQAQRVRSNLLKTLQLMDEKYNQCLDEIQSTTARFNTLMHSAPGGGGICAPFAHRAVSAMYRGLRRRLAGEIMAAASRASCWGESSSSVTVAAGGDVERSWESAFIQKHWSAQQLRRTEQQCWRPQRGLPEKSVAVLKAWMFENFLHPYPKDHEKDVLAARSGLTRNQVSNWFINARVRLWKPMIEEMYQDLKRSSGAGGGGHGPAMEPQQHLSKRRICELEDGGQ

SEQ ID NO: 16128 - protein, 610 aa, Zea mays
METLLAGNPANGVAKPTCNGVGALPVANSHAIIATPAAAAATLAPAGATLGRHLARRLVQIGASDVFAVPGDFNLTLLDYLIAEPGLTLVGCCNELNAGYAADGYARSRGVGACAVTFTVGGLSVLNAIAGAYSENLPVVCIVGGPNSNDYGTNRILHHTIGLPDFSQELRCFQTITCYQAIINNLDDAHEQIDTAIATALRESKPVYISVSCNLAGLSHPTFSRDPVPMFISPRLSNKANLEYAVEAAADFLNKAVKPVMVGGPKIRVAKAREAFAAVADASGYPFAVMPAAKGLVPEHHPRFIGTYWGAVSTTFCAEIVESADAYLFAGPIFNDYSSVGYSLLLKREKAVIVQPDRMVVGDGPAFGCILMPEFLRALAKRLRRNTTAYDNYRRIFVPDREPPNGKPNEPLRVNVLFKHIKGMLSGDSAVVAETGDSWFNCQKLRLPEGCGYEFQMQYGSIGWSVGATLGYAQAAKDKRVIACIGDGSFQVTAQDVSTMLRCGQKSIIFLINNGGYTIEVEIHDGPYNVIKNWDYTGLVNAIHNSDGNCWTMKVRTEEQLKEAIAMATGDKKDCLCFIEVIVHKDDTSKELLEWGSRVSAANSRPPNPQ

SEQ ID NO: 16129 - protein, 597 aa, Zea mays
MASSASLQRFLLPSPHAAATAASPSSRLRRTGRARAAVSVPPPAAAGEQVPTERLEPRVEERAGGYWVLKEKYRAGLNPQEKVKLEKEPMALFMEGGIQDLARVPMEQIDAAKLTKDDVDVRLKWLGLFHRRKHQYGRFMMRLKLPNGVTTSEQTRYLASVIEAYGADGCADVTTRQNWQIRGVTLPDVPAILDGLRAVGLTSLQSGMDNVRNPVGNPLAGVDPHEIVDTRPYTNLLSSYVTNNSQGNPTITNLPRKWNVCVIGSHDLYEHPHINDLAYMPAVKDGEFGFNLLVGGFISPKRWAEALPLDAWVAGDDVVPVCKAILEAYRDLGSRGNRQKTRMMWLIDELGMEVFRSEVEKRMPNGVLERAAPEDLVDKRWERRDYLGVHPQKQEGLSYVGLHVPVGRLQAADMFELARLADEYGTGELRLTVEQNIVLPNVSNERLDALLAEPLLQEQRLSPRPSMLLRGLVACTGNQFCGQAIIETKARALQVAREVEKRVAVPRPVRMHWTGCPNSCGQVQVADIGFMGCLTKDSDGKIVEAADIFVGGRVGSDSHLADVYRKSVPCKDLVPIVADLLVERFGAVPREREEDEE

SEQ ID NO: 16130 - protein, 541 aa, Zea mays
MARCVAGSCPPVTFACCPRRTGRSAVVQCGTASSTPAISGTGPSSSGSSGLVQDCTAPLVCALQLTARQDVSCFHFPGHNRGKAAPSSLSKLIGSGAFLHDLPELPELDDLFSPKGVILDAQRRAAQLFGSSKTWFLVNGTTCGIQASVMATCSPGDYLIVPRNCHISVISALVLSGVVPKYIIPEYNSGWDIAGGITPLKLDEAVKELEEDGKRVGAVLVTSPTYHGVCSNVQGIVSVCHPRGIPVIVDEAHGAHFRFHDSLPSTAIEQGADLAVQSTHKVLCSLTQSSMLHMSGDLVDVDKVSQCLQLLQSSSPSYLLLSSLDAARDQLSQNTNIFDEPLAIASETKDKLARIPGISVLGLPCFASDFPAIDPLRITLSASDLQLSGYEADDILYEGHQIVSELVGTRAVTFAVNLGTRVQDAEKLVQSAKHLSEKHFFANSLKPVKENRVHGPLENISVHLSPREAFFTEKRRVKIEDSLGEICGELICPYPPGIPVLIPGEVVTHDSLSYLMSVRHQGITISGAADAELNSILVCDL

SEQ ID NO: 16131 - protein, 392 aa, Zea mays
MLVTLMNLLRACWRPSSNRHARTGSDVTGRQDGLLWYKDAGQHVNGEFSMAVVQANNLLEDQCQIESGPLSFLDSGPYGTFVGVYDGHGGPETACYINDHLFQNLKRFASEQNTMSADVLKKAYEATEDGFFSVVTRQWPVKPQIAAVGSCCLVGVICGGMLYVANVGDSRVVLGRHVKATGEVLAIQLSAEHNVSIESVRKELQSMHPEDRHIVVLKHNVWRVKGLIQVCRSIGDAYLKKQEFNREPLYVKFRLREPFHKPILSSEPSINVRPLQPHDQFLIFASDGLWEHLTNQEAVDIVHSSPRSGCARRLIRAALQVAAKKREMRYSDLKKIDRGVRRHFHDDITVIVVFLDSSLVSKASAHRGPTLSLRGGGASAGLRSNTLAPTSM

SEQ ID NO: 16132 - protein, 584 aa, Zea mays
MGQCYGKARGASSRADHDADPSGAGSVAPPSPLPANGAPLPATPRRHKSGSTTPVHHHQAATPGAAAWPSPYPAGGASPLPAGVSPSPARSTPRRFFKRPFPPPSPAKHIKATLAKRLGGGKPKEGTIPEEGGAGAGAGAGAGAAVGAADSAEADRPLDKTFGFAKNFGAKYDLGKEVGRGHFGHTCSAVVKKGEHKGHTVAVKIISKAKMTTAISIEDVRREVKILKALSGHDNLVRFYDACEDALNVYIVMELCEGGELLDRILARGGRYTEEDAKAIIVQILSVVAFCHLQGVVHRDLKPENFLFTTRDESAPMKLIDFGLSDFIRPDERLNDIVGSAYYVAPEVLHRSYSMEADIWSIGVITYILLCGSRPFWARTESGIFRSVLRADPNFDDSPWPSVSAEAKDFVKRFLNKDYRKRMTAVQALTHPWLRDELLYLRLQFKLLEPRDGFVSLDNFRTALTRYSTDAMRESRVLEFQHALEPLAYRKMDFEEFCAAAISPYQLEALERWEEIAGTAFQHFEQEGNRVISVEELAQELNLAPTHYSIVQDWIRKSDGKLNFLGFTKFLHGVTIRGSNTRRH

SEQ ID NO: 16133 - protein, 507 aa, Zea mays
MALLLHPRLPSHPFRAAAHHHHAISDASCFLTLHGPGRKRRMLLAAVTCRAARVKEPAPSAGASPPPPPQALTKEAHKYFDHAVVTVRAGDGGHGAVLAMPPAPSADAAKPRGRFNRGEKKSKKVSYKRNYDGSVALPTGGHGGDVVVYADEAEETLLRFHEKARYCAKRGGNVGAAGGTLSSRMHSGFAGKTLRIPVPVGTVVKRKKGAVLADLAHHCDEVLVARGGQGGISLIDVPEYKRRKAMALSPNIMRDTSDKVLTHGQPGEEVSLELILRVVADVGLVGLPNAGKSTLLSAITLARPDIADYPFTTLMPNLGRLGGDPALGALQFSSEATLADLPGLIEGAHLGKGLGRNFLRHLRRTRVIVHVVDAAADDPVNDYKIVREELRMYNPQYLERPYVVVLNKIDLPKAQDRLSALVLEISSIGCEEGHEQSGSKDNLNGRVSDHQVLSEAKAEGVEKELGDYPRPEAVVAASVLRHIGIDEMLKEIRAALRKCFDHKLPEH

SEQ ID NO: 16134 - protein, 140 aa, Zea mays
MGGASASASSGAGADERPKGEDGKQGQVAAGAQPPAGGKKRGRTAGDKEQNRLKRLLRNRVSAQQARERKKAYLTELEAKAKGLELRNAELEQRVSTLQNENNTLRQILKNTTAHASKRSGGGAGGKGGDGGKKHHLAKS

SEQ ID NO: 16135 - protein, 236 aa, Zea mays
MSANVGESTSGVSSSDAAGGSFECNICFELPQEPIVTLCGHLFCWPCLYRWLHIHAHSPECPVCKALVEEDKLVPLYGRGKDRVDPRSKNMPEGEIPHRPTGQRPATAPRAHANSNFANANANANPWFPGAGVPLANARWGNYAFSAAFGGLFPMLSFQVHGFPDAAAYAQPAGFHYGYGHGHGHGFHHGGHMGQAQAHGVHRQAPLGQQQQQADIYLKALLFMIVILVLASLLAF

SEQ ID NO: 16136 - protein, 210 aa, Zea mays
MARPRSVAAAAPLLLLLAAAAAGLVSAASPAASDFVRKSCRTTQYPSVCEQSLASYGGSPPPRSPRELARAALSVSADRARAASTYVGRLCGASNGKGAKKGSGSASASAGPVRDCLDNLADSVGHLRDAAQEMGGAGMGRAGTPAFRWHLSNVQTWCSAALTDEDTCLDGLSSRAVDAGTRAAIRGKVVEVAQVTSNALALVNKVGPGY

SEQ ID NO: 16137 - protein, 273 aa, Zea mays
MDSKSMEAFVASEASVFMNQPPPHMSRPTIIIKLILWLLWTITHLAISILNLWSHLIYSLDCYLISSGLLRKYQNLHLGRLKYLAIVVDSKEAKSTEKVKRLLRWLSSMGVKYVCLYDIEGVLKKSFEPAVNVSRDRTAGEHFGIGANIKDLHCSQREMMIDCLSGSDGKEGIAKAASLLCSTYFNGDTHGDGKRKPAFTEADMAAALKAVGCGGPEPDLLLMYGPARCHLGFPAWRLRYTEIMYMGPLKSMKYGAIVKALYNFSKKHQNYGK

SEQ ID NO: 16138 - protein, 451 aa, Zea mays
MALSRRLLPLFLRRGAPIPARALSTAVAPAAVASEEDEAAVTVKGVRISGRPLYMDMQATTPVDPRVLDAMLPFYLSRYGNPHSRTHLYGWESDAAVEDARARVASLVGADPREIFFTSGATECNNIAVKGVMRFYRERRRHVITTQTEHKCVLDSCRYLQQEGFEITYLPVRKDGLVDLAQLEDAIRPDTGLVSIMAVNNEIGVVQPLEEIGRICKEKGVPFHTDAAQALGKIPIDVNRMGIGLMSLSGHKIYGPKGVGALYLRRRPRIRVEPQMNGGGQERGIRSGTVPTPLVVGFGAACEIAAQEMDYDHRRVSALQQRLLDGIRAQVDDVVINGSMEHRYPGNLNLSFAYVEGESLLMGLKEVAVSSGSACTSASLEPSYVLRALGVEEDMAHTSIRFGMGRFTTDEEVDRAIELTVHQVKKLRDMSPLYEMAKAGIDLKSIEWSQH

SEQ ID NO: 16139 - protein, 382 aa, Zea mays
  misc_feature (10)..(10): Xaa can be any naturally occurring amino acid
  unsure (1)..(382): unsure at all Xaa locations
MAVSTGSTGXVPRLEQLLNMDTTPYTDKVIAEYIWVGGSGIDIRSKSRTISKPVEDPSELPKWNYDGSSTGQAPVEDSEVILYPQAIFKDPFRGGNNVLVICDTYTPQGEPLPTNKRHRAAQIFSDPKVAAQVPWFGIEQEYTLLQKDVNWPLGWPVGGFPGPQGPYYCAVGADKSFGRDISDAHYKACLYAGINISGTNGEVMPGQWEYQVGPSVGIEAGDHIWISRYILERITEQAGVVLTLDPKPIQGDWNGAGCHTNYSTKTMREDGGFEEIKRAILNLSLRHDLHISAYGEGNERRLTGKHETASIGTFSWGVANRGCSIRVGRDTEAKGKGYLEDRRPASNMDPYTVTGLLAETTILWQPSLEAEALAAKKLALKV

SEQ ID NO: 16140 - protein, 435 aa, Zea mays
MYSNFKEQAIEYVKQAVQEDNAGNYVKAFPLYMNALEYFKTHLKYEKNPKIKEAITAKFTEYLRRAEEIRAVLDEGGAGPGANGGDAAVATRPKTKGKDGDGGNGGDDSEQSKLRAGLNSAIITEKPNVKWNDVAGLESAKQALQEAVILPVKFPQFFTGKRRPWRAFLLYGPPGTGKSYLAKAVATEADSTFFSISSSDLVSKWMGESEKLVANLFQMARENAPSIIFIDEIDSLCGQRGEGNESEASRRIKTELLVQMQGVGHNDDKVLVLAATNTPYALDQAVRRRFDKRIYIPLPDTKARQHMFKVHLGDTPHSLTESDFESLARRTDGFSGSDVAVCVKDVLFEPVRKTQDAMFFFKADGDMWMPCGPKQPGAVQTTMQELASKGLAAKILPPPISRTDFEKVLSRQRPTVSKKDLEVHERFTKEFGEEG

SEQ ID NO: 16141 - protein, 270 aa, Zea mays
MVPSEMGSVATAVSTPAADKLLHGPISGKKCKKPGPRKIHKAEREKLKRDHLNDLFVELGNMLEADRQNNGKACILTDTTRILRDLLVQVDSLRKEHSDLQNESHYVTMERDEMQDENGVLRKEISELQNELTMRVSGSPAGWGHGTARSDPPLPHSTAVFSSEQAMQPPTIASVVFPLQQPLAPSAMTKPPHAAPPLELKLFPEVAFAEGHEPCEDHKAPNHVARPQARYPTQSASWPVNLFSGLPRMEDEQCSSSTSGSSREDNTDIE

SEQ ID NO: 16142 - protein, 250 aa, Zea mays
  misc_feature (46)..(46): Xaa can be any naturally occurring amino acid
  unsure (1)..(250): unsure at all Xaa locations
MAGEDCRSGAEMDALVRRLKLHRPSPSPYDPDPAAAPVPATAGDGXLFRPRRAAVLVCLFRGDGGELRVILTKRSSSLSTHSGEVSLPGGKVEEGDADDVATALRESKEEIGLDPALVTVVASLEHFLSKHLLVVVPVVGILLDRQAFKPALNIAEVDEIFDVPLEMFLKDENRTSEEREKMGQTFTVHYFTYENGIQKYLIWGLTARILIHAASVVYERPPDFTERRAHFKLPMFTKDCSSMLAGPAKH

SEQ ID NO: 16143 - protein, 331 aa, Zea mays
MESGRLIFNAPGSGAGQMLFLDCGAGGGPGGGLFHRGGRPMLGLEEGRGVKRPFFTSPDELLEEEYYDEQLPEKKRRLTPEQVLLLERSFEEENKLEPERKTELARKLGLQPRQVAVWFQNRRARWKTKQLERDFDRLKASFDALRADHDALLQDNNRLRSQVVSLTEKLQEKEDATEGGATADTAAPAVDVEASLADDVEEPAEPAATFEVLQEVKSEDRLSTGSGGSAVVDADALLYGRFAAAVDSSVESYFPGGEDHYHDCGTMGPVNHGAGGGIQSDDDGAGSDEGCSYYADEAAAAAAAAFFAGHATHHHADEDEDAGQISWWMWN

SEQ ID NO: 16144 - protein, 349 aa, Zea mays
MAESSGSGSVSVDVERISFGGKDHLVRTRCGSVTVAVYGDEDKPALITYPDVALNYMSCFQGFFFCPEVASLLLHNFCVYHINPQGHEMGAAPMSSAVPVPSVDDLADQVADVLDFFSLGSVMCLGVTAGAYVLTLFATKYRERVIGLMLVSPLCKSPSWSEWLYNKVLLNLLYYYGNQGLVKECLLQRYFSKKLRGDAQCPESDIVRASRSLLDDKQGENIWRFLHSINERHDLTDSLKKLQCRTLIFVGESSQFHEDAIHMATKLDRRYCALVEVQDCGSLVTEEQPHAMVMPMEYFLMGYGLYRPYQLSSSPRSPLSPCCISPELLSPESMGVKLKPIKTRVGISL

SEQ ID NO: 16145 - protein, 262 aa, Zea mays
MEQEEVGLALGLSLGSGHHHQELKPQHPSHPCAALLEPSLSLSGPATKDDGPTAPVRRFAAVKRELQTMEGNDDEATGRVLVYSVASSAVVTADDDEGCNSSRKKLRLSKEQSALLEDHFKEHSTLNPKQKAALARQLNLSPRQVEVWFQNRRARTKLKQTEVDCEILKRCCETLTEENRRLHRELQQLRALSHPHPHPAAFFMPTAAAAALSICPSCQRLVATGASAAAATTAGADNKPKAGGPGGRAPHVFSPFTNSAAC

SEQ ID NO: 16146 - protein, 356 aa, Zea mays
MACLTDLVNLNLSDTTEKIIAEYIWIGGSGMDLRSKARTLPGPVTDPSKLPKWNYDGSSTGQAPGEYSEVILYPQAIFKDPFRRGNNILVMCDCYTPAGEPIPTNKRYSAAKIFSSPELAAEEPWYGIEQEYTLLQKDTNWPLGWPIGGFPGPQGPYYCGIGAEKSFGRDIVDAHYKACLYAGINISGINGEVMPGQWEFQVGPSVGISSGDQVWVARYILERITEIAGVVVTFDPKPIPGDWNGAGAHTNYSTESMRKEGGYEVIKAAIEKLKLRHKEHIAAYGEGNERRLTGRHETADINTFSWGVANRGASVRVGRETEQNGKGYFEDRRPASNMDPYVVTSMIAETTIVWKP

SEQ ID NO: 16147 - protein, 401 aa, Zea mays
MASNGIAPRDVCVVGVARTPLGGFLGALSSLPATKLGSIAIEAALKRANVDPALVQEVFFGNVLSANLGQAPARQAALGAGIPNTVVCTTVNKVCASGMKATMFAAQSIQLGINDIVVAGGMESMSNAPKYIAEARKGSRFGHDTLVDAMLKDGLWDVYNDCAMGMCAELCADNHALTREDQDAFAIQSNQRGIAARDSDAFAWEIVPIEVPVGRGKPPVLIEKDESLDKFDPAKLKKLRPSFKENGGTVTAGNASSISDGAAALVLVSGQKAQELGLQVLARIRGYADAAQAPELFTTTPALAIPKAISNAGLESSHVDFFEINEAFSAVALANQKLLGIPSEKINVHGGAVSLGHPLGCSGARILVTLLGVLREKGGKIGVAGVCNGGGGASALVLELA

SEQ ID NO: 16148 - protein, 330 aa, Zea mays
MTTRSKHRRHEEDQEMTMVELRRGPWTLEEDNLLMNYIACHGEGRWNLLARCSGLKRTGKSCRLRWLNYLKPDIKRGNLAPEEQLLILELHSKWGNRWSRIAQHLPGRTDNEIKNYWRTRLLEKTMAAAAASTSGEVLLPPLPPPPQLHPSRVAGLLASSSSSPVQRDTSDSDYLPQRYHHHPVDPSPSASSTVSSSAALAPVPCFSELSWVDQYGYGPYYSYGANLDDGAGVFDDSAALEEGLGLDALDLGPADDSDVAHSDATLLDYLNSACAGGGTMMMAVTGGGGGVQSSGCGATGGADADYRPSPCTWRTDELGDPRQHQWGGGI

SEQ ID NO: 16149 - protein, 384 aa, Zea mays
MALRQAGVPVIGLAAGEPDFDTPPAIAEAGMDAIRNGYTRYTPNAGTLELRKAICTKLQEENGVSYLPDEVLVSNGAKQCITQAVLAVCSPGDEVLIPAPYWVSYPEMARLADATPVILPTNISENFLLRPELLTDKINEKSRLLILCSPSNPTGSVYPKELLEKIADIVKKHPRLLVLSDEIYEHIIYQPAKHTSFASLPGMWERTLTVNGFSKAFAMTGWRLGYLAAPKHFVAACGKIQSQFTSGASSISQKAGVAALNLGYAGGEAVSTMVKAFQERRDYLVKNFKELPGVKISEPQGAFYLFIDFSAYYGSEVEGFGTIKNSESLCIFLLEKAQVALVPGDAFGDDKCIRISYAASLTTLQTAMSKLKEAVALLKPCVAA

SEQ ID NO: 16150 - protein, 427 aa, Zea mays
MPSTFYIRRPRPQPPRPASPRRLRSRLVTGEVSAGERRRLAGVQGHGLSTGSTGVVPRLEQLLNMDTTPYTDKVIAEYIWVGGSGIDIRSKSRTISKPVEDPSELPKWNYDGSSTGQAPGEDSEVILYPQAIFKDPFRGGNNVLVICDTYTPQGEPLPTNKRHRAAQIFSDPKVAAQVPWFGIEQEYTLLQKDVNWPLGWPVGGFPGPQGPYYCAVGADKSFGRDISDAHYKACLYAGINISGTNGEVMPGQWEYQVGPSVGIEAGDHIWISRYILERITEQAGVVLTLDPKPIQGDWNGAGCHTNYSTKTMREDGGFEEIKRAILNLSLRHDLHISAYGEGNERRLTGKHETASIGTFSWGVANRGCSIRVGRDTEAKGKGYLEDRRPASNMDPYTVTGLLAETTILWQPSLEAEALAAKKLALKV

SEQ ID NO: 16151 - protein, 236 aa, Zea mays
MSANVGESTSGVSSSDAAGGSFECNICFELPQEPIVTLCGHLFCWPCLYRWLHIHAHSPECPVCKALVEEDKLVPLYGRGKDRVDPRSKNMPEGEIPHRPTGQRPATAPRAHANSNFANANANANPWFPGAGVPLANARWGNYAFSAAFGGLFPMLSFQVHGFPDAAAYAQPAGFHYEYGHGHGHGFHHGGHMGQAQAHGVHRQAPLGQQQQQADIYLKALLFMIVILVLASLLAF

SEQ ID NO: 16152 - protein, 242 aa, Zea mays
MVTVREETRKGPWTEQEDLQLVCTVRLFGERRWDFIAKVSGLNRTGKSCRLRWVNYLHPGLKRGRMSPHEERLILELHARWGNRWSRIARRLPGRTDNEIKNYWRTHMRKKAQERKRNMSPSSSSSSLTYQSGYPDTPSTIGVEGQELHGGSGCITSILKGTPPDMDGYPMDQIWMEIEAPQMPSEESFVGGNHNVCSSLATPLPPPTVWEYYPEACWKVDDEIKMAPQFQFGYSEGVGPCF

SEQ ID NO: 16153 - protein, 329 aa, Zea mays
MASSSEPSALPTLLVFRVRELRFLAALRERYRVLDFFTSGSPLAAFLAAAAGGADPPRALVTVGGDSVRVDAALLDAVPSLRFVHSTGAGLDHIDLGECARRGVGVASSGTVYSTDVADHAVGLLVDVLRRVSAADRFVRRGLWPLHGDYPLGSKLGGKRVGIIGLGNIGTLIAKRLAAFGCVICYSSRKPKESVSYWYFPSVHDLASESDVLVVACALTRETRHIVNKDVLAALGKDGVVVNIGRGPNIDEAELVAALKEGRIAGASLDVFDKEPKVPAELFSMDNVVLTHHVAVFTTESRSDLRDVTISNLEAFFAGRPLLNPVLHS

SEQ ID NO: 16154 - protein, 247 aa, Zea mays
MSGGNAWSPLPSHGFESDSGGMGSRAGEPVARTNSGGGSSSKDSGSFECNICLDLAQDPVVTLCGHLFCWPCLYEWLHVHAHSQECPVCKAVVEEGKLVPLYGRGGNSTSPRARSVAGVEIPSRPTGQRPSTAPQPDHSNHYPPQNPWFMGAGAPPVAGGRWGNYTFSAAIGGLFPLLSFQVHVFPQVSAYGPAAGFPYGYGHSFHGWHGHGYGFPRQAPQGQQVDAYLKVLLLVVGVLVIASLIAF

SEQ ID NO: 16155 - protein, 300 aa, Zea mays
MPVILREMEDHSVHPMSKSNHGSLSGNGYEMKHSGHKVCDRHSSSESDRSHQEASAASESSPNEHTSTQSDNDEDHGKDNQDTMKPVLSLGKEGSAFLAPKLHYSPSFACIPYTVDAYYSGVGVLTGYAPHAIVHPQQNDTTNTPGMLPVEPAEEPIYVNAKQYHAILRRRQTRAKLEAQNKMVKNRKPYLHESRHRHAMKRARGSGGRFLNTKQLQEQNQQYQASSGSLCSKIIGNSIISQSGPTCTPSSGTAGASTACQDRSCLPSVGFRPTTNFSDQGRGGLKLAVIGMQQRVSTIR

SEQ ID NO: 16156 - protein, 154 aa, Zea mays
  misc_feature (132)..(132): Xaa can be any naturally occurring amino acid
  unsure (1)..(154): unsure at all Xaa locations
MDARMFGLETPRVAALHHLLDVPDGDKAGGGATRTYVRDARAMAATPADVKELAGAYAFVVDMPGLSTGNIRVQVEDERVLVISGERRREEREDAKYLRMERRMGKFMRKFVLPDNADVDKVAAVCRDGVLXVTVEKLPPPEPKKPKTIEIKVA

SEQ ID NO: 16157 - protein, 448 aa, Zea mays
MPFRSIVRDVRDGFGSLSRRGFEVRFLSHRRGKSHGAVHELHDPVLVVQSSCWASLPPELLRDVIERLETSEDTWPSRKHVVACAAVCRTWREMCREIVKSPEFSGKITFPVSLKQPGPRDGTIQCFIKRDKSTQIYSLYLSFSSAVPVENGKFLLSAKRNCRATYTEYIISINSGDTSRCTSNNTYIGKLRSNFLGTKFVIYDTHPPYNGTSQTVAGKTSQRFYSKKGSTKVSCRWYSIAQISYELNVLGTRGPRRMNCVMHSIPASCLEAGGSVPCQPDSIAAHSVGGSFSSVSLSKSSTMDHSMHFTSSRLSDAITGDGIVNRGQALNDADDEECKDMPLILRNKAPRWHEQLQCWCLNFRGRVTVASVKNFQLVAATQPAAGALTPSQAAPQPAPPPPPDQEKVILQFGKVGKDIFTMDYCYPLLAFQAFAICLSSFDTKLACE

SEQ ID NO: 16158 - protein, 461 aa, Zea mays
MASFSSLSASSSTSTPSFNIPAKTSAGTGSLSFHRARESQKSRARMVTVRAEAVDTTISPRVNALRPSKTMAITDQATALRQAGMPVIGLAAGEPDFDTPAVIAEAGINAIRDGATRYTPNAGTLELRKAICKKLEEENGLSYSADQVLVSNGAKQCITQAVLAVCSPGDEVLIPAPYWVSYPEMARLAGATPVILPTSISDNYLLRPESLVSVINENSRILILCSPSNPTGSVYPKELLEEIAAIVRKHPRLLVLSDEIYEHIIYQPAKHTSFASLPGMWERTLTVNGFSKAFAMTGWRLGYLAAPKHFVAACGKIQSQYTSGASSISQKAGLAALNLGYAGGEAVSTMVKAFQERRDYLVRSFRELPGVKISEPQGAFYLFIDFSSYYGSEVEGFGTIKDSESLCLFLLEKAQVALVPGDAFGDDKGVRISYAAAMSTLQTAMGKIKEAMALLRPPVAV

SEQ ID NO: 16159 - protein, 446 aa, Zea mays
MAVQVHRHRNKVRNGQAIRCAMATGKEQGAISTASSGDQTKGGLRGKLNKVVLAYSGGLDTSVIVPWLRENYGCEVVCFTADVGQGAIELEGLEKKAKASGACQLVVKDLKEEFVSEYIYPCLRAGAVYERKYLLGTSMARPVIAKAMVDVAKEVGADAVAHGCTGKGNDQVRFELTFYALNPELKVVAPWREWDITGREDAIEYAKKHNVPVPVSKKSIYSRDRNLWHLSHEGDILEDPANEPKEDMYMMSIAPENAPSKPEYLEIGIIAGVPVSINGRDLSPASLLAELNEIGGKHGIGRIDMVENRLVCMKSRGVYETPGGTIMAAAVRELESLTLDRETMQWKDIIALKYAELVYAGRWFDPLRQSFDAFMEKVTATTTGSVTLKLYKGSVNVASRKSPYSLYREDISSFENGEIYNQADAEGFIRLYGLPTRVRAMLEKGI

SEQ ID NO: 16160 - protein, 270 aa, Zea mays
  misc_feature (202)..(202): Xaa can be any naturally occurring amino acid
  unsure (1)..(270): unsure at all Xaa locations
MHPSAVSFDSGDGRRRGGAQMLLFGGGGSANSNGFFRGVPMAVLAMDDATRVGKRPFFTTHEELLEEEYYDEQAPEKKRRLTAEQVQLLERSFEEENKLEPERKTELARRLGMAPRQVAVWFQNRRARWKTKQLETDYDRLKAAYNALAADHQGLLADNDSLRAQVICLTEKLQGKETSLSATIAAQEVDQPNEHTTGTEKXLAQQLKDDLHSSCGCTGHGALSSEEEDGGVVSDEGCNFDLPDAMFAVGVTNHGAEEAQLANWTSWFWN

SEQ ID NO: 16161 - protein, 218 aa, Zea mays
MARRASLLLAAALLVAVAAAAVPPTCERIECPAYEVVDSANGFEIRRYTBAMWITTAPIEDISFVAATRTGFLQLFDYIQGKNAYNQTIEMTAPVLTRVSPSDGPFCASAFAVSFYVPAKNQADPPPAEGLRVDRWAGARYAAVRRFGGFVADADVGEQAARLEASLQGTRWAAAVNDARRADPASPYTVAQYNSPFEFTGRVNEIWMLFDADDDASM

SEQ ID NO: 16162 - protein, 163 aa, Zea mays
MDAVMFGLETPLMAALQHLLDVPDGDAGAGDNKTGGGGGATRTYVRDARAMAATPADVKELPGSYAFVVDMPGLGTGDIRVQVEDERVLVVSGERRREEREDDAKYLRMERRMDKFMRKFVLPDNADVDKVAAVCRDGVLTVTVEKLPPPEPKKPKTIEVKVA

SEQ ID NO: 16163 - protein, 244 aa, Zea mays
MRQNGAVMIQFGHQMPDYDSPATQSTSETSHQEASGMSEGSLNEHNNDHSGNLDGYSKSDENKMMSALSLGNPETAYAHNPKPDRTQSFAISYPYADPYYGGAVAAAYGPHAIMHPQLVGMVPSSRVPLPIEPAAEEPIYVNAKQYHAILRRRQLRAKLEAENKLVKSRKPYLHESRHLHAMKRARGTGGRFLNTKQQPESPGSGGSSDAQRVPATASGGLFTKHEHSLPPGGRHHYHARGGGE

SEQ ID NO: 16164 - protein, 376 aa, Zea mays
MAMWRAAARQLVDRALGSRAAHTSTGSKKIVGVFYKAGEYADKNPNFVGCVEGALGIRGWLESQGHQYIVTDDKEGPNCELEKHIEDMHVLITTPFHPAYVTAERIKNAKNLELLLTAGIGSDHIDLPAAAAAGLTVAEVTGSNTVSVAEDELLRILILLRNFLPGYQQVVQGEWNVAGIAHRAYDLEGKTVGTVGAGRIGRLLLQRLKPFNCNLLYHDRLQIDPELEKEIGAKFEEDLDAMLPKCDVIVINTPLTEKTRGMFNKERIAKMKKGVIVVNNARGAIMDAQAVADACSSGHIAGYGGDVWFPQPAPKDHPWRYMPNHAMTPHISGTTIDAQLRYADGVRDMLNRYFKGEDFPVQNYIVKEGQLASQYQ

SEQ ID NO: 16165 - protein, 174 aa, Zea mays
MTELFDTALTSLLHLPEVLDRLAAADGDRRSAGHHAAHGHGHGHGHGRVHGLGGGGAPVDIVESPREYAFVLDVPGLSKSDIQVTLEEDRVLVMKGGSGKRKRDEEEDMNGEGCRYIRLERGAAPRSFVRKFRLPEDADTGGVAARCENGVLTVTVKKLPPPEKKAKTVQVTIA

SEQ ID NO: 16166 - protein, 579 aa, Zea mays
MAARSLLLYALLLLALATAAPSHGLTQADVAKRLKEVLSERNRGHEMLDSWNGDGDPCSPSTWEGFSCEPKDGAQVVVKLNFSSKKLQGPIPAEIANLTELNEIHLQYNNFTGSIPASFSALRHLLKLSVICNPLLNNKQPDGFSSGVNFSYGGCAAQEYYSSPAEEYQSPPAVASQKVYVIGGVAGGSLACTVALGSFFVCFNKRERRSPKKDCSSTTNPVFQECSIHNTTNPAVQQFSLKAIQTAISNYKTTIGEGGFGAVYRGALANGQEVAVKVRSSSSTQGTREFNNELRLLSAVWHENLVPLIGYCCEKDQQILVYPFMSNGSLQDRLYGEASKRKVLDWPTRLSVCIGAARGLVYLHNFAGRCIIHRDIKSSNILLDHSMCGKVADFGFSKYAPQEGDSNPSMEVRGTAGYLDPEYYSTQVLSTRSDVFSFGVVLLEIVTGREPLDVKRPRHEWSLVEWAKPYIREYKIEEMVDPGIKGQYCSEAMWRVLEVASVCTEPFSTFRPTMEDVLRELEDALIIENNASEYMRSIESTGTLGSNRYLSIDRKMFASGSARIESTKGNLQAMPSLPR

SEQ ID NO: 16167 - protein, 208 aa, Zea mays
  misc_feature (63)..(63): Xaa can be any naturally occurring amino acid
  misc_feature (113)..(113): Xaa can be any naturally occurring amino acid
  misc_feature (187)..(187): Xaa can be any naturally occurring amino acid
  unsure (1)..(208): unsure at all Xaa locations
MASDRVLGTVKWFNGTKGFGFITPDDGSEDLFVHQSSIKSDGYRSLNDGDAVEYTVGSGNDGXAKALDVTAPGGGPLAGGERPDGGNGGGRGGYGGGDRGYGGGGDRGYGGGXDRGYGGGDRGYGGGGDRGYGGDRGYGGGGGYGGGYGGGGGGGGRGCFKCGEEGHMARDCSQGGGYGGGGGGGRXSECYNCGQEGHISRDCPNKRR

SEQ ID NO: 16168 - protein, 344 aa, Zea mays
  misc_feature (243)..(243): Xaa can be any naturally occurring amino acid
  unsure (1)..(344): unsure at all Xaa locations
MATSSTGCLVLLCLASPLLLLLPSAVVHGHPWGVGGGGGGLSPQFYDHSCPMAEKIVQSVVAQAVAKETRMAASLVRLHFHDCFVKGCDASVLLDNSSSIVSEKGSNPNRNSIRGFEVVDQIKAALEAACPGTVSCADILALAARDSTALVGGPYWDVALGRRDSLGASIQGSNNDIPAPNNTLPTIITKFKRQGLNVADVVALSGGHTIGMSRCTSFRQRLYNQTGNGMADSTLDVSYAARXRQSCPRSGADSTLFPLDVVAPAKFDNLYYKNLLAGRGLLSSDEVLLTKSAETASLVKAYAADAGLFFRHFAQSMVSMGNISPLTGSQGEIRKNCRRLNSGH

SEQ ID NO: 16169 - protein, 280 aa, Zea mays
MAAMANTSRLPTPCSLPTISIGAKSRRLAVAAVRCGPGGSRSHRRSLGVLLCRSSSTAGAQGSTRMEDYNTAMKRMMRNPYEYHHDLGMNYAVISESLIVGSQPQKPEDINHLKNEERVAYILCLQQDKDIEYWGIDFQSIVNRCKELGIQHIRRPAVDFDPDSLRSQLPKAVSALEWATSQRKGRVYVHCTAGLGRAPAVAIAYMFWFENMDLNTAYQKLTSIRPCGPSKRAIRAATYDLAKNDPSKEPFENLPEHAFEGVADWERKLIHDRVRALHEA

SEQ ID NO: 16170 - protein, 663 aa, Zea mays
MASPDDESAQPPSKRPRRDAEPEVDAAEPSPRVVLNPADCDLDFDVGGGGLRGSALHEGGFAYCWSGARATVGARGGGRYCFGCRIVAEQPVEMDPTTSGERHLCRIGVSRGDDPVGALGESQHSFGFGGTGKFSHQRRFVNYGVKFGVGDTVVCAVDLDSKPMASIGFARNGEWLGIARHFDAGEKGLGLVDAPLRPMRWGSALFPHVLLKNVIVEMQFSREDGLLPVDGYEPWASAFSQRNSVFGPSFEQNKCEVMMMVGLPASGKSTWAEKWVKEHQEKRYILLGTNLVLEQMKVPGLLRKNNYGERFERLMDYATWIFNKLLTRAANTPRNFIIDQTNVYKNARIRKLRPFANYRKTAVVMFPTPSELKSRAAKRFNEMGKEIPAEAVNEMTANFVLPLSKDMPHSKEPFDEVIFTELSRDEAQRTLDDMQRVLPRNVTPSYGNSGNQKHYSSTYAGTAAPLDPSARSSMPGFYPPTANSYGVGDLRSSAATFSTGVHTEGNTTHGQTPCSVRSFRSPTGNQHGIHSSYPSAPNQYQMPSSYLSNSNQYEVRASYRSTPLPGYGQSTYASRRNPSPYNSEMHQGIQAPMSSRNLYRAPGSAEAYVAPCYAAGNLIGRPHQVLSPSTFPAHGPQPAAQWVPNQGSSRSWSSDSYRPYYGQ

SEQ ID NO: 16171 - protein, 287 aa, Zea mays
MVMEETIDDSEMSLSNMVLGFLEDFERDERRPENDDDNNEEEGSSGGDTAESKAFWQTQHLQLREALAKGSPAESRIRADTEEAVKSMRAAACSCSCTGRPAARDCRPCMLRHVADRLRDAGYDSALCKSKWTRSPDIPSGEHSYVEVAVQTRSGKAVRVVVELSFRAEFEVARASAGYRALVTALPEVFVGRADRLRGVVKVMCAAAKQCMKDNNMHMGPWRKHKYMQAKWLGTPERGVAAAAAVAAEMPVVAVPSVAVGSSPEKQTKFRASMLTFDFGRTALEVA

SEQ ID NO: 16172 - protein, 332 aa, Zea mays
MEPHHANKPKPRPKLSAKHSKFISCKLYISESRNATAVDAVERASKSDPQVVVVSQFGDHHYNRFRYTLVSYIVVDDDGVDGGGGSSAAGEAIVVHSPIRKVLLAMMEAAFSSIDLESQSGAHPRMGVVDDLSFHPVGQATVEDAASLARQVASDIACIAAVPVFLYAAAHPAGKSVGAVRRELGYYRPNYRGNQWSGSVLPDVLPVKPDVGPAHVVSHKRGATTVGVTPWIEGYNVPVLCKDVATVRRITRGVTGRSGGLPTVQALALFHGDDCTEIACLLDPDHASAYQVQTVVEQIAGDQGLEVEQGYYTDITKDEALDKYLKIACADD

SEQ ID NO: 16173 - protein, 192 aa, Zea mays
MAAQEQEQEKQQAKTSTTSSLPSSSERSSSSARNNLTEGGAESDEEIRRVPEMGGASASASSGAGADERPKGEDGKQGQVAAGAQPPAGGKKRGRTAGDKEQNRLKRLLRNRVSAQQARERKKAYLTELEAKAKGLELRNAELEQRVSTLQNENNTLRQILKNTTAHASKRSGGGAGGKGGDGGKKHHLAKS

SEQ ID NO: 16174 - protein, 412 aa, Zea mays
MASEMSKNVKALDEQEVTSQHSRAQTSDAAEEQQQQQQAVDPLARQSSIMSLTLEELQNSLCEPGRNFGSMNMDEFMANIWNAEEFQAATAGCNKEGAEREPVPVATTTGTGENGGGGGSGRGLVRQGSFALPPPLSRKTVEEVWAEISQGPADFQASAAPQPVAQPQAASGGGVAASGRQATLGEMTLEDFLVKAGVVRGAFAGHGHGVGMVPAGPMGMQHNAAPPMMYQVAAAAAPPPGAVYPVMGDGMGYHGGGYPGGVAVVPPPPPSQCVAAAASPGSSDGMSAMTQAEMMNCIGNGGVVRNGGGGARKRDFPEDGCTEKTVERRQRRMIKNRESAARSRARKQAYTVELEAELNHLKEENERLRAEERTILLSKKKMLVEKMMEQARENVSAKKVGPGLRRWGSAMW

SEQ ID NO: 16175 - protein, 1465 aa, Adiantum capillus-veneris
MATPGGPKTKHSVSVAQTRADARLHAAFEGSGDAGAGGSRAPFDYSKSGMDASSVTSVAPEAITAYLQRMQRGGLTQAFGCMLVVAGQKIVAFSENAPEMLEVAAGLGTDLRMLFTQGSTAALDQAVKEEDLSSVNPLVLQSCGGSAKQFYAMLHRIEDVAGVVIDLEPIENGVVEKKSSAEMAVKPIARVQSLPGGEIGRLCQVVVEEVQEMTGYDRVMAYKFHEDGHGEVVAEVRRPDLEPYLGLHYPSTDVPQASRMMFMKNGVRMIGDCTLPPVRVVQAKELAQPISLAGSTLRAPHGCHAQYMSNMGSAASLTMAVAIDDYDDDSSLSCGSRKLWGLVVCHHPSPRTVSYPLRCACEKLMVAFGVQLNIELDLAAQLRENHILTTQALLCDMLRRIRGAPIGIVSRSPSIMDLVKCDGAALYYGGRFWPLGTTPSEFQIRDLAEWLLGASEEIASTGVTCTDSLAEMGYPGAALLGDAVCGMAAAMITPNSDFLFWFRSHTAKEVYWGGAEHDPQSRDDDSWMQLPRSSFKAFLEIVKRRSLPWEEVEVDAIRSLQLILREDLEQFCAAVGAVKASDGDDEDSLVPSAKKLSLKETEENGGADNSKKLERMHSAAAGGGGGGGRWEKMRLPSSLAQEWMEAIRGTGDGGASGGGGGGPFDWDLISAFQHNSFIVVDALKPDFPIIYASTGFFNLTGYTSREVIGGNCRFLQGPDTNPADVASIREALAQGTGTFCGRLLNYRKDGSSFWNLLTIAPIKDDLGSIVKLIGVQLEVSKYTEGIRANNRRPNGMPQSLIRYDVRHQDKVSAFIAQLVAALTKPDKVETPRLSSAMRFSLTGQTIESLPQPTAIPREGGGRTRRPRSSSFLSLLGMEKEKDIPEEDELQELEVIMLEDASVGRPGSLDDPERTRRGIDLATTLERIGKSFVITDPRLPDNPIIFASDRFLELTEYTREEVLGNNCRFLQGRGTDRKAVQLIRDAVKEQRDVTVQVLNYTKGGRAFWNLFHLQVMRDENGDVQYFIGVQQEMVAPRPVHQPPELPDILPDRVEQEKAEVVRATAQRVDAAARELPDANLVPDHLFAPHSKVVTPLPHSKTNSSSWFAIRRVQRRLRRGERLGLKHFRPIKPLGSGDTGSVHLVELRGTGQVFALKAMDKSMMLQRNKVHRARAEREILAIMDHPFLPTLYASFQTKTHVCLITDYCPGGDLFLLQDKQPTQTLSERTASFYAAEVVVALEYLHCMGVIYRDLKPENVLLQKNGHILLTDFDLSFLTSCRPQLILQGGKGRSRRSKRRRRVTFCAEPRVSSNSFVGTEEYIAPEIISGEPHSSAVDWWALGILLYEMLYGRTPFVGRNRQKTFYNVLNKELIFPTSIPVSLAGRQLIAGLLQRDPTIRLGTLRGASELKKHPFFREINWPLIRWRKFSANQAHNANNVSSLDEGESDSGNAWEANGGSTQSFQDTF

SEQ ID NO: 16176 - protein, 601 aa, Sinorhizobium meliloti 1021
MNVKDRKEREVDNETIAGILRRVIAENGRDHIGGYAFAIACLMVVAATTAFTAWISETVINEAFAHKRGDVVLLVCFSIFAAFVLRGLATYGQAVALSKIGNSIVASYKRRLYTHLMALSIGFFQEKRSAHLTAKINQNISGIRDVLNMTVTSVARDVLTLVGLVGVMISKDWLLSLITFVGAPPLLLGLRYISRRLRLATREAVEANSRVLGAMQETIQGISIVKAFTMEDELGRKVEGIIKGAENRANRIARLSERTAPLTETFAGLAISGVLAYAAFRTIYSNVAPGALFAFVTALLLAYDPVRRLARLQVSLERAAVNARMLYEILDTVPHQRDLPGARQLAFSEATVEFRDVRFSYGNGEEVLKGVSFLAEGGKTTALVGPSGAGKSTIISLIPRFYDPQSGVILIDGQDIAAVTKQSLRNGLAYVSQQAYLFEGSIRDNIRYGRPEATDAEVEEAARLAYAHDFILAQPQGYDTPVGEQGMTLSGGQRQRLSIARALVRNAPILLLDEATSALDTESEAAVQKALDQAMSGRTVIVIAHRLSTVVNADKIVVMNEGLVVEEGTHEELARRPDGVYARLHNIQGGFLELTVGAAAT

SEQ ID NO: 16177 - protein, 706 aa, Sinorhizobium meliloti 1021
MQNRVVSCRFTGSTARRATMPEGIRGRSHILFLVPLSRAESVGRLHQVQRFKVNLPVFVGSVAVIALFVGIGVIAPKRAESIFSGMQTAILSGFGWLYLLSVAVFLFSMLFLAFSRYGELKLGPDDSEPEFRYLSWIAMLFAAGMGIGLMYFAVGEPMTHFASPPEAEPLTIAAQREAMSVTFFHWGVHAWAIYSVVGLSLAYFGYRYNLPLTVRSGLYPLLKEGIHGPIGHVVDIFAICGTMFGLATSLGFGILQINSGLNYLLGIPQSIYVQLLLVTVVTAIATISVVTGVEKGVRILSETNLFLAVLLMLFVLVVGPTGTLMRDFVQNIGLYLDSLVLRTFNIYAYEPRPWIDSWTLFYWAWWISWSPFVGMFIARISRGRTVREFVTAVLFVPAMFTFLWMTVFGNTAIYVDTTIANGELARDVKADLSVALFQFFEYLPWPAVTSTLAVLLVSIFFVTSSDSGSLVIDTIASGGETATPALQRIFWCSLSGIVAAVLLSTGGLTALQSATISTALPFSLVMLILVWSLFVGMRADLARTQSPGSLGPRAYPASGVPWQRRLAMTLSTPDRRAVEKFLQASVLPALEAVARELTRRSRPASVGRDAETGALTLTVPAEGHRDFVYGVQMSEHKLPAFTAYDATVADVRYEARTFFSDGSRGYDIMGMADNQIINDVLFQFERYTGFVRSPESSLLATSPEER

SEQ ID NO: 16178 - protein, 376 aa, Sinorhizobium meliloti 1021
MTSAGSAYIDGAKAERDRERARAAPHSVLNLKRSRRNGEPMKFLDETKVYIRSGDGGAGAVSFRREKFIEFGGPDGGDGGRGGDVWVEAVNGLNTLIDFRYQQHFKAKTGTHGMGRNRTGAKGGDVTLKVPVGTQIFEEDNETLIVDMVAEGQRYRLAAGGNGGFGNAHFKSSTNQAPSWANPGLEGEEKTIWLRLKLIADAGLVGLPNAGKSTFLAACTRARPKIANYPFTTLHPNLGVATIDEKEFIIADIPGLIEGAHEGVGIGDRFLGHVERTRVLLHLVSAQEEDVAKAYKTVKHELEAYGGGLEEKPQIVALSQIDVLDEEELKAKAKALGKACGTPPLLISAVTNKGMTEALRALRSVIAAAKAGEEEA

SEQ ID NO: 16179 - protein, 322 aa, Sinorhizobium meliloti 1021
MSRPRILVPGKINPRVLERLPEMFETVRIERADAALVTADMRDVSGIAVSGKLPVPLMDAFPSLEIVANFGVGYDGVDVSRAAARGIVVTNTPDVLTEEVADTAIGLLLNTLRLLPQAEQWLRQGRWVREGAFPLSPLSLRGRTVGLFGLGRIGLAIARRLEAFGVSIAYHTRTPREGLGFTYHPTLVGMAEAVDTLIVIVPGTASTLKAVNADVLSALGPKGVLINVGRGSTVDEAALVTALQNGTIAGAGLDVFENEPNVPEALLSFPNVSLLPHVASASVVTRNAMSDLVVDNLKAWFSTGEALTPVAETPFRRRAIQN

SEQ ID NO: 16180 - protein, 327 aa, Brassica oleracea var. alboglabra
  misc_feature (267)..(267): Xaa can be any naturally occurring amino acid
  unsure (1)..(327): unsure at all Xaa locations
MDSWSYGTFLLPSDSFPENPRTMAQGLSNEFDKVDDVNGLCAVSSSSNLSSLDFKLRSFMDYGNYDGNTSSRAKKPRASSSSPLCQVHGCNMDLSSSKDYHKRHRVCEAHSKTSVVIVNGIEQRFCQQCSRFHFLSEFDNGKRSCRRRLAGHNKRRRKPSFYFLHGKQQQQHKLLPQGTKLSAFLPLATDFHGRLVSFKDEPMFPAENMSFYSPEAASGVSSIWDLHEAAPPRYTCAHSLLSAQSQQHLSETQNQTLNASIIDYHHXQPLRTDLGNSKTDSSSCNGKRSSTVDLLQLSSHLQRIEQQQRSFTNDDVKHEYNNELYFP

SEQ ID NO: 16181 - protein, 67 aa, Streptomyces flavoviridis
MASGTVKWFNAEKGFGFIEQDGGGADVFAHYSNIAAQGFRELLEGQKVSFDIAQGQKGPTAENIVPA

SEQ ID NO: 16182 - protein, 498 aa, Streptomyces flavoviridis
MYRTRKNDRFARTRDGSADSGKGGNRFASPAPRRSAGPGRSGGHGRRPAAVHGEFALPRTITPALPAVEGFADLDMPGELLAALGKDGVTVPFPIQAATLPNSLAGRDVLGRGRTGSGKTLAFGLALLARTAGRRAEPRQPLGLVLVPTRELAQQVTDALTPYARSVKLRLATVVGGMSIGRQASALRGGAEIVVATPGRLKDLIDRGDCRLNQISITVLDEADQMADMGFLPQVTALLDQVRPEGQRMLFSATLDRNVDLLVRRYLTDPVVHSVDPSAGAVTTMEHHVLHVHGADKHAATTEIAARDGRVIMFLDTKHAVDRLTRDLLNSGVRAAALHGGKSQPQRTRTLTQFKTGHVTVLVATNVAARGIHVDNLDLVVNVDPPTDHKDYLHRGGRTARAGESGSVVTLVTPSQRRGMVRLMSNAGIRPQTTQVNPGDEALSRITGAQAPTGIPVVITAPVDERPKKRGATSRGRRRPASATRRARALQSPAGAAA

SEQ ID NO: 16183 - protein, 637 aa, Streptomyces flavoviridis
MCGIVAAVDFDGSLGADAVAPALRVLRPRGPDGEGTWVSPTGRAVLGHTRLAVNDPAGGAQPMSVADGALWIVANGEFYGHRALRERLRRRGVAVRSGSDSEVALHLFHAHRERALDELHGEFAFVVWDERRAELTAVRDRFGVKPLYYARLGRRLLIASEIKALLALGVSPEWDTAAFADHLNLAMGPDATPVRAVRQVPPGCLLHADAGGLRLREYWDIDYPRAEEHADVREQDRSAHLDAVEAALTQAVLRRTDVDGPLACHLSGGLDSSSVLALAARTRDITAFTVAFEGSGLDESALARRTADHLGVRHQVVHHTPDGHLDRLVRTLHAGEMVQENPHGVARSVHAGAIAAAGHKVALAGEGGDEVLAGYPQFGKDLALTLDPAQRARTRAAYAQLADTADLPRHLRTLVADLGFVPSWIVERHATVARPIAALLTPDFARLTRERDSAAALLARAGDRLVDRTPLHRSLYLFARSRFANYILMAERLDAAHGVEVRLPFLDDGLFDVLRRTPPQWYAHDGHTKHLLRATVGTQMLTAEVRSGRKRGFMAPPAIGDEAAFAALRGAITPAALDDSPFFDRRAVLAWLDRLRALPAARRAVHDPIVQLVAGALLLTDVFRQAGRAAHERSVRV

SEQ ID NO: 16184 - protein, 259 aa, Vigna angularis
VLETSPGVRWDDVAGLTEAKRLLEEAVVLPLWMPEYFQGIRRPWKGVLMFGPPGTGKTLLAKAVATECGTTFFNVSSATLASKWRGESERMVRCLFDLARAYAPSTIFIDEIDSLCNARGASGEHESSRRVKSELLVQVDGVSNSATNEDGSRKIVMVLAATNFPWDIDEALRRRLEKRIYIPLPNFESRKELIRINLKTVEVATDVNIDEVARRTEGYSGDDLTNVCRDASLNGMRRKIAGKTRDEIKNMSKDEISKD

SEQ ID NO: 16185 - protein, 93 aa, Candida glabrata
MSETRAPRRKTTRRKKDPNAPKRALSAYMFFANENRDIVRSENPDVTFGQIGRLLGERWKALTAEDKQPYEAKAEADKKRYESEKELYNATRA

SEQ ID NO: 16186 - protein, 142 aa, Candida glabrata
MISIDFSNLIVIIAVLLLTRYISQKFYSSLGNKMVSQDTVNSVKNMIGQKKIFVASKSYCPYCRAAKQTLFEELKVPMDKAVVLELDEIEEGSDIQQALAEINGQNTVPNIYIDGQHIGGNSDLQKLKQTGKLQPLLQKVLA

SEQ ID NO: 16187 - protein, 330 aa, Catharanthus roseus
MASSSSSSSSFSSNFGIVIMVIVLSIIMMRSCSGQLSSEFYSKTCPQVYNTVRKGVESAVSKEKRMGASLLRLHFHDCFVQGCDGSILLDDTSSLRGEKTAGPNVGSVRGFDVVDNIKSDVEKVCPGVVSCADILAIAARDSVVALGGPSWKVKVGRRDSKTASLSGANSRIPPPTSNLRNLISSFQAVGLSAKDMVVLSGSHTIGQARCTVFRARIYNESNIETSFARTRQGNCPLPTGNGDNSLAPLDLQSPNGFDINYYKNLINKKGLLHSDQELYNGGSTNSLVEAYSKDTKAFYSDFAAAMIKMGDISPLTGSNGEVRKNCRRVN

SEQ ID NO: 16188 - protein, 455 aa, Pseudomonas pseudoalcaligenes
MSVNSLDDPFSPDSELSHAAGCACQRCTPSAAALPDSSEAMLDRAVENAIVRGVFGHNDFSRRSFMGMVGGGVAAAILGSMIPLDAVKAAVKDSLGPLEKTKLKIGFVPITCATPIIMAEPMGFYAKYGLDVETVKTAGWAVARDKSLAGEYDASHMLSPMPLAISLGLGSAQTPFVMPALENVNGQAIVLGMQHQDKRDPKLWKGMRFGVPFEYSMYNFLLRYYVAEHGLDPDRDIQIRVVPPPEMVANLRAGNLDGFLSPDPFNQRAVWEKVGFIHLLTKELWPGHPCCAFACSQRFASENPNTYGALLHALIDATQYSSKAENRKAVAEAISTRNYLNQPVPVVQQVLSGRYADGLGNIHDEPQRIDFDPFPWQSMAVWILTQMKRWGYLQGDVDYRNIAERVFLAADAGKVMKELGLPVPADAYKSFSVMGKPFDPADPDGYLASFAMRRS

SEQ ID NO: 16189 - protein, 592 aa, Malpighia glabra
MFRFITLNRTLRHQYNHRKTLIPAVQLKPTPTRTFCTSPPTATDSEVRKYLGYTALFIFCGAATYYSFPFSENAKHKKAQIFRYAPLPEDLHTVSNWSGTHEVQTRNFHQPETINELEELVKVSNEKKERIRPVGSGLSPNGIGLSRLGMVNLALVDKVLEVDKEKKRVRVQAGIRVQELVDGIKEHGLTLQNFASIREQQIGGIVQVGAHGTGARLPPIDEQVISMKLVTPAKGTIEISKDKDPELFYLARCGLGGLGVVAEVTLQCVERQQLVEHTYISNMKDIRKNHKKLLSDNKHVKYLYIPYTDAVVVVTCNPVSKWRGVPKFTPKYTEDEALQHVRDLYQEPLNKYRGGEITSKSSEDDSPDINELSFTELRDKLLALDPLNKDHVIKVNQAEAEFWRKSEGYRVGWSDEILGFDCGGQQWVSETCFPAGTLANPSMQDLDYIEDLKQLIEKEDIPAPAPIEQRWTARSQSSMSVASSSKEDDIFSWVGIIMYLPTMDARQRKEITEEFFHYRHLTQAELWDKYSAYEHWAKIEVPKDKEELEALLERLKKRFPVDAYNKARKELDPNKILSNNKLEKLFPSLDAI

SEQ ID NO: 16190 - protein, 320 aa, Gossypium hirsutum
MASSFGVLFVVGVWMMMGSGSYAQLSTNFYSKSCPKVLSTVELVVETAVSKEQRLGASLLRLFFHDCFVNGCDGSVLLDDTSSFTGEQTATPNNGSLRGFEVVDEIKAKVEKVCPGVVSCADILAIAARDSVVILGGPDWDVKLGRRDSKTASFSDANSGVLPLGSANLSQLISLFQAQGLSTKDMVALSGAHTIGKARCLVFRNRIYNDTIIDTSFAKTRRSSCPRTRGSGDNNLAPLDLATPNSFDSKYFENLLNKKGLLHSDQELFNGGSTDSLVKTYSSNVKKFYSDFIAAMIKMGDIKPLTGSNGEIRKNCGKPN

SEQ ID NO: 16191 - protein, 583 aa, Bromus tectorum
LRPWGPSEPRKGADILVEALERCGIVDVFAYPGGASMEIHQALTRSPVITNHLFRHEQVEAFAASGYARASGRVGVCVATSGPGATNLVSALADALLDSIPMVAITGQVSRRMIGTDAFQETPIVEVTRSITKHNYLVLDVEDIPRVIQEAFFLASSGRPGPVLVDIPKDIQQQMAVPAWDTPMSLPGYIARLPKPPSTESLEQVLRLVGEAKRPILYVGGGCAASGEELRRFVELTGIPVTTTLMGLGNFPSDDPLSLRMLGMHGTVYANYAVDKADLLLAFGVRFDDRVTGKIEAFASRSKIVHIDIDPAEIGKNKQPHVSICADVKLALQGLNDLLNGSKAQKSLDFGPWQEELEQQKRTFPLGYKTFGEAIPPQYAIQVLDELTKGEAIIATGVGQHQMWAAQYYSYKRPRQWLSSAGLGAMGFGLPAAAGASVANPGVTVVDIDGDGSFLMNIQELALIRIENLPVKVMILNNQHLGMVVQWEDRFYKANRAHTYLGNPENESEIYPDFVTIAKGFNVPAVRVTKKSEVRAAIQKMLDTPGPYLLDIIVPHQEHVLPMIPSGGAFKDIIMEGDGRIEY

SEQ ID NO: 16192 - protein, 583 aa, Securigera parviflora
MCGILAVLCAENSQAKRVRVLELSRRLKHRGPDWSGLHQHGDCYLAHQRLAIVDPASGDQPLFNEDKSLIVTVNGEIYNHEELRKQLPNHKFRTGSDCDVIAHLYEEHGENFVDMLDGIFSFVLLDTRDNTFIVARDAIGVTSLYIGWGLDGSVWISSEMKGLNDDCEHFECFPPGHLYSSKDRAFRRWYNPPWFSETIPSAPYDPLALRHAFEKAVIKRLMTDVPFGVLLSGGLDSSLVASITSRYLATTKAAEQWGSKLHSFCVGLEGSPDLKAAKEVADYLGTVHHEFTFTVQDGIDAIEDVIYHVETYDVTTIRASTPMFLMSRKIKSLGVKWVISGEGSDEIFGGYLYFHKAPNKEEFHRETCRKIKALYQYDCLRANKSTFAWGLEARVPFLDKEFINVAMNIDPENKMIKRDEGRMEKYILRRAFDDEEHPYLPKHILYRQKEQFSDGVGYSWIDGLKEHAAKHVTDKMIFNAANIFPHNTPTTKEAYYYRMIFERFFPQNSARLTVPGGASVACSTAKAVEWDAAWSNNLDPSGRAALGVHLSAYDNQNNLANKPVEFEKIIPMEAPSLGVAIQS

SEQ ID NO: 16193 - protein, 456 aa, Securigera parviflora
MCGILAVLGCSDDSQAKRVRVLELSRRLKHRGPDWSGLHQHGDCFLAHQRLAIVDPASGDQPLFNEDQSIIVTVNGEIYNHEELRKQMPNHKFRTGSDCDVIAHLYEEHGENFVDMLDGIFSFGLLDTRDNSFIVARDAIGVTSLYIGWGLDGSVWIASELKGLNDDCEHFETFPPGHLYSSKEREFRRWYNPPWFSESIPSAPYDPLALRQAFEKAVVKRLMTDVPFGVLLSGGLDSSLVASITARHLADTKAAKQWGAKLHSFCVGLEGSPDLKAGKEVADYLGTVHHEFQYTVQDGIDALEDVIYHIETYDVTTIRASTPMFLMSRKIKSLGVKWVISGEGSDEIFGGYLYFHKAPNKEELHKETCRKIKALHKYDCLRANKSTFAWGLEARVPFLDKEFINVAMNIDPENKMIKLDEGRIEKWILRKAFDDEENPYLPKHILYRQKEQFSDG

SEQ ID NO: 16194 - protein, 205 aa, Fusobacterium nucleatum subsp. nucleatum ATCC 25586
MSYIYNLLKQFLAFLLNTTDKYVGNFGISIIIVTILIKIILLPLTLKQDKSMKEMKKLQPELEKIKQKYANDKQMLNIKTMELYREHKVNPLGGCLPILVQLPILFALFGVLRSGIIPADSSFLWMRLADPDPFYVLPVLNGAVSFLQQKLMGTSDNAQMKNMMYVFPIMMIVISYRMPSGLQLYWLTSSLIAVIQQYFIMKKGA

SEQ ID NO: 16195 - protein, 397 aa, Fusobacterium nucleatum subsp. nucleatum ATCC 25586
MKVYLDNNATTKVDEEVVKAMLPYFSDYYGNPFSLHLFGAETGKAVTEARQTIADILKAKPNEIIFTASGSEADNLAIRGIAKAYKHRGKHIITSTIEHPAVKNTFMDLIEDGFEVTMVPVDENGVMIIDEFKKVLREDTILVSVMHANNEVGSFQPIEEIAKITKERKIILHVDAVQTMGKVEIYPERMGIDLLSFSGHKFHAPKGIGVLYKRDGVRLARIITGGNQEGKRRPGTSNVPYIVGLAKALEISVANMKEEWNREETLRNYFEDEVSKRIPEIKINGKEARRLPGTSSITFKYLEGESMLLNLSLKGIAVSSGSACSSDSLQPSHVLLAMGIPAEFAHGTLRFSLSKYTTKEEIDYTIESLVEIIGKLRELSPLWKIFKDNKLTNEASF

SEQ ID NO: 16196 - protein, 419 aa, Fusobacterium nucleatum subsp. nucleatum ATCC 25586
MEEINVLKFDMFTTLMLAVLAIYFGDFMRKIFPILKKYCLPASVVGGTVFALISLLLFKMGIVQLDFDYKAINQLFYCIFFAASGAAASMALLKKGGKLVAIFAVLAAILAACQNGMALVVGKFMNIDPLISMMTGSIPMTGGHGNAASFAPIAVDAGAPAAIEVAIAAATFGLISGCMLGGPFGNFLVKRFKLEGSTSNEQAMGEIDAEGESGNLLVDKPNIIQAVFLMCIAIGIGKIIELGLKSIQENTGWKVALPIHVCCMFAGIVIRLIYDRKEGNHDVLYESIDIVGEFSLALFVSMSIITMKLWQLSGLGLALVVLLIAQLVLIVTFCYFLTFRLLGKNYDAAVMAVGHMGFGLGAVPVSMTTMQAVCKKYRYSKLAFFVVPVIGGFISNLTNAVIITKFLDLAKDLHTIWIS

SEQ ID NO: 16197 - protein, 296 aa, Fusobacterium nucleatum subsp. nucleatum ATCC 25586
MKAGFIAVVGRPNVGKSTLINKLVSEKVAIVSDKAGTTRDNIKGILNFKDNQYIFIDTPGIHKPQHLLGEYMTNIAVKILKDVDIILFLIDASKPIGTGDMFVMDRINENSKKPRILLVNKVDLISDEQKEEKIKEIEEKLGKFDKIIFASGMYSFGISQLLEALDPYLEDGVKYYPDDMYTDMSTYRIITEIVREKILLKTRDEIPHSVAIEIINVERKEGKKDKFDINIYVERDSQKGIIIGKDGKMLKEIGVEARKEIEELLGEKIYLGLWVKVKDDWRKKKPFLKELGYVEE

SEQ ID NO: 16198 - protein, 402 aa, Fusobacterium nucleatum subsp. nucleatum ATCC 25586
MSKVYVVAAKRSAIGSFLGTLSPLKPGDLGAQIVKNILEETKVDPANIDEVIVGNVLSAGQAQGVGRQVAIRAGIPYEVPAYSVNIICGSGMKSVITAFSNIKAGEADLVIAGGTESMSGAGFILPGAIRGGHKMADLTMKDHMILDALTDAYHNIHMGITAENIAERYGITREEQDAFALDSQLKAIAAVDSGRFKDEIAPVVIPNKKGDIIFDTDEYPNRKTDAEKLAKLKPAFKKDGSVTAGNASGLNDGASFLMLASEEAVKKYNLKPLVEIVATGTGGVDPLVMGMGPVPAIRKAFNKTDLKLKDMELIELNEAFAAQSLGVIKELCKEHGVTPEWIKERTNVNGGAIALGHPVGASGNRITVTLIYEMKKRGVEYGLASLCIGGGMGTALILKNVK

SEQ ID NO: 16199 - protein, 783 aa, Fusobacterium nucleatum subsp. nucleatum ATCC 25586
MSKLDQNKTPLFTVLKDEYVRRNILPFHVPGHKRGKGVDEEFYNFMGEAPFSIDVTIFKMVDGLHHPKSCIKESQELVADAYGVKHSFFAVNGTSGAIQAMIMSVVKAGEKILVPRNVHKSVSAGIILSGSEPVYMNPEIDENLGIALGVKPQTVENMLKQDPDIAAVLIINPTYYGVATDIKKIADIVHSYDIPLIVDEAHGPHLHFHDELPVSAVDAGADICTQSTHKILGAMTQMSLIHVNSDRVNVEKVKQILSLLHTTSPSYPLMASLDCARRQIATQGQELLTRTIELAKYFRREANRIPGIYCFGEELVGKDGFFAFDPTKITISAKELGLKGGELESLLVDDYNIQMELSDYYNTLGLITIGDTEESVNKLLDALRDISRRFFGKGKTLEKNIIKLPETPELVLMPREAFYSEKNKVPFKESVGKISGEMIMAYPPGIPIIIAGERISQDIIDHIEELKEADLHIQGMEDPELETINVIEEEDAIYLYTEKMKNVLIGVQTNLGVNKTGTEFGPDDLIQAYPDTFDEMELISVERQKEDFNDKKLKFKNTVLDTCEKIAKRVNEAVIDGYRPILVGGDHSISLGSVSGVSLEKEIGVLWISAHGDMNTPESTLTGNIHGMPLALLQGLGDRELVNCFYEGAKLDSRNIVIFGAREIEVEERKIIEKTGVKIVYYDDILRKGIDNVLDEVKDYLKIDNLHISIDMNVFDPEIAPGVSVPVRRGMSYDEMFKSLKFAFKNYSVTSADITEFNPLNDINGKTAELVNGIVQYMMNPDY

SEQ ID NO: 16200 - protein, 453 aa, Fusobacterium nucleatum subsp. nucleatum ATCC 25586
MKFWSIVLLTINSIIGTGIFLSPGAVAKLVGDKAATIYLAAAVFAAVLAVTFAAASKYVVKSGAAYAYSKAAFGDEVGSYVGITRVVSASIAWGVMATGVVKTTLSIFGQDSSNVKNVTIGFITLMFVLLIINLIGTKLLTLISNISTIGKIGALGITIIAGIFILVFSDGANLQGLTLLKDAEGNNLIPEFTTSVFVTALVGAFYAFTGFESVASGSADMEKPEKNLPRAIPLAIAIIAAIYFGIVFVSMYIDPVAMVTSKDPVVLASVFKNQLLQKIIVMGALMSMFGINVAASFHTPRVFEAMAKEKQVPDFFAKRTKSGLPLTSFILTAIIAVVIPLAFNYNMAGIIIISSISRFIQFIVVPVAVIVFFYGKSKEEILNTNKNFIIDVIIPIIALLLTILLLVKFNWAQQFSTKLDDGTVTVNLKAVVSMVIGYLILPIVLRIYMRTKK

SEQ ID NO: 16201 - protein, 71 aa, Fusobacterium nucleatum subsp. nucleatum ATCC 25586
MEVLQMKGTVKWFNKEKGFGFITGEDGKDVFAHFSQIQKEGFKELFEGQEVEFEITEGQKGPQASNIVVIK

SEQ ID NO: 16202 - protein, 583 aa, Fusobacterium nucleatum subsp. nucleatum ATCC 25586
MKILKFKNKSLNIFLGYSYRYKWQMIAVIILSIIASLMSAAPAWLSKKFVDDVLIGQNKKMFMWIIGGIFAATVIKVISSYYSQIASNFVTETIKRKIKIDIFSHLEKLPISYFKKNKLGDTLSKLTNDTTSLGRIGFIVFDMFKEFLTVLVLTARMFQVDYILALVSLVLLPLVIRVVRKYTKKIRKYGRERQDTTGKVTAFTQETLSGIFVIKAFNNTDFAIDKYKDLTKEEFEQAYKTTKVKAKVSPINEVITTFMVLLVVLYGGYQILVAKRITSGDLISFVTALGLMHQPLKRLISKNNDLQDSLPSADRVVEIFDEKIETDVFGEAVEFNEKIQDIKFENVNYKYDDSNEYVLKNINLDVKAGEIVAFVGKSGSGKTTLVNLLARFFNTDDGKITVNGVNIKNIHLDTYRDKFAIVPQETFLFGGTIKENISFGKEVTEEEIISAAKMANAYNFIQEDLPNKFETEVGERGALLSGGQKQRIAIARALIKNPEIMILDEATSALDSESEKLVQEALDSLMEGRTTFVIAHRLSTIVRADKIVVMENGEIKEMGTHSELIAMNGIYKNLYDIQFNENV

SEQ ID NO: 16203 - protein, 321 aa, Fusobacterium nucleatum subsp. nucleatum ATCC 25586
MAKIVECIPNYSEGKDLAKIERIVAPYKNNPKIKLLSVEPDANYNRTVVTVLGDPEEVKKAVIESIGIATKEIDMNVHKGEHKRMGATDVVPFLPIQEMTTEECNEISKEVGKAVWEKFQLPVFLYESTATAPNRVSLPDIRKGEYEGMAEKLKQPEWAPDFGERAPHPTAGVTAIGCRMPLIAFNINLATTNMDIPKEIAKAIRFSSGGFRFIQAGPAEILDKGFVQVTMNIKDYTKNPIYRIMETVKMEAKRWGVKVTGCEIIGATPFASLTDSLKYYLACDGIKDDVDAMSMDKVVELMIKYLGLTDFDVKKVLEANI

SEQ ID NO: 16204 - protein, 327 aa, Fusobacterium nucleatum subsp. nucleatum ATCC 25586
MAYISSLDILETEIAIKKVKDFFESHLSKELDLLRVSAPLFVIPESGLNDNLNGTERPVSFDTKSGERVEIVHSLAKWKRMALYRYNIENDKGIYTDMNAIRRDEDTDFIHSYYVDQWDWEKIISKEDRNEEYLKDVVRKIYSVFKKTEEYITTEYPKLTKKLPEEITFITAQELENKYPNLTPKNREHAAAKEYGAIFLMKIGGKLSSGEKHDGRAPDYDDWDLNGDIIFNYPLLGIGLELSSMGIRVDEKSLDEQLKIANCEDRRSLPYHQMILNKVLPYTIGGGIGQSRICMFFLDKLHIGEVQASIWSQEVHEICRQMNIKLL

SEQ ID NO: 16205 - protein, 399 aa, Fusobacterium nucleatum subsp. nucleatum ATCC 25586
MFEYQLNMAETVGFAIILLLLGRWIKKKVSFFEKFFIPAPVIGGTLFSIILLIGHQTETFTFTFNDDIKNLLMIAFFTTVGFSASLKILKKGGVGVALFLLAAVVLVILQDIVGPVLAKALGINPLLGLAAGSIPLTGGHGTSGAFGPYLEDLGATGATVVAVASATYGLIAGCLIGGPIGRRLMIKNNLKPTENKAGVDDSILGSTTEVTEERLFSAVVYIGIAMGIGATITLILGNHGIKFPAYLMGMVVAAIIRNILDFNQKQLPFNEIGIVGNISLSLFLSMALMSMKLWQLIDLAVPLIVILLVQTLLMAFFAYFITFNIMGRDYDAAVMSTGHCGFGLGATPNAMANMETFTTANGPSVKAFFIIPIVGSLFIDFINAGVIQTFATWIVNNFM

SEQ ID NO: 16206 - protein, 323 aa, Fusobacterium nucleatum subsp. nucleatum ATCC 25586
MLDTEIIEIAKNIYDTEIKSLELRMNKLSENFVKVVRKIYDCKGKVVVTGIGKTGIIGKKISATFASTGTTSIFMNSTEGLHGDLGIINPEDIVLAISNSGESDEILAIMPAIKNIGACIIAMTGNINSRLAKASDLYINTHVEEEGCPINLAPMSSTTNALVMGDALAGCLMKLKNFSPQNFAMYHPGGSLGRKLLTRVGNLMKTGEALALCKADTSMEEIVILMSEKKLGVVCVMNDENNILIGIITEGDIRRALSHKEEFFKLKAKDIMTTKYTKVDKEEMATQALSIMEDRPHQINVLPVFDNDKFVGVIRIHDLLKVR

SEQ ID NO: 16207 - protein, 366 aa, Fusobacterium nucleatum subsp. nucleatum ATCC 25586
MTKKCVGCGVELQNTDKNLQGYTPKPINTKEDMYCQRCFQLKHYGKYSVNKMTREDYKKEVGKLLDDVKLVIAVFDIIDFEGSFDVEILDILREKDSIVIVNKLDLIPDEKHPSEVANWVKNRLAEESIVPLDIAIVSTKNGYGVNGVFRKIKHFYPDGVNAMVIGVTNVGKSSVINRLLGKKIATVSKYPGTTIKNTLNMIPFTNIGLYDTPGLIPEGRASDLVCDNCAQKIIPSGEISRKTFKAKHNRMIMIGNLVKFKILNNDEIKPIFSIYAAKDVQFHETTIEKSKELELGNFFTIPCDCCKEEYNKHKKINKTLTINTGEELVFKGLAWVSVKRGPLNIQVTLPEEIEISVRKAFINPRR

SEQ ID NO: 16208 - protein, 104 aa, Fusobacterium nucleatum subsp. nucleatum ATCC 25586
MYAVIKTGGKQYKVTEGDVLKVEKLNAEVNTTVELTEVLLVAGGDNAVKVGKPLVEGAKVVVEVLSQGKGPKVINFKYKPKKASHRKRGHRQLFTEVKVTSIIA

SEQ ID NO: 16209 - protein, 256 aa, Fusobacterium nucleatum subsp. nucleatum ATCC 25586
MADGYKTPPELVDYMIKTGIDKATKPLFKLMLLGIFGGAFIALGGAGNIISGSTLVKTDLGLAKFVGACVFPVGLIMVVILGSELFTSNCLLTVAYTNKKITFTQLIRNIVTVYLFNYVGSFIVAYITVKGGSFNADSLNYLQDIATHKVHSTAYALFIKGILCNVLVCGAVLLSYTAKDTIGKLFGAWFPIMLFVLIGYDHSIANMFYLTAAKLVDSSFEVSLILYNLFYVTLGNFAGGMVIGLPLYFCYYKKQD

SEQ ID NO: 16210 - protein, 396 aa, Fusobacterium nucleatum subsp. nucleatum ATCC 25586
MRISDRVKNMKYSAVRKLAPLAAEAEKKGIKVYRLNIGQPNIETPKLFFEGLKNIPDHVIRYADSRGISILLEQVIEVYARDGHILKKEDIIVTEGGSEALTFAMLAICNPNDEVLIPEPFYSNYKSFLDIAGAKIIPIPTDIKNDFALPKKEEIQKLITSKTKAILYSNPCNPTGKVYTEEEVKLLANLAAENDLFVIADEPYREFIYDDNDKHYSLLDIEKAKENVIIIDSVSKHYSACGARVGFLISKNKDFMTYIMKLCQARLAAPTVEQYAVASLMKAPKEYFKEIKEIYKRRRDIIVNSLNKIEGVTCSTPKGAIYAFAKLPVESSEDFCKWLLTEFVYDNSTVMLAPGEGFYETEGLGKNEVRFSFCVGENDIEKAMRVLEEALKVYKK

SEQ ID NO: 16211 - protein, 398 aa, Fusobacterium nucleatum subsp. nucleatum ATCC 25586
MKILVINCGSSSLKYQLINPETEEVFAKGLCERIGIDGSKLEYEVVAKDFEKKLETPMPSHKEALELVISHLTDKEIGVIASVDEVDAIGHRVVHGGEEFAQSVLINDAVLKAIEANNDLAPLHNPANLMGIRTCMELMPGKKNVAVFDTAFHQTMKPEAFMYPLPYEDYKELKVRKYGFHGTSHLYVSGIMREIMGNPEHSKIIVCHLGNGASITAVKDGKSVDTSMGLTPLQGLMMGTRCGDIDPAAVLFVKNKRGLTDAQMDDRMNKKSGILGLFGKSSDCRDLENAVVEGDERAILAESVSMHRLRSYIGAYAAIMGGVDAICFTGGIGENSSMTREKALEGLEFLGVELDKEINSVRKKGNVKLSKDSSKVLIYKIPTNEELVIARDTFRLAK

SEQ ID NO: 16212 - protein, 337 aa, Fusobacterium nucleatum subsp. nucleatum ATCC 25586
MIIMSFLGQVRKKALQANRRIVLPESSDERIIRATSQILKEGLAQVVLVGNQEAIMHSAKAYEVSLSGAKIVDPYNFERLNDYINKLVELRAKKGMTPEEAKKILLNDPTFFGAMLVRMGDADGMVSGSASPTANVLRAAIQVIGTQPGVKTVSSVFIMELSQFKDLFGSILVFGDCSVIPFPTSEQLADIATSAAETAIKIAGINPRVALMTFSTKGSAKHECVDRVIEAGHILRERKVQFRFDAELQADAALVKSIGEIKAPLSDVSGNANVLIFPTLSAGNIGYKLVQRLAGANAYGPIIQGLNAPVNDLSRGCSVEDIVVLTAITSAQACIDC

SEQ ID NO: 16213 - protein, 293 aa, Fusobacterium nucleatum subsp. nucleatum ATCC 25586
MNKILMAEVNISEGTNLELIEKVKKSFIDEKNIEIVDIDSNVDHNRTVFTYKGEPSAVLNATKKLAKCAVDLIDMRNHKGSHPRMGAVDVVPFIPVKNITTEEAVEIAKEFGKYLGEQGVPVYFYEDAQEKEYRKTLPSIRKGQYEALEEKMKDPKWAPDEGPKEFNPKSGGTVTGARFPLVAFNINLDTYNLEIGKKIVKAVRSATGGYSCIRAIALELEEKKQIQVSMNMINYEKTPIHRVFETIKSEANRYNVNIVDTELVGPVPIYALRDVLDFYLRIADSFSLDQIYF

SEQ ID NO: 16214 - protein, 613 aa, Fusobacterium nucleatum subsp. nucleatum ATCC 25586
METKMKKAIFLDRDGTINVEKDYIYKSEDLVFEEGTIEALKTFKNLGYILIVVSNQSGIARGYFTEKDLNIFNNNMNEILKKNGVEITEFYCCPHHPDGIGGYKKVCECRKPNNKMIEDAIKKYNIDREKSYMIGDKTSDIGAGLKSNLKTVLVKTGYGLKDMEKIDKNETLICENLKDFSEILKREKLNELIFEEFSKKVQIKNVVMDSRKVTEGSLFFAINNGNSYVKDVLDKGASLVIADNTDVKDERIIKVSDTIATMQDLAIKYRKKLDIQVVGITGSNGKTTTKDIVYSLLSVKAKTLKTEGNYNNHIGLPYTLLNVTDEEKFVVLEMGMSSLGEIRRLGEISSPNYAIITNIGDSHIEFLKTRDNVFKAKTELLEFVNKENTFVCGDDKYLAKLDVNKIGFNNSNTYKIESYKFSDKGSKFVLDGKEYEMSLLGKHNISNTAIAIELAKKIGLTDEEIENGLKEIKISNMRFQEIKIGEDIYINDAYNASPMSMKAAIDTLNEIYNDKYKVAILGDMLELGDNEIDYHIDVLNYLLDKKIKLIYLYGERMKKAYNMFMKSKSEEYRFWYYPTKEGIVESLKNIKMEKVILLKASRGTALEDIIKLS

SEQ ID NO: 16215 - protein, 260 aa, Fusobacterium nucleatum subsp. nucleatum ATCC 25586
MNILEIKNLSLKISDEKILKNINFELKEKEIISIIGKSGSGKTMLSKMIMGLKNKNMQIEGEILFKDNNIFNFSEEDLRKYRGEGIGYITQNPLNVFLPFQKIKTTFLETYFSHKNISKSEVIELAKKNLKQVNLENAEEILNKYPFELSGGMLQRVMVAIIIGLDAKIIIADEVTSALDSYNRYEMIKIFKELNKMGKSIVLITHDYYLMKSISDRCLVMENGEVIEKFNPKLKPELIKEKSEFGAKLLETTIYKRKGS

SEQ ID NO: 16216 - protein, 261 aa, Fusobacterium nucleatum subsp. nucleatum ATCC 25586
MLEIKDLTIQYGEKNAVVENFSLTMQKGEIISIVGESGSGKSTVLRSIIGGLLGQGKITSGDIIFNGKSLLNLSNNEWRELRGTVISMISQDCGATLNPIRKIGSQYIEYINAHTNLNKTEAEKKALFMLEKVRLPEVKNIMNSYPYELSGGMKQRVGIAMALTFEPELVLADEPTSALDVTTQAQIVKQMMELRDEFHTGIIIVTHNMGVAAYMADKIIVMQNGVVVDSGTREEVINNPKSDYTKKLLKAIPEMDGERFV

SEQ ID NO: 16217 - protein, 413 aa, Fusobacterium nucleatum subsp. nucleatum ATCC 25586
MNFETIEGVLNINLNSTMTLALAALLLIMGYSINKRLTILNKYCIPAPVVGGFIFMFLTWLGHISGTFKFNFENIFQSTFMLAFFTTVGLGASFTLLKKGGKLLIIYWLTCGIISILQNVIGMTISKTIGLEAPYALLSSAISMVGGHGAALAYGDTFAKMGYESAPLVGAAAATFGLISAVLIGGPLGRRLIEKNNLKPDNTENFDQSVTEINVDKGEKLLDLDIIKNVVVILLCMAVGSYISTLIGKLIKMDFPSYVGAMFVAVIVRNINEKTHTYNFSFSLVDGIGNVMLNLYLSLALMTLKLWELSGLIGGVLLVVACQVAFMILIAYFVVFRILGSNYDAAVMCSGLCGHGLGATPSAIVNMTAINEKYGMSRKAMMIVPIVGAFLVDIIYQPATVWFIKTFIKGFVQ

SEQ ID NO: 16218 - protein, 428 aa, Fusobacterium nucleatum subsp. nucleatum ATCC 25586
MFIDEVIITVKAGNGGDGSAAFRREKFVQFGGPDGGDGGKGGDVIFVADSNINTLIDFKFKKLFKAQNGENGQKKQMYGKKGEDLIIKVPVGTQVRDFTTGKLILDMSVNGEQRVLLKGGKGGYGNVHFKNSIRKAPKIAEKGGEGAEIKVKLELKLLADVALVGYPSVGKSSFINKVSAANSKVGSYHFTTLEPKLGVVRLEEGKSFVIADIPGLIEGAHEGVGLGDKFLKHIERCKMIYHIVDVAEIEGRDCIEDFEKINHELKKFSEKLAGKKQIVIANKMDLIWDMEKFEKFKSYLAEKGIEIYPVSVLLNEGLKEILYKTYDMLSRIEREPLEEETDITKLLKELKIEKEDFEIIRDEEDAIVVGGRIVDDVLAKYVIGMDDESLVTFLHMMRSLGMEEALQEFGVQDGDTVKIADVEFEYFE

SEQ ID NO: 16219 - protein, 496 aa, Fusobacterium nucleatum subsp. nucleatum ATCC 25586
MDRIANTVGHYDAYRKKIEFDKELYLGIMLPDKNLNKNNKCFNEDATNLVKKIKCDLLYLDPPYNSRQYSDAYHLLENIARWEKPKVFGIARKMDRKAIKSSYCTIEATQKFRELIENTNARYILLSYNNMSEKGDGRSNAKILDKDILEILEKKGKVKVFEEEYKMFSTGKSNVKDNKERLFLCEVEENRSVSSPFNYTGGKYKLLEQLQKLFKEEEIFLDIFTGGANVGINSKSSKIIFNDVNAKIISLMEYIKNIDVEELLKKIDNIIVDYGLSNTMLYGYEYYSCNSSEGLANCNKEAFLKLREDYNKKLNKGIEDYNLLYVLIVFSFNNQVRFNSKGEFNLPVGKRDFNSKMRNKLILFSKKLKEKDIEFYSKDFRDIDINKIPKNTFVYCDPPYLITTAGYNENGMWTDKEEKDLLNFLKELDKKGLKFALSNVLESKNKENKILKDWILENNFYCNYLKKDYSNSNYQRKEKNSVSVEVLVTNYNTEEM

SEQ ID NO: 16220 - protein, 864 aa, Fusobacterium nucleatum subsp. nucleatum ATCC 25586
MLGGFIMMNPNQFTENTISAINLAVDISKGNMQQSIKPEALALGLLMQNNGLIPRVIEKMGLNLQYIISELEKEMNNYPKVEVKVSNENISLDQKTNSILNRAEKIMNEMEDSFLSVEHIFKAMIEEMPIFKRFGISLEKYMEVLMNIRGNRKVDNQNPEATYEVLEKYAKDLVELAREGKIDPIIGRDSEIRRAIQIISRRTKNDPILIGEPGVGKTAIVEGLAQRILNGDVPESLKNKKIFSLDMGALVAGAKYKGEFEERMKGVLKEVEESNGNIILFIDEIHTIVGAGKGEGSLDAGNMLKPMLARGELRVIGATTIDEYRKYIEKDPALERRFQTILVNEPNVDDTISILRGLKDKFETYHGVRITDTAIVEAATLSQRYISDRKLPDKAIDLIDEAAAMIRTEIDSMPEELDQLTRKALQLEIEIKALEKETDDASKERLKVIEKELAELNEEKKVLTSKWELEKEDISKIKNIKREIENVKLEMEKAEREYDLTKLSELKYGKLATLEKELQEQQNKVDKDGKENSLLKQEVTADEIADIVSRWTGIPVSKLTETKKEKMLHLEDHIKERVKGQDEAIKSVADTMLRSVAGLKDPNRPMGSFIFLGPTGVGKTYLAKTLAYNLFDSEDNVVRIDMSEYMDKFSVTRLIGAPPGYVGYEEGGQLTEAIRTKPYSVILFDEIEKAHPDVFNVLLQVLDDGRLTDGQGRIVDFKNTLIIMTSNIGSHFILEDPNLSEDTREKVADELKARFKPEFLNRIDEIITFKALDLPAIKEIVKLSLKDLENKLKPKHITLEFSDKMVDYLANNAYDPHYGARPLRRYIQREIETSLAKKILANEVHEKSNVLIDLDNNHIVFKEV

SEQ ID NO: 16221 - protein, 714 aa, Fusobacterium nucleatum subsp. nucleatum ATCC 25586
MNDNQFENEDLKNKDDSDVHEKQENKENEKEEPKQEKSQEQDSHNENKNDSEDKKSSDEDKKQDDKYNPFNNKRDDEKRRVVGKAVKVNFNFKGLLMLIFIITLAVVVPSIMDENKNQQIVDISYSDFIKNIENKKIGVVEEKDGYVYGYKASEVKYLETKSNSIKSKLGFDGKNEVQGLKARLITNRLGEDSNLMAVINNNNAIIQSVEPPEPSLFLSIVLAFLPYIIMIGFLVFMLNRMNRGGSGGGPQIFNMGKSRAKENGENISNVTFADVAGIDEAKQELKEVVDFLKEPEKFRKIGAKIPKGVLLLGEPGTGKTLLAKAVAGEAKVPFFSMSGSEFVEMFVGVGASRVRDLFNKARKNAPCIVFIDEIDAVGRKRGTGQGGGNDEREQTLNQLLVEMDGFGTDETIIVLAATNRADVLDKALRRPGRFDRQVVVDMPDVKGREEILKVHAKGKKFAPDVDFKIIAKKTAGMAGADLANILNEGAILAARAGRTEITMADLEEASEKVQMGPERKSKVVPEDEKKMVAYHEVGHGIVGYIIGGGDRVHKITMIPRGPAGGYTLSLPEEEKSFHSKKYMLDRIARYFGGRAAEEIIFGKENITDGAGSDIYYATLIAKDIVTKYGMTEKFGPVFLEATEEDYMLQRKYYSEQTGKEVDDEIRKIITEQYSRAKNILLENREKLEEVTTILLEKETIMGPEFEAIMRGENI

SEQ ID NO: 16222 - protein, 316 aa, Fusobacterium nucleatum subsp. nucleatum ATCC 25586
MINFNNVKIFSGNSNLELAKKIAEKAGLQLGKAEIQRFKDGEVYIEIEETVRGRDVFVVQSTSEPVNENLMELLIFVDALKRASAKTINVIIPYYGYARQDRKSKPREPITSKLVANLLTTAGVNRVVAMDLHADQIQGFFDIPLDHMQALPLMARYFKEKGFKGDEVVVVSPDVGGVKRARKLAEKLDCKIAIIDKRRPKPNMSEVMNLIGEVEGKIAIFIDDMIDTAGTITNGADAIAQRGAKEVYACCTHAVFSDPAIERLEKSVLKEIVITDSIALPERKKIDKIKILSVDSVFANAIDRITNNQSVSELFN

SEQ ID NO: 16223 - protein, 453 aa, Brassica rapa subsp. pekinensis
MSEEEAHANLAVPAFRTEKVAKTQTQNGHGTVWRFGGADKAAKAATVTLRGVIYMLFDNCSKDVKKTILPLGHGDPSVYPCFRTCIEAEDAVVNVLRSGKSNSYCPGAGILPARRAVADYLNRDLPNKLTPDDIFLTAGCNQGIELVFESLARPNANILLPRPGFPHYDARAVYSGLEIRKFDLLPDREWEIDLEGVEAVADENTVAIVVINPNNPCGNVYSHDHLHKVAETARKLGIMVITDEVYDQTIFGDNPFVPMAKFASIVPVLTLGGISKGWVVPGWKIGWIALNDPEGVFESTKVVQSIKQSLDITPDPSTIIQAALPEILEKVDKNFFAKKNKILKHNVDLVCDRLKDIPCVVCPKKPESCTYLLTKLELSLLDDIKDDIDFCVKLAREENLVFLPGEALGLKNWMRITIGVEAHMLEDALERLKGFCTRHTKKTVTETESPSSV

SEQ ID NO: 16224 - protein, 453 aa, Brassica rapa subsp. rapa
MSEEEAHANLAVPAFRTEKVAKTQTQNGHGTVWRFGGADKAAKAATVTLRGVIYMLFDNCSKDVKKTILPLGHGDPSVYPCFRTCIEAEDAVVNVLRSGKSNSYCPGAGILPARRAVADYLNRDLPNKLTPDDIFLTAGCNQGIELVFESLARPNANILLPRPGFPHYDARAVYSGLEIRKFDLLPDREWEIDLEGVEAVADENTVAIVVINPNNPCGNVYSHDHLHKVAETARKLGIMVITDEVYDQTIFGDNPFVPMAKFASIVPVLTLGGISKGWVVPGWKIGWIALNDPEGVFESTKVAQSIKQSLDITPDPSTIIQAALPEILEKVDKNFFAKKNKILKHNVDLVCDRLKDIPCVVCPKKPESCTYLLTKLELSLLDDIKDDIDFCVKLAREENLVFLPGEALGLKNWMRITIGVEAHMLEDALERLKGFCTRHTKKTVTETESPSSV

SEQ ID NO: 16225 - protein, 453 aa, Brassica rapa subsp. rapa
MSEEEAHANLAVPAFRTEKVAKTQTQNGHGTVWRFGGADKAAKAATVTLRGVIYMLFDNCSKDVKKTILPLGHGDPSVYPCFRTCIEAEDAVVNVLRSGKSNSYCPGAGILPARRAVADYLNRDLPNKLTPDDIFLTAGCNQGIELVFESLARPNANILLPRPGFPHYDARAVYSGLEIRKFDLLPDREWEIDLEGVEGVADENTVAIVVINPNNPCGNVYSHDHLHKVAETARKLGIMVITDEVYDQTIFGDNPFVPMAKFASIVPVLTLGGISKGWVVPGWKIGWIALNDSEGVFESTKVVQSIKQSLDITPDPSTIIQAALPEILEKVDKNFFAKKNKILKHNVDLVCDRLKDIPCVVCPKKPESCTYLLTKLELSLLDDIKDDIDFCVKLAREENLVFLPGEALGLKNWMRITIGVEAHMLEDALERLKGFCTRHTKKTVTETESPSSV

SEQ ID NO: 16226 - protein, 453 aa, Brassica rapa subsp. rapa
MSEEEAHANLAVPAFRTEKVAKTQTQNGHGTVWRFGGADKAAKAATVTLRGVIYMLFDNCSKDVKKTILPLGHGDPSVYPCFRTCIEAEDAVVNVLRSGNSNSYCPGAGILPARRAVADYLNRDLPNKLTPDDIFLTAGCNQGIELVFESLARPNANILLPRPGFPHYDARAVYSGLEIRKFDLLPDREWEIDLEGVEAVADENTVAIVVINPNNPCGNVYSHDHLHKVAEAARKLGIMVITDEVYDQTIFGDNPFVPMAKFASIVPVLTLGGISKGWVVPGWKIGWIALNDPEGVFESTKVVQSIKQSLDITPDPSTIIQAALPEILEKVDKNFFAKKNKILKHNVDLVCDRLKDIPCVVCPKKPESCTYLLTKLELSLLDDIKDDIDFCVKLAREENLVFLPGEALGLKNWMRITIGVEAHMLEDALERLKGFCTRHTKKTVTETESPSSV

SEQ ID NO: 16227 - protein, 334 aa, Brassica rapa subsp. chinensis
MSEEEAHANLAVPAFRTEKVAKTQTQNGHGTVWRFGGADKAAKAATVTLRGVIYMLFDNCSKDVKKTILPLGHGDPSVYPCFRTCIEAEDAVVNVLRSGNSNSYCPGAGILPARRAVADYLNRDLPNKLTPDDIFLTAGCNQGIELVFESLARPNANILLPRPGFPHYDARAVYSGLEIRKFDLLPDREWEIDLEGVEAVADENTVAIVVINPNNPCGNVYSHDHLHKVADAARKLGIMVITDEVYDQTIFGDNPFVPMAKFASIVPVLTLGGISKGWVVPGWKIGWIALNDPEGVFESTKVVQSIKQSLDITPDPSTIIQVCVLLLLMGWLGC

SEQ ID NO: 16228 - protein, 451 aa, Brassica rapa subsp. rapa
MSEEEAHANLAVPAFRTEKVAKTQTQNGHGTVWRFGGADKAAKAATVTLRGVIYMLFDNCSKDVKKTILPLGHGDPSVYPCFRTCIEAEDAVVNVLRSGKSNSYCPGAGILPARRADYLNRDLPNKLTPDDIFLTAGCNQGIELVFESLARPNANILLPRPGFPHYDARAVYSGLEIRKFDLLPDREWEIDLEGVEAVADENTVAIVVINPNNPCGNVYSHDHLHKVAETARKLGIMVITDEVYDQTIFGDNPFVPMAKFASIVPVLTLGGISKGWVVPGWKIGWIALNDPEGVFESTKVVQSIKQSLDITPDPSTIIQAALPEILEKVDKNFFAKKNKILKHNVDLVCDRLKDIPCVVCPKKPESCTYLLTKLELSLLDDIKDDIDFCVKLAREENLVFLPGEALGLKNWMRITIGVEAHMLEDALERLKGFCTRHTKKTVTETESPSSV

SEQ ID NO: 16229 - protein, 671 aa, Arabidopsis halleri subsp. halleri
MNEQGDDFDMIDATSGDNDQDGGRMRRAHRHTAYQTQELENFYLENPLPTEDQRYELGQRLNMEPKQVKFWFQNKRNQMKINSDRLENITLREDHDRLLLTQHQLRSAMLYCSCNICGRATNCGDIDYEVQKLIVENTILEREINQLYSKIPSRPNQMLVSPSQPPHCSSSNPGINATPELGLGGGTRTTEKERSMFLDLAIKALKELLELGEMDCPFGKIDSRSSKAVSLINEKYKNASNNVTKPPGHVVEASREIGLVPMTCLTLVKTFMDTEKWVDVFASIVPVASTRKVIPTGSGGTKSGSLQQIQAEFQVISPLVPKRQVTFLRYCKELRHGLWVVVDVTPDKNPTLLSYGGSNRLPSGLFIADMANGYSQVTWIEQAEYNESHIHPLYQPLIGSGIGLGATRWLATLQRHCESLSTLSSTNLAEISPGLSAKGAAEVVKLAQRMTLNYYTGITSSSGDKWEKIQVENVAPNMGFMIRKNLNEPGEHSGILLSAATSVWFPVNQKTLFAFLSNPSFRHEWDTLTNNTRMEETIRIQKAKRHGNIISLLKIVGNDTLVLQEIWNDASGAMVVYAPVETNPMEWVKRGGNSDSVQLLPSGFSIMPDGVPDRKGKSKNGGGGGSLVTFGLQILFSSNPTAVIPQGYVKNVEVLMVHTIGKIKSALRRQT

SEQ ID NO: 16230 - protein, 689 aa, Arabidopsis arenosa
MNEQGNDFDAVGNIPNPSGAENGEGDHMIDATSGNNDQDGGSMRRNHRHTAYQTQELENFYLENSLPTEDQRYELGQRLNMEPKQVKFWFQNKRCQMKINSDRLENITLREDHDRLLVTQHQLRSAMLQSSCNICGRATHCGDIDYEVQILMVENAKLEREIDQYYSKIRSHPNQMLVSPSQPAPHCSSSNPGINATPELGLGGGTRATEKERSMFLNLAITALKELIELEAKHRPFGKIDSRSSKAVSLIYEKYENASNNVIKPPGHVVEASRDTGLVPMTCLTLVKTFMDTGKWVNVFAPIVPVASTRKVIPTGSGGTKSGSLQLIQAEFQIISPLVPKRQVTFLRYCKELRQGFWVVVDVTPDQNPTLLSDGGSNRLPSGVFIEDMANGYSQVTWIEQAEYNESHIHPLYQPLIGSGIGLGATRWLATLQRHCDSISTLSSTNLAEISPGLSAEGAAEVVKLAQRMTLNYYSGIMSSSGNKWEKIQVEDVAPNLSFMIRKNLNEPGEFSGILLSAATSVWFPVNQKALFAFLSNPSFRHEWDTLIHNTTMEETIRIQKAKRHGNIISLLKAGNGMLVLQEIWNDASGAMLVYAPVETNSIEWVKRGGESDHVQLLPSGFSIMPDGVPDRKGKSKTGGGGGCLLTFGVQLLFSRNPTAELPQGYVKTVEVLMVHTIGKIKSALHIYT

SEQ ID NO: 16231 - protein, 79 aa, Olea europaea
TLVMVEPDAPSPSDPNLREYLHWLVTDIPATTGASFEQEIVCYESPRPSMGIHRFVFALFRQLGRQTVYAPGWRQKFNT

SEQ ID NO: 16232 - protein, 164 aa, Saccharomyces cerevisiae
AWLAYNEANQTFTNEIAKTMNHNDLIWVHDYHLMLVPEMLRVKIHEKQLQNVKVGWFLHTPFPSSEIYRILPVRQEILKGVLSCDLVGFHTYDYARHFLSSVQRVLNVNTLPNGVEYQGRFVNVGAFPIGIDVDKFTDGLKKESVQKRIQQLKETFKGCKIIVG

SEQ ID NO: 16233 - protein, 421 aa, Nostoc sp. KU001
MYNQGAFEGAANGESGSRIFVYEVVGLRQGEETDQTNYPIRKSGSVFIRVPYNRMNQEMQRITRLGGKIVSIQSVSGLQQLNGKATPVTATSEVNGFAQQPAEEQQKNKDNKGNTMTQAKAKKAHADVPVNTYRPNAPFIGKCISNETLVKEGGIGIVQHLKFDLSDSNLKYIEGQSIGIIPPGVDKNGKPEKLRLYSIASTRHGDDVDDKAVSLCVRQLEYKHPESGETVYGVCSTYLTQLKPGDDVKITGPVGKEMLLPDDPEANVIMMATGTGIAPMRAYLWRQFKDAERAANPEYQFKGFSWLIFGVPTTPNILYKEELEEMQQKYPDNFRLTCAISREQQNPQGGRMYIQDRVAEHADELWNLIKNEKTHTYICGLRGMEDGIDAALTAAAAKEGVTWSDYQKEIKKAGRWHVETY

SEQ ID NO: 16234 - protein, 415 aa, Nostoc sp. PCC 7906
MYNQGAVEGAANTQLGSRVFLYEVVGLRQSEETNQTNYPIRKSGSVFIRVPYNRMNQEMRRITRLGGTIVSIQPVDALGQVNGKATPVNSNTEVKAEEQLKNKDKKGNTMTQAKAKKDHGDVPVNTYRPNAPFIGKVISNEPLVKEGGIGIVQHIKFDLSGSNLKYIEGQSIGIIPPGLDKNGKPEKLRLYSIASTRHGDDVDDKTISLCVRQLEYKHPETGETVYGVCSTHLCFLKPGEDVKITGPVGKEMLLPDDPEANVIMMATGTGIAPMRAYLWRQFKDAERAANPEYQFKGFSWLIFGVPTTPNLLYKEELEEIQQKYPDNFRLTAAISREQKNPQGGRMYIQDRVAEHADELWQLIKNEKTHTYICGLRGMEEGIDAALTAAASKEGVTWSDYQKQLKKAGRWHVETY

SEQ ID NO: 16235 - protein, 396 aa, Candidatus Phytoplasma australiense
MKIMSVNSGSSSLKFQLLEMPQKNLITSGLIERIGSNNATFTLKNQNHKTSKTLEIKNHQQAVSLLLTSLIENKIIARLEDIDGVGHRIVQGGELFQDATALNDVEIAKIESLCDLAPLHNPANLVSIKAFRQVLPSLFQVGVFDTTFHQTIPVKNFLYATPYAWYQKYKVRKYGFHGISYQYITEQMQQLLNKKDAKLIICHAGNGVSLCAVDSGKSIDTSMGFTPLEGVPMGTRSGNIDPAVIKFIAEKENKGIAEITDDLNKKSGLLGVSTISNDARDILAEIKKGNPQARLAFDIQIKRIVDYIASYYVLLKGIDALVFTAGIGENSSFFRSEIIKRLSVLGFRLDEQKNEVQGKTSVITSSDSLQQAFVVPTNEELSIACDVLRIYKKVKK

SEQ ID NO: 16236 - protein, 564 aa, Candidatus Phytoplasma australiense
MNILFEQLPILEQTKKALQELNFIEATPIQALVIPEIIQGHDVIGQAQTGTGKTFAFGIPIIEKIDYKLSKTQSLILCPTRELTLQVYEELKKLLRYYPQIRIAVVFGGESYTKQFRALESKPHLIIATPGRVIDHIERGKIDLSALKILTLDEADEMLKMGFQEALETILKQIPEERQTVLFSATLPPSIKQIASKYQKNTKILQVPVKKLAVNAIEQYYFLVKEFDKNKLLVRLLDLKRDYSTILFANTKKDVDEITSFLQDKGFLADAVHGDLKQNQRQYVMNNFRKGKIKILIATDVAARGIDISDIKMVVNYDLPHEDEVYVHRIGRTGRAGKKGLAYSFISPRKFSQLKKLEYYLKEKVKFLEIPSVEEIKKQILENFEQKVIDIIEKNSQENANNPMIEKLLQKFSSEQIIQGLLTNIQPKAKNYTDIIPPRMTFTPRETFNNNSFGNRRFGEKRFQNPKFSSYNSYNSYNSYNSYSQKRNDFIEATINLGKKDNINPTVLIRLLKDEYQIYGKNIGNIKHLTHETIFEIPSRFWNQMKNKSDIRFQNKILVINKKE

SEQ ID NO: 16237 - protein, 270 aa, Candidatus Phytoplasma australiense
MKIAWIGSKKKMLPQLLNYIPTNYHNYYEPFLGSGALFQSLTPSTVTLNDNDINLIQLWKDMLAKPELFCDYVRKFEDKIYVNKDQKTQKESFKHLVEKFNKSNLGAYKSALFYVLLKYAFRGIFRYRSDGTIYLGYSFSSRFKNPIIVLSEIQRIKTNVKNIKLLNGDFESVINQTQSNDFIFVDPPYWREGTKDKDFYQKPFTFEDHKRLYKSLEMANYRKVKWLYTNYNSPKIIELFKDFHIQPLQTTTNYALTSKGITQEVIIKNY

SEQ ID NO: 16238 - protein, 618 aa, Candidatus Phytoplasma australiense
MAKSNKIIGIDLGTTNSCVALMEGGEAKVIPNAEGGRTTPSVVSFKGNDIMVGEIAKRQVITNPNTISSIKRHMGEANYTVDVNGKKYTPQEISAMILTNLKKTAEDYLGAEVTDAVITVPAYFNDAQRQATKDAGKIAGLNVKRIINEPTAAALAYGADKSNKEQTILVFDLGGGTFDVSILDLADGTFEVLSTSGDNALGGDDFDLRIVDFLVKEFKKDNGVDLSKDKMAMQRLKDVAEKAKKELSGVTSSQISLPFLTMSASGPLHLEYNMTRAKFNELTKDLIDRCLGPVKRALSDAKLTIEKIDQVLLVGGSTRIPAVQELVKKELQKTPNKSINPDEVVAIGAAIQGGILAGDVKDILLLDVTPLSLGIETLGNVFTKLIERNTTIPTSQKQVFSTASDNQSAVDIHVLQGERPLAADNKTLGQFRLTDIPPAPRGIPQIEVTFDIDANGIVSVKAKDLGTQKEQKITISGSGALKEEEIKRMIREAEENAEADRVKKEGIDARNEADNMIFLTKKSLDDLKAEVTPEEKEKVEKQIQELETALKGEDISLIKEKTASLSKESQGIAMKAYQKAQQQQQNQNEANPEQPNSSDKDKKDGVDEVVDADFEEKK

SEQ ID NO: 16239 - protein, 421 aa, Candidatus Phytoplasma australiense
MFSLHFIDEAFNEVYAGNGGHGIVAFRREKYVPFGGPAGGNGGNGGSVIFVGEQGETTLLKLKYQKHLKASHGFNGKNKSQNGANAPHLYVKVPLGTVFFTMDNHFLGEILHHQETLVIAKGGKGGRGNKALANFKNPAPSYAEKGDLGEHFKIKIQLKVLADVGLLGFPSVGKSSLISLISKAQPKIDSYPFTTLFPHLGVVLIDGFSFVIADLPGLIPNAHLGQGLGIQFLKHIERCRVLVHLISMQSLDPYKDYVALNKELQQYNSTLVEKKQIIVANKMDLPDAEKKLKDLQKKLSDVTIIPLSLINFYNIEKLKYAIKNLLQKTPFVIPKHDNFKVYDLNSETQTFTINKNKEGVFVVSGRQVEIFSHRTDFNNEAAVKRFNYLLKKIGIEEALKQKGAKLGDQVKICNYLFDFVI

SEQ ID NO: 16240 - protein, 102 aa, Candidatus Phytoplasma australiense
MFAIIRTGGKQLRVSEGQEIFVEKLPINPEQNYEFKEVLAVYGEKSILGQPYVEGAKVQAQVIKNDRAKKIIVFKYKRRKKYRCKQGHRQAYTKLLITKIIA

SEQ ID NO: 16241 - protein, 292 aa, Candidatus Phytoplasma australiense
MSFKSGFIAIVGRPNVGKSTLLNVLTNQKIAITSDKPQTTRHKIVGICHESDAQYIFVDTPGINQYKYLLNQKMNQISFRSISDVDVILFVTDSFYHPQEKNLLDFIFKKKKPLFLVINKIDILKSKNKIDAIILSYLNHYPFINVIPLSAVESKNIPKLKSFLYQNMQKGVPYYPQNIITDQKKEFLMSEIVREKILYYVHEEVPHAATVVIEKIKPLNKDLLEIWVLILVEKNSQKQILIGAQGSKLKAIGSHARKDLNAYFNIKSYLHLWVKVVPNWRNQKQLLSGFGF

SEQ ID NO: 16242 - protein, 543 aa, Candidatus Phytoplasma australiense
MQKLKETKLNSNFIKTIIQKDLEENKCRQIITRFPPEPNGFLHLGHARAIIINFELAKFFNGKTYLRYDDTNPNNEKQVYVDAILQDITWLGYKPDKITFASDYFDQMFEKALFLIQQGHAYVDDLSAEEITKLRGNLLEKGTNSRCRERSIEDNKKLFIEMKEGKFAEGSKVLRAKIDMSSPNLNLRDPVLYRILSARTLNKKHWHIFPTYDYAHPLEDSFEKISHSLCSLEFEDHRPLYDWVIQKTQVSYIPRQIEFGRLNLAQTLMSKRHLKSLVEEKKVFGWDDPRMPTLSGIRKKGYTPQAIKNFILETGLSKVNSTVKKDMLDAFVRNDLRPQAFPRMAITNPLKVTIINYPENQIEKLTAPFFPKEHNEEKTREIYFSRHLYIEKDDFSLVKPDPQYKRLVLGEEVRLFHAYFIKACDVVKNVQREVIEVIATYDPQTKSGSGFKGRRPNGTIHFVESTTALEAHFHLFEELLTENGSFNHNSYQIQKGFVEKSLEAENLKNPIQFLRQGFFVLEKKADKKLHFNKIVSLKVSNLK

SEQ ID NO: 16243 - protein, 462 aa, Burkholderia cenocepacia J2315
MDNDRPGRTASAAAMHEFEAYAPRGDTDARKPHLLGLSTLVIFGLAYMLPMTVFTTYGLVTSETNGHLTAAYAVTLIAMLFTARSYGHMARLMPSAGSAYTFASRNFGTSAGFMVGWALLMDYLFIPMISYLAIGIYMKQIFPTVPASVWIIGSIALITGLNIVGIRLVNRVNLILIASQLVFIAVFVIASAHVAAGEGLSIAIALPSSGDARAIFAGAAILCLSFLGFDAVTTLSEETREPRRTVPRAILLCTLASGLLFMLIAYVGQVVFPDWHAFKDLDSASLELMRRVGGRTLSAFFVAVYVAGCFASAMAGQASVTRVLFAMGRDRVLPGCVFGHLHARLHTPVRATLAVGVVSLSALFITLDLASTMISFGALVAFAIVNLCVMRSYLGRPEHRHAAGWIAYGLMPAIGFAMNVWLWSGLSRQTFYVGIGWLVVGLCQLVWLTRGFTRPAPTLSMN

SEQ ID NO: 16244 - protein, 391 aa, Burkholderia cenocepacia J2315
MSRREWLKLSALFTATGAAPLLSMANAHAAAEPDAPVRIGYLPITDAAPLLVAHNNGYFASEGLTVEQPKLLRSWAQLVEAFLSGQVNVVHLLSPMTLWARYGSRAPAKVVAWNHVNGSGLTVAPDIDSLRDLGGKTVAVPFWYSIHNVVLQDMLRGQGLVPVLKRRGTPAANEVNLVVMAPSDMLPALAARQIAGYIVAEPFNATAELMKIGKILRFTGDVWKNHACCVVFMHEQDLTQRPAWSQKVVNAIVKAQLWARSHPQETAQLLSKDGTHRYSPHTLASLDRVLVPSASLADTYRASGAIRHADWHAKRIDFQPYPFPSYTEALVQRLKRTVVDGDSTFLASLDPAFATRDLVDDRFVRKSIDAVGGLTAFGQSGGFRREEIVVV

SEQ ID NO: 16245 - protein, 614 aa, Burkholderia cenocepacia J2315
MATVADFIVERLYDWGVRRIYGYPGDGINGFFGALNRADGKIEFIQARHEEMAAFMASAHAKFTGELGVCVATSGPGAAHLVTGLYDARLDHMPVLAIVGQQARAALGGHYQQEVDLPALYKDVAGAFVQLATVPGQVRHLVDRAVRTALGARTVTALVLPNDLQELDYAPPKRAHGTVHSGVGYTAPKVVPYADDLRRAADVLNAGSKVALLVGAGALKATDEVIAVADRLGAGAAKALLGKAALPDDLPWVTGSIGLLGTKPSYELMTECDTLLVVGSGFPYSEFLPKEGQARGVQIDLKADMLSLRYPMEVNLVGDSAETLRALLPLLNERRDTAWRDRIAKWNHDWHETLAARAAAKASAGRGVNPQRAFTELSPRLPDDVILTSDSGSCANWYARDLMMRRGMMGSLSGGLASMGAAVPYAIAAKFAHPVRPVIAMVGDGAMQMNNMAELITVAKYWRQWPDPRWICMVLNNEDLNQVTWEQRVMEGDPKFDASQQIPNVPYYRFATLLGLKGIYVDDPEQLGAAWDEALASDRPVVLEVKSDPEVPPLPPHVTLQQAKHFAETLVKGDAREANVIVETARQVLSAVLPGNGEHGDKAGKGSKGGKGES

SEQ ID NO: 16246 - protein, 340 aa, Burkholderia cenocepacia J2315
MSSYKIALNFEDGVTRFIDCKAGEKVLDAAFRAKINLPMDCSDGVCGTCKCRAESGRYDLGDDYIDDALTEDEKDGGLVLTCQMVPQSDCVIAVPTSSVACKTGESAFAATVTKVEQHNDAAVVLELDVGASAPVFLPGQYVNIGVPGSGQHRSYSFSSAPGDAKVGFLIKKIPGGVMSTWLESAQPGDTLELYGPLGSFYLRDVQRPLLFLAGGTGLAPFLSMLEVLARSGSQQKVHLVYGVTRDLDLVLVDALEAVAARLPNFSFATIVADAASSHPRKGWVTQHIPADALNDGDVDVYLCGPPPMVDAVRQYFDDAGVKPNSFHYEKFTPNVTAKAA

SEQ ID NO: 16247 - protein, 268 aa, Burkholderia cenocepacia J2315
MSPTTRPFPRRTWLAALLAAPVIALFAAAPAHADALDTIAKNGTLRVAVPEDYPPFGSVGTDMQPQGYDIDMAGLLAKALGVKLKLVPVNSANRIPYLTTNKVDMVISSLGKTPEREKVIDFSSAYAPYFQGVFGPSDVKVSAPADLTGKTVGATRGALEEIALSQLAPNATIKRFEDNNATIQAFLSGQVQLIAAGNIVAAAILAKNPPRRPEVKFVIKNSPCFVGVNKNEPRLLAKIDDAIAHAKQDGSLGEMSRKWLGQPLPAGL

SEQ ID NO: 16248 - protein, 496 aa, Burkholderia cenocepacia J2315
MASIPDPSTTGETDKRSWLESHEAGYHQTLGNRQVQMIAIGGAIGTGLFLGAGARLQAAGPALAIVYLVCGAFSFLILRALGELVMHRPSSGSFVSYAREFLGEKASFVAGWMYFLNWAMTGIVDITAVALYMHYWAPFAAVPQWIFALVALCIVATMNLIGVKWFAEMEFWFALIKVAAIVLFLVIGAAILGTGMPVAGHGTGMHLITDNGGFFPHGLMPALVLVQGVVFAFAGVELVGTAAGECKDARKVLPRAINNVIWRIAIFYVASVVLLVCLLPWSAYKAGQSPFVTFFGALGVPGIGSVMNLVVLTAALSSLNSGLYSTGRVLRSLSMGGSAPAFLARMSGQSVPYAGILVTVAIYVVGVLLNYLVPSSVFEIVLNIASLGIISTWGFIVVCQMKFRAAVRRGDVEDVSFRMPGAPVTSWLTLLFLLGVLVLMAFDYPNGTWTIALIPLVALLLVAGWKWLSRRARRALLKPTIPSITLTQNVLEKGES

SEQ ID NO: 16249 - protein, 396 aa, Burkholderia cenocepacia J2315
MTTQDPIVIVGAARTPMGGFQGDLAAASASDLGAVAIRAALERANVSAERIDEIVFGCVLPAGQGQAPARQAALKAGLPLAAGATTVNKMCGSGMKAAMFAHDLLLAGSAGVAVAGGMESMTNAPYLLPKARAGMRMGHGQVLDHMFLDGLEDAYEKGRLMGTFAEDCAQAYQFTREAQDAFAIASLTRAQRAIAEGRFVSEIAPVTVKAGKTESVVSIDEQPGKAKLDKIPTLKPAFRDGGTVTAANASSISDGAAALVMMRRSEAERLGLTPKAVIVGHSTHADQPGLFATAPIGALRKLSEKTGWNLRDVDLFEINEAFAVVPMAAMRDLDLPHEKVNVHGGACALGHPIGASGARVMVTLLAALETYGLKRGVASLCIGGGEATAVAIERLA

SEQ ID NO: 16250 - protein, 348 aa, Rhodotorula graminis
MPRPRVLLLGDPARHLDDLWSDFQQKFEVIPANLTTHDGFKQALREKRYGDFEAIIKLAVENGTESYPWNADLISHLPSSLKVFAAAGAGFDWLDLDALNERGVAFANSRGAGDTATSDLALYLILSVFRLASYSERAARTGDPETFNRVHLEIGKSAHNPRGHVLGAVGLGAIQKEIARKAVHGLGMKLVYYDVAPADAETEKALGAERVDSLEELARRSDCVSVSVPYMKLTHHLIDEAFFAAMKPGSRIVNTARGPVISQDALIAALKSGKLLSAGLDVHEFEPQVSKELIEMKHVTLTTHIGGVAIETFHEFERLTMTNIDRFLLQGKPLLTPAGKVFAPSSAA

SEQ ID NO: 16251 - protein, 336 aa, Rhodotorula graminis
MPRPRVLLLGDPARHLDDLWSDFQQKFEVIPANLTTHDGFKQALREKRYGDFEAIIKLAVENGTESYPWNADLISHLPSSLKVFAAAGAGFDWLDLDALNERGVAFANSRGAGDTATSDLALYLILSVFRLASYSERAARTGDPETFNRVHLEIGKSAHNPRGHVLGAVGLGAIQKEIARKAVHGLGMKLVYYDVAPADAETEKALGAERVDSLEELARRSDCVSVSVPYMKLTHHLIDEAFFAAMKPGSRIVNTARGPVISQDALIAALKSGKLLSAGLDVHEFEPQVSKELIEMKHVTLTTHIGGVAIETFHEFERLTMTNIDRFLLQGKPLLT

SEQ ID NO: 16252 - protein, 190 aa, Pseudotsuga menziesii
IFNRGMSEHSTMLLNKILDTYKGFNEVQELVDVGGGVGSTLNLIVSRYPHISGINFDMPHVVADAPHYSAVKHVGGDMFDSVPTGQAIFMKWILHDWGDNYCMTLLKNCYKALPEKGKVIVVDTILPVAAETSPYARQGFHIDLLMLAYNPGGKERTEQEFHDLAKAAGFAGGVKPVCCVNGMWVMEFHK

SEQ ID NO: 16253 - protein, 190 aa, Pseudotsuga menziesii
IFNRGMSEHSTMLLNKILDTYKGFNEVQELVDVGGGVGSTLNLIVSRYPHISGINFDMPHVVTDAPHYSAVKHVGGDMFDSVPTGQAIFMKWILHDWGDNYCMTLLKNCYKALPEKGKVIVVDTILPVAAETSPYARQGFHIDLLMLAYNPGGKERTEQEFHDLAKAAGFAGGVKPVCCVNGMWVMEFHK

SEQ ID NO: 16254 - protein, 190 aa, Pseudotsuga menziesii
IFNRGMSEHSTMLLNKILDTYKGFNEVQELVDVGGGVGSTLNLIVSRYPHISGINFDMPHVVADAPHYSAVKHVGGDMFDSVPTGQAIFMKWILHDWGDNYCMTLLKNCYKALPEKGKVIVVDTILPVAAETSPYARQGFHLDLLMLAYNPGGKERTEQEFHDLAKASGFAGGVKPVCCVNGMWVMEFHK

SEQ ID NO: 16255 - protein, 190 aa, Pseudotsuga menziesii
IFNRGMSEHSTMLLNKILDTYKGFNEVQELVDVGGGVGSTLNLIVSRYPHISGINFDMPHVVADAPHYSAVKHVGGDMFDSVPTGQAIFMKWILHDWGDNYCMTLLKNCYKALPEKGKVIVVDTILPVAAETSPYARQGFHLDLLMLAYNPGGKERTEQEFHDLAKAAGFAGGVKPVCCVNGMWVMEFHK

SEQ ID NO: 16256 - protein, 190 aa, Pseudotsuga menziesii
IFNRGMSEHSTMLLNKILDTYKGFNEVQELVDVGGGVGSTLNLIVSRYPHISGINFDMPHVVADAPHYSAVKHVGGDMFDSVPTGQAIFMKWILHDWGDNYCRTLLKNCYKALPEKGKVIVVDTILPVAAETSPYARQGFHIDLLMLAYNPGGKERTEQEFHDLAKAAGFAGGVKPVCCVNGMWVMEFHK

SEQ ID NO: 16257 - protein, 163 aa, Rheum australe
MDSTKGIAFTEEEEALVVKSWASMKKNAGELGLKLFLKVFEIAPTAKKMFSFLRDSDVPVEKNPKLKTHAMTVFIMTCESAVQLRKAGKVTVRESSLKRLGSTHLTYGVADEHFEVVRYALMETIREAVPEMWSPEMKAAWGTAYDQLVAAIKDQMKVASQAS

SEQ ID NO: 16258 - protein, 498 aa, Rheum australe
MSSVASFNNSLNDLSSPSSSALSFQFMNSPFTDFFAADDDATANHGMQQRLDSGWSVFEQQNAITNHDFTDQPKFKSMAPPSLAPVVSSSTSSYLPSPLSFSPSVFLDSPLLFPNSNNFSSPTVGAFIGNNEQKPDVFSFQTPIRPSAVSSTASMFQSLVNEGVWNMDQADNHNKETNNSKSEFAMTLPSKPKIEEATHSNSNSNAAAAQPQRSGSQPSYQYIRSSKTSEDGYNWRKYGQKQVKGSENPRSYYKCSYPNCPTKKKVEMSVEGHVTEIVYKGSHNHPKPQPKRSSYDGLDAPLPAHSMDPSPNLTPETSSVSMEEDDEFDHTSALSMTRPAKEDEPDSKRWKGESETEAMSAYGSRAVKEPRVVVQTTSEIDILDDGYRWRKYGQKVVKGNPNPRSYYKCTSIGCPVRKHIERASNDMRAVITTYEGKHNHDIPAARGSSYSINRPEPSGAALPVRPSAYAPPQLNSAPATLEWLSNTSGFGYSTGFSN

SEQ ID NO: 16259 - protein, 327 aa, Phytophthora sojae
MADQVPAGFNEKYRIGRVIGEGNFSIVKECTNRATGDRYAVKCINKAALNPKDRSNLVQEIEILKDLSHPNIIKLFDVYDGDGPMCFLVMEYAEGGELFDRIITKEYYTEAEAKKVVKVVAKVLRYCHAEGVTHRDLKPENLLYADETENAVIKIADFGFAKLVTEETNMSTMCGTPGYYAPEIVRKLPYDSKCDIWSLGVIAYILLCGFPPFYDENQVEEMRKILNGDFEFVAPYFDGVSQQAKDLICKMLVVQPSKRLSAQEVLDHPWFNDIKEADDDAPVLSVGKNMKEARRLTARSKFRAGVGAVMAVTKTQRLLKASRSPPT

SEQ ID NO: 16260 - protein, 570 aa, Phytophthora sojae
MVQGTSAARAFSVMQELQQLRDKVGGLSEKNRQLAKALTATKQELTRARAAQTAVFSSKVVEWMDARHKPVEDTGTTENAASAPRRLRRRDASVSYVEPKLNTKLRRGDYYGLGKRTGQQRKTHHPRTSPRRVISEPRRATSAFVPAPFAQQRSPFRRRTMRPVQRVSYAEPKLNTKLRQQGGNMGCVNSKPDQDVVNGSAQVDANGENNATANGKPAPAATNPNSFEEQYSLGKVIGSGTFSVVRIAIHKPTGQRYAIKCIKREGLVAEDIEALTTEVAILKQMNHPNIMILHDFFVEEKFYYLVTEYMEGGELFDRIVEKSYYNEREARDLVKLLLEAIKYCHDANIVHRDLKPENLLLTSKDDDASIKLADFGFAKRIEFDSEGLVTACGTPGYVAPEILEGKPYGKAVDIWSIGVITYILLCGYPPFHDDNHNALFKKIKKGKFQFDSPYWDHVSDDAKDLISHMLIVDPEKRATVDQLLSHRWVTGTELATVQLTSALEELRRFNARRKFKAAVSTVSTTVGFSKKYSKSYSQPQSDEAADPDLDNVPEVSPETLDLDLDGNKAD

SEQ ID NO: 16261 - protein, 463 aa, Streptococcus pyogenes MGAS8232
MTIFRKKKKYSNKTEMQRHFKVIDLIFLGLGSMVGTGIFTVTGIGAAKYAGPALTISIIISAIAIGILALFYAEFASRMPSNGGAYSYVYATLGEFPAWLVGWYIIMEFLTAISSVAVGWGSYLKGLLANYNIVLPNALNGTFNLKNGTYIDILPVLVMFFVTGIVLMNSKLALRFNSFLVILKFSALALFIFVGIFFIDHNNWSHFAPYGVGQITGGKTGIFAGASVMFFAFLGFESISMAVDEVKEPQKTIPKGIILSLIIVTALYIVVTTILTGIVHYTKLNVPDAVAFALRNIRLYWAADYVSIVAILTLITVCISMTYALARTIYSISRDGLLPKSLYTLTKKNKVPQNATLVTGLLAMICAGIFPLSSLAEFVNICTLAYLIILSGAIIKLRRIEGEPKANEFKTPLVPFLPILAIIICLSFMSQYKAFTWIAFAIATIIGTLIYLAYGYTHSIENK

SEQ ID NO: 16262 - protein, 398 aa, Streptococcus pyogenes MGAS8232
MSKTIAINAGSSSLKWQLYQMPEEEVLAQGIIERIGLKDSISTVKYDGKKEEQILDIHDHTEAVKILLNDLIHFGIIAAYDEITGVGHRVVAGGELFKESVVVNDKVLEHIEELSVLAPLHNPGAAAGIRAFRDILPDITSVCVFDTSFHTSMAKHTYLYPIPQKYYTDYKVRKYGAHGTSHKYVAQEAAKMLGRPLEELKLITAHIGNGVSITANYHGKSVDTSMGFTPLAGPMMGTRSGDIDPAIIPYLIEQDPELKDAADVVNMLNKKSGLSGVSGISSDMRDIEAGLQEDNPDAVLAYNIFIDRIKKCIGQYFAVLNGADALVFTAGMGENAPLMRQDVIGGLTWFGMDIDPEKNVFGYRGDISTPESKVKVLVISTDEELCIARDVERLKNTK

SEQ ID NO: 16263 - protein, 394 aa, Streptococcus pyogenes MGAS8232
MTKEVVITSAYRTPIGNFGGVFKSLSAVDLGVTVVTKILADTGLKSDAIDEVIFGNVLHAGLGQNVARQVALNAGLSYDTPAFTIDMVCGSGLKAVELGAQKIQTGNADIVLVGGTENMSQAPYVLQGQRWGSRMGDSKVVDTMLKDGLSDAFAGYHMGITAENIVQQYGLTREEQDAFAADSQRKAQLAIEKGRFKEEIAPVTIPQRKGEPLLIDQDEYPKFGTTVDKLAKLRPAFIKDEGTVTAGNASGINDGAAAILLMSKEKAEELGLPILAKITSYASAGVDPSIMGCGPIPATKKALAKAQLTIDDIDLIEANEAFAAQALAVSRDLGFDNEKVNVNGGAIALGHPIGASGARILVTLLAEMAKRDVRHGLATLCIGGGQGQSIIVTR

SEQ ID NO: 16264 - protein, 256 aa, Streptococcus pyogenes MGAS8232
MSILEINNLHVSIEGKEILKGVNLTLKTGEVAAIMGPNGTGKSTLSAAIMGNPNYEVTQGQILLDGVNILDLEVDERARLGLFLAMQYPSEIPGITNAEFMRAAMNADKADEDKISVRDFITKLDEKMALLGMKEEMAERYLNEGFSGGEKKRNEILQLLMLEPKFALLDEIDSGLDIDALKVVSKGVNEMRGKDFGAMIITHYQRLLNYITPDLVHVMMDGRIVLSGDAALATRLEKEGYAGIAQDLGIEYKEES

SEQ ID NO: 16265 - protein, 372 aa, Streptococcus pyogenes MGAS8232
MEELFCIGCGIQIQTEDKEKAGFTPAAALKKGMETGELYCQRCFRLRHYNEITDVHITDDEFLRLLHEVGDSDALVVNVIDIFDFNGSIIPGLSRFISGNDVLLVGNKKDILPKSVKDGKVTQWLTERAHEEGLRPLDVMLTSAQNKYAIKDLIERINELRNGRDVYVVGVTNVGKSTLINAIIQEITGDKDVITTSRFPGTTLDKIEIPLDDGSFIFDTPGIIHRHQMAHYLSPKELKIVSPKKEIKPKTYQLNPEQTLFLGGLSRFDFINGERQGFTAFFDNQLELHRTKLAGADAFYDKHVGTLLTPPGKKELTAFPKLVRHEFTIDQKMDIVFSGLGWIRVNGQKDSKAIVAAWAPEGVAVIVRKAII

SEQ ID NO: 16266 - protein, 298 aa, Streptococcus pyogenes MGAS8232
MFKSGFVAILGRPNVGKSTFLNHVMGQKIAIMSDKAQTTRNKIMGIYTTETEQIVFIDTPGIHKPKTALGDFMVESAYSTLREVETVLFMVPADEKRGKGDDMIIERLKAAKIPVILVINKIDKVHPDQLLEQIDDFRSQMDFKEVVPISALEGNNVPTLIKLLTDNLEEGFQYFPEDQITDHPERFLVSEMVREKVLHLTQQEVPHSVAVVVESMKRDEETDKVHIRATIMVERDSQKGIIIGKQGAMLKKIGKMARRDIELMLGDKVYLETWVKVKKNWRDKKLDLADFGYNEKEY

SEQ ID NO: 16267 - protein, 397 aa, Streptococcus pyogenes MGAS8232
MPKLSKRVLEMKESVTLAAGARAKALKAQGRDVLNLTLGEPDFFTPKHIQDKAIESIQNGTASFYTNASGLPELKAAIATYLKNQYGYHLSPDQIVAGTGAKFILYAFFMAVLNPGDQVLIPTPYWVSYSDQVKMAEGQPIFVQGLEENQFKVTVDQLERARTSKTKVVLINSPSNPTGMIYGAEELRAIGEWAVHNDILILADDIYGSLVYNGNQFVPISTLSEAIRRQTITVNGVAKSYAMTGWRVGFAAGEPEIISAMSKIIGQTTSNLTTVSQYAAIEAFCGSQSSLEEMRLAFEERLNITYPLLCQVPGFEVVKPQGAFYFFPNVKKAMEMTGFSDVTSFANAILEEVGLAVVSGAGFGAPENVRLSYATDIETLKEAIRRLHVFMESNEIN

SEQ ID NO: 16268 - protein, 278 aa, Streptococcus pyogenes MGAS8232
MTKRNKYTMNFKKIRFGFLLCLLLYPLAACNKSEQLNHYERIKKTRKLVVAVSPDYAPFEFKALVNGKDTIVGADVQLAQAIADELDVDLELSPMSFDNVLSSLQTGKADLAISGISHTKERAKVYDFSIPYYQAENAIVMRASDAKVTKNISDLSGKKVAAQKGSIEEGLVKIQLPKANLISLTAMGEAINELKAGQVYAVTLETPVAAGFLAQHKDLALAPFSLKTSDGDAKAVALPKNSGDLTKAVNKVIAKLDEQERYKSFIAETIALTKNTMK

SEQ ID NO: 16269 - protein, 380 aa, Streptococcus pyogenes MGAS8232
MIYFDNAATTIPYGEALKTYQEVATKIYGNPSSLHQLGTNASRILEASRKQIAGLLGVKSEEIFFTSGGTESANWAIKGIAFEKTAFGKHIIISAIEHPAVSESVKWLLTQGFEVSYAPVTTQGVVDVNALAELIRPDTILISIMAVNNEMGAIQPIRAISNLLANQPTITFHVDAVQAIGKIPLCDYMTNRVDLASFSGHKFHSVRGVGFLYKKAGKRLNPLLSGGGQEQELRSTTENVAGIASMAKALRIVTEKQVSVLPKLTAMRDVIYKALSAYPDVTVFSAQEGFVPNILTFGIRGVRGEVIVHAFEKYEIYISTTSACSSKAGKPAGSLVAMGIPVKTAQTAVRISLDDDNDMGQVEQFLTIFKQIYDKTQKVR

SEQ ID NO: 16270 - protein, 326 aa, Streptococcus pyogenes MGAS8232
MTERYADKQIKLFSLTSNLPIAEKIAKAAGIPLGKMSSRQFSDGEIMINIEETVRGDHIYIIQSTSFPVNDNLWELLIMIDACKRASANTVNIVLPYFGYSRQDRVAKPREPITAKLVANMLTKAGIDRVVTLDLHAVQVQGFFDIPVDNLFTVPLFAERYSKLGLSGSDVVVVSPKNSGIKRARSLAEYLDSPIAIIDYAQDDSEREQGYIIGDVSGKKAILIDDILNTGKTFAEAAKILERSGATDTYAVASHGLFAGGAADVLETAPIKEIIVTDSVKTKNRVPENVTYLSASDLIAEAIIRIHERKPLSPLFSYQPKGKNNA

SEQ ID NO: 16271 - protein, 331 aa, Streptococcus pyogenes MGAS8232
MSIRSLFGGLREKILGKNMKIVFPEGNDERVVRAAARLKFEGLLEPIILGQSEEVRNLLTKLGFADQDYTIINPNEYADFDKMKETFVDIRKGKATLEDADKMLCDVNYFGVMLVKMGLADGMVSGAIHSTADTVRPALQIIKTKPGISRTSGVFLMNRENTSERYVFADCAINIDPTAQELAEIAVNTAETAKIFDIDPKIAMLSFSTKGSGKAPQVDKVREATEIAKGLNSDLALDGELQFDAAFVPETAAIKASDSAVAGQANTFIFPDLQSGNIGYKIAQRLGMFDAIGPILQGLNKPVNDLSRGSSAEDIYKLAIITAAQAIESQG

SEQ ID NO: 16272 - protein, 330 aa, Streptococcus pyogenes MGAS8232
MKKSFIHQQEEISFVKNTFTQYLIAKLDVVEVQGPILSRVGDGMQDNLSGTENPVSVNVLKIPNATFEVVHSLAKWKRHTLARFGFNEGEGLVVNMKALRPDEDSLDQTHSVYVDQWDWEKVIPDGKRNLAYLKETVETIYKVIRLTELAVEARYDIEAVLPKKITFIHTEELVAKYPDLTPKERENAITKEFGAVFLIGIGGVLPDGKPHDGRAPDYDDWTTETENGYHGLNGDILVWNDQLGSAFELSSMGIRVDEEALKRQVEMTGDQDRLAFDWHKSLLNGLFPLTIGGGIGQSRMVMFLLRKKHIGEVQTSVWPQEVRDSYDNIL

SEQ ID NO: 16273 - protein, 395 aa, Streptococcus pyogenes MGAS8232
MKNIVIVEALRTPIGAFGGSFKSVSAVELGTTVLKKILDKTQVKPEMVDEVILGNVLHAGLGQNVARQIAIHSGIPSDKTAFTLDMVCGSGLKAIQLATQSIMLGDADIVIAGGVENMSQAAYVSTQHRFGQRLGNSQLIDTLVHDGLTDAFNNYHMGITAENVAQKYGISREEQDQFALESQEKAAKALENHRFADEIVPVSVPQRRKDPLIVTTDEYPKVDTSLEKLQQLRPAFLPKEGTVTAGNASGINDGAALLMLMTEEKALELGLTPLVTIESYASAGVAPELMGAGPIPATQKVLKKAGLTTSDLDLVESNEAFAAQSLAVLKDLKLNPEIVNVNGGAIALGHPIGASGARILVTLIHEMKKRQVTRGLATLCIGGGQGTAVIVKNNT

SEQ ID NO: 16274 - protein, 404 aa, Streptococcus pyogenes MGAS8232
MKIIEKSSKLEHVAYDIRGPVLDEANRMIASGEKILRLNTGNPAAFGFEAPDEVIRDLIVNARLSEGYSDSKGIFSARKAIMQYCQLKGFPDVDIEDIYLGNGVSELISMSLQALLDNGDEVLVPMPDYPLWTACVSLGGGKAVHYLCDEEAGWYPDIADIKSKITSRTKAIVVINPNNPTGALYLKEILEDIVALAREHQLIIFADEIYDRLVMDGKEHIAIASLAPDVFCVSMNGLSKSHRIAGFRVGWMVLSGPKDHVKGYIEGLNMLANMRLCSNVLAQQVVQTSLGGHQSVDALLLPGGRIFEQRNFIYEAINAIPGLSAVKPEAGLYLFPKIDRQMYRIDDDEEFVLQLLKQEKVMLVHGRGFNWKDPDHFRIVYLPSVEELEDVQEKITRVLYQYRR

SEQ ID NO: 16275 - protein, 362 aa, Streptococcus pyogenes MGAS8232
MKVFASPSRYIQGKNALFTNAKTLKQLGDSPILLCDDVVYGIVGERFESYLIDNGMTPVHVAFNGEASDNEISRVVAIAKENSNDVIIGLGGGKTIDSAKAIADLLAVPVIIAPTIASTDAPTSALSVIYTDEGAFEKYIFYSKNPDLVLVDTQVICQAPKRLLASGIADGLATWVEARAVMQKNGDTMAGGNQTLAGVAIAKACEQTLFADGLKAMASCDRQVVTPALENVIEANTLLSGLGFESAGLAAAHAIHNGFTALTGAIHHLTHGEKVAYGTLTQLFLENRSREEIDRYIDFYQAIGMPTTLKEMHLDTATQEDFLKIGRQATMAGETIHQMPFVISPEDVAAALVAVDAYVTSR

SEQ ID NO: 16276 - protein, 222 aa, Streptococcus pyogenes MGAS8232
MEYMLDTLDLEAIKKWHHILPLAGVTSNPSIAKKEGDIDFFERIREVRAIIGDKASIHVQVIAQDYKGILKDAAEIRRQCGDSVYVKVPVTTEGLAAIKTLKAEGYHITATAIYTTFQGLLAIEAGADYLAPYYNRMENLNIDPEAVIGQLAEAINRENADSKILAASFKNVAQVNKSFALGAQAITAGPDVFEAGFAMPSIQKAVDDFGKDWEAIHHRKSI

SEQ ID NO: 16277 - protein, 299 aa, Streptococcus pyogenes MGAS8232
MTKIVECIPNFSEGQNQAVIDGLVATAKSIPGATLLDYSSDASHNRSVFTLVGDDQSIQEAAFQLVKYASENIDMTKHHGEHPRMGATDVCPFVPIKDITTQECVEISKQVAERINRELGIPIFLYEDSATRPERQNLAKVRKGQFEGMPEKLLEEDWAPDYGDRKIHPTAGVTAVGARMPLVAFNVNLDTDNIDIAHKIAKIIRGSGGGYKYCKAIGVMLEDRHIAQVSMNMVNFEKCSLYRTFETIKFEARRYGVNVIGSEVIGLAPAKALIDVAEYYLQVEDFDYHKQILENHLLG

SEQ ID NO: 16278 - protein, 447 aa, Streptococcus pyogenes MGAS8232
MASNHMNEQEREQAKFSLSGATLYGINAVIGSGIFLLPRAIYKGLGPASIAVMFGTAILTIMLAVCFAEVSGYFGKNGGAFQYSKRAFGDFIGFNVGFLGWTVTIFAWAAMAAGFARMFIITFPAFEGWHIPLSIGLIILLSLMNIAGLKTSKIVTITATIAKLIPIVAFCVCTLFFIKNGLPNFTPFVQLEPGTNLLGAISNTAVYIFYGFIGFETLSIVAGEMRDPEKNVPRALLGSISIVSVLYMLIIGGTIAMLGSQIMMTNAPVQDAFVKMVGPAGAWMVSIGALISITGLNMGESIMVPRYGAAIADEGLLPAAIAKQNQNGAPLVAILVSGAIAIVLLLTGSFENLAKLSVVFRFFQYIPTALAVMKLRKDAPDANVIFRVPFGPIIPILAVIVSLVMIWGDNPMNFVYGAVGVIIASSVYYLMHGRNHQMDQMPPEEQI

SEQ ID NO: 16279 - protein, 437 aa, Streptococcus pyogenes MGAS8232
MSMFLDTAKISVQAGRGGDGMVAFRREKYVPNGGPWGGDGGKGGSVIFRVDEGLRTLMDFRYNRKFKAKSGEKGMTKGMHGRGAEDLIVFVPQGTTVRDAETGKVITDLVEHGQEVVIAKGGRGGRGNIRFATPRNPAPEIAENGEPGEERQLELELKILADVGLVGFPSVGKSTLLSVVSSAKPKIGAYHFTTIVPNLGMVRTKSGDSFAMADLPGLIEGASQGVGLGTQFLRHIERTRVILHVIDMSASEGRDPYEDYVSINNELETYNLRLMERPQIIVANKMDMPEAQENLKAFKKKLAAQYDEFDDLPMIFPISSLAHQGLENLLEATAELLAKTDEFLLYDESDLVDEEAYYGFAEAEKDFEITRDDDATWVLSGEKLERLFVMTNMERDESIMKFARQLRGMGVDEALRERGAKDGDLVRIGKFEFEFVD

SEQ ID NO: 16280 - protein, 244 aa, Lilium hybrid cultivar
MGRGKIEIKRIENTTNRQVTFCKRRNGLLKKAYELSVLCDAEVALIVFSTRGRLYEYANNSVKGTIERYKKASSDAFNTGSVSEANAQYYQQESSKLRNQIVSLQNAHRSMLGESIGSMGLKELKYMEKKLENGINKIRTKKNELLFAEIEYMQKREAELQNNSMFLRTKIAENERSQQQHMDMDRSQQQHMNIERSHQSHLEMLPTTSAFEAMPTFDSRNFFDINLLEAHHHYQQQQTALQLG

SEQ ID NO: 16281 - protein, 437 aa, Nostoc commune
MYNQGTVEGAANTELGSRIFLYEVVGLRQSEETDQTNYPIRKSGSVFIRVPYNRMNQEMRRITRLGGTIVSIQPATALQPVNGKASLGNATSEVSELATSGETANSEGNGKATPVNAHSAEEQNKDKKGNTMTQAKAKKDHGDVPVNTYRPNAPFIGKVISNEPLVKEGGIGIVQHLKFDLSGSNLKYIEGQSIGIIPPGLDKNGKPEKLRLYSIASTRHGDDVDDKTVSLCVRQLEYKHPETSETVYGVCSTHLCFLKPGEEVKITGPVGKEMLLPNDPDANVIMMATGTGIAPMRAYLWRQFKDAERAANPEYQFKGFSWLIFGVPTTPNLLYKEELEEIQQKYPDNFRLTAAISREQKNPQGGRMYIQDRVAEHADELWQLIKNEKTHTYICGLRGMEEGIDAALTAAAVKEGVTWSVYQKELKKAGRWHVETY

SEQ ID NO: 16282 - protein, 436 aa, Nostoc commune
MYNQGAVEGAANTELGSRIFLYEVVGLRQSEETDQTNYPIRKSGSVFIRVPYNRMNQEMRRITRLGGTIVSIQPVTVLEPVNGKASFGNATSVVSELATSGQTANSEGNGKATPVNAHSAEENKDKKGNTMTQAKAKKDHGDVPVNTYRPNAPFIGKVISNEPLVKEGGIGIVQHLKFDLSGSDLKYIEGQSIGIIPPGVDKNGKPEKLRLYSIASTRHGDDVDDKTVSLCVRQLEYKHPETSETVYGVCSTHLCFLKPGEEVKITGPVGKEMLLPNDPEANVIMMATGTGIAPMRAYLWRQFKDAERAANPDYQFKGFSWLIFGVPTTPNLLYKEELEEIQQKYPDNFRLTAAISREQKNPQGGRMYIQDRVAEHADELWQLIKNEKTHTYICGLRGMEEGIDAALTAAAAKEDVTWSDYQKQLKKAGRWHVETY

SEQ ID NO: 16283 - protein, 436 aa, Nostoc commune
  misc_feature (91)..(91): Xaa can be any naturally occurring amino acid
  misc_feature (99)..(99): Xaa can be any naturally occurring amino acid
  misc_feature (101)..(101): Xaa can be any naturally occurring amino acid
  misc_feature (200)..(200): Xaa can be any naturally occurring amino acid
  unsure (1)..(436): unsure at all Xaa locations
MYNQGAVEGAANTELGSRIFLYEVVGLRQSEETDQTNYPIRKSGSVFIRVPYNRMNQEMRRITRLGGTIVSIQPVTALQPVNGKASLGNAXSEVSELGXSXETANSEGNGKATPVNAHSAEENKDKKGNTMTQAKAKKDHGDVPVNTYRPNAPFIGKVISNEPLVKEGGIGIVQHLKFDLSGSDLKYIEGQSIGIIPPGXDKNGKPEKLRLYSIASTRHGDDVDDKTVSLCVRQLEYKHPETSETVYGVCSTHLCFLKPGEEVKITGPVGKEMLLPNDPDANVIMMATGTGIAPMRAYLWRQFKDAERAANPEYQFKGFSWLIFGVPTTPNLLYKEELEEIQQKYPDNFRLTAAISREQKNPQGGRMYIQDRVAEHADELWQLIKNEKTHTYICGLRGMEEGIDAALTAAAAKEGVTWSDYQKQLKKGGRWHVETY

SEQ ID NO: 16284 - protein, 446 aa, Nostoc commune
MYNQGAVEGAANIELGSRVFVYEVVGLRQSEETDQTNYPIRKSGSVFIRVPYNRMNQEMRRITRLGGTIVSIQPVTALESVNGKASFGTATGVVSELATSEETANSEGNGKATPVNAHSEAEGFAKPPAEEQNKDKKGNTMTQAKAKKDQGDVPVNTYRPNAPFIGKVISNEPLVKEGGIGIVQHLKFDISAGDLKYIEGQSIGIIPPGLDKNGKPEKLRLYSIASTRHGDDVDDKTVSLCVRQLEYKHPESGETVYGVCSTHLCFLEPGADVKITGPVGKEMLLPNDPDANVIMLATGTGIAPMRAYLWRQFKDAERAANPEYQFKGFSWLIFGVPTTPNLLYKEELEEIQQKYPDNFRLTAAISREQKNPQGGRMYIQDRVAEHADELWQLIKNEKTHTYICGLRGMEEGIDAALTGAAAKEGVTWSDYQKELKKAHRWHVETY

SEQ ID NO: 16285 - protein, 436 aa, Nostoc commune
MYNQGAVEGAANTELGSRIFLYEVVGLRQGEETDQTNYPIRISGSVFIRVPYNRMNQEMRRITRLGGTIVSIQPVTALQPVNGKASFGNATSEVSELATSGETANSEGNGKATPVNAHSAEENKDKKGNTMTQAKAKKDHGDVPVNTYRPNAPFIGKVISNEPLVKEGGIGIVQHLKFDLSGSNLKYIEGQSIGIIPPGLDKNGKPEKLRLYSIASTRHGDDVDDKTVSLCVRQLEYKHPETSETVYGVCSTHLCFLKPGEEVKITGPVGKEMLLPNDPDANVIMMATGTGIAPMRAYLWRQFKDAERAANPEYQFKGFSWLIFGVPTTPNLLYKEELEEIQQKYPDNFRLTAAISREQKNPQGGRMYIQDRVAEHADELWQLIKNEKTHTYICGLRGMEEGIDAALTAAAAKEGVTWSDYQKQLKKAGRWHVETY

SEQ ID NO: 16286 - protein, 436 aa, Nostoc commune
MYNQGAVEGAANTELGSRIFLYEVVGLRQGEETDQTNYPIRKSGSVFIRVPYNRMNQEMRRITRLGGTIVSIQPVTALQPVNGKASFGNATSEVSELATSGETANSEGNGKATPVNAHSAEENKDKKGNTMTQAKAKKDHGDVPVNTYRPNAPFIGKVISNEPLVKEGGIGIVQHLKFDLSGSNLKYIEGQSIGIIPPGLDKNGKPEKLRLYSIASTRHGDDVDDKTVSLCVRQLEYKHPETSETVYGVCSTHLCFLKPGEEVKITGPVGKEMLLPNDPDANVIMMATGTGIAPMRAYLWRQFKDAERAANPEYQFKGFSWLIFGVPTTPNLLYKEELEEIQQKYPDNFRLTAAISREQKNPQGGRMYIQDRVAEHADELWQLIKNEKTHTYICGLRGMEEGIDAALTAAAAKEGVTWSDYQKQLKKAGRWHVETY

SEQ ID NO: 16287 - protein, 436 aa, Nostoc commune
MYNQGAVEGAANTELGSRIFLYEVVGLRQSEETDQTNYPIRKSGSVFIRVPYNRMNQEMRRITRLGGTIVSIQPVTVLEPVNGKASFGNANSVVSELATSGETANSEGNGKATPVNAHSAEENKDKKGNTMTQAKAKKDHGDVPVNTYRPNAPFIGKVISNEPLVKEGGIGIVQHLKFDLSGSDLKYIEGQSIGIIPPGVDKNGKPEKLRLYSIASTRHGDDVDDKTVSLCVRQLEYKHPETSETVYGVCSTHLCFLKPGEEVKITGPVGKEMLLPNDPEANVIMMATGTGIAPMRAYLWRQFKDAERAANPEYQFKGFSWLIFGVPTTPNLLYKEELEEIQQKYPDNFRLTAAISREQKNPQGGRMYIQDRVAEHADELWQLIKNEKTHTYICGLRGMEEGIDAALTAAAAKEDVTWSDYQKQLKKAGRWHVETY

SEQ ID NO: 16288 - protein, 436 aa, Nostoc commune
MYNQGAVEGAANTELGSRIFLYEVVGLRQSEETDQTNYPIRKSGSVFIRVPYNRMNQEMRRITRLGGTIVSIQPVTVLEPVNGKASFGNATSVVSELATSGQTANSEGNGKATPVNAHSAEENKDKKGNTMTQAKAKKDHGDVPVNTYRPNAPFIGKVISNEPLVKEGGIGIVQHLKFDLSGSDLKYIEGQSIGIIPPGLDKNGKPEKLRLYSIASTRHGDDVDDKTVSLCVRQLEYKHPETGETVYGVCSTHLCFLKPGEEVKITGPVGKEMLLPNDPEANVIMMATGTGIAPMRAYLWRQFKDAERAANPDYQFKGFSWLIFGVPTTPNLLYKEELEEIQQKYPDNFRLTAAISREQKNPQGGRMYIQDRVAEHADELWQLIKNEKTHTYICGLRGMEEGIDAALTAAAAKEDVTWSDYQKQLKKAGRWHVETY

SEQ ID NO: 16289 - protein, 243 aa, Prunus serotina
MAYENTTMSLDSPQRKLGRGKIEIKRIENTTNRQVTFCKRRNGLLKKAYELSVLCDAEVALIVFSNRGRLYEYANNSVKETIERYKKACAESTNTGSVSEASTQYYQQEAAKLRAQIRNLQNSSRNMMGESLSSMKMKDLKNLESKLEKGISRIRSKKNELLFAEIEYMQKREIDLHNNNQLLRAKIAENERSQQNINVMAGGGSYEIMQSQPYDSRNYFQVDALQPNHQYNSRQDQMALQLV

SEQ ID NO: 16290 - protein, 174 aa, Prunus persica
MPRDRDPLVVGRVVGDVLDPFTRSVSLRVTYGMKEVNNGCELKPSQVVQQPRVDTGGDDLRTFYTLVMVDPDAPSPGDPNLKEYLHWLVTDIPATTAASFGQEIVCYESPRPTVGIHRFVLVLFRQLGRQTVYAPGWRQNFNTRDFAELYNLGLPVSAVYFNCQRESGSGGRRR

SEQ ID NO: 16291 - protein, 641 aa, Carica papaya
MVFKKDVDYGFNVPVIPRAPRSSRRRAPHKTTAEDTQVCAFELLASLAGKLLEESESSSASSNASERSDCPRIATDIIAQEQEDGDKRLETECVDRGSCEVSIAASESTAENSDRKCSPNEFPHVENDAILERTSFSGCLHNIDGNSKSNGYDQQQKTEGLEYLTEANTCHANDQTDLCMGSPGLISSDKDVNIPSRKNLVSNVSLSRHRTDVSLGRRDDDENFSRCYNYKFSNKVKAYRPPPRIVHRRIRKLLTSKYWKVAPKLKDYELSRADGGIKPLYHKRKTCYNRESSQHDVFYKKRKLSDRNSVVTSDGGFSSESVTNSPEKNVDKSGSDAMLHGVKFSIKSFRVPELFIEVPDTATVGSLKRTVMEAVTALVGGGIRVGVLVKGKKIRDDDRTLSQTGISCKDNLDALGFTLEPTHAQAPPPICPEDHPPLLPNDPTLLLSRLSAAPALELGIPNAIPDPTSLNDSGNHVDSNHEIVSSYVDSLTDKPPSDSRALVPVPAMSVEALAVVPVNQKIRKSELAQRRTRRPFSVSEVEALVQAVEELGTGRWRDVKLRAFEDADHRTYVDLKDKWKTLVHTATISPQQRRGEPVPQELLDRVLAAHSYWSQNQAKQGKRQAGTLKITDVQPGAIVMV

SEQ ID NO: 16292 - protein, 635 aa, Carica papaya
MVLQNRLEYGFNGYQVPATPRASRSTRRRSSFKKKPEDNQMCAFDLLATVAGKLLLEKESSPMSSNMSSDKDQYAAVKHAVKKECQGEDKLVKAEACDQGSCDRRYFVSEPVSQAPINHSYRESPGPENDHCRFTSAVATSNCTERFDTQKLIVKDKLHGNEKALFGIGTDSCSLRDPVVRAGKLSGLVSLDSSVQEREEHVPRSSFPGSWDDVNFVSKDDDESSSGCTHPSITKKLFRPTPRLGDRRIRKVLASKYWKVAPKLKDVTFSNTNVDFKPAYWNRKNSYKRLRSDRNYPFKKRKFFDCISVSNSDEGISSECVSDAPEKGIIGDDFGSHPKTHEVKLRIKSFRVPELFIELPETATVGSLKRTVMEAVTAILGGELRVGVFLQGKKVRDDNKTLLQTGISQDNQSDSLGFCLEPNPSQASKPLCPEESPFLLPCGVPQPLSRYPPAPGMIQQDTRNVMPEPRVANTGNSIDSDHDSAPSPTDMSVDKSTTDSRALVAVPSVNVETLAVVPVHRKSKRSEVVQRRIRRPFSVAEVEALVQAVEKLGTGRWRDVKLRAFDNAKHRTYVDLKDKWKTLVHTARISPQQRRGEPVPQELLDRVLTAHAYWSQQQAKQQLKQQQQSENCLLL

SEQ ID NO: 16293 - protein, 508 aa, Actinobacillus succinogenes
MLIGVPRERLNGETRVAATPKTVEQIKKLGFDVIVENDAGFKASFEDNAFTAAGTSGSQHDVWNADIIFKVNAPTDEEIALMKDGATLVSFIWPAQNPQLMEKLSARKINVLAMDAVPRISRAQALDALSSMANISGYRAVIEAANAFGSFFTGQITAAGKVPPAKVLVIGAGVAGAAIGAANSLGAIVRAFDSRPEVKEQVKSMGADFLEIDFEEEGGSGDGYAKVMSEEFNRRAMALYAEHAKDVDIIITTAAIPGKPAPRLITKEMVDSMKPGSVVVDLAALTGGNCEYTKAGEVVVTENQVKVIGYTDFPARLPTQSSQLYGTNLVNLLKLLAPNKDGQIDINFEDVVLRGVTGIRDGEVTWPAPPIQVSAQPQQKAAAAPVEKKEKEPTNPRVKYGIMAAIVVLFLWLAAVTPAAFLSHFTVFVLSCVVGYYVVWNVSHALHTPLMAVTNAISGIIIVGAVLQIAQASFYVSLLAFIAILVASINIFGGFKVTQRMLSMFRKG

SEQ ID NO: 16294 - protein, 190 aa, Rhizobium sullae
LWGFDGSSTMQAEGRSSDCVLKPVAIYPDPARTNGVLVMCEVMMPDGVTPHASNARATILDDEDAWFGFEQEYFFYENGRPLGFPESGYPAPQGPYYTGVGYSNVGSVAREIVEEHLDLCLAAGINHEGINAEVAKGQWEFQIFGKGSKKAADQIWMARYLLQRLTEKYGIDIEYHCKPLGDTDWNGSGI

SEQ ID NO: 16295 - protein, 158 aa, Brassica oleracea var. gemmifera
SYRGVRKRPWGKYAAEIRDSTRKGIRVWLGTFDTAEEAALAYDQAAFALKGDLAVLNFPVEVVKESLWNMENVNFNDGESPVIALKRKHSMRNRPRGKKKSSPSSSSSFLSSTSSSSSYSSSSSAYSSSLSSRNREQSVVTNQETEVVVFEDLGAEYL

SEQ ID NO: 16296 - protein, 605 aa, Zea mays
MDTHIGSVNGAASNQTVGCPASAPGCPMASTPAQPAATLSAGEASLGRHLARRLVQVGVNDVFAVPGDFNLTLLDHLIAEPGLRLVGCCNELNAGYAADGYARARGVGACAVTFTVGGLSVLNAIAGAYSENLPVICIAGGPNSNDYGTNRILHHTIGLPDFSQELRCFQTVTCHQAVVNNLDDAHEQIDTAIATALRESKPVYLSISCNLPGLPHPTFSRDPVPFFLTPRSNKMGLEAAVEATVEFLNKAVKPVLVAGPKLRVAKAGKAFVDMVDASGYAYAVMPSAKGLVPETHPHFIGTYWGAVSTAFCAEIVESADAYLFAGPIFNDYSSVGYSFLLKKEKAIIVQPERVIVGNGPAFGCVMMKEFLSELAKRVNKNTTAYENYKRIFVPEGQPLESEPNEPLRVNVLFKHVQKMLTGDSAVIAETGDSWFNCQKLKLPEGCGYEFQMQYGSIGWSVGALLGYAQGANHKRVIAFIGDGSFQVTAQDVSTMLRCEQNSIIFLINNGGYTIEVEIHDGPYNVIKNWNYTGFVDAIHNGLGKCWTSKVKSEEELTAAIETALGEKKDCLCFIEVIAHKDDTSKELLEWGSRVSAANSRPPNPQ

SEQ ID NO: 16297 - protein, 468 aa, Azoarcus sp. BH72
MKKLFAILLTALTVGFAGGVIAQENTAAPTAPAAVEAPAATDAAPAAAEAPAAAEEVVATVNKGDVAWIMTATLLVLFMALPGLALFYGGLVRTKNMLSVLMQVMVVFSLIAVLWAFYGYSLAFTEASPFIGSLDKLFLSGVSNSTLADTFSADAKLPEYAFIAFQATFAGITCALIVGSFAERIKFSAVLLFSVIWFTFCYLPICHMVWGPGGFLLGDGALDFAGGTVVHINAGVAGLVGAYMVGKRIGFGRESMAPHFVTLTMVGASMLWVGWFGFNAGSNLEATAGAALAFINTLLATAAAVLAWSLGEAMFKGKPSMLGAASGAVAGLVAITPACGSVGPMGAIIIGLLAGFVCLWGVNGLKRMLGADDSLDVFGVHGLGGILGAILTGVFTAPSLGGTGAEDFAMGHQVWVQTYSVLITIVWSAVVAFIGYKIADMFVGLRVPEEEEREGLDVTAHGETAYHY

SEQ ID NO: 16298 - protein, 575 aa, Lactococcus lactis subsp. lactis
MKKIKLEKPTSGSQLVLQTLKELGVEIIFGYPGGAMLPLYDAIHNFEGIQHILARHEQGATHEAEGYAKSSGKVGVVVVTSGPGATNAVTGIADAYLDSVPLLVFTGQVGPLSIGKDAFQEADTVGITAPITKYNYQIRETADIPRIVTEAYYLARTGRPGPVEIDLPKDVSTLEVTEINDPSLNLPHYHESEKATDEQLQELLTELSVSKKPVIIAGGGINYSGSVDIFRAFVEKYQIPVVSTLLGLGTLPISHELQLGMAGMHGSYAANMALVEADYIINLGSRFDDRVVSNPAKVAKNAVVAHIDIDAAELGKIVKTDIPILSDLKAALSRLLQLNKVRTDFNDWIKTVTKNKEKAPFTYEPQNHDIRPQETIKLIGEYTQGDAIIVTDVGQHQMWVAQYYPYKNARQLITSGGMGTMGFGIPAAIGAKLAQPNKNVIVFVGDGGFQMTNQELALLNGYGIAIKVVLINNHSLGMVRQWQESFYEERRSQSVFDVEPNFQLLAEAYGIKHVKLDNPKTLADDLKIITEDEPMLIEVLISKSEHVLPMIPAGLHSDEMIGLHFTDENEEVDNA

SEQ ID NO: 16299 - protein, 396 aa, Oryza sativa
MCGGAIISGFIPPSAAAAAAAAAAKKQQGRRVTADVLWPGMLRKGKAAAAEEDFEADFREFERGMSDDEAEGGGGEEEEDDDDVVVVVPPPAAARFVVRAAAKAAPPTADGMLTTKLVQHDGPTARSAKHKRKNQYRGIRQRPWGKWAAEIRDPSKGVRVWLGTYNTAEEAARAYDAEARKIRGKKAKVNFPDEPAVAQKLSLKQNAAKQEKLAPPLKTCGDDAFFQLNSSDNDLFAMLAKVPAKPAEPVDLMPPVKPLASTETFEMNMLSDTSSNSFGSSDFGWEDDTLTPDYTSVFVPNAAMPAYGEPAYLTGGAPKRMRNNYGIAVPQGNGMPNLAQNMPTFDPEMKYLPLPYVESSSDESMDNLLQNDATQDGASNEGIWSLDELLMAAGAY

SEQ ID NO: 16300 - protein, 254 aa, Legionella pneumophila
MKFVDEALIKVEAGKGGNGCLSFRREKFIPRGGPDGGDGGDGGSIYFEASSDLNTLIDFRYTRQYKAENGQSGMGGNCTGKKGDDLTIKVPVGTMVYDADTGELLADISQPGIPVLIAQGGFHGLGNTRYKSSVNRSPRQTTPGSPGESRNLRLELRVLADVGLLGLPNAGKSTLIRAVSSSKAKVADYPFTTLHPGLGVVRVSPYKSFVMADIPGLIEGAAQGAGLGHRFLKHLSRTCVLLHVIDIAPLDGSD

SEQ ID NO: 16301 - protein, 583 aa, Nicotiana tabacum
SIKFLAPSLPNPARFSKNAVKLHATPPSVAAPPAGAPEVAAERLEPRVEEKDGYWILKEQFRKGINPQEKVKIEKQPMKLFMENGIEELAKIPIEEIDQSKLTKDDIDVRLKWLGLFHRRKNQYGRFMMRLKLPNGVTTSAQTRYLASVIRKYGKEGCADITTRQNWQIRGVVLPDVPEILKGLAEVGLTSLQSGMDNVRNPVGNPLAGIDPEEIVDTGPYTNLLSQFITGNSRGNPAVSNLPRKWNPCVVGSHDLYEHPHINDLAYMPATKDGRFGFNLLVGGFFSAKRCDEAIPLDAWVPADDVVPVCKAILEAFRDLGFRGNRQKCRMMWLIDELGVEGFRAEVEKRMPQQELERASPEDLVQKQWERRDYLGVHPQKQEGYSFIGLHIPVGRVQADDMDELARLADEYGSGEIRLTVEQNIIIPNIENSKIEALLKEPVLSTFSPDPPILMKGLVACTGNQFCGQAIIETKARSLMITEEVQRQVSLTRPVRMHWTGCPNTCAQVQVADIGFMGCLTRDKNGKTVEGADVFLGGRIGSDSHLGEVYKKAVPCDDLVPLVVDLLVNNFGAVPREREETED

SEQ ID NO: 16302 - protein, 583 aa, Bromus tectorum
LRPWGPSEPRKGADILVEALERCGIVDVFAYPGGASMEIHQALTRSPVITNHLFRHEQVEAFAASGYARASGRVGVCVATSGPGATNLVSALADALLDSIPMVAITGQVPRRMIGTDAFQETPIVEVTRSITKHNYLVLDVEDIPRVIQEAFFLASSGRPGPVLVDIPKDIQQQMAVPAWDTPMSLPGYIARLPKPPSTESLEQVLRLVGEAKRPILYVGGGCAASGEELRRFVELTGIPVTTTLMGLGNFPSDDPLSLRMLGMHGTVYANYAVDKADLLLAFGVRFDDRVTGKIEAFASRSKIVHIDIDPAEIGKNKQPHVSICADVKLALQGLNDLLNGSKAQKSLDFGPWQEELEQQKRTFPLGYKTFGEAIPPQYAIQVLDELTKGEAIIATGVGQHQMWAAQYYSYKRPRQWLSSAGLGAMGFGLPAAAGASVANPGVTVVDIDGDGSFLMNIQELALIRIENLPVKVMILNNQHLGMVVQWEDRFYKANRAHTYLGNPENESEIYPDFVTIAKGFNVPAVRVTKKSEVRAAIQKMLDTPGPYLLDIIVPHQEHVLPMIPSGGAFKDIIMEGDGRIEY

SEQ ID NO: 16303 - protein, 512 aa, Torenia hybrid cultivar
MSPLALMILSTLLGFLLYHSLRLLLFSGQGRRLLPPGPRPWPLVGNLPHLGPKPHASMAELARAYGPLMHLKMGFVHVVVASSASAAEQCLRVHDANFLSRPPNSGAKHVAYNYEDLVFRPYGPKWRLLRKICAQHIFSVKAMDDFRRVREEEVAILSRALAGKRAVPIGQMLNVCATNALSRVMMGRRVVGHADGTNDAKAEEFKAMVVELMVLSGVFNISDFIPFLEPLDLQGVASKMKKLHARFDAFLTEIVRERCHGQINNGGAHQDDLLSTLISFKGLDDGDGSRLTDTEIKALLLNLFAAGTDTTSSTVEWAVAELLRHPKTLAQVRQELDSVVGKNRLVSETDLNQLPYLQAVVKETFRLHPPTPLSLPRLAEDDCEIDGYLIPKGSTLLVNVWAIARDPKVWADPLEFRPERFLTGGEKADVDVKGNDFELIPFGAGRRICAGVGLGIRMVQLLTASLIHAFDLDLANGLLPQNLNMEEAYGLTLQRAEPLLVHPRLRLATHVY

SEQ ID NO: 16304 - protein, 457 aa, Torenia hybrid cultivar
MAKTYGPLMHLKFGLKDAVVASSASVAEQFLKKHDVNFSNRPPNSGAKHIAYNYQDLVFAPYGPRWRLLRKICSVHLFSSKALDDFQHVRHEEICILIRAIASGGHAPVNLGKLLGVCTTNALARVMLGRRVFEGDGGENPHADEFKSMVVEIMVLAGAFNLGDFIPVLDWFDLQGIAGKMKKLHARFDKFLNGILEDRKSNGSNGAEQYVDLLSVLISLQDSNIDGGDEGTKLTDTEIKALLLNLFIAGTDTSSSTVEWAMAELIRNPKLLVQAQEELDRVVGPNRFVTESDLPQLTFLQAVIKETFRLHPSTPLSLPRMAAEDCEINGYYVSEGSTLLVNVWAIARDPNAWANPLDFNPTRFLAGGEKPNVDVKGNDFEVIPFGAGRRICAGMSLGIRMVQLVTASLVHSFDWALLDGLKPEKLDMEEGYGLTLQRASPLIVHPKPRLSAQVYCM

SEQ ID NO: 16305 - protein, 227 aa, Corynebacterium glutamicum
MEGVQDILSRAGIFQGVDPTAVNNLIQDMETVRFPRGATIFDEGEPGDRLYIITSGKVKLARHAPDGRENLLTIMGPSDMFGELSIFDPGPRTSSAVCVTEVHAATMNSDMLRNWVADHPAIAEQLLRVLARRLRRTNASLADLIFTDVPGRVAKTLLQLANRFGTQEAGALRVNHDLTQEEIAQLVGASRETVNKALATFAHRGWIRLEGKSVLIVDTEHLARRAR

SEQ ID NO: 16306 - protein, 572 aa, Geobacillus stearothermophilus
MAKMNVEEQTKTKMSGSMMLIEALKAEQVEVIFGYPGGAVLPLYDELYKAGVFHVLTRHEQGAIHAAEGYARISGKPGFVIATSGPGATNIVTGLTDAMMDSLPLVVFTGQVATSVIGSDAFQEADVVGITMPITKHNYQVRDISELPKIIKEAFHIATTGRPGPVLIDIPKDITTAEGEFDYDEEVCLPGYQPTTQPNHWQIRRLVEAVSQSKRPVILAGAGVLHADAANELRQYAEQQNIPVVHTLLGLGGFPADHPLFLGMAGMHGTYTANMALYECDLLINIGARFADRVTGNLKYFAPKATVAHIDIDPAEIGKNVPTKIPIVSDAKAALQELIAQQGKPADNAAWLEQLNEWKRRFPLHYEPEAGTIKPQKLIEMIYELTNGEAIVTTDVGQHQMWAAQYYKFNRPNRWVTSGGLGTMGFGLPAAIGAQLADRSATVVSIVGDGGFQMTLQELSVIRELGLPIKIVIVNNQALGMVRQWQELFYEKRYSHSLIPNHPDFVKLAEPYGIPGLRAKTEAESAEVLKQAFAMDGPVLLDFHVRADENVYPMVSPGKGLHEMVGVKACEE

SEQ ID NO: 16307 - protein, 295 aa, Oryza sativa Japonica Group
MAIIHDTSDQQEDNMRSYMDGGGAAAYEEEEEEVEDDDGGGGGGGGGGGGGLGEKKRRLAAEQVRALERSFEADNKLDPERKARIARDLRLHPRQVAVWFQNRRARWKTKQIERDFAALRSRHDALRLECDALRRDKDALAAEIADLRDRVDGQMSVKLEAVAADEHQPPPPPPPPPLAYNSKVVDGSTDSDSSAVFNEEASPYSGAAIDHHHHQTPASYDTAGFTSFFAPSTTLTSSLSFPSMFHASSHFDGHQELLVGGGGAGAVADADLGGAGFFAGDEHAGGLSWYGAEGW

SEQ ID NO: 16308 - protein, 360 aa, Kluyveromyces lactis
MSSKAVNVAVIGTGVVGSSFLKQLLSIKSQITYNVILVAKYSNALVSKDYSPLKLDASSWEETVNAEAGNPISVPEIFEFLQKSPLPTILVDNTSNEEIANFYPKFIESGISIATPNKKAFSSNLELWNNIFSAKPSNGLVYHEATVGAGLPIIGPLRDMIQTGDKVVKIEGIFSGTLSYIFNEFSTSTPNDVGFSSVVKVAKELGYTEPDPRDDLNGLDVARKVTILARIAGFKVESPTSFPVQSLIPSALESVKSSDEFLQKLPDYDHELKQLKEEAAKENKVLRFVGKVDFPSNVVSVGIEKYDYSHPFASLKGSDNVISIQTERYTNPLVVQGAGAGADVTAAGVLADVIKIAERL

SEQ ID NO: 16309 - protein, 514 aa, Debaryomyces hansenii
MDESDEEYIAPQHTAADTPSGVPSNEASQKESSVPADGVSKRTRSSGMTHQPRSGAVGDLKSSNGGYAWEDEYQRPWDIVKDDEDGRSLETIIQTMIENRKKKIMRNPTTPFQRGIIRTLVVIIDGSSVMSEKDLRPTRFSMMLSLLQEFVVEYFDQNPISQLGIIMMRNGVSNLISEVNGSPQYHLDKIRQLKSRQHNKYEPKGDPSLQNALEMARSLLMYNFGTNLNDTKNSKEILIIFGALFTSDPGDIHKTINSLVKDEIKVKVIGLSAQVAICQELVNKTNNPGKSNTFWSAGGNNYGVIMNEIHFRELLMDCVIPLPVTTNAVIDENNSKEVPIIKMGFPSKIQPVITSSTSNLSVDFPQLCACHPTQDSLESKNNDPTATLGTRSVIGYECPQCNNKVCHLPTICPICGLMLILSTHLARSYHHLVPLGDYKEVPVSESYSSTYCYGCLLKFPSGIKNTDVNEDGKTKMDSLTSSRYRCGKCQNDFCIDCDVFVHESLHNCPGCENK

SEQ ID NO: 16310 - protein, 498 aa, Debaryomyces hansenii
MVALERKRKISGSEQPNGTKKFKSATSSFVLHSYSKLPDLNSIPLAKTQPLDVFVWGTGSMCELGLGPSAKTKEVKRPRLNPFLTSEHLGDSKIVDFAAGGMHTLALDSDNRVWSWGGNDSGVLGRDTSKVKEVLKDMDADDSEDDDDGDLNEAESTPGLVENLPKLKGAKIVQLAATDNLSAVLYDNGDVYAWGCFRCNEGLLGFLRDEIKLQKTPLKIKQLKNVVQLARGKDHLLALDSKGIVYAWGNGQQFQLGRRVLERHRYNGLEPKQFGLYNIKYIASGDFHCFAIDHDDQVYAWGLNQFGQCALTDSDGKLEDGSLITSPTIIPELSKKGITHLCAGEHHSMALTGDGSVLSWGRYDMKEVGIPKDKLPESTFKDAHGNARSVPTPTKLQFGLKSDNGVKCKTIACGSHHSFAVTDDGFVYAWGFGDTYAPGLGPLEEDVEKPTRIVNTATKYHDIQQINAGGQFSISGGVKIDDEDKAEDRIEKYEEIDG

SEQ ID NO: 16311 - protein, 387 aa, Debaryomyces hansenii
MKLLSQSFEKDKSGSTTLVPQDKEDLWQLYNLIQKGDEIKLPTHRNVKKVTSGGGSGGKDKGKADRKLLTLKMSVEDIEYTPSDEVMRIRGRTVEPNEYVPIQSYHTAEVQFDKKFTLIKPDWDEISYGIIVSACSIEEKAEVGAVIMEEGVAHLCLVTDNMTVLRNKIEKSIPRKRRGEGGGGNHDKAMEKFLNMVSSTMLRNFDLTKLKAIILASPGFTANALYQNTINQAIQEENKLVIQNKSKFMVVHSSTGYLQGLEEILKDPSIQKQLSNTKFAREGAIFEEFQRVLNNDDDRAWYGPSEATKAVELGAIKYFMITDTLFRSDDIAVRKHYIKLTEEVKRQGGEVLIFSSLHESGEQLDQLTGVAVLLNYPVADLDEDEEE

SEQ ID NO: 16312 - protein, 607 aa, Debaryomyces hansenii
MSVYTPNSAAVAAQQQQQQHQQRQQHQQRLSELLEAVKQEFDFALNEASNFKQVKEDYDLKYNQQTAEMQQIRQTVYELEMAHRKIKEAYEEEILRLKTELENRDRQAQQHQNKLNGIENRQPPFGNYPPPQQQQPPQQAPVPQVSQSQTLPPPIKPSPAKQEAKSESPKTAKVEPTKDETASTQPPAEPSTPETSTALTIIDKSQYIVNPLQKASHVKEIPSFLADLDVSKANPDFKKQKPDYYVLYNPAFNRDLDVDLIHSLDHSSVVCCVRFSKNGEFIATGCNKTTQVFNVKTGELIAKLIDDNSSNGINDDSNNENQSGESNVQSSSANANGDLYIRSVCFSPDGKLLATGAEDKLIRIWDLETKRIIKILRGHEQDIYSLDFFPDGNRLVSGSGDRTVRIWDLRSSQCSLTLSIEDGVTTVAVSPDGQLITAGSLDRTVRVWDSTTGFLVERLDSGNESGNGHEDSVYSVAFSTNGKQIASGSLDRTVKLWNLEGKQDPQSNVSNNASTGKKSSCDVTYIGHKDFVLSVCSTPKNEYILSGSKDRGVIFWDQLSGNPLLMLQGHRNSVISVAVSLNSQGTEGIFATGSGDCKARLWKWTRK

SEQ ID NO: 16313 - protein, 790 aa, Debaryomyces hansenii
MLPDENTRLLERSSSLQIPTSRGGSPGPSSSSRLKRPPLISIPTSQSVRSLRSINNVNDPLVNSYISNRSKNGYSRGNSATDELDESIFKSRFWNKFNRIEADDSFDFYSYVSYYCPILKWLPNYDAKNNFLGDCVAGLSLASFQIPLVMSFSLSLAHLSPVSGLYGIIIGACVYSILGCVPVLIVGPSPSTALIYGEAIEAIRQLPNFAELSKLQISSAISAAMSGLLLGAGIFRMGFLDNVLSRALLKGFIAAIGFIMIINELSTELGIGDLILDNPYSTTFDKLMFVCKYARQSHIFTLLVSCITLGLVLSIRKLKNTLVNKYHMRHAVLIPELFLMVSVATYLSWRFQWHSEYGVEIIGNIQSSTPDSKSMVEFINPFKPSLIPLYKKAFSASFLCTILGYFDSTTATKALGAKYNYNVSSNRELIALGATNFVVSLVGGIPAFGTFGRSKINILSGANTQMASIMMSIATVLVIIYLLPLLYNLPKCVLALSTTIIGITVLEEAPSDLKFFWNIGGYDEILTFLFIFCTTILWNAEAGVLSGAAFAIIRIIKHSTRSRIQILGRVPNTTVFRNADELIEESFVTYANGSDPVNQEETSSDIEDSTDKLMNLIAEIEEIEGVLVIKIPEPLNFANVGDLKNRLNRIEKYGSLLIHPSQPTRRDFNNTTIKFIIFDCKGMNAIDSSATQILYEIIRKYIEVNEISVCFSRVAMSKDIRHKFKKSGIIDLVNNSYKTYENSNNVRSKSAGSENGSSTNLYSYGTSSGMEDGFFLSIDEAIKAFGSQNV

SEQ ID NO: 16314 - protein, 567 aa, Debaryomyces hansenii
MSEVSLGRYIFERLRQLSVQTVFGLPGDFNLSLLDKIYEVDGLRWAGNANELNAAYAADGYSRVKGLACLITTFGVGELSALNGIGGAFAEHVGLVHIVGVPSISSQAKQLLLHHTLGNGDFTVFHRMSNNISQTTAFISDIKSAPKEIDRCIREAYIFQRPVYIGLPANLVDINVPAVLLNIPIDLSLRENDPEAQEEVIDNILQLISEASNPVILVDACTSRHNCNGEVEALVNKTQFPVLTTPMGKSSFNESHPRFAGVYVGTMSHVEVKNLVDGADLILAVGALLSDFNTGSFSYSYKTKNVIEFHADCIKIKQGTYPGVQMKEVLNVLIDKIDPAVKHYNPIAIPSPTFLTNSVTNSDVSSALLTQEWLWSKVSAWFREGDIIITETGTSAFGIVQTKFPNNTIGISQVLWGSVGFTVGATLGAVMAAEEIDPNKRVILFVGDGSLQLTVQEISTMVKWETRPYLFVLNNDGYTIDRLIHGMSATYNDIQPWNNLALLPLFNAKYYDAIQVSTTDELEKLFCDEEFAINSKIRMIEVMLPRMDAPINLIKQMEFISKMNADT

SEQ ID NO: 16315 - protein, 835 aa, Debaryomyces hansenii
MPLNDITPSSNIPKSSNGKKRFMDAQDDDNTFLPPALSSYSIALLNERTKQSPSHITGIYEFDFPNSRSKNNLKNKLSVHFRESDPVHTIEKPDTPHSSHNNSSAPMEPTSNSNNNKSYNTSHNASHNAITSTNPHIQNQNNISAHNSFNLSTNNFSSHTHNTTSEYNDDLMDISPHESTSRNSSNHTPSTTFNENPPPSSSSQTKSSISQVHTLKRMRGTRRFGRMLGPPKRAMKLNEDKSTQAEYDGISSNENNDFQIPHNRAVSINNDDNNDNNNDDNINTNNNNNALSTPPPLFTMDFSPKINRIDNLKEKNPESVFFKTLKKMKSESPEDDIISKQKESELRRRIDEQKRINEIESQLSKSKSIQDIEMEISELNNSRNEANDRSDKKGFVSSYLADTNEEGNKENLILSTSKDSNISVKNEQPRLPLNNVSPNRLNRVAADETDFRKPKLPKPISQHATSNVTPPSSSDDYKRKKCISINGNQYEKLELLGRGGSSKVYKVKSLSNNKLFAIKKVTFDQFDELCVQGFKGEIDLLLKLKDADRVVKLVDHAIGEGSIYLVMECGDIDLAHVFQNKLSMNNVLDINFVKYHSIEILKCVQAVHRAGIVHSDLKPANFLFIRGILKIIDFGIANAVPDHTANIYRESQIGTPNYMAPEALVEVSQAFPGLPTPDNNNNQQQLNGSQRNTWKVGKPSDVWSCGCIIYQMIYGRPPYGGYSGNQRVMAIMNPQVKIQYPGKGIGNIKVPQSAIALMQKCLTRNPNERWTVEECLNSDFLNPKIVSETFVRDLVHSAVNFGHNNRVNGNGLITADVYDRLVDTVLKQIEDLNFG

SEQ ID NO: 16316 - protein, 799 aa, Debaryomyces hansenii
MLLPIQRVKPSFLFSYSSNVGIFRTLHTRIPTRLSTLNTSVIYRRTYPNISNACNVFLGKTNIIYGRSRYFSDSSVVRNTSDTPSKQELIKSLQKSNSLKNHLEFTKIRKRELREEEKEQQKKDRKPFRENIKTILRILKLGRPDLKLFLYALGFILFAVLYPTTAVKLVGSAIDAFNNNMKDSDGTLLIWGYKYSTVFGFMVPFMCLSAVCFWARIWVLKVLGERLVARLRLRVMKHLLRHDAKFYDHEKHKVGDLISRLSSDAYVVSRSITNNLPDGLKNVLFGIISSYMMFSINPMLFGIMLLISPPITFGSVWYGEKIRALSTRLQNATAGLTKVSEETLNSVKLVQAFTGEQKELTKYSDQLRNVINVAKKEALAQSNYSVSIYSLYHTGYLSCVAIGVYLIINGQMTTGDVVAFTMYSELFNSALYSLTTTYMELMKGSGAGIKLFELIDYDNDVPPVKGNKLPPGLSNGIEFKDVVFSYASRPYDKIFNECSFNIPASSTTCIVAPSGCGKSTVASLLLRSYNINSGEILIGGRNINNFQVRDLRRSIIGIVQQEPVLLSGTILENIVYGLTPSQISQMTMEDVKFAARQANCHDFIMSLPDGYETIIGSRGASLSGGQKQRVAIARALIKKPSILILDEATSALDSRSESLINETLKELTSQGKMTIISIAHRLSTISKSENIIVLGKHGKVVEQGRFVELYSDPNSELSKLLDSPGLDESEETPEQTEAEETERITEENKANELEIIRSMIDDLPVEMRAQLADQISQEINEDKNAAISESKISSDKIVS

SEQ ID NO: 16317 - protein, 489 aa, Debaryomyces hansenii
MFKRFVSFKAAGKLKLADLNKSTINAKYAVRGKIPIRADELKEQLNDTNNELPFKEIIYANIGNPQQLDQAPLTWYRQVLSVLQNPKLLNSQIDYPKDVIDRAKILLENVGSVGAYSHSQGTPHVRKSVADFITRRDGFPSNSSDIFLTSGASAAVSYLLQVLSSSDRSGFLIPIPQYPLYTATIALNDAVPIGYYLNEENNWSTNPTQIRELIKENNEKGIQIKALVVINPGNPTGSILSYDNIVEIINIAAEHGIAIIADEVYQENVFEGEFVSVKKVLSKLNRLDPQAYNNVQLASLHSTSKGVSGECGQRGGYMELVGFSKEVRDIIFKLASINLCSVVSGQTLMELMINPPTPESPSYELYKSETSKIHKSLQSRADLLYKSFIEMEGITCNKPMGAMYLFPKLNFTPNSYSKLFEASENIGATIDEVYCIELLENTGICCIPGSGFGQVPDTYHLRTTFLPPGSKWIDRWVEFHNDFIAKYKN

SEQ ID NO: 16318 - protein, 491 aa, Debaryomyces hansenii
MEIAIFWFRPSKKYTMTYKKVAIITQLISVALCVALGVYEETFMDSVYGELVASKESKNYKHELLETGELTRDAKFDKITEKSSIDLSQFDPNDIGSFQQVLDMYHSSQKSNMHQQHNDVYYEKSHESYQKYRPMVKFPNDDDTSDIYDDARNLFGGITTYGHFRHFNCFDPKLFDEKIDIAVVGAPFDTGVSFRPGARFGPDSIRSASKRLGGVSPDRGRGNPNTNMTEINPYDPRSHNLSIIDCGDVPMTPFDNRIALNQLYRGQRSIHKHTSGNKPKIITMGGDHTVTLMALKSAYEHYGALSVLHFDSHIDTWDPKKLGGGITNYMSLNHGTFLHYAAEQGYLNKGSCFHLGMRAPYIDYHYDLHHDKDHCGFNTITARDLDNLGRAHIVESIKQAVGSNPVYISVDIDVLDPASAPGTGTVEVGGWTARELLSILDGLEGINVVGGDVVEVSPPYDTNSGITALAATGVIDSIMGLIMVKTLSAHP

SEQ ID NO: 16319 - protein, 834 aa, Debaryomyces hansenii
MVNLSSSKFHITEPADEDIQSTSVNGNQKGHEDSCNRSSTPKFGSISRFFFNKEQSVSSDVSNADSTVSSNTDSLNHNHGSKSGVTNSEAREDEHDDAKQQPGLSKLKSFLRLSSNSLLLSNNGPNDNGEQNGPKGTDVITPNAESVTPVRSNEEKTKLKHESDRNEEGHNGNKDGSNVSTKQEASAGMMKKFMLGRKRSVSSPTSPATGNRKPQQSNLSINTESPKDIPEIITENTESPVISSNLYFAHQGLPPHMNNHNKNNHTLAASAANEDDISVALRHNDSVFSLNDGGPLKPPNVYQSKLSASDESGSEHEPIPEHTTESGLKTPEESTLQNKNKLEVPPHTLPHPGQASPFQKTLRRVASAPLVHRLLNDSNTRLPQTRAYVSNDDDFDITEHIGELKSGRPRTLSRGRMYSSASTKIMDAQVNQNSFKKIRLLGKGDVGKVYLVKENLSNRLYAMKILSKKEMIERNKIKRALAEQDILATSNHPFIVTLYHSFQSNDYLYLCMEYCMGGEFFRALQTRETKTISETDAKFYAAEVTAALEYLHLMGFIYRDLKPENILLHQSGHIMLSDFDLSKQSESTKNPEIFFSKTSHGLSSSNNHNGPTLDTKACIDGFRTNSFVGTEEYIAPEVIRGKGHTSAVDWWTLGIFIYEMLFGTTPFKGRDRKKTFGNVLKKEVKFLETRSISSSCKSLIKKLLIKDEAKRLGSKTGASDIKNHAFFKNTQWALLRHQKPPMIPVLSKNKRADKVERYDSEEDQITDSTTDVSENKDILNDPFANFSSVTLHYNELDSGDDQMVYNEADNTVYTSVAYTMTNDSSPKPKHFLKR

SEQ ID NO: 16320 - protein, 412 aa, Debaryomyces hansenii
MDRLNQVLGHLSPSATNHITSKNPDDVVIVASYRTAIGKGFKGSFKDVGSDYILLKFLEAFLAKTQVNPNLIEDIACANVLKVRSGICEHRAAAISAGIPYTTPIIAINRQCGSGLVAIGDIANKIISGEIDCGLAVGVESMTKDFGLGQSVVSKALEDHPEMIKSKIPMGITNENIAIKYNISRKQQDEFAAKSFQKAEKALASGVFADEILPVESLIEEKDGQGNVSFKKIIVDKDEGVRKGVTAESLGKLRPSFKKDGSTHAGNSSQVSDGAAGVLLMRRSFAEENGFKIEGKFVRCVSVGVPPEIMGVGPAMAIPHILKKTNLVVDDIAAFEINEAFATQCLYSIKACNIPEEKVNINGGAIALGHPVGVTGARQYATILRLLKPGDIGLTSMCIGSGMGSASIVVKE

SEQ ID NO: 16321 - protein, 850 aa, Debaryomyces hansenii
MSETKLEDKSDFIRVDLKDESTALHEDYKHKLYEKLGHSDVLTDDTSIPEIEYLFQKTDELPLPKALDILKQCLQDHDDDPNFPYDDFEFIQKIVNGYNNDLRMSYDDWVFNVKMYAALNEYHSPYPEVRAISSPLDDPNIPCETIRAYILGFFWCVVGTGVNELFSRRQPSIYLSASVCQMLMYPSGLALEYVLPDWGFTLFGTRHSLNPGPWTYKEQMFATVMFDIAIGGMYVGYNFYVEKLNIFYGNTWITAGYQILLSLCTQLFGFGFAGILRKIVIYPVRAVWPTILPTLALNRALLKKEKKESIHGWTITRYKFFFIVFTCSFLYMWVPDYLFQALSYFNWMTWIKPDNFNLATVTGSIQGLGLNPISSFDWNIIGYWLPLAFPFYTYLNMMIGMFIGFFVIIGLYYSNYKWTAYLPINDNNIYTNTGTIYEVQSVLTNGRLDEDKYKKYGPPYLSAANLVVYGANCALYTFMVPYVFFTERKGIWNSIKSLKESITDFRSSNYSRFKDPHSRMMSNYKEVPDWCFLVIMLIALVFAIVCVKVYPANTPVWGIFLVLGINAVFVIPLCIIYAVTGYYFTLEVLVELIIGYALPGNGDALMFLKALGFNITGQAQQYVYDQKMAHYAKVPPRAVFRGQLLGTIFQIIVSLLVINWEISNIDGICTDEQSNNFTCPSEVSYYSSSVFWGVIGPKRVFNKLYPVLPYCFLIGFLLALVCLAVRHYFYKQTRWFQPAVIIGGLFNYAPYNLSYFLPGLYMCFAFNHYIKKRFGAWWEKYNYILSSSLDAGVAFGGIIIFFAVQYHEKDINWWGNSVSYAGTDGGMGQVSLLDPTTAPDGYFGLRSEEF

SEQ ID NO: 16322 - protein, 436 aa, Debaryomyces hansenii
MLFIWCNILTNVVAASILPQASFQIDGLLAGDPSIMESVPNIITEQVVSHYESKNYNFLDEYFGQVYFGDYSDLEKTIRKQKTSLWASREVTYPDKDDITDIVSGRSDRYVSNPLSGFLSFAHLPLTNCFSGETKFDIGIVGATFDTGVSFRPGSRFGPLGIRMATKRMSSGSISPFRKNFSLFKDGKIVDCGDPPMTPIDNRIALDQLYRAERAILKTKPTTPSLSKVSRILTLGGDHTVTLSCLRAVYEKWGKVAVIHFDSHLDTIDPYQMNENVTEYAALNHGTFFHWAAKRGLISESKNVHVGLRGYYENLNDTQRDSAIGFERIMSRDIDDIGIAGIVKRIKDRVGDSKVYITVDIDSLDPSSAPGTGTVEPGGFSSRELLTILDKLEGLEVIGADVVEVAPPYDTNEITTMVASEVARSLLGLMVITPVQ

SEQ ID NO: 16323 - protein, 535 aa, Debaryomyces hansenii
MVNSPTLSASSYNSVLDFKKVNKASNWIIQKFGGTSVGKFPENIVDDIAKVFSQQNRVAVVCSARSSNTKSEGTTSRLIKSADLALEDGDFHALLKVIEEDHVENAKSRISDTKIQEELIENTMKELERANELLKACQVIGEISARTLDSIMSVGEKLSCLFMAALMNDRGLKATYVDLSDIIPLDYDFTSGFDEKFYKFLSSELGKKVLSLDSDVVPVLTGYFGVVPGGLLNGVGRGYTDLCAALIAVGTQAEELQIWKEVDGIFTADPRKVPNARLLDSVTPEEAAELTYYGSEVIHPFTMEQVIKAKIPIRIKNVKNPWGSGTIIFPDNLGRRGEETPPHPPAAYETLSSSYIATHKKKSATAITAKQDIVVINVHSNKKTLSHGFLAHIFTTLDNFKLVVDLISTSEVHVSMALQIQPDQELHLKNALKELRKMGTVDVTREMTIVSLVGKQMVNFIGIAGNMFKVLADERINIEMISQGANEINISAVIDAKDTLRALQSIHAKLLEGSYDLLGKTESAVDTRLEGLKLQ

SEQ ID NO: 16324 - protein, 371 aa, Debaryomyces hansenii
MFFNRIKNLTGLKSLNIARMTTTTIKPKVLRIGEIDFAHQKWKELSDVVEVVKCESSNREEFFKDLKTKYSDITNITRSFASIDQTGRFDEELVSHLPESVKAVSHCGAGYDQIDVEPFSNRKIQLSNVTTPVEAPTADVAVFLILSTLRNFQVGHDLTVQGKWPSGGKCAGAALGHEPSSQTVGIFGMGGIGRAIRDRLKPFGFKKIIYHNRSQLSPELEGGATYVTFDQLLSESDVICISIPLNAKTKHSINGDTISQMKDDVVIVNTARGAIIHEAELLQSLKSGKVGAFGSDVFEFEPEVSQELLDLPNVVSLPHMGTHTYESIQNMEEFVIANVFDHLYTGKVKTIVPEQYNLQFDETPLLKKASG

SEQ ID NO: 16325 - protein, 446 aa, Debaryomyces hansenii
MRDLFVLGGSSHPNLTRSICRNLTIDQAFVDSKKFSNGETSIEIQDSVREKDVFIIQSGCGHVNDNFLELLIMIAACKTASAKRVTAVLPLFPYSRQPDVPHAASLTGAPSVSTKKDKYTFESAPGTPRPLSRGESEAEGPVSPTPSSANSSQQTETLLSKATMNNVKQPVPTRVNTKIPSYTPTSIVTNSAATNLPCVDVYGKTESGYKQWIAQNGTLIANLLTTAGADRCITMDLHDPQFQGFFNIPVDNLYSKPLLKHYIIDYIPNYSDCVIVSPDSGGAKRATSIADALGCSFALIHKERRAKVANTPPSTNATNTGLHSVQNSLVATTMLVGDVKDRVCVLVDDLVDSSYTITRAAKLLKDQGAKYVYALVTHGIFSGDAINRINKSAVDKLIVTNSVPQNDNIGVLGDKLEVLDISRILAESIRRIHNGESVSMLFDHGW

SEQ ID NO: 16326 - protein, 979 aa, Debaryomyces hansenii
MSSQVVTNSEETTNQHKAINNPNVVKRIHREVRFGSYILGSTLGEGEFGKVKLGWRKDGKHPSQVAIKLIKRDTIMKDSESEIKIHREINSLKMLNHPNIVNLVEVMKSGKYIGIVLEYASGGELFDYILQHKYLKENVAKKLFAQLVSGVDYMHSKGLIHRDLKLENLLLDKHKNVIISDFGFVNSYNKDKNDLMKTSCGSPCYAAPELVLTQAPYEGRKVDTWSLGVILYAMLAGYLPFDDDPENEDGSDIVRLYHYICKTPLTFPEYISPLARDLLRKIIVPDPKKRITIKNIKNHPWLTPYVNLLSVTQPEWDKVHKDNKTVNPKSAATANNSYTNLIHSNTNKRFSMINEKTNSSSLMMPAGRSYSSTNVVNQLYSNPSAPTTSSSLANAVALSKPKDPASDRSRTPSPTKQLPNGNNYSSTNYQRGHAKSTSISNPYSSASNALKAMVTENDSKRNSLVSLDSTTSSMISLTSSTKPAQHNHLPSPHLPRSTTYTGSAISTIAESPSKPSPATHLAVDNESNVTHHNTASSSNITNLKPNSSSRESAKLPHANKKPRPTSYHPSSMSASLMSSNGSSLQDYIKIPTPLLPIPQLLSTSPTKASPSSETSSPVFTDTNNSSPTMRSNASINSRRNSVVTHVHVNGVLTSESNANHNENKRNSVLSYLEDKMDALELTESHSPSKSNKPGFTDNASDTNITPQINQSPMFDGQTESPIIHTSKAEESQVKDQSEEGNKIETDEHPFVNVANQVDENKVVDLALEKESISEAPEEPNVSHSQDRTNQQENITSEFEEPKYTLEAQPAEPVSQTFKDEPVVSLDEQLIKRDHVNIIDEQEKENLDRKTTNTKKETSREINKSSAKEIKDNKKRNRFSLLSFYSNYNGSSSSNVVLQQAPTSNVSHSGKRILEPSLEQNVPTQPQDQKRNVSNSSGKSSTSKKSNNSGTAHISSNNGKEASAARKVMDFFKRRSVKIG

SEQ ID NO: 16327 - protein, 776 aa, Debaryomyces hansenii
MEKLKNALSKDHGIEIESKNVNEIESAEEHVLMASKSQEFDPVTSRLEEVILDDDYAAVTVEDDSPYAEVRASVPSSDDADLPQNTIRMWILGMILNTIGSALNLLFSLHSPQIILTTLVTSLLAWPIGMAWARFIPNIKIFGTPLNPGPFNIKEHTIIVIMANVSFGGGAAYATDILLSQNKFYEQDFGWGFDLLAIWSTQCIGFALGGLARRVLVYPASMIWPQNLVTVTFLTNLHVNSNHVADGWKISRLYFFALIGICSFLWYWFPNYIFQALSWFAFPTWIAPKNVIVNQVFGANTGLGLIPITFDWNQISGYIGSPLIPPASAIATILLSMVTIFWIIVPAIHYSNTWYAQYLPISSSGSYDRYGSNYNVSRIINKDTLSFNEKSYKNYSPLFLSTTFAISYGLSFAAMFATLVHTVLFHGKDIMRQLKQKEKPDVHMRLMRQNYKDVPEWWFLIVFLVFFGISIVTIRCWNTEMPVYALIVALLIAVLFLLPVGVIFALTNIGVGLNVVTEFIIGYMVPGKPLAMMFFKTYGYITNNQAITFVQDMKLGHYMKVAPRLLFAAQFIASIWGSLVQVAVLRWSYGNIPNLCEADQANNYTCPNGKVFFNASIIWGVIGPERQFSQGQIYYGLLFFFIIGALLPLMNWLILKKWPNSPIRWLNWPVFFSGTGYIPPATPYNYSAYCAVGLTFGYWIKRRWFHWWSKYNYSLSAGLDIGMAWSSVIIFLTISLTKTSAPNWWGNNVIETTMDMTSTAIRQPLAEGEWFGPSSW

SEQ ID NO: 16328 - protein, 113 aa, Debaryomyces hansenii
MFEYIKSWFVSPPVSPVIKAEVQNLIDSNKILIFSKSYCPYCDSTKDLIKSITSDFKVVELNTSANGRTIQDALREMTGQNTVPNIFINRKHIGGNSDLQALQGAGKLKSLVN

SEQ ID NO: 16329 - protein, 249 aa, Debaryomyces hansenii
MFTASRSIIKNSTRIIPRTNSLLTRNRIPTYNNYKQAMNLMTISQSLDESYTKHKIIPDVVDKFDTQGLLTIEYNEQDHVALGNTLKVENTQHHPVIQFTLNSPGQENDFEISNNDKFTLVLTDPDAPSHKDHKWSEYAHWIVTDLPLNANSNDVESAESLTTVLDYSKGKELLSYQGPAPPPKTGKHRYVFLLFRQDPSVSKFETPKDRPNWGTGTPSSGVRDWIKKNGPESKLLGVNFFYAQNDTQE

SEQ ID NO: 16330 - protein, 622 aa, Debaryomyces hansenii
MSKKGSIESSNTQTMDATEPGTLTHSASENSYHSNSSNDRSYQEQISNINSQNANLKTINKHLVNQEDTLKLQGGDVARHLYSQLENVSSKELTNSKRRTRSSSFSNFLSQSRRQSTASDINIPGGFRREFLINKSLQENTEPPNFLTRNFVEFLSIYGRFAGENFDDDDNEEQYEETFDEESLLLPNERRTPPTRRPRPEKKGAANVPKTFFLVFKALVGSGILFLPKAFSNGGLLFSAIMLLCFGILTFLCYIILIRSKRILNKSSFGELGFKTHGKPLRICILISILISQIGFVATYILFTAENLISFIENYLHFSANYVSTRNIVIVQCILLIPLVLIRNLAKLSIISLISSVFIVIGLIIIFYFSIMKISVEGVGDNIVYFNSSNWSMLIGVAVTSFEGIGLILPIESSMAQPEKFPMVLSISMCVITTLFMSIGVLGYSTFGDQVKSIIILNLPQGKLSVQFISLLYSLAVFLTAPLQLFPVTKILESLIFNSYLFNDNTTTARKKDDEGKLYHFSGKYSTSIKWSKNLIRAILISSICIIAYLNANNIDKFISFNGCFACIPLVYIYPPLIHLKTYKFDRQNDWKGKFFKIFDYILIIVGIVAVIYTTYQILFLI

SEQ ID NO: 16331 - protein, 578 aa, Debaryomyces hansenii
MSQNKEETISLGTYLFERIHQLKVQSIFGVPGDFNLTLLDKIDEVKNLTWRGNANELNAAYAADGYSRVRSTESSANGFACLVTTFGVGELSALNGIAGSYAEHVGLLHVVGIPATSAQDKQLLLHHTLGNGDFTVFRRMSSSITQTTGMVADAASGPQEIDRVIREAYINQRPSYLAFPTNMVELEVPKSALDTPIDLSIPDNDPETENEVLDRVTELISNSKNPIILVDACCARHGATGEARKLIDLTKFKFAVTPMAKGAKYIDEDHDRFAGVYVGTLSYPSVKEQVESSDLILSLGAMLSDFNTGSFSYSYQTKNVVEFHSDYTKIRSANYPNVRMKHVLQKLLESNKLKEAASKYEPVKVEKDPFPEEKRDESSKITQQWLWSKLSGWLRENDIVITETGTSSFGIIQTQFPKNTLGISQILWGSIGYTVGATCGAVMAAEEIDPNRRVILFVGDGSLQLTVQEISSMIKNKTKPYIFVLNNNGYTIEKLIHGETADYNSIQPWDHLKLLETFKAEDYESIRVSTVKELSDLFSDHKFAKNDKIRLIELMFDTMDSPQNLIEQARITAQTNSN

SEQ ID NO: 16332 - protein, 900 aa, Debaryomyces hansenii
MDNSEFTDNALRIITNATQLAKDNAHTQLAPLHFLAAMVPTDDENSTQYLKTLIQKARYEWPTFERNVNKHLVRLPSQTPAPDDIRPSYATGQVLANATKIKSQQKDDFVAQDHLLLALLDDSSIKAIFKESGINVDSIKTQAIELRGSQRIDSRQADSSSSYEFLNKYCEDFTEKAREGKIDPVIGREEEIRRVIRVLARRTKSNSVLIGEPGVGKTSIVEGVAQRIIDGDVPNILANSRLFALDLGALTAGAKYKGEFEERIKGVLNDIEKSNEMIILFIDEIHMLMGDGKSDAANLLKPMLARGSLHCIGATTFTEYRKFIAKDGAFERRFQKIDVPASTVPETVAILRGLQPRYEIHHGVRILDSALVTAAQLASRYLTYRSLPDSAVDLIDETAATVAVARDSKPEELDTLERQLHLIEVEINALERDVEADADSKDRLEVAKRKKAELEEQLGPLRERFNQERAGHEELIAAKRKLDELEIKASDAERRHDTATAADLRYFAIPDVAKQIEELEVKVAEEEQSLGSESMLKNAVSSEQVAETAARLTGIPVTKLSQAENTKLINMERELSSEVVGQSKAVKAVSNAIRLNRSGLANPNQPASFLFLGLSGSGKTELAKKVAGFLFADERAMIRIDCSELGDKWSASKLLGAAPGYVGYEEGGILTEALLRRPYSVILFDEVEKAAPEVLTILLQILDDGRVTSSQGKLVNCSNSIIIMTSNIGAEYINASKGPTIDDTTKGLVMDAVRANFRPEFLNRISSTVIFNRLSKKAISKIVKIRLKEIQERFAANGKALALEVDDAALEYLCNKGYSPDLGARPLNRLIQSEILNRLAVLLLKGQIKDKEVARVTLGPKGLEVLPNHEAEDEDMADVQVDDWKDSEDEDDYLDSTPLD

SEQ ID NO: 16333 - protein, 354 aa, Debaryomyces hansenii
MPVTSEELFLINVRTYQPPNISCPSHSIWHKVPVARRSAVFVLLFLGNMGELRVILTKRSSKLRSFPGHISLPGGKADSGLETEWQVARREMEEEIGLEANNEKLMKHYGFKIDHLNLLPCYLSRTFSAVKPCIGFMNLSSEHEQELFGNLKLNLNPDESSSIFSCPLKDFLYPSTKSPSRECIKRQFFKIEWGGIPWNLRSYTFAHENEHEIHWLREVSDTSMSSEEEPEDNPSMKEKAKSMPKRDLSTWGRLGTRRDSDTDQKINDVWGLTANILHDLAQIIYCQPTVYKNKTFGEEELINSVFTQGNLMQEKERSEEEVKLIHSKTINEEFGFNSILPKDEFLRLKEIYRH

SEQ ID NO: 16334 - protein, 429 aa, Debaryomyces hansenii
MSGASDFLSKGIDLVQKAIDADTATRYEEAYKLYYNGLDYLMLALKYEKNQKSKELIKSKFTEYLTRAEQLKDHLEKQAKSNTAEGSSDGSTKAKKSGDGDDDDTKKLRGALAGAILSETPNVKWDDIAGLESAKEALKEAVILPVKFPQLFTGNRKPTSGILLYGPPGTGKSYLAKAVATEAKSTFFSVSSSDLISKWMGESERLVKQLFTMARENKPSIIFIDEVDALCGPRGEGESEASRRIKTELLVQMNGVGNDSNGVLVLGATNIPWQLDAAIRRRFERRIYIALPEAEARTRMFEINIGTVPCECSGQDYKMLADMTEGYSGHDIAVVVRDALMQPIRKIQQATHFKTVMTEDGEEKLTPCSPGDEGAREMGWQEIDTDELKEPELTIKDFIKSIKNNRPTVNQSDIGNHTKFTEDFGQEGN

SEQ ID NO: 16335 - protein, 1314 aa, Debaryomyces hansenii
MSSHQRQDSIASLSSTATGNIHPQKIGPWKLGKTLGRGATGRVLLATHQSTGQKAAVKVVSKSELNDDEINKKSADEAGLPYGIEREIIIMKLLTHPNVLRLYDVWETSKALYLVLEYVEGGELFDLLVERGPLQEVEAIKYFRQIILGTAYCHALGICHRDLKPENLLLDSGLNVKLADFGMAALESNGKLLETSCGSPHYAAPEIVSGLKYHGAASDIWSCGVILFALLTGRLPFDDENIRNLLLKVQAGSFEMPCELSPEAVDLIDKMLTVDPMKRIPTERILSHPLLTKYPIPNEDLISVKSLPHPETAYKSLGSEKNIDKQILQNLSILWHDRSQGDIVDCLLKTGSNPEKTFYALLMRYRHNQEESAGSSPTRSNSQNFNNKIGNKDNNRKKRMSQVSASTSRNRPVSFQYKNGIKSSIGNGNGRLSSTSSVSNSPRKSPVRRSSNRYSFAQSPRKFGGTSDETTLHSSSVPRNIYNEIVSAQRNGQGVMPPPLPSKDNMDSKSNPIVDEVSNQDLLSSAKISPTKNKRGSVIRNSISKNRLSRRKSRTSFTPGLKRNSITTKLLSTYAKLAGETDWEFMDKQTKRTSATFATLCDKIFNQEQYDAEDEKLIDEEEKQAKEYERLMEIERKKHEAELRARKELAKQRKREKRKSLLSSRKLSILVKDDANNSEQDITVTDSDALSQPKRQSRNQAMRSISEGHGKESDDLTKEDLENLKRRSVTQPTPRRRKTPVLTRRPVSRLDPLWTAYENEEIERAQDALEAEYRDADFKTKKKINRESMVSVMDDKEVDNEPHVDDDATDEVQDEEAVKAKSRGYELPEPDMERSDLSDEYMSEIRKSRLLNSQLNINAIANGEKEVKSEKRQDKEPKTLIGDVRIPTVTRKSRCFTNSNKRLSVLSMYSTKQSYRDLNSILGDENDENNDVEGQLPQLRTSFADRLDRAGLADAEEEDDEPLDEGSIMDFDQHLANKRSSYYAGDKSRRQSRYSTTKRNSQAPTVDVPAIPKKSNKERDREDDTFVTKDDDVHRRKSAYSAKGANNNDDEDMIFENIKLPNEDRRQSASTAKSNKKKSFQPSAESMLIPNVDNIPEDAKTRKPDPRSQPYEKVRKPKVSNGELKSTGPEGQVKNPLEDTTNEPRENQKRKGSIFRKLSWGSKKTMDNSAAQLPSPADSRAPSVEEKPKSKSGFFRWFSSSSNQPGIESEIRRFKAILPKQEMSSALFALLNSWSNFGLKNLRNDTVGYNITGEISKNNAFNLKNCKFRIKVNPREFNQKSEIVCARVKGSKVTTDTLFKEIEKVLQKEGVMDI

SEQ ID NO: 16336 - protein, 622 aa, Debaryomyces hansenii
MSEQQGSDNRHHHHHHHHNNHHGDHSGQHDGHNNKVHQPQPIDPKANPANRIGKYQVLKTLGEGSFGKVKLAQHTTTGQKVALKIINRKTLAKSDMQGRVEREISYLRLLRHPHIIKLYDVIKSKDEIIMVIEYAGKELFDYIVQRGKMPEDEARRFFQQIIAAVEYCHRHKIVHRDLKPENLLLDEQLNVKIADFGLSNIMTDGNFLKTSCGSPNYAAPEVISGKLYAGPEVDVWSSGVILYVMLCGRLPFDDEFIPALFKKISNGVYTLPNYLSQGAKDILTRMLVVNPLNRITIHEIIEDEWFKQNIEEYLLPPDLSKTKHKKIEVDEDVITALQSTMGYDRDEIVNVINKCNQHNAPQQQSNEIIDAYLLMRENRTLVKDLKNSKSNNMDTFLSQSPPPSWTNNANNNSNMNINVNHSTKAPGVQQSLTYQTLAAVPDLSTLPNSTIAILPSSLPSIHRAYMMESNMDTQSKIAPVSHKKSKTRWHFGIRSRSYPLDVMGEIYRALKNLGAEWSKPTEEELWTIRVRWKYGPCILPNEKSQEEQQKDIPDMMKMQIQLFQLEPNNYLVDFKFDGWENSSNKDVSIKQDVDEMSSFSAYPFLHLATRLIMELAVNSQTN

SEQ ID NO: 16337 - protein, 818 aa, Debaryomyces hansenii
MSVHESQVPEIQEFQPEAQEHDFDYANDEYEIKNSNVLVPSYNEREVTVVDWGQEVFGSPLQKATNYFISLFPIAQWILHYNRKWLYGDLIAGITVGVVLVPQSMSYAQLAGLSAEYGLYSSFVGVFIYSFFATSKDVSIGPVAVMSMQVGKVIQNVQAKVGEDKYDPAEIATFLSLICGGIATGIGILRLGFILEFISIPAVMGFMSGSAFSIIVGQVPGLMGYNSLVNTRSASYMVVIDTLKNLPNTTVDAAFGLVCLFILFVWKFSTEIAMKRWPRYKLWFFYSQNLRNAIVLIVATAISWGIVHPQKVAFDGPASDFKPPIKTIGEVPSGLQHVGVMTIPDNIISSMASEIPVSTIILLLEHIAISKSFGRVNDYKVVPDQELIAIGVNNLIGTFFNAYPATGSFSRSALKAKCGVRTPLAGIFTGAVVLLALYCLTSAFYYIPKAVLSAVIIHAVSDLIANYKVTWNFWRISPLDCGIFLIAVIITVFSSIENGVYFAICASVAVLLFRVSKPQGFFLGRIQVAEVINPIIDNSNSDSSSTISGDANYNNSSSDVSKDIEIHQVLSNTSNYQATSSNKFKSKEAITTSPSTHKLLDNNPNIRFHTRWVPLTKENINSDLQVRPPPPGVIVYKPIEAFTYPNASTQIERVTDEVKRITRRGKPYNSNDVGSRPWNDPGPLQWSIPFFKNKNAKVETPQEDNRPILKIVHFDFSTVASVDVTSIQALVDLRKALNIYADREVEFHFSGILSPWIRRGLMNAGFGSYSEDGLVSDTTYVNIATSSKTQDIESGINDQYFAAVSTNTPYFHLDIPNF

SEQ ID NO: 16338 - protein, 801 aa, Debaryomyces hansenii
MLRTRLIIQNVRSRAISQASRNINTVSSLSTRQIHVPAIQSKSNFGMKNGLQGMKYKHNSFGLNHVKFMHSSGIRKLQMSMDKEGQDTRPALEKYGTDLTQLAKDGKLDPVIGRDEEIRRTVQILSRRTKNNPVLIGNAGTGKTAVMEGLAQRILKNEVPDSMKDKQIITLDLSGIIAGAKYRGDFEGKLKQILKEVEEKQGKVILFIDELHILMGLGKAEGSIDASNLLKPALARGKLSLCGATTIEEYRKYVEKDAALARRFSAVTVNEPTVQDTISILRGLKERYEVHHGVRITDGALVTSALYSSRYITDRFLPDKAIDLVDEACSTLRLQHESKPDAIAQLDRQIMTIQIELESLRKEDDQLSLDRKTKLEEELNVKSAELKDFTEKWESEKKSIDDVKNAKTDLEQAKFDLEQCQREGNYGKASELQYATIPKLEEQLKELTDNEKSVEGSTLLHDSVTSDDIANVISKMTGIPLSNLMKGEKDKLLDMEATLKDKVIGQDEAINAVADAVRLQRAGLTSDKRPIASFIFLGPTGTGKTELTKSLAEFLFHDKSSVIRFDMSEFQEKHTISRLIGSPPGYVGYEESGELTEAVRRKPYSVILFDEFEKAHSDVSKLLLQVLDEGSLTDSHGKHIDFRNTIIVMTSNIGQEILLNDKDTSDDGHISESTKTQVSDMLKHYYPPEFLNRLDDVLIFNRLSKQSLKNILTIRLKEIDERLADRRINLSLSNESKDKLCELGYDPVYGARPLNRVLQKKVLNPLSKLMIKGQIREGETILVDLKDDEIYVTPNHEEDHP

SEQ ID NO: 16339 - protein, 907 aa, Debaryomyces hansenii
MSPDIAEQEYIELSNINVDGTTTSDNAFNIGNNWNLTTDQIQFILLRLGIITDDTYKPGSSLDINLSQTSRFMINKIDNLSVIEAITILREALAEHKDDFNFLHEDYQLLQRLVRLIPGDFEISGKQEIEKTNPEEIEEKPTHFKNKTYLNIIDWNLQVRLEAALIAFHSPYPEIRAITDPVDEQEMPAETIRAYVIGFFWTLIGSIINNFFVHRLPSISLGSHTIQLLLLPSGRLWEKMMPYDKMITIFGYSFNLNPGPWSYKEMMLSTIIYSCSAGTPYSVYNIFVMKLDKFYGLKWVSWVYQLLLALSTQCLGFGFAGIMRKVCIYPVKSIWPTILPTIALNRALMHQDDGNNPSIHGWKISRYSFFYVMFGLSFIYNWIPSYFFTALSSFNWPTWINPYSVHLNNVTGFKSGLGLNPLPTLDWNILDAAGCLTFPFYTYANQYLGSVLGFFVILIVYYTNNKWTGYLPINSNALFNNEGKIYNVHSILNDKNMFDEKKYKEYGPPYFSAANLVLYGAYFCLYPFAIFFHVVTEWESMKASFVNVWHSIVDSSSSKGNIFGRYSKDPHCVMMSKYREVPDWWFLVILVVSTVFAILCVSLYPTETPIWGIFFTIFINFIFLIPMTAIASVTGFSFGLNVLVELIVGYTIPNSGIALITLKSYGYNIDSQASNYITDQKLAHYSKLPPRAIFKGQLISTIISVSTALIIANWQLDNIQDICDSHQKERFSCPGANTFFFSSVQYGEIGPAKVFSGLYPVLKWCFLLGVLLVIPCYWFKKNGPSRLTRYFHPTIIIGGFLMYAPYNLSYYTGGFYLSFIFMYYIKKNYILWWEKYNYILTSALSAGVAFSALIIFFTVQNDYTALDWWGNNVNDQGIEGGLAPKYTWLDVKQAEDGYIGLRKGHFP

SEQ ID NO: 16340 - protein, 701 aa, Debaryomyces hansenii
MIGSTQLMIPRLTSRLNNDIARRSLSSRISFINFSHNFHVHRVENNRSQTIHFNANRLHWNFQRRNSTSSTTTNVQMSEVSTRDVKTSTLRKDISKLFRLAKPEVKIIIAALVCLILTSAVSMSLPLFIGKIIDTAKSPDSRMTDADSEKGDNNDDDDDKKIFGLEPFEFYGALGVFFSIGAVANFGRTYLLRSAGERLVARLRSRLFSKILSQDSYFFEGGPSDKGMKTGDLISRLSNDTQIISKTLSGNISDGARSLISGCVGLSMMCVVSWKLTLCMSSIFPPLIIMSVVYGRRIKSLSRTIQENLGDMTKVTEEKLNGLKTIQSFAQQRMIVHGYNQEIKNIFSSSMREGKLSGIYYGINGFLGNMTLIGLLVIGTKLIGNGEITVGDLSSFMMYAVYTGSSVFGLGNFYSELMKGVGAAERVFELIESKPKITTTLGKKVDDLHGDIEFRNVKFSYPSRPDSPIFGGSELNLTITKGEHVCFVGPSGSGKSSISQLLLRFYDPTEGTITVNNHNIKDLNLNFYRSQVGYVQQEPLLFSGTIRDNIVFGRMDSNEDEIKEASILSNAYKFIEEFPDKFDTVIGPSTSGAAQLSGGQKQRVSLARTLIKKPDILILDEATSALDSQSEEIVMKNLKRLSKDMHVTIISIAHRLSTIRNSERIIVVNYRGEIVEDGKFNELYYNSNSELNKLLKAHELQ

SEQ ID NO: 16341 - protein, 438 aa, Debaryomyces hansenii
MKVLNISTILFIATTTTANQLHSDPFSDNVVYFDTHSAEREPNLKDMWDDLWPFQGINTFAHLEHNKCLLDPDQEYDIGIIGVPFDTATSYRPGARFGPRAIRSASQRQTSLRGYNQRADFNPYTSWAKVIDCGDMPVTPMDNSLAFKQMNKGFEELIARRNSKNSTVTPPRYIALGGDHSVLLPHLRALHEVYGKINILHFDAHLDTWGPDKYPSFWHSKQAELNHGSMLWKANKECLTSEHNVHAGVRTKLSGIEDYVDDDSQNFTRITADDIWIKGVQYVVDKILETIPPDTPTYLSVDIDVLDPAFGSGTGTQEPGGWLPRELIHVLRSIENLTIVGADIVEVSPAFDTAEITATNGAQVVFEILTSMVKKGSVGHLVKNNNPKELLEVKSKNDGKSTQYLDKQEINRLIENKLQEFENIKFNLLSEIEQLRST

SEQ ID NO: 16342 - protein, 320 aa, Debaryomyces hansenii
MSTNSIKLLASDVHRGLAELVAKRLGMKLTPSELKRDSTGEVQFSIGESVRDEDIFIICQIGSGEVNDRVIELLIMINACKTASARRISVILPNFPYARQDRKDKSRAPITAKLMADMLTTSGCNHVITMDLHASQIQGFFDVPVDNLYAEPSVVRYIKETINYKDAIMISPDAGGAKRAAGLADRLDLNFALIHKERARANEVSKMVLVGDVTDKISIIVDDMADTCGTLAKAAEVLLDNGAKEVIAIVTHGILSGNAIKNINNSKLTKVICTNTVPFEEKLSLCPKLDTIDVSAVLAEAIRRLHNGESISYLFKNAPL

SEQ ID NO: 16343 - protein, 481 aa, Debaryomyces hansenii
MLSKQLRGLSILRNNRARCSLINGVRQISSGNSPLSATTSDPSGVHTATIVEPPVVAPPSGSTITLKSATRDDSKFGTRPIYLDVQATTPTDPRVLDRMLEFYTGLYGNPHSSTHSYGWETDKEVEKARKYVADVINADPKEIIFTSGATESNNMAVKGVPRFYKNTKKHIITTQTEHKCVLDSARHMQDEGFEVTYLPVNEEGLISLDDLRKSIRKDTSLVSIMAVNNEIGVVQPLKEIGKICRENKIFFHTDAAQAYGKIDIDVNEMNIDLMSISSHKIYGPKGIGACYVRRRPRVRLDPIVTGGGQERGLRSGTLAPPLVAGFGEASRLMKEEMDYDQAYIHRLSEKLKAGLLAIPSTQFNGCLSNPDYQYPGCVNVSFAYIEGESLLMALKDIALSSGSACTSASLEPSYVLHALGADDALAHSSIRFGIGRFTTEAEVDYVIKAITERVEFLRKMSPLWEMVQEGIDLNSIEWSGH

SEQ ID NO: 16344 - protein, 794 aa, Debaryomyces hansenii
MKFYIDDLPILFPYPRIYPEQYAYMCDIKKTLDVGGNCILEMPSGTGKTISLLSITVAYQMHYPEHRKVVYCSRTMSEIEKALIELHNLMKFRAEQLGYVEEFRGLGLSSRKNLCLHPTISKERKGIVVDEKCRRVTNGQLKKKIENGLINTEQTQDPEANALCSFHESLNEMDQHNLIPAGVYSFDALINHCKEVGTCPYFTVRRMIPFCNIIIYSYHYLLDPKIADRVSKEISKDSIIIFDEAHNIDNVCIESLSLDLTDDTLKRATRGANKLGDAVDDMKSQDSEKLQNEYEKLVEGLRQAEIARDEELFMSNPTLPQDLLDEAIPGNIRKAEHFISFLKRFIEYLKTRMKVLHVISETPISFLQHLKDLTFIDRKPLKFCSERLSLLVRTLELSEIEDFTALKDIATFATLVSTYDTGFQLILEPFETEGSTVPNPILHFTCLDASIAIKPVFERFSSVIITSGTISPLDMYPKMLNFQTVIQESYTMTLARRSFLPMIVTKGSDQVSISSRFEIRNDPSVVRNYGSLLIEFAKIVPDGMVVFFPSYLYMESIISMWQNMGVLDEVWKYKLILVETPDAQETSLALETYRKACSNGRGAILLSVARGKVSEGIDFDHHYGRTVLMIGIPFQYTESRILKARLEFLRDHYQIRENDFLSFDAMRHAAQCLGRVLRGKDDYGIMVLADRRFSRKKNQLPKWIAQALNDSDTNLSTDMALANAKKFLRSLAQPTNPNDQEGVSVWNLEQLEKFQREHQHQISAAEEKPKQENGNDNEEDDEFMDIDDDDLALL

SEQ ID NO: 16345 - protein, 878 aa, Debaryomyces hansenii
MTNALNEIENMSAFPSDGKTVSPKDYANNDKLKLSGRIINVMTSLPTQIVKKTNKSGNDNWDVEPVRGNSALYSSQFFLAQQTDWESHLVGWTGELINKSSNSKSIINENITDDPLYLNKEDKTSLEGKIRDANKSAHIHPVWLLRRDQERWRNYAENVLWPVFHYIQGEPSDGKDEASSWHDYVKFNEAYCQKIISIYKPGDVIWIHDYYLLLLPQLLRMEIPNAIIGLFMHAPFPSSEYFRCLSKRSHLLDGMLGADKIAFQSEAFQRHFSSCCTRLLGCEISKDKLMAYGSAISLETLPIGIDTKKIEYDAFSSDSGIEQKVRALGEIYADKKIIVGRDRLDTVRGVVQKLQAFEMFLQMYPEWRDKVVLIQVSSPGYSHSAKVEQKVTELVHHINSEYGDLNSTPILHYQKRINKDEYLALLRVADLALITSVRDGMNTTSLEFVLCQKENYSPLILSEFTGTASVLSEAILVNPWDSVGIAKTMNDCFYMSKDKKRALEERLYKQVTSNTIQNWTSNFITHLIDHVNNTHQTHYTPALNRPLLLNNYENSHRRLFLFDYDGTLTPIVKDPAAAIPSSRLNAVLDILSSDPKNQVWVISGRDQAFLDKWLGSKNIGLSAEHGCFLKDIGSTEWSNLSASFDMSWQTKVKEVFKEYTEKTPGSNTEQKKVALTWHYRRSDPELGKYQAEKCLKFLKETVATEYDVEVMPGKANIEVRPNFVNKGEIVKRLVLNPHGAKQIPHVVTNYNKDVPVDELPDFILCLGDDFTDEDMFKSLKDIEAEWSSKDHPTNQYGSHGVYPVAVGPASKQTIATSHLTEPSEVLETLGLLSGVVSLFESAGSVSLDDRGHLENSTSSNKSKSAIKEATKKEGSKSC

SEQ ID NO: 16346 - protein, 1531 aa, Debaryomyces hansenii
MGRYRDRNRETDENDDTNRQATMTTTLVQQHSRQSLGKFVNPSPTKYESTENMDKVVQSVTNATKRLSQISTNTNSSAKKRKTQNRIGPWKLGRTLGRGSTGRVRLAKNVNSGKLAAVKIVPKSNFKKLENPKYKRNSVDSSGSVKDRLPYGIEREIIIMKLISHPNIMGLYDVWENKNDLYLILEYIEGGELFDYLIKKGKLQEFEAISYFKQIINGIHYLHQFNICHRDLKPENLLLDFNKNIKIADFGMAALEVREKLLETSCGSPHYASPEIVAGKNYHGAPSDIWSCGIILFALLTGHLPFDDENIRKLLLKVQNGKFLMPNNLSSESKDLISKMLKVNPSERITIDAILQHPLLTKYPEPSVRKDKVTEYSDLNIRPIDSINNIDKEILKNLSVLFHNRDEQTIISKLLSPEDCSEKTFYYLLVKYRNEHLTASNNTINNYEDDPDLTGSESKQTITRSTSIVKTTTTDPLTGEKHTTIRKIPNSTSNFSNRSRSPKKKPEVLGNITNTAPTFKASTSFNKKKTLMNNNVISRNNSSKSLRKRPPQQQPPKLSRKISGMPDLNDLRLEKTQLNSLYKQQKLNGSFGNKSLFNFESVCQEIFGNAEQHEGDRKIEPKENLRKDKQMDGRTGKLSNIEKCERELAAKVHEKNDARALKLQHQQKEEDAKLQHKKQLESKKRDQSKLLQEKQRQALEKLGSQIQDNNDNNRRGIAHRTQQRHVTEPAPTSSLDPKLGGGAKSLLRAKSLASPSSYVSLRQNTHTSDNTSKVLQTLGIEVAPLKTSTKFNSNLKTSSSKNLSDYLDNETLYSRSDKSIEHQKENISMNKFNEKEKVNQSIAKPNYSRTSTSKSQPSAISRTTTLNSIGYRSLLDGIDENKVQKDLPKRPNGEKDYDTTLSTIETRKNGLIPNPRFSRFSFNGLLNSRFDNPDVTIQNNLVSSGTVVRKSVNQKEPISSRIIEEDPQTSHLKSETGSLKKSSTNLLGLGIVQNHQGKTSRKVSQNSEYCDSNFISVNLSDTADDSQDNTTLEENAISLSHANSVLKDDHANTTVSNTTISKQQEVLNTNVDQRNKRKSSYLGNLEGSKETLVENDKEDKSFQDSIKSMYKDYAKLYNDKKPKSETNTQELGETDDNIPSEKQTRERQSILRDDRINSIDSDNDLSFAADGSSNIDILDSSSIADTNMIENRSEIQSNDNKYSPTITDNQKDFGDEYEDEIDDQFSQHGDQQEYNHEYDHENNHEYNQEDGQEQHEHDHNQQNDQQLQDSDRLQTGTDLRKSTASTQIFSTMNLPKIRDKNSVVEENKEIKHSEVKSEESNQRHNSIFNKLKPKREAPKPPGFKWDDEKSQGHNRFSRISVSSKFDKQQKLNDNYNDSSKSNWFMKFINSLTANSKTPKGEKRKSLIRKFNSDKLDDNETKNFCVLDSTLQSSELTRVIKDTLELKKIEGSVSKVDIDEDFGMISGVIPARYSGGRRLRFKIEIINLKNSSSLHLSKLKGTDKGFKNLTNTVKFIVSKEEQNINRMSSVEA

SEQ ID NO: 16347 - protein, 2738 aa, Debaryomyces hansenii
MASYLPQEEFETNVYKYDETPENKSWASTLPTAKGLYNPEYEKDACGVGFTCHIKGEASHKIVSDCRNLLCNMTHRGGELNPKDGDGAGLLSSLPHKFFLREFKYYCNIDLPKLGQYGTGNIFFKKDDIVFEKSRKTFESIANTLGLKVLGWRKVPHDSSILGPASLSREPLILQPAIVLSELFDGQHKEISEEEFEKNYQMDFEKKLFILRKQSTHTIGLHNWFYICSLSSKTIVYKGQLAPNQVYAYYHDLANAEYEAHFALVHSRFSTNTFPSWDRAQPLRWAAHNGEINTLRGNKNWMRAKEGVMESELFGDELDKLYPIIEEGGSDSAAFDNVLELLVINGVLSLPEAVMMLIPEAWQNDIHIDSKKKAFYEWAACLMEPWDGPALFTFADGRYCGANLDRNGLRPCRYYVTDDDRMICASEVGVIEIEPEKILQKGRLQPGRMLLVDTKEGRIVDDRELKNKVASRFDFKSWVLANMISMDDLFSKLESRNVNLIENPESQDITVQTDPRLVAFGYSHEQISMVLAPMAEAKEALGSMGNDNALACISEQPKLLYDYFRQLFAQVTNPPIDPIREEIVMSLECYVGPQGNLLEMKPDQCNRLLLKSPVLSSLELNAIKNIEKVYPKWSVTNIDITFDKAEGIQGYINKIDNICQASSKAIADDHQIIILSDKLTSFNRIPISALIATGAVHHHLVRQKQRSKVAIIIETAEAREVHHACCLVGYGADGINPYLALETLVRMNIENLLKASLTDDQIIKNYKIAVDSGILKVMSKMGISTLASYKGAQIFEALGVDNSVIDRCFAGTASRIKGITFEYIAQDAFSLHDVGYPSRETIKPVALPETGEYHWRDGGDSHINEPAAIASMQDAVKNKNEIAYEAYSKKEYEAIKKCTLRGLLDFDYENSQSIPIDQVEPWTEIVRRFFTGAMSYGSISMEAHSTLAVAMNRLGGKSNTGEGGEDSARSLVHSNGDTMRSSIKQIASGRFGVTSYYLSDADELQIKMAQGAKPGEGGELPGHKVSEQIGKTRHSTPGVGLISPPPHHDIYSIEDLKQLLYDLKCSNPRARTSVKLVSEVGVGIVAAGVAKAGSENILISGGDGGTGAAKLTSIKYAGLPWELGLAESHQTLVLNDIRGRVILQTDGQLRTGRDIAVAALLGAEEWGFATTPLIALGCIMMRRCLASDTLVRTSEGDKPVAEVAIGDYLLDAEDKPVLCMGANPSQTGRMKEIAYQDFDSKKRVSFKCTPDHHLELTLTDSTPSLSGKSVTWFSRCTGAHLSEEVSEVYLDNMVSIFYNDLVDSTDSAVDKDSIHEAVDLALEDHYHRGNSDQYSIHLNEYISRIADKELQNEPEFIRECIHDAANRFVITSSGNRNIKSESFDDKLSLSRSRSSTADSDSDYVITDASVHSHSNNSSVYLASPDSMIPDGAANRFENIASKLKEPVCNCGGIRKIFRSFGTTEDAELAYSLLLSEHYYRLDPRFVTDGYTFQASVEQYENMCSQEVQNMHLKLYRSPLKFVEREHNSAELPVDPYFLGLWLGDGDSSGTTIMTTDREIVVWLNSYVERLNQNKPEGCFPLKLTEQLIYGAGHTSKSGHTTKVDVRNYKISSGDAFVRSGTYWNPIFDGLKKLGLLNNKSAGIPQEYMNSDEQNRLSVIAGLMDSDGCYVKSHNTYRFTQLTEDHKKIVYDLKELALSCGINTTGVESSVKPLGFNKHKHSTEYVVYLGNGSQKFQELLLLPRKKMEISKKHVSLDARPFTVSDVEDGEFRAIEVSGGVFQLANRLVVANCHLNTCPVGIATQDPELRKKFTGTPEHVINFFYYLANELRGIMANLGFRTVNEMIGRTEKLKVREDLRNTKNANMDLSPILTPAHTIRPGVATHCVKKQDHRLHVRIDNKLIDESEITLAKGLPVTIDCDVVNTDRSLGTTLSYRVSKTFGEQGLPHDTIHVNVNGSAGQSFGAFLAPGITLELEGDANDYVGKGLSGGRIIVYPPKESKFNAEDQIIAGNTAFFGATSGAAFIRGIAAERFAVRNSGANIVVEGTGDHGCEYMSGGRVVVLGSTGRNFAAGMCGGIAYVLDMAQDFGDKVNSQNVELSQITEASEIAFVRGLIEDHRHYTSSAVAENILNNFNRILPRFVKVLPYDYKKVLENEKKKQEEAKKNELNTFIKSIKEDPESDATNGEAAKIRKGHIHRPSSATVSAKDCSHEPNVLDLEDTIFDTEVEKKSVAKLDKLKGFMKYKRRNEKYRDAKKRTNDWNEMTSRLTKDELKYETARCMDCGVPFCTSDTGCPISNVIPKWNELVFQDRWYDALQRLLMTNNFPEFTGRICPAPCNGACVLGINSDPVNIKSVECAIIDHGFEQGWIKPEPPQHRTGKSIAVIGSGPAGLATADQLNKAGHSVKVYERSDRPGGLLMYGIPNMKLDKRIVKRRTDLMTAEGVEFICSTTIGEDISIEEIRSSNDAVVFAVGSTIPRDLRIKGRELNNINFAMQLLHKNTKALLDNDLEEIKKTLEGKHVIVIGGGDTGNDCLGTSTRHGAKSVTNFELLPNPPTSRPKDNPWPQWPRVFRVDYGHTEVTEHYGKDPREYSILSKEFVDDGEGNVKGIKTIRVEWKRSDSGAWQMAEVPGSEEFFSADVVLLSMGFVGPDADNLEVTKTKRGTISTVEPNGYKVSNEDNLFTAGDCRRGQSLVVWGIQEGRQCAREVDNYLMGSSRLPGNGSIEQRNFKLLEELAEKV

SEQ ID NO: 16348 - protein, 589 aa, Debaryomyces hansenii
MSDITLGKYLFERLKQVEVSTIFGLPGDFNLTLLDKIYEVEGMRWAGNANELNAAYAADGYSRIKGLACLVTTFGVGELSAVNGVAGAYAEHVGLLHVVGVPSISSQANQLLLHHTLGNGDFTVFHRMSKNISHTTAFLSDSETAPAEIDRCIRDAYVYQRPVYLGIPANLVDVTVSSSLLEKPLDLSLKPNNAEAEEEAVELTLKLIEESKNPIILVDACASRHNCKQETKELVEITQFPVFTTPMGKGTIDEGGVGGLLEDDPSSIEKVKKKLDYGNSVSSRFGGVYVGNLSHPEVKEAVENADLILSIGSLLSDFNTGSFSYSYKTKNIVEFHSDYTKIRQATFPGVQMKEALQHLLKKVGQAALKYKPQPVPKVKLINTPASRDSKLTQEWLWTRVSSWFKEGDIIITETGTSAFGIVQSRFPNNTTGISQVLWGSIGFTVGATLGAVMAAEEIDPAKRVILFIGDGSLQLTAQEISTMIKWNTKPYLFVLNNDGYTIERLIHGENATYNDVQPWKNLDLLPLFSAEDYDAIRISTIGEAEDIFRDKEFEENTKIRMVEVMLPRMDASTNLIKQAEYSAKTNAAN

SEQ ID NO: 16349 - protein, 249 aa, Musa balbisiana
MVRAPCCEKMGLKKGPWTAEEDQVLIAYIQQHGHENWRALPKRAGLLRCGKSCRLRWTNYLRPDIKRGNFTKEEEEAIIKLHEMLGNRWSAIAARLPGRTDNEIKNVWHTHLKKRVKPNQTVQESKRRSRSDVEATRSGAKAVKFQALQAAIRPKLESPTPLPVSIDQSYSEISSSVTISSTKRGETNSPGIKEEVVVSSAQFSDIDQNFWLDDSFASFCSSSNKDDDVIDYWLQVFMEAGHLEELPEI

SEQ ID NO: 16350 - protein, 514 aa, Methanosarcina acetivorans C2A
MVSDNFSIILVFTVYLLFMIGIGILYYKKTENLSDYILGGRKLNSWVTALSSQASDMSGWLILGVPGYAYLSGMESIWLAIGLTAGTYLNWKFVAKKLRQYTEIAGDSITIPVYFENRFRDKSHSLRIISSIFILIFFLLYTSSGLVAGGKLFNTVFGIHYQQALLIGALVIISYTFLGGFMAVCWTDFFQGMLMVFAIVFVPLAVLKGMGGYESTVSLIESIDPQLLNPWTALAGGSIPLISNLAWGLGYFGMPHILVRFMAIESPEKIKKARIIAMVWVTISLFFAVAIGIIGRAYLYPEFLGDGGSETIFMVMVNNTFTPIIAGIFLAAILAAIMSTADSQLLVAASAFTEDIYRITLKKNAGEKELVWMGRFAVILISAIAYVIARDPNNSVMGLVSYAWAGFGAAFGPVILFSLFWRKTTRNGALGGMIVGGLVVIIWKQLSGGIFDMYEIVPGFILSCITLYTISILDKEGPAEEILKEFDRVNHIALHGMSTHKEDTIPLKTDLRKS

SEQ ID NO: 16351 - protein, 337 aa, Methanosarcina acetivorans C2A
MRKSSILILILLLAVSIFVSGCAEDTDENATEEAPAITELNFGYQPSTHQIAYMTAYEKGWWQEDLAPYGIEKINEYQFPTGAPEMQAMMAGELDFAYVGAAPVITALSQGLDAKIIAPVQIQGSDLVLRPEYEYESPEDLKGLKIATFPVGTIQDTLLRNWLRENGLDPDKDVTILEMGPGDAVTAISAKQVDAVFLPHPSPAIIESEGNGRSIVSSGEMEANHACCVLVASGEMIREHPDIVEQVVKTHIKATEYNQANVDEAAQIFSNKTSEDVEVVQKSLEEWDGAWITDPTLIENSTVEYANIQYELGYIQKPLTKEEIFDTSFYEEAKNEE

SEQ ID NO: 16352 - protein, 472 aa, Methanosarcina acetivorans C2A
MKIVMKFGGTSVGDGKKIRHVAQLLKRYHEEGNQIVVVTSALGGVTDRLLENARLASTKGKVSLVKEFKTELTNKHHEAVKDAIEDPRVAKEVLQVLDLRIEELEKALIGICYLGELTSRSIDYISSYGERLAAPIVSGAVRSLGAASIEYTGGEAGIVTTSDYGNARPLEKTYELVLKRLGCRLESHILVVTGFIGENEDGIITTLGRSGSDFSASILGAALKADEIWLWKEVNGIMTTDPRIVPEAKTIPQISYAEAMELSYFGANVLHPRTIEPAMREHIPVRVKNTFNPEFPGTLVVAEKFQCRHVVKAVSLIKNVALINISGAEMPGTVGTVARLFTALARAGVNIVMISQGSSESNLSFVVSESHVESALKALHAEFNREIVKEITSDRNVCVVAVVGAGMAGTPGVAKRVFGALGNSMINIIMISQGSSQYNISFVVREGDAFAAVKTLHDEFELYNGNGIEKKL

SEQ ID NO: 16353 - protein, 468 aa, Methanosarcina acetivorans C2A
MSEHYESASLVKTLRPFHVWALGVGIVLVGEYMGWNFTVAKGGVLGSLLAMLVAGTMYVIISLCASELGAATKLAGGPYDWARLFIGPGAAASVGLAVYMEYIALEAADAIVVAFIAQSIFPELQVFPVTLLVIALLTFINYRGVVAALTLNFFLTMIAFISIVVFFFATAFGGVDIHPEYLFHGALPNGMIGLFAALQFGPWFYLGIEGAAMCAEECKHPSRAVPLGQQAGMITLLVGAAMTLYLCSVLIPTDQLGVSVYPLFEAAQNSGMFIFIALLGLGTFLTCVASANGCVCDSSRSWFALSRDNYVSSWFSAVHPRYNTPYRAVIFTMPVAIGFAFSGFLDQVITFSIVSGLLCYVLIPFALIRFRSLFPQNTSTIRPFVSPLQPYIAYFAIAIAITILSTLYWGYKYNLIFAFVFYGIAYFYFSHRHRSLNIENNWTEMGWPLPRGSENTGIRKEATGIGDE

SEQ ID NO: 16354 - protein, 639 aa, Methanosarcina acetivorans C2A
MDGYNIFIVLLAVYIAGLVAIGWYFNKKQKSVTDFWLAGRRIGPSALGFSAAASWLTAGGILAVIGYYMLQGMGSIWAFVAPNILALLIIALLVGKIKNLPAITQPELLEQRYGSAVRWPIALIITVVMILFAVADVTGFSLVLQVFYGVDPLYAAAIVAIAVSLYVTMGGLSAVVWTDVVQFAFLSIFTIAMAFAAVGTVADGGLNTPAISSSELFGNVSYDWWNPLSIGIPMVLIFVFAIIPGWITEQDPWQKVWAAKDAKSARLGMVFGSLMITVVFAACAVIAIAFNNIYPDIAGMGFPAGMAQAEPALLAFVSERFVSAPLIVALSAIGLAAASMSCADTFATSGASCISRDIFQRYIKPDATMKEMLVVNRISVLIIVLAATAGSFVIPNIIDAIHIATFIASASYFFPLMGGLYWKRATKEGAFAGMVVGFVVQVTLVSLDLIKTPPMAANYLESVHPALMSHGVIVGMGLSAIAFFGVSLMTKPSSRINLAPFFEEEAEELAHYEAREIDEKDPTYGAFLKNVDEKVAGERAHLQLNLRASGALSWHELVEKLKSSSPAWVTPTGLDSVYRLTHGDMLACVTVTRGSEERDIWLKAEPRLETVGRQKKELFTAYEELKKVLGQKGVNLDFY

SEQ ID NO: 16355 - protein, 579 aa, Methanosarcina acetivorans C2A
MFISGETPMTLSPEDLKTIEKYALQNAVKYEKAPQSKAVMGKVMGECPQLRANPGAVSTALKSIVSEIAKGNPEAWKTRLSEIAPELIEALNVKKEPEKGLKPLEGAEPGKVVMRFAPNPNGPGTLGSARGMVVNSEYVKMYKGKFVLRFDDTDPDIKRPMLEAYDWYLDDFKWLGVVPDRVVYASDHFPIYYDYARKLIEMGKAYVCFCKGEDFKRLKDAKQACPHRDTSPEENLMHWEKMLAGEYEDQQAVLRIKTDIEHKDPALRDWGAFRIRKMSHPRAEIGNKYVVWPLLDFAGAIEDHELGMTHIIRGKDLIDSEKRQGYIYKYFGWTYPKTTHWGRVKIHEFGKFSTSSLRKAIEAGEYSGWDDPRLPTIRAIRRRGIQAEALKKFMIEMGVGMTDVSISMESLYAENRKIVDPVANRYFFVWAPVELEIAGMEPTVAKLPLHPTDHSRGVREIAVGNKVLVCAEDVEKLELGSVIRLKDFCNIEITSLSPLQAKHSDVSLEALKKAKAKIVHWAPVDGISVKVRGPEGDLEGIGEKGIVGELDKIVQFERFGFCRIDAVSEEKVVAYFAHK

SEQ ID NO: 16356 - protein, 523 aa, Methanosarcina acetivorans C2A
MKVLVSDSLSNEGLEILKEHFTVDVNTGLSEDELVEKIGEYDALVIRSGTQVTQRVIEAADNLKIVGRAGVGVDNVDVDAATKKGIIVANAPEGNMISAAEHTIGMMMAMSRNIPQANASLKGREWKRNKFMGVEVKGKTLGIIGLGRIGSEVAKRASGLEMNLMGYDPFISEKRAMELGVKLATVNEISKEADYITVHTPLIKETRNILDDEQFDLMKSGVRILNCARGGIINEAALVRALESGKVGGAALDVFVEEPPFGSPLLNFDNVIVTPHLGASTQEAQVNVAIDIAKEVVSVLTGGLAKNAINIPSVKPEAMAVLAPYIRLAELMGKIAGQLVDSNYEKVEIGYNGEISGKDTRPLTVSALKGLLEMALGAGVNYVNAPALAKSRQIAVVESKSESAEEYSSTVSIKLSSGETAKLVAGTVVGDEPKIVSIDEDRVDIFPAGRMIFAKHINKPNVIGPCCMVLGKNNINISGMQVGRSEVGGVTMMVLNVDTDVSDAILDEVRQVPGILNAKLVTL

SEQ ID NO: 16357 - protein, 550 aa, Methanosarcina acetivorans C2A
MPETVIQYLLNRLKQLGIRDIFGVPGDYAFPINNAICDDKELRWIGCCNELNAAYAADGYARINGMSALSTTFGVGELSALCGIAGSYAEHNLVFHIVGMPATPVQERNALVHHTFGNGEFDQFMTMATPAVCAKTMLTPGNCIQEVERVIAAALGYRRPVYIAIPHDYVHENISHVHEKILSSQAPANVPVKSDPEVLEEAVSTIINRLSGAEKACIIPGIFVDRFGLKDLTTEVVNASGLPYVTMPMDKSVIDETNPSYLGLYMGQLVNPEIREFVESCDCVLTIGTILFDVNTGMFTAKLDRDRIISIVPYDVHIGYAGYTNLKMSDVLEELARRLRKRTDIRGPAARQPATPEVDAGSPITADYLYASCTKFFKPDDIIIADSGTSFYGLLPVFLPEGARLHSQTLWGAIGWATPASFGAALAAPDRRVILITGEGAHQMTAQEVSQFYRYGLKPIIFVLNNHGYLIERMLSRKLDYCYNDLAQWQYHKLPEALGCSGWVIRKATTCGDLDKIMAELDNAGTGAYVEITTPEMSAPPIMETVHSNL

SEQ ID NO: 16358 - protein, 300 aa, Methanosarcina acetivorans C2A
MTTSGCDKNITVGVIGLGIMGSSFASNLLSRGYNVHVYNRTKEKAQPLIERGATFHSTPRELASVADIIMTSLTDEAAVNSVAFGEDGLLNGAKKGCLWIDLSTIDPSSSVKHAEAAKKAGLERLDTPVVGSKDLASKGELIILVGGSQEVLRKHEKFLNKLGKSVIYLGADGNGHKMKLAINLHLGLLAESFSEALVFSQKLGFDAKTFVETINNTPIRNYISQGKGPRIVEGNFEPAFSLNNLAKDLRLVNEQITKTGAILPMTKVSIEEYSRTVQNGEGQKDFSVIALEIQRKNGIA

SEQ ID NO: 16359 - protein, 394 aa, Methanosarcina acetivorans C2A
MFSINSECILSKQSEDIPPFYVMEVLESAKELEAQGRHIIHLEVGEPDFPTAPHICEAACAAIGKGLTKYTHSQGLPALREAIAESYYRKFGVDLDPNQVIVTSGTSPGLLMVFMALLEKRDEVIMSNPHYACYPNFVKYLGGTPVFVYTSEANGFALEPETVRQCLSPNTKAILINSPSNPGGHVMSPDTLQGLAAIADEKGIPVVSDEIYQGLIYSGEEHSILEYTKNAFVLNGFSKLYAMTGWRLGYIICPPGCVRAIQKIHQNFFICANSFVQEAGIAALKGSQEHVVEMVQIYNMRRQYMLKRLLGMGLEVRKEPMGAFYVLADARKFGNDSLELSRSILNEAGVAVTPGVDFGNGAEGYLRFSYANSLENIAEGMDRLEAFLEKELDG

SEQ ID NO: 16360 - protein, 350 aa, Methanosarcina acetivorans C2A
MRVTNRSLRGREGEIAITAETLDDLWHLKYIIEKGDLVFALTKRKADSASDKLRPEKVEKVKVRLGIRVEEMEFHKFANRLRIHGPIEHGMDVGSYHTLNVEIGTNISIIKERWKNDQLQRIQDAEEAGKRPKVVIVAVEEGDADIGFVRHYGIEVYSHIRQSSGKRENGLRSEFFREIVDQLRHAVPEDASIVIAGPGFTKEDFLKYFHETEPEMASKALTEDTSMIGMSGFQEVLRRGAVDRIMQESRIARESSLMEDLLREISMDGKAAYGFADVKNALKYGAVETLLIADETLREGREKGEDIDKVLMEVEQAQGKVVVFSTAFEPGEKLHKLGGVAALLRFKVTG

SEQ ID NO: 16361 - protein, 228 aa, Methanosarcina acetivorans C2A
MCKNMTKEYVKGDLPEKAAILQRDGETYAIAPHIPGGIVYPETLRKIADIAEKYGAAALKVTSAQRIAIVGLKEENLDAAWGELGMSPGAAIGLCVRSIKICPGTTFCKRGKQDSVGLGLKLDKKYHGMQLPSKFKMAVSGCPNSCSETSIKDLGIMGTAKGYNLTVGGSAGPSPRLGDLVAKDLSEEQVLDLVEKIINFYKGYGKPKRLGKVIDEIGIEKFKEEIGL

SEQ ID NO: 16362 - protein, 384 aa, Methanosarcina acetivorans C2A
MIYLDNAACTRLDERVFEAMKPYFFDTYAVATSEFGYSMGIDAKEGLENSREGIASGLGAAPEEIVFTSGDTESSNMALKGVAWALREKKGKHIIISKIEDFPVLNTAKTLQKQGFDVTFLDVDAEGFADLEELKKAITKETILVSIQHSNQEIGTAQDLKAISEICEEKDVLLHTDATHSFTRLPLNVKDLPVDLVTMSAHTIHGPRGIGALCIRKDTPIVKFMDGGFQEFNLRAGVENIPGAVGFATAVKLVTEEENRQLAAMRDRVIERALSEIPEVTLNGSREKRLPQNANLTFHYVEGESVTLHMDMRGFAVSTGSACFSRSLEASHVIRGIGGDHERAHGSVRFTFGRYNRMEDADAAIDAMSEIVARLREISPLAKK

SEQ ID NO: 16363 - protein, 401 aa, Methanosarcina acetivorans C2A
MFFYRGVCLRPPCDPSKFVAEAVKSIPPSGIRRFFDLVSGLEDIISLGVGEPDFITPWHIREMCIHSLEKGQTSYTSNYGLPELRDELARTYYKRYGLDYDPASEILVTTGVSEALDIAVRAVVNPGEEVIVVQPSYVAYVPSVILAGGKPVIVSTSRDDDFSLTAEALKPAITSKTKAIILNFPNNPTGAIMEQEGMEDIADLVVENDLFVISDEVYECLTYGGTHVPFSSLEGLKDRTVMLNGFSKAYAMTGLRLGFAMGAPDIIHSMMMIHQYSMLCAPITAQVGAIEALRNGKEEMERMVREYDRRRRFIVKGFNSIGLECGNPKGAFYAFPYIGGTGLSSSDFAERLLEEKKVVTIPGDVFGEAGEGFLRCAYAASLDDIRKSIERMGDFVEELKQ

SEQ ID NO: 16364 - protein, 235 aa, Methanosarcina acetivorans C2A
MSRDGKKILRGVNLEVGDREIHSIIGANGAGKSTLAYTLMGLQGYEHEEGDIIFDGEDVAVLSITERARKGITLAWQEPARFEGLKVRDYLAIGARDNGGITEEEIKEALRKVDLKPEKYLDREVGEALSGGERKRIELASIITMKPKLAILDEPDSGIDVVSLKEIISLIRTFKENGSSVLVITHREEIAAASDKASLMCEGVILRSGDPIEISEFFKNRCIPCDSRVSPPKVV

SEQ ID NO: 16365 - protein, 439 aa, Methanosarcina acetivorans C2A
MRIWTEPEMNRYESNSLTLTGAVSLGTGVMIGAGIFALLGQIAELAGMLFPIIFLIGAVVTAFSAYSYVKFSNTYPSAGGIAMYLEKAYGKGVMTGFGALLMAFSMVINESLVARTFGTYTIQLFNMDEGSFLVPLLGVGLLVFAFAVNISGNRVIEKFSFFMALIKITGIAIFGIVGLWLADFSFTYTSTDAMATTTEEYLAAVALAVLAYKGFTTITNSGSEIVDPHQNVSKAIVISIAICTIIYFLVSLAVAGSLTLPEIIEAKNFALAEAARPVFGNYGLWFTVALAIIATISGIIASVFAVSRMLAMLTDMDLIPHRHFGMPGDIQKHTLVYTIVVAILLTIFFDLSRIASLGAIFYLVMDIMIHWGLLRNMREKIKIRSYIVITAIILDAAVLSALLLTKASTDTLLVVISLIMMLLIFAGEKLFLRSHPNQE

SEQ ID NO: 16366 - protein, 319 aa, Methanosarcina acetivorans C2A
MKIVVADSIFLTDEYRKRLEALGELEIYDSVPVSLDEFIDRIKDADIVVVGRYGVSAEALRSAPRLKMISLWQTGFDNVDLEEATDHGVIVSNVPSYAFESVAEFVFALTLNLLRRVHLADMNLREGLFDWKYYVGNQLMSKTIGVLGTGEIGKRVIQIAHGFNMNVLSVTAHPSPERAKALGVKFVDLDTLLSESDIVTLHVPLTPETEHMIGARELAKMKPTAILINTARGKVVEEAALMEALKEKKIAGAGLDVFEREPLSMDSPLLEMHNVVLTPHIAFLSEESLDECTYISIENVEMFAKGKPQNVVNPSVLKG

SEQ ID NO: 16367 - protein, 548 aa, Methanosarcina acetivorans C2A
MGFFMKASDLFVTQLKEEGVEYIFGLPGEENLALLESLRNSNIKLIITRHEQAAAFMAAAYGRLTGKAGVCFSTLGPGATNLVTGVAQAQLIGAPLISISGQKALVDNWQARFQLVDVVRMMEPLCKKAVSISDPGRIPTVIRNAFKHAEAEKPGAVHIELPEDVAGEETDAVVQKRSRIKIPSPDPEAVEMAARMIHKAKNPLIIVSSGANRTEVTEELEYFSRKTGIYLVHTQMGKGVVPDDCIYSLFATGIHARDYVNCGIDGADLIITVGYDIVEYPPYLWNRHLDKKIINIDFADSIPDRYFNPDVEVIGDIASSIRQLAARIPEKREFPFFENTRNFIEEKINSPFRKGYPPLPQEIVQSVRKVLGREDIISLDNGIYKLWFSRLYKAYAPNTVLLDNALATMGAGFSAGLVAKLLHPERRVLAVCGDGGFMMNCQELETAIRYKIPLVVLILNDNAFGFIKWKQKKLHFEDFALDCGNPDFVRFAESFGATGLKVEEGDDLSEVLEKAFFLNKLVAIECPIDYSVNYETFSIELGNLVCKF

SEQ ID NO: 16368 - protein, 370 aa, Methanosarcina acetivorans C2A
MKEISFSENVSRIDTSGIRKIFEAAGSNAINLGLGQPDFDTPVHIKTAAIEAINEGFTGYTVGPGIPELREALSQKFLEENGFSVSPQEIIVTSGASEALTIALAALLNVGDEVLISNPGFVSYNALTEILNGKVVSVPLAEDLTMKPDAVLERITPKTKALILNSPSNPTGAVSSRADIKALAEIADDHNITIISDEVYEYFIYEGEHVSPASYSDNVVTINATSKSYSMTGWRLGYLAARKEYIAQMNKVHQYIQACANSIAQKAAYAAVTGPKDSVNAMREEFRKRRDLLVKGLNELGMECAFPKGAFYAFPKVENSAEVASKMISNGVVVVPGTAFGSEGDGYIRISYAASMKDIEKSLAIMEKVL

SEQ ID NO: 16369 - protein, 617 aa, Methanosarcina acetivorans C2A
MAKILGIDLGTTNSCMAVMEGGDAVVLPNAEGSRTTPSVVGFSKKGEKLVGQVAKRQAISNPENTVYSIKRHMGEANYKVTLNGKTYTPQEISAMILQKLKTEAEAYLGETIKQAVITVPAYFNDAQRQATKDAGSIAGLEVLRIINEPTAASLAYGLDKGDVDQKILVYDLGGGTFDVSILELGGGVFEVKSTSGDTHLGGDDFDQRVIDHLLAEFKKTEGIDLSKDKAILQRLKDAAEKAKIELSGVTVTNINLPFLTVGPDGEPKHMDIDLTRAQFQKMTEDLLEKTLVSMRRALSDSKLTPNDLDKVILVGGATRMPAVVELVENFTGKKPYKNINPDEAVAIGAAIQAGVLGGEVKDVLLLDVTPLTLGIETLGGIATPLIQRNTTIPTKKSQIFSTAADNQPSVEIHVLQGERGIASENKTLGRFTLDGIPPAPRGIPQIEVAFDIDANGILHVNAKDLGTGKEQSISIQKPGGLSDAEIERMVKDAELHAEEDKKRKEEVETRNNAEALINAAEKTIKEAGDVATEDQKSKVNAAIEDLKKALEGKDTEEVKAKTEALQEAVYPISTAMYQKAQQEAQQASGEAGSADARGPDETVVDADYEVVDDEKRK

SEQ ID NO: 16370 - protein, 764 aa, Methanosarcina acetivorans C2A
MTEEDKSTIKLKVAEADQRDVGKGIVRIDERFREKLGLKPFDVVEIKGGKSTSALIGRPYPSDAGLDIIRMDGLIRTNAKTSIGEYVDIRKADWKEAKSVTFAPVAQGMQIYAPSETLKAVFMNRTVSKGDFISTTSLRRSRERETFGKGVMFEDFFQDFFGQGFGPSFGLGEIKLQVVSTAPAGIVKITDMTQVELLPEAMEIISEQNIPTVMYEDLGGLKDAISKVREMIELPLKHPELFDRLGIDAPKGVLLQGPPGTGKTMLAKAVANESDAYFISINGPEIMSKYYGESERAIREIFEDAEKNAPAIIFLDEIDSIAPKRAEVTGEVERRVVAQLLSLMDGLKARKNVIVIGATNRPEALDIALRRPGRFDREIELRVPDTEGRLEIFQIHTRGMPLADNVNLMDFAQITYGFVGADIAALCREAAMSALRRILPKINLNEPEISKEILDALQVTREDFENALKDVQPSAIREILIEVPNVSWEDVGGLERVKELLKEVVEWPLKNPESYRDIGVEAPKGVLLYGPPGTGKTLLAKAIAHESDANFITAKGSDLLSKWYGESEKRIAEVFTRARQVAPSIIFLDELDSLAPIRGTSVGEPQVTARILNQLLSEMDGLEELRAVVVIGATNRPDIIDPALLRPGRFDELILVPVPDEGARREIFRVHTKNMALAEDVDIEKLVSFTDQYTGADIAAVCKKAGRHALREDLHAKKVRQKHFLQAIEETGPSVTPDTMKYYEAIKGELRKRKSKEIENPYYV

SEQ ID NO: 16371 - protein, 380 aa, Methanosarcina acetivorans C2A
MTSARLKRVEESATIRISNIATRMIKEGTDVINFSLGEPDFDTPKNICDAAAKAMYEGKTHYAPSAGIPELRAAIAEKLKTENHLEVTEKDVLVTPGAKQAIFEIMMGALDDGDRALLFDPAWVTYDACIRFSGANTVWVPTVPERGFLPDNFAEYINDKTKLIVVNSPGNPTGGVFGKKTLQCIADLAIDHDLLVVSDEIYEKIIYDREHISIGSFDGMQDRTITVNGFSKAYAMTGWRLGYLTAPPEIFKLLQKIQSHSVSSATTFVQYGGLEALQGPQDGVKAMVDRFKMRRDILIDGLNKIGIECKKPDGAFYAFANVSEYGNGTEVAERLLKEAHVAVTPGIAFGASGEDFIRISYATSIDRIREALERLEKIFA

SEQ ID NO: 16372 - protein, 497 aa, Methanosarcina acetivorans C2A
MCGIAGVFGTPDSNLKVKKMLAALGHRGPDACGIHTAGDLSIGNTLLKITGDMPQPLTGKGALVLNGEIFNFRELAAEIGIKIDSDTELLFSLIETGVKEGSTPIDAVCSALSKVNGDYALAYACGGELVLARDPSGVKPLFYCSGTEGEKPEIAFASEKKALAFISRKAKPFPQGGILGFNTESGKITEKIPEGYLEIKSPEKRIYTEHEALSQLKETLEKAVELRLTPTTGIAFSGGIDSTFLAALAKRIDPGVSLYAVGLPDSHDITQAERAAEAIGMRKNLKVHFLSPEEIEAAVPRVVYATESTDPMTVAIGIPLYIVAKTAKEDGKRVLLTGQGADELFGGYRRHEEFLKKGAEVLDREIYSDLATISKINLERDDMVTMANSVELRVPFLDKEVIKTGLAIRPELKVLKKDGYYEDGYYERKYILRKAAKGLIPPEILWKEKKAMQYGTGVQKVLDRLARDSGFSKKQESHIEKYLMQIASEKGFEFVNN

SEQ ID NO: 16373 - protein, 593 aa, Methanosarcina acetivorans C2A
MAESWQLNRFRRFLVHEFKSRIIFNGEIKANMTHEKNPKRFLHFPFFQGAFPSSPKQIPLEITAGIAFAAFAIPEVMGYTKIAGMPLVTGIYTILLPMLVFAIFGSSRHLVVGADSATAAIIASGLITMAVPGSPQYVAYAGMIALIAAIFLLIAGLLQLGFLADFLSHTVLIGFLTGVGIRISISQLAGMFGISAGSYGTFMQLASLVRDLDLTNVPTLIVSLSVIGIIFLSERIGSKVPGALIAIIGAIAASWMFDLTSYGIIILDAVPGGLPHLSFPQVPLSDIPKLFNISVACFLIILAQSAATSRAYSVKFSDTFNENSDLIGLSLANAAAGISGTFVVNGSPTKTEMVRSVGGQTQLTQLTTVFIVLIVLMFFTRPFAYLPTAVLSSMVFLIGLRLIDTEGMTALHRQRPVEFNVALITAMTVVVIGVEQGIVIAIVLSVIAHLRHSYRPLNLLLVPKPGGAMRTVPLEKGQQAVEGLLIYRFGSNLYFANENRFTKEIIELAKKDGSLKWFCISATNIGDIDFTAIEAFKNVCIQLQQMNITLVLSEVVQPVMNELDRDGITKMIGRDHIFESVQDVIEAYKRTAD

SEQ ID NO: 16374 - protein, 394 aa, Methanosarcina acetivorans C2A
MVKKVALAYSGGLDTSVCIPILKEKYGYDEVITISVDVGQPEEEIKKADAKAEKISNKHYTIDAKEEFVKDYIFPLIKANGDYEGYVMGTSVARPLIAKKVVEAAIKEGAVALAHGCTGKGNDQLRFEAVFRQTDMDVIAPMREMNLTREWEIDYAKEHGIPVEVTKAKPWSVDENIWSRSIEGGKLEDPSFVPPEEIFEWTKSAEDAPNEPRIVDIDFEAGVPVALDGEKLGGYALVRKLNEIAGENGVGRTDMIEDRVLGLKARENYEHPAATVLLAAHADLEKLVLTRGELKFKKIVDEQWSELAYYGLVDEPLYADLNAFIDKSQERVTGTVKVKLYKGALTILARSSPNALYSEDLVSFDSQTIDQKDAEGFAKYHGFQARMYRKVMEK

SEQ ID NO: 16375 - protein, 430 aa, Methanosarcina acetivorans C2A
MAETKSMGLWASASIGVGAMVGAGIFSIFGTAAQISGNAVYVSFIIAGMIALLNTYSYAKMGVRYPSAGGPVEFMLKGFGDGILSGGLNLLLWVGYVFGLALYAKGFSYYAITFLPAGSAPVWTSFFATAIILAFTAINFRGAKTVGKSELFIVSIKVGILLLFAAAGMFYVTPGNLSISAWPAPKNLFFGAGMVFLAYQGFGLITNAAEDMKNPEKNLPRALYLSVVLVIIIYVSVSLAVIGNLSVPEIQNAQDYALAAAAKPFLGDIGFKIMAFAALFSTSSAINASLYGGANVSYILAKDGELPEIFERKVWHRSPEGLFITSSLVILCANFLQLEGIGMLASTCLLMVYVAVNISHLRLLKETGAKSYIIWASLLSSLTFFCVLLYYEFMHSKTTLGLLGFTVFCCFAAEWTYRKYSGRLIKERTG

SEQ ID NO: 16376 - protein, 332 aa, Methanosarcina acetivorans C2A
MKTVHCSILGFGAIGQGVAEVLLMKKEYLKSIGLEVLVVAVVDSKGATVDPAGVDLADCLARKRTKGTVAIEKLTGVEVIRSVSHELVIETTPTNIVTGGAGLQNMLAAFETGKDVVTSNKGPLTLKYRELTKAAKAAGSNFRFEATVGGSMPVINLANEVLAGNRLRSIKGILNGTCNYILTRMLEERASYKDILAESMELGIAETDPTYDVEGIDTACKLVILANAIFGLDVTYKDVEVTGITKITPEALEMAYERGHVIKLIGEVSRERIQVAPRLVPINHPLAVRGTLNVASIDTELAGEITVTGKGAGPIETASAILSDFVAIYGDR

SEQ ID NO: 16377 - protein, 392 aa, Methanosarcina acetivorans C2A
MENRTVYMDNSATTPVRKEVVEEMLPYLTENFGNPSSIYELGKISKHAVENARKRVADAIGAEENEIYFTSGGTESDNWTVKGVAFANKNRGKHIITSSIEHHAVLHACAWLEGQGFEVTYLPVDRYGMVSPEELKNAIRDDTILISIMLANNEIGTIQPVEEIGKISRENSIYFHTDAVQAIGHVPIDVKKMNVDLLSLSGHKFGGPKGCGALYIRKGTKIEAFLHGGAQERKRRAGTENVPSIVGLGKAIGLATGEMEETNKPLLEMRERLIKGLLQIPKTHLNGHPTERLANNVNVTFEYIEGESLLLLLNAKGIFASTGSACNSTSLEPSHVLTACGVPHEIVHGSLRLSLGRMNTLEDVDRVLEVLPEIVQKLRNMSPLTPQEYRAL

SEQ ID NO: 16378 - protein, 242 aa, Methanosarcina acetivorans C2A
MQLPDILNRFKIPAFKFEEKGSIMKDNLPEKGAIVQRDRETYAIAPHLPGGVVDPDTLIKIAEVAKKYGAAALKATSAQRIAIVGLKEEDLDNVWADLNIKPGAAIGLCVRSIKICPGTTFCKQAKQDSLGLGLKLDEKYHGMPMPSKLKIGVSGCPNSCAEPAIKDIGIMGTAKGYNLMVGGSAAATPRLADVVAKGLSEDEVLDAVERILTYYKNSGTKKRLGKFIDGMSLEEFKTQVGL

SEQ ID NO: 16379 - protein, 231 aa, Methanosarcina acetivorans C2A
MLCREAIPMKSTIPEKNAIIQRDGETYVIAPRTPGGIVDPATLRKIADVAEKYGAATLKMTSEQKMAIVGLKEEDIDAAWSDLGMDAGIVTGPFVKGVKFCPGTTFCRKGQQDAVSLGMKLEARYRGMKLPYMMKMAVSGCPSSCSEPVIKDVGVMGTAKGYILMVGGAAGLKPRLADVVAKGLSEEEILAAVDRIVEFFKDYGENRKRLGTIIDEIGLEEFKKEVGLWEK

SEQ ID NO: 16380 - protein, 448 aa, Methanosarcina acetivorans C2A
MLSSRLFSQDYFPQIHSHLRYFHTFMMQTERFQKAHNKFISSKLLFSLGVLMGETHLIYMDHAATTFTKPEVIEAMLPFLKEHFGNPSSLYSIGREGKEAVETSRKKLAKALGAAQPEEIYFTSGGTESDNWAIKGTAFSRQKKGKHIITTPIEHHAVLYPCEYLETQGFEVTYLPVDEYGLVNPAEVEASIKKDTVLISVMYANNEIGTIEPILEIGKIAREHGIPFHTDAVQVIGKVPLDLQREHKDVDMLSLSSHKFYGPKGIGALYIREGTEIDNYMHGGAQERGKRAGTENVVGIVGMGKAIELATANIEAHNEKLSKMRARLMAGILEIPYCRLNGHPEKRLPGNLNFSFEYIEGESLLLMLDQMGICCSTGSACSSGSSEPSHVLRAIGLAPKTAQGTLRLTLGDANSEEDIDYVLEVLPEVVGKLRAISPFYKPESKCEK

SEQ ID NO: 16381 - protein, 439 aa, Methanosarcina acetivorans C2A
MFEVKYNSGNYMGRESELKRDLSLLEITLVGIGDILGAGIYVLMGKAAGLAGNMVWASFLFAGFTASLSALSYMELSSMYPRAGAEYVFARKAFGERIGLFVGLLVIYYVAITASAVALGFGRYFSNIFGGGILIGAISLYILLSLVMVYGIKESARLAILMTFIELSGLMIIIYVGIPYLGTVNYFETPSLSGVFEASALIIFAFLGFEDIVRLSQETKDAEKTTPKALLISIFFTIFLYICVAVASVSVLDFQVLGISEIPLAEVAAVAFGEKAFVLLSWIALFSTMNTVLVVMLGGSRIVYGMANSGSLPKILARVHQKLKTPWTAICGIAFFSSLFVFLGDIATVANIANFMIFIVFFIVNISLIKLRYTDPERKRPFRVPVSIGRFPIFPALGALSAVFLFSQIGKEVMLYGFFLAGISALLVLLKTRKRENEL

SEQ ID NO: 16382 - protein, 288 aa, Methanosarcina acetivorans C2A
MTYMAEKKIDLSSIKSKGFLPQRQENMFSMRLKVVSGNLDAEKLRAIADAAEKYGSGYVHITSRQQIEVPFVKLEDAETANNELENQGISGGSAGKRVRAVVACQGDRVCRNGLIDCQNLACRIDEKYFGEAVPKKFKVAVTGCPAACVRPQENDFGVMGTVKPEILEENCVGCKLCEKACKVGAITVLDDKIRIDLEKCILCGACIAACRKDALRAEKTGCTIFVGGNGGRHPRQGTKLLELAAEEQLFSILEKTFEYYRREGLDGERFGDLLERLGFEKYREEVLP

SEQ ID NO: 16383 - protein, 786 aa, Methanosarcina acetivorans C2A
MEEIQLKVEKAYPIDLGRGIIRLDPAALLKLQLSPGDIVEIRGKKKTTAKVWRADRQDWEQGIVRIDNFIRQNAGVSIGEKVTIKKVEAPEAKKLILALPESMTQGGPELQFGEHANEIIKRHILKRPVFKGDIIPIINSMSQPMTESLTTSQVIPLVAVETDPANTIVLITEATIIELRKKPVQGYEKATRGVTTYEDIGGLGQEIMRVREIIEMPMKHPELFAHLNIEPPKGVILYGPPGTGKTLIAKAVANESGASFHYIAGPEIVGKFYGESEERLRKIFEEATQDAPSVIFIDEIDSIAPKRENVTGEVERRVVAQLLTLLDGMEERGQVVVIGATNRVDAIDPALRRPGRFDREIHIGVPDTKDRYEILQIHTRGMPIEKDDEITPAESEVELEEATEIEAEIEVDEAALEREKKEKTNRYLMYLAEKTQGFVGADLLALVQEAAMRCLRENLPDLDLEKETIPPERLEKIVVTKKNFEDALMEAEPSALREIFVEMPSVGWDGVGGLDEAKNAIIEAVEWPIKNPEKFVKLGIKAPKGILLYGPPGTGKTLIAQAVAKESNANFISVKGPEMFSKWLGESEKAIRETFKKARQVAPCVVFFDEIDSIAAMQGMESTDSRTSERVLNQLLTEMDGLETLKDVVIIAATNRPNLLDPAIMRPGRFDRLVYVGAPDRKGRMKIFKIHTRNTPLAEDVDLENLANITEGYVGADIEAVCREAVMFALRENFDVEAIEMRHFREALKKVKPTINENIAQFYEKIEEQFKGGQRPAETAGYVGYR

SEQ ID NO: 16384 - protein, 408 aa, Methanosarcina acetivorans C2A
MKVLVINAGSSSLKYQLIDMTNESPLAIGLCERIGIDNSIITQKRSDGKKLEKQTDLPNHKVALEEVVKALTDSELGVIKSMDEINAVGHRVVHGGEKFTSSALIDEGVEQAIKDCFELAPLHNPPNMMGITACQEIMPGVPMVAVFDTAFHQTIPAYAYMYALPYTLYEKYGIRKYGFHGTSHFYVARRAAAMLGKPEEEVKVITCHLGNGSSITAVNGGKSVETTMGFTPLEGVAMGTRCGSIDPAVVPFVMEKEGLTTREIDTLMNKKSGVLGVSGLSNDFRDLDEAASKGNQRAELALEIFAYKIKKVIGEYSAVLNGADAVVFTAGIGENSASIRKRILSGLDGLGIEIDEEKNKIRGQEIDISTPDAKVRVLVIPTNEELTIARDTKEICETEVKLRRSVSI

SEQ ID NO: 16385 - protein, 333 aa, Methanosarcina acetivorans C2A
MVTFLEKISERAKKLNKTIALPETEDIRTLQAAAKILERGIANVVLVGDEADIKALAGDLDLSKAKIVNPKTYEKKDEYINTFYELRKHKGITPETAAEVMSDYVYFAVMMAKLGEVDGVVSGAAHSSSDTLRPAVQIVKTAPGAALASAFFIIAVPDCEYGSDGTFLFADSGMVEIPSVEDVANIAVISAKTFELLVQDTPYVAMLSYSTKGSAHSKLTEATVAATKLAQELAPDVAIDGELQVDAAVVPKVAASKAPGSPVAGKANVFIFPDLNAGNIAYKIAQRLAKAEAYGPITQGLAKPINDLSRGCSDEDIVGAVAITCVQAAAQDK

SEQ ID NO: 16386 - protein, 353 aa, Methanosarcina acetivorans C2A
MRMKRASKVIFYNRLSTIQLFNISEICGCQIIDKFQLILEIFAKRATTRRSKLQVELARLRYEVPRARAIVSLVKKEERAGFMGLGDYEDAYEQDLKKRISRIENELESAEKDDESLRAFRHRKGFSLVSFAGYTNAGKSTLFNAIVDESVEAQDKLFTTLVPTTRALDLGGRKALLTDTVGFIEELPHWLVDAFKSTLDEIFLSDLILLVVDVSEKPETILQKLSTSHDTLWDRIQGVPVITVLNKTDLLEASELEAAMEEIGYMAPNPVFVSAKEKLGMKELKAEIIKHLPAWSSYSFTLPNSEKGMSVLSWLYDEGIVHRVDYGERISVDYEARTEIINRIKALELNQGE

SEQ ID NO: 16387 - protein, 356 aa, Methanosarcina acetivorans C2A
MKLTINKNSAKWMQLPRDVLVGHGVLEEIGDVCRDLKLKGNALIVTGNTTRDVAGKRVSTLLENAGSSTEMVLTCRATMEEVDKIMQKASETGATFLLGIGSGRSIDLAKLASTRLEIPFISVPTAASHDGIASSRASIIDNGKNASVQAQAPIAVVADTEIISAAPFRFLVAGCGDIISNYTAVLDWELASRLRNEYFGEYAAALSRMAARVVIENADSIKPEHETSARLVVKALVSNGVAMSIAGSSRPASGSEHMFSHALDRIAPKPALHGEQCGVGTIMMMYLHGGNWQEIRDALKKIGAPTNAEELGIEDRYIVEALLHAHSIRPDRYTILGNGLTPSAAEKVARITKVIS

SEQ ID NO: 16388 - protein, 564 aa, Methanosarcina acetivorans C2A
MTTGSTEKVNGAKALIKCLEKEGVDTLFGYPGGQIIPFYNELYDSDLRHILVRHEQAAAHAADGYARATGKTGVCVSTSGPGATNLVTGIATAYMDSVPIVALTGQVPRPLIGNDAFQEADITGITLPITKHNYLVQDAEEIPRIVKEAFHIASTGRPGPVLIDLPKDVQNIEIDLQYPDKVELRGYKPTYKGNTQQIKRAAEEIANSCRPIIYAGGGVISSNASAELVELAETLMAPVTTTLMGISAIPTEHPLYVGMLGMHGCKYANYAVQESDLIIAVGARFDDRVTGKLESFAPNARVIHIDVDPAEISKNVKVHVPIVGDAKQILKSLIKYIQRCNSAEWIEKINQWKKEYPLAYRYVSSDTIMPQFVVEQISEVCKDAIIVTEVGQHQMWAAQYFKYRKPRTFLTSGGLGTMGYGLPAAMGAKVGKPDKTVINIAGDGSFQMNSQELATLVQNDIPVVSVILNNGYLGMVRQWQELFYDRRYSHTFIKGSVDFVKLAEAYGALGLRAEKPSEVRPAIEEAVGSGRPAVVEVIVECEANVYPMVPAGAAINEIIDLEEH

SEQ ID NO: 16389 - protein, 555 aa, Methanosarcina acetivorans C2A
MEKLAKFKALGLSDSTLKALKKKGFEEPTPIQEKVIPLFLKGESDIIGQAQTGTGKTTAFGAPIIEKIPEKSGYVQAIILTPTRELAIQVSEELNSIKGDKKLHVVPIYGGQSMTQQLRVLKSGVDIVVGTPGRIIDHLERKSLDLEHIAYFVLDEADEMLNMGFIDDIKEILKATGPDKRMLFFSATMPKPILGIVKKYMQNYEHVTIEKEELAAKLTEQIYFEVQENDKFEALSRIIDIEDEFYGLVFCRTKTDTGQLAQKLSDRGYEADALHGDLSQQEREKILNKFRKQKINVLVATDVAARGIDIMDLTHVINYSLPQDPESYVHRIGRTGRAGKQGTAITFVTSTEFRRLTYIKKTSKSEMKKGRIPEIKDVIKAKRARVKAELEETIKTEEYGDCLEMSERLLEEYPAEKILAALLKYTFKEKFDESMYTEISSPSSYVDRKGKTRLFIAMGKADGMSPEKLSYFIQEELGDSELKVRDAEIFPHFSFVTLPFAQAEALLEIFKNKRRGRKPFVELAQKSKGRSLKGSNNGRSNGRPRNPSRPRNTKK

SEQ ID NO: 16390 - protein, 291 aa, Methanosarcina acetivorans C2A
MFLPNSFIDALADYESARYVIFGVPFDNTSSYRAGSRWAPDAMRQVSANFESYNPTFDIDLVDLPIYDAGNLETSASVDETLRDLYEDVKGLLNDGKLPIMLGGEHSLTYSTVKACAEFAGDDFGVLILDAHFDLRQEYRGFKHNHACVSRNILEQVTKNLVSIGIRSGPEEEWVFARENNLKYYTADDVESTGMVEVLKEAIEWLNCSQLYLSLDMDAIDPAYAPGLGTPEPFGLSARDVRTAIRTLAPFSMAFDIVEIAPEYDSGQTAMLGAKLMREFIASHAKSCTKI

SEQ ID NO: 16391 - protein, 340 aa, Methanosarcina acetivorans C2A
MEQLTEPPLFIATILEVNGEIALIRQHGNNQEVLTQIPEECLGKIEPGMRVAVNGAYSIISIVSRAADVRAQVMELINSPGVDYSMIGGLDDVLQEVRESVELPLTEPELFEDLGIEPPSGVLLHGAPGTGKTLIAKAIASQAKATFIRMSGSDLVQKFVGEGSRLVKDIFQLARDKSPSILFIDEIDAVGSMRTYDGTSGSAEVNRTMLQLLAEMDGFDPKGNVKVVAATNRIDLLDPALLRPGRFDRSIEVPLPDEKGRVEILKIHTRKMKLADDVDFEKLAKVLTGKSGAEISVIVKEAGIFVLRRRGKEITMADFMKAYEKVVNVQEPTIPQAMFV

SEQ ID NO: 16392 - protein, 469 aa, Methanosarcina acetivorans C2A
MLKNVQKLGKFLIIICMIFIALSSPAFAATAEENAVAIEGVQTALTFVWLLLASGLVFFMHAGFSLVETGLTRSKNTANILMKNFMTIVLGILIYWAVGWGVMYGADAAGLIGTDQFFLSGADNALWNGWFFQMVFAATGATIVSGAMAERTNFKAYLIYCIMMVAVIYPVYGHWVWSGADLALLTGADSPIVQAIGVPSHDFAGSGVVHSIGGYSALAGVLLVGARIGKFKDGKAVPIPGHNLTIAFLGTLILALGWIGFNGGSTLDGNDPYMNLVVVNTFLAAAAGAVVTMLITWMKTGKPDPSLTANGLLGGLVAITAPCGSVNNWAAIIIGAIAGIIIYAGVMFNENTLKVDDPVGAIAVHGYCGSWGLISVGLFSIGIGNGILADAAYAAEVPGLFYGGGISLLLIQLISVLCSIVWAFGISFIIFKILDAVVGLRVSEEEEIMGLDICEHGIRAYPEYLMREE

SEQ ID NO: 16393 - protein, 503 aa, Methanosarcina acetivorans C2A
MTLGSVPPKYKVSIDRDQCMDCGRCIENCSYGVYRREGDRILIESRKCTACLRCVAMCPRDAITLTEKPVDYRSHPIWTREAREDIINQARSGKIILSGMGNVRDLPIIYDRLLLDACQVTNPSIDPLREPMELRTYIGKKPAKLKFRRTESGDVELETKLAPNLKLDTPIMIGHMSFGAISLNSQLSMAKAVAETGTYMGTGEGGLHKELYPYQDHMIVQVASGRFGVNIDYLERGAAIEIKIGQGAKPGIGGHLPGEKVNEEVSRTRMIPLGSDAISPAPHHDIYSIEDLVQLVRSLKEATEWKKPVFVKIAAVHNVAPIAAGIARSSADAVVIDGFRGGTGAAPKVFRDHVGIPIEAAIASVDQKLRDQGVRNEISIIASGGIRNSADLAKSIALGADAVYIGTAALVALGCRVCGNCYRNLCPWGIATQRPDLVSRLDPEAGAAQVSNLIHGWTLELSELMGAAGINSIESLRGNRDRLRGYMLDEGMLKILDVLPAGA

SEQ ID NO: 16394 - protein, 441 aa, Methanosarcina acetivorans C2A
MNLNIIRSSMTEITKSKDESMRSHLVKPGSVYDGIEPGELGESTESVQDRVRQLESRNSFLEEQCSQIESEKRYLENQKIKYEREIRKLQSELDRMKTSPLIIGTVIDVIKNDRIIVRSSNGPQFLVNVSQYIDEKKLLPGAKVALNQHTLAIAEVIPSTEEPFVAAMEVIESIEVDYDQIGGLDEQIQELQEAVELPLIEPERFARIGIEPPKGVLLYGLPGTGKTLLAKAVAHRTNATFIRVVGSELVQKYIGDGSKLVREIFEMARKKAPSIIFIDELDSIAARRLNETTGADREVQRTLMQLLAEMDGFDKRKNIRIIAATNRPDVLDPAILRPGRFDRLVHVPMPGIEARGKILKIHCGKMTLAGDIDFKKLAKVTEGMSGADLKAIATEAGMFAVRKDKALVEMEDFLEAVEKVSMAADTQKMMPGNLPETTMFV

SEQ ID NO: 16395 - protein, 247 aa, Methanosarcina acetivorans C2A
MLKIEDLTVEVDGKTLLHDVNLEVEKGYTNVLFGPNGAGKSALMRTIMGFSEYRVVKGRILFKGEDITHLPIDERARLGLGIMMQRPPDMAGIKLKDLVKVASKGKKDPETLAENLDMKRFLDRDVNVGFSGGEIKRSELLQLSAQNPSLYLLDEPESGVDLVSIEQVGMTIKELLEEGLECPGERCKKGKSALIITHTGQVLDYVQADRGYILCNGTVMCSGNPMKMLEEIKNKGYQECITCKLMK

SEQ ID NO: 16396 - protein, 753 aa, Methanosarcina acetivorans C2A
MTEEMNLRVAEAYHKDVGRGIARIDTRLMQEMGLVSGDIIEISGRSKTYAIVWPNVERGQENRIRIDGNLRSNAKVGIDDRVTIQKVQAKHAQRVTLAPSQPVRLVGGAHYILRIIEGRPLNKGQQIRVETVNNPLTFVVASTRPAGPVVVTKDTEIVIKEKSIEEIKTPEGISYEDIGGLRREIQLVREMIELPMRHPELFQKLGIEPPKGVLLHGPPGTGKTMIAKAVASETDANFITISGPEIVSKYYGESEQKLREIFDEAEKDAPSIIFIDEIDSIAPKRGEVTGEMERRVVAQLLSLMDGLKSRGEVVVIAATNRPNSIDEALRRGGRFDREIEIGIPDRNGRRQILLIHTRGMPLEDEVSLGEIADVTHGFVGADLSSLCKEAAMHALRRITPEIDIEEEIPQEIIDNLVVTKEDFREALKNIEPSAMREVYVEVPHVGWDDIGGLDKAKQELIESVEWPLKYPEMFKAVNIKPPRGVLLFGPPGTGKTLLAKAVASESEANFISIKGPELLSKYVGESERAIRETFRKAKQAAPTVIFFDEIDSIAPERSSVSDTHVSERVVSQILTELDGVEELKDVIIVAATNRPDMVDPALLRPGRFDRLIYIKPPGKEGREKIFEIHTKGKPLAEDVKLSELAEMTEGYVGADIEGICREAAMLALREIVTPGTDRKSIKEKAGDVRLSKRHFERAIRRVRPTTSRETLSAYEKSAELFARYAAELEEESSEAKEEEKEIEGKEVPNFPKV

SEQ ID NO: 16397 - protein, 196 aa, Methanopyrus kandleri AV19
MKETSVKEVPELDSRAFRIAVLGPENAGKSTLVNALMGREVTEVSEVPGTTKTVSGYRWTSREFPLYVFDTVGLADERGKRSKRGVRAEDVAEKLGRYDLALFVVDVTRHVGPETLRALHVIKYAADLETLLVANKIDLLDRGELEERLERIRERTGHRPIPVSALTGEGIGRLLREIERRVREKRRTLRAAPGYR

SEQ ID NO: 16398 - protein, 353 aa, Methanopyrus kandleri AV19
MKVVEKDLDKGYIEVLPETLDDLWHLYHVVRKGDLVFALERRRVKDERAETIRRDKGERKPVYLGVRVEDVEFDKYANRLRIKGVIEHGPESGSHHTVNVTTGKRIKIVKDEWERKDLERIEEAEMSRPPVMLVAVDTGEGTIGIVRDYGLDVVARVRHNVPGKRGGDRRAEMRKFFHRLADEIERIAEEEGVEHIVVGGPGFVKSDFAEFLREERDIPAHVEDTGSAGEAGLIEMIRRGAVERAVEESRVAEEVKHLEEVFKRIGKGDDKVAYGVRECLKAAEFGAIDVLLVADEKFREAMVEGEEDVLNAVKYAERTGAEVLIVSTEHEWGERLRELGGIAALLRFSIPTG

SEQ ID NO: 16399 - protein, 431 aa, Methanopyrus kandleri AV19
MAAESIAKAVHDVLATWGAQGPGAIFFLVWAAVLVVGMQLGFMFLEAGQVRTKNVVSVLMKNLLDLSLGGIVFIFFGFALAFPDYAQSIGKWIATMFTANPWSADPMKAADPYNLAYCFFQFAFCATAATIVSGAVAERINFKACLVMTVLITGLLYPIFVLWTWGGGWMGGDTGLFAKVFGQPYHDFAGSTVVHAIGGFLAMAAAYLLGPRIGRFKNGKPVPIPGHNIPQAFLGALFLAITWYGFNVGSSAVLYDPTNESWISSLVATLAMCGGAAAAAFTTRFDPLWAANGLIAGLVAICAGCDIMSPFGALLTGIVAGLIIKPAFRLLEKLEIDDVVAACPVHGFAGVWGAIAAGIFGAEALGGAGGVSLAAQIVGALVCIAWALGSGFATFYVIDKVIGLRATEEEEKGLDETEFGVSAYPYMETRD

SEQ ID NO: 16400 - protein, 262 aa, Methanopyrus kandleri AV19
MKPVEPCDLEVYADLRVPPNTHLVLRIDGRAFTKLTRRLGLKKPYDRRFAEAMAETAVRMIRDAGLGITLVYTFSDELNALIPRGNVPFSGRVEKLTSVSASCASTYFFRALQRHGIDPTGETVSFDSRCVVLTDDDLVDYFKWRQDEAWRNHLNSYAYWALRERGLKPKEAAERLRGMKAHDVHELLYREFGINLGRTPAWQRRGILAYRVAVNEDGVQRRRVTRDWAPPFFDESEGERLIRACASQGYVSLDPAPDQVEE

SEQ ID NO: 16401 - protein, 520 aa, Methanopyrus kandleri AV19
MCGIACAVGDDDIAAMVTAMEHRGPDGRGFASVSDDGVEFSEEPPSEGEVVLGHVRLWVRGEASAVQPIVEEDRAVAVNGEIYNYRRFVEDAPSDSWAVFEVVRSVRDAAAALRVLRGEYAFVAAFRDGTVVAARDPIGVRPLYYCVEAGLAVASERKALWAAGFRDVRRVPPGALLVLRDGRVELRNVVDVPRSRPGRSSWKDLLEVLQRSVRERVEETERVGVVLSGGVDSSTVAKLASEYVDVKCYAAGFEGSDDVEVAERLCDEMGWPFVSVSLEDEFERYVVATVYAVETWNPMKVEVGIPILACAGAMSDDGIRVMLSGQGADELLGGYHRHLRHYGDWDRFSWELWKDVAAIHAVNLERDDKAGMHHSVELRVPYLDLDVVRTGLGIDPRENVSGPEDNLRKRALRRVAAELGLPDFVVERRKRATQYGSLTSKMLDKLVRELGIKRAVAKRLGYRSHKELFLRLVGKYLGFPWEAPSVEEVERECARLGVEPEISEFLEERVLTFDSDLRAG

SEQ ID NO: 16402 - protein, 467 aa, Methanopyrus kandleri AV19
MRVVMKFGGTSVGTGESIRKVAKIVTDAAEEHEVIVVVSAMSGVTDELVRAAESAPDWTEEDVKNFVGKLRRRHGKAASEAISSDLIRREVMGYVDSLLEELEKVLLGLSYVGEVTPRSMDLILSFGERMSAPIVAGALRDRGLEAEHLEGGEAGVITDDGFGEAEPILPACRRKAQKTLIPMIESGKIPVITGFIGRTIDGEVTTLGRGGSDYSAAIIGCISEADEVQIWTDVDGVMTANPNLVPDARTVPRLSYEEAMELASFGAEVLHPKTVIPARSENIPIRVKNTFNPESEGTLITSESEPSEQVVKAVASSSDVGMIDIRGTTMIGRPGVAGRIFSRLGDEGINVIMISQSASESNISIVVSRPEVRRAARIIEREFVGERVVERVTTYEDVAVVAVVGEGMRGTPGVASRVFRAVADAGVNIKTISQGASEVNISFVVAEEDEAAAVNAVHSEFELGEEA

SEQ ID NO: 16403 - protein, 522 aa, Methanopyrus kandleri AV19
MAKILVTDPIHEDALRKLEELGEVVVLEDADEEEIREHVRDADAWVVRSGTRVTRELIEEAKNLKVIARAGVGVDNIDVKAATERGIIVVNAPESSSISVAEHTMGLILALARKIPQADRSVRRGEWDRKRFMGVELAGKTLGLIGLGRIGQQVAKRAKAFEMEVTAYDPYIPEKVAEELGVELVDELEELLERADVVSIHVPLTEETEGMIGEEELKRMKSSAFLVNCARGKIVDEEALIKALKEGWIAGAALDVFAEEPPGEDHPLYELDNVVLTPHIGGSTGEAQRAAGLIVAREIERVLKGEIPENVVNLPLAGVPDDVRELMEVGERLADAAAQVLEERLRWVQVKVGGELEDREKEALKRAVLKGCLDRVLTEPVTMVNAVDVAERRGIEFEFTVSDELEGGEVEVVVRSDEDEISLRGELVEDRVYLTSVNGYEVRFKLSGPTLFVWHVDRPGVIGEVGIILGEHRVNVAAMEVGRRERGGEAIMVIRMDEEPPEECLRAIDEVEPVRRVELVRC

SEQ ID NO: 16404 - protein, 252 aa, Methanopyrus kandleri AV19
MPGRGCAHDEDPGHGPVHEDALRKLEELGEVVLEDADEEGLRRHVRDADAWVVRSGTQVTRELIEEAENLKVIARAGVGVDNIDVEAATERGIVVVNAPESSSISVAEHTMSLMLVLARRIPQADRSVRRGEWDRKLFMGVELAGKVLGVIELGRIGRQVAKRTKAFEMEVIAFDPYISEEVAEGLDVELVEDLDELLRRADVVTIYVPLTDETQGMIGERELKLMKESAFLINCARGEVVDEEALVRACSC

SEQ ID NO: 16405 - protein, 1249 aa, Methanopyrus kandleri AV19
MPGLPIKLRVEKAYPEDVGKRAVRMDKASRDRIGVSEGDLVKITGSKTTVARVLPAKKEDVGKGIVRMDKYERQNAGASVGEPVEVDRAEEKVAKRVELMPTERVVVPVQAGLKEEVEEELTREHEQDILEQIKRYLRSRAQQTPIPATHRDVIPLEVQGKTIAGHVLIKFPDSLLVVGIEPEDATVIGPETEIEVKPYSEDLAKAAEIPDVTYDDIGGLDREIELIREYVELPLKRPELLKELGIKPPKGVLLYGPPGTGKTLLAKAVANECGAKFYSINGPEIMSKYYGESEARIREVFEEARKNAPAIIYIDEIDAIAPKRGETGEVERRVVAQLLTLMDGLSEDERVVVLASTNRPDDIDPALRRPGRFDKEIEIGVPDKEGRKEILQIHTRDMPLADDVDLDKLAELTHGFTGADLEALCKSAGLKALRRAIRKIGAKLAEKGEKEEREVAVKVSELSDEELMEVLEKGLDRARIPEEKKRALRRVLREAEEEEKEEVAYTDALDKVLEAEELPEIREELKVTMRDFMEALKEIEPSALREVIVEVPDVSWDDVGGLEDVKQELKEAVEYPLKYPEVYEKLGTRPPKGILLYGPPGTGKTLLAKAVANESDANFIAVRGPEVLSKWVGESIPGDEVVWAKVDGEAKLIPIEDLYELWKEGRDVEVAALTEEGVVWSSVDRVARHRRRTGLVKIITRTGREVIVTEDHSVFTVRDGKIVDVPTSELSEGDWIVLPARLPAGDSDEIDGIKIDEDLAFLLGLYVAEGSLTNQKDAVRIHNKDPEVIEEIDRIVREKGWEGRYYESDHSYWIKSRKLRQLCEKLGTKAREKRLGPLLSLKPELLAAALRGYYTGDGSFSVKPHGRSAIIEATTVSKRLADELLVALQILDIVARRYECDDTKGSTRYRVMITKSEYIRTFVEKVGFAQSEKNERIRKFLAERKWTRGRSDIPTELIGSPYTYVEVEYISDRVAADGGLMKAELEHLYFDKIKEIVPLDRDDEYVYDVVEVKLGHNFVGGQGVLLHNSEKKIREIFQKARQTAPCVIFFDEIDAIAPKRGTEVGGSRVTERIVNQLLTEMDGIEATEDVFVIAATNRPDIIDEALLRPGRFDRIVYVPPPDEEAMKEIVKIHTRDMPLAEDLTVDDIVEILRRREREEDAKYTGADIEAVCMEAAMLALREVLDELERIEKESETEEELEARKEALLEELRVERRHFEKAVEKVPPSVPKEKLEEYEKLKEEYQRLAG

SEQ ID NO: 16406 - protein, 565 aa, Methanopyrus kandleri AV19
MSELPTGARVLVECLKEEGVEHIFGYPGGAVLPIYDEIYDEVSIEHILVRHEQGAAHAADGYARVKGKPGVCMATSGPGATNLVTGIATAYMDSSPVIAITGQVPTTMIGKDAFQEVDAVGVFMPITKHNYQIGKPEEIPEVVKEAFKIAITGRPGPVHIDVPKDVQEAEVDVEIPKTVEVEGLNVVKRGHPVQIKRAAELLAEAERPVILAGGGCVISNATRELIELAELLGAPVATTLMGKGAFPEDHPLALGMAGMHGTKAANYALTECDVLLAVGCRFSDRTTGDPSGFAPEAKIIHIDIDPAEIGKNIPVDVPIVGDAKLVLRDLIKELKRRKYLRERKRWGERIEELKAEVEMPPESTESDQRISPRELVRVLHEALKDRDYILTTDVGQNQMWMARYFPVEEPRRFISSGGLGTMGFGLPAALGAKVAAPEKTVVAVVGDGGFLMTAQELATAVDNDIEVKVFVMDNRLLGMVAQWQRLFYDERLSESKLDEKTDIVKLTESYGAAGITVEEPSELESAVEEAFETPGTVVVDVFVDPEEIIPMVPPGGELRDILGEK

SEQ ID NO: 16407 - protein, 429 aa, Methanopyrus kandleri AV19
MNAKGPLTRSTPSPVCGGTSRLWWREYVKEIQRKAETGEYAVRGFGTSRKVPHFDDLVILPAQVSRPPIDKYREPCNTKTVLGDRFAEKPLKLDTPVLVGAMSFGALSKEAKVAIARGTAMVGTATNTGEGGMLPEEREEAKWLIAQYASGRFGVSAEYLNAADAIEIKIGQGAKPGMGGHLMGEKVTKEIAEIRGIPKGSDALSPARHMDIVGPEDLKMKIEQLREITDWKIPIIVKYSPGRVKEDVKIAAKAGADIIAIDGMQGGTGASPEIATENAGIPTIAALVQAVEALNEIGMRDEVDIIISGGIRDGADVAKALALGADAVYVCTSVLIAMGCTACAQCHSGRCPVGICTQDPELRKKLDVDEAAERVANYLKVVTEECKMLAQLAGKTDVHNLEKEDLRALSEDVARITGVKMAGSDVELA

SEQ ID NO: 16408 - protein, 319 aa, Methanopyrus kandleri AV19
MKKVVALGIVIVAVLGGALGYYYYTTTSNVVRIGYQPSDHSAALFVAMAKKMFEKEGIKVETYEFKAGPPETQALAAGKIDVAYIGCVPAITAYSKGVPIKIVAGVNQEGSAIVVRKDEAGKIKDIKDLKGKRVAELMKGSIQDCMLRTALKRAGLDPDKDVDIVEMKTADAVNALGAKQIDAFIEPEPGPTMAVKKGFGVRLMDTGKIWSHHQCCVLVMRKDFIERHPNLAKKVLKVHVMATKYVQEHPDEAAKITAKQLKVPEEVEKEAMRHVRYSVDLDVDSIKMFARFLKQLGYIKELPDWSDFIDLKLLKEVAG

SEQ ID NO: 16409 - protein, 257 aa, Methanopyrus kandleri AV19
MWESRRKSEPRFPLSFSSDDVKSPDVAVVGLPRERVLPEYPTGQAEAPNAVRSAASTLDFYDPEVGDPLEILTLVDEGNLRTFEPESEPEIFVVLGGDHSITPEIVQELTPRRLLWLDAHPDLRRSERHDGALRGCLEIVDEVFLVGVRCWSREEYDVFREHEHVVSVDHGDITEVIDDVDYVSLDLDVLDPSVVPGVTTPEPGGLPYRLCADILRWAGRKRAHLDVVELCPTVESHVSPVTAARLVGEYLKGVAER

SEQ ID NO: 16410 - protein, 136 aa, Methanopyrus kandleri AV19
MDVAVKKVEVRQLKKGKYIMIDDEPCKIVEYTTSSPGKHGSAKARIVAVGLFDGKKRTLTKPVDAKVDVPVIERKTAQVVSDMGDTVQLMDMETYETFEVQKPEDEELASQLEPGTMVEYMEAAGKRKIVGIKEEE

SEQ ID NO: 16411 - protein, 571 aa, Methanopyrus kandleri AV19
MEEKELRDLVRRYALENAARYGGRANPNAVMKKIMKEHEELRPRAKEVLKTVREVVREVNKMSGEEIRRELEELGGPREDVARDKEGLKPLPGAEPGNVRLRFAPNPSGPLHIGHARAAVLNDEYARRYDGTLVLRIEDTDPRRVDPEAYDMIEEDLEWLGVNIDERYVQSNRIELYYMVCEELLEREGAYVCTCDPDEFRRLRDVGRACPCRSRDKEENLELWEEMLDGTFSEGEAVVRVKTEVDHPDPAVREWIAFRIVEEEHPMTGSRYLVWPTMNFAVAVDDHLMNITHVLRGKDHESNTRRQKYVFEHLGWDTPEYVHYGILKVEGAVLSTSEIRRGIDSGEYTGWDDVRVATLRALRRRGIKPEAIRETILEIGLTDVDATFSWEHLYARNRKMIDPESHRYFFVRDPVELRIEGMKESVLARLPLHPDRDEGERVLILHPENGVARALLDGEDAEDLWEGDVVRLMNAVNVEIEEVGDGWLRGRYHSDDYRIAKEEGAQIVHWVPPDQAVRCEVVRPDGSVESGYAEINVEREQAGSTVQFERLYFVRLEEVSSGGVRAVYAHD

SEQ ID NO: 16412 - protein, 436 aa, Methanopyrus kandleri AV19
MEETGVKDVRDLCEKFLDFKREKERLEELLKEYFKRLEELERKLRAHEEKLRIEARRRKTLEKELEMERDEKAELREELRRKEVMIEKLRSDLQRMKKPPLIVGTVEEILDDGRVIVKSSTGPKFVSNVSPTVDRNELEPGANVALNQQSMAVVDVLPSEKDSRVLAMEVDESPDVSYDDIGGLDEQIREIREVVEKPLKEPELFEKVGVEPPKGVLLYGPPGTGKTLLAKAVANHADATFIRLAAPELVQKFIGEGARLVRELFELAREKAPSIIFIDEIDAIGARRMRDATSGDREVQRTLTQLLAEMDGFDPLDDIKVIAATNRKDILDPALLRPGRFDRHIKIPLPDEEGRYEIFKIHTRDMNLAEDVDLQKLAKITEGASGADIKAICTEAGMMAIREDRDIVTMDDFLKAVDRVMGKKEEESGEFKRAYH

SEQ ID NO: 16413 - protein, 394 aa, Methanopyrus kandleri AV19
MSRVVLAYSGGLDTSVCIELLRERYGYDEVITVTADVGQPEEELREAEEKARKLADEHFTVDCVDEFVCEYCWRAVKANATYEGYPLSTALARPLIAQKVLEVARDVDADAVAHGCTGKGNDQFRFESYLRAHGGEEFEIVAPVRDLNLTRDEEIAYAEERGIPVPVDVDSPYSVDENLWGRSIEGGVLEDPSEEPPEEVFEWTVSPAEAPDEPEVVEIEFEDGVPVEVDGRDDPVEIVRYLNETAGEHGVGRIDIIEDRVIGLKSREVYEAPAAVTLLEAHRALEAFTLTRRELSLKASLEEEWARLVYDGLWFNPLREHLEAFFDSTQRHVEGTVRVKLFKGSATVISRESPRALYEEELISYEEKQFDQRTAEGAVKLHGLQERLALRRRG

SEQ ID NO: 16414 - protein, 353 aa, Methanopyrus kandleri AV19
MSVPKKRMQLPREVVVGSNVLPEVPKLLRSVGVPDGVVAVFSGRTTMKIAGNEVADHLEEAGYQTSPVIVKGSTGDDVKKALEALDEIDADVVAAVGGGKVIDVAKVASYRRGIPFISVPTSASHDGIASPFASIRREGRPYSEPAQAPLAILADIEVIREAPERLIRAGVGDVVSNVTAVKDWRLAHRLRNEPYSEYASSLSLMAARIVMKNAKPIGKLLPEGIKKLVQALISGGVAMSIAGSSRPCSGSEHLFSHALDVIAERPALHGEQCGVGTIIMEYLHGGNWREIRETLETAGAPTTAEDLGVSDEEIIEALCRAHKIRPDRYTILGDKGLTREAAERAAEETGVIQ

SEQ ID NO: 16415 - protein, 237 aa, Methanopyrus kandleri AV19
MALLEVKDLRVESEDGTEIVRGASLTVDEGEIVDLIGPNGSGKSTLAKTIVGCSGYEVVEGEVRFKGRDITDLPMYERARMGLTMSWQEPARFEGLTVGEYLSVCTDDEDWARRCLRIVGLDPEEYWDRECGENLSGGERKRVELAAVMAMRPDLVILDEPDAGLDMSSMEDLAKVIETMREEGSAVLLITHNRDLAEQVGDRAYLMMDGKIVDEGDPKDVVLKCLMCGGGLVCGAE

SEQ ID NO: 16416 - protein, 291 aa, Methanopyrus kandleri AV19
MIVLATSEGVKLGRRLAEELDAELAPVEEDRFPDGEQIVRVPPELDGTVVVVHSMSPPQDENLVKAIITLDAARENGAEEVIAIVPYMAYSRQDRRFEPGEPVSFRAVARAVSANADALITVDLHEPGTLKYFDVPAENVSAAEELGKYLAERFEGEDLVVIGPDEGARELAREVASICGVEYDHLEKKRLSGDEVEIHPKELDVEGRTVVLVDDMIDTGGTMVEAARALRDQGAGTLYAACTHALLTRNAATRLLASGFEDIIATDTVPNPFEKVSVAPPVAEAVENLSG

SEQ ID NO: 16417 - protein, 68 aa, Burkholderia multivorans
MDTGIVKWFNDAKGFGFITSDNGGEDLFAHFSEIRMDGFKTLKENQRVSFDVKVGPKGKQAANIQACL

SEQ ID NO: 16418 - protein, 309 aa, Arabidopsis thaliana
METDSIDSVIDDDEIHQKHQFSSTKSQGGATVVISPATSVYELLECPVCTNSMYPPIHQCHNGHTLCSTCKSRVHNRCPTCRQELGDIRCLALEKVAESLELPCKYYNLGCLGIFPYYSKLKHESQCNFRPYSCPYAGSECAAVGDITFLVAHLRDDHKVDMHTGCTFNHRYVKSNPREVENATWMLTVFQCFGQYFCLHFEAFQLGMAPVYMAFLRFMGDEDDARNYTYSLEVGGSGRKQTWEGTPRSVRDSHRKVRDSHDGLIIQKNMALFFSGGDKKELKLRVTGRIWKEQQNPDSGVCITSMCSS

SEQ ID NO: 16419 - protein, 383 aa, Deinococcus radiodurans
MSMIAHVINPGISGVKLACAVIEPGQNPAFPSHLQVSLTREELPLEAAPDELGLDALAERILEQTAAWPAPDAVVGRGGLMGRVPAGTYHVTPELARYVLENVSGSQPADDPNPGIGAPLALRVAQARGVPAYIVDPQSVDELLPEAHMTGVPGVRREARFHALNARAVARRAAYEVGKQFREARVVVAHLGVTTSVTAFDQGRAIDTTGTAPDGGPMGARQSGPLPTRAVIRLLQTQSESELLRLLTRGSGFFALTGTADLSEIERRQEQGEDSVVQTAIAAFVHQVCKAIGEQTAALPGRPDAVALTGGIARWDAVVDRIERRLAWVAPFIVLPGELELEALAEGAGRVLLGLEGVREWTPEGVTLRPAAPLVQVETVEEV

SEQ ID NO: 16420 - protein, 146 aa, Pisum sativum
MGFTDKQEALVNSSWELFKQNPGYSVLFYNIILKKAPATKGMFSFLKDSAGVVDSPKLQAHAEKVFGMVHDSAVQLRVSGEVVLGDATLGAIHIQKGVVDSHFVVVKEALLETIKEASGEKWSEELSTAWEVAYEGLASAIKKAMS

SEQ ID NO: 16421 - protein, 146 aa, Pisum sativum
MGFTEKQEALVNSSWELFKQNPSYSVLFYTIILKKAPAAKGMFSFLKDSAEVVDSPKLQAHAEKVFGMVHDSAIQLRASGEVVVGDATLGAIHIQKGVVDPHFVVVKEALLETIKEASGEKWSEELSTAWEVAYEGLASAIKKAMN

SEQ ID NO: 16422 - protein, 146 aa, Pisum sativum
MGFTEKQEALVNSSWELFKQNPSYSVLFYTIILKKAPAAKGMFSFLKDSAEVVDSPKLQAHAEKVFGMVHDSAIQLRASGEVVLGDATLGAIHIQKGVVDPHFVVVKEALLETIKEASGEKWSEELSTAWEVAYEGLASAIKKAMN

SEQ ID NO: 16423 - protein, 146 aa, Pisum sativum
MGFTEKQEALVNSSWELFKQNPSYSVLFYTIILKKAPAAKGMFSFLKDSAEVVDSPKLQAHAEKVFGMVHDSAIQLRASGEVVLGDVTLGAIHIQKGVIDPHFVVVKEALLDTIKEASGEKWSEELSTAWEIAYEGLASAIKKAMN

SEQ ID NO: 16424 - protein, 147 aa, Lotus japonicus
MGFTAQQEALVGSSYETFKKNLPTNSVLFYTVILEIAPTAKDMFSFLKESGPKHSPQLQAHAEKVFALTRDAATQLVAKGEVTLADASLGAVHVQKAVTDPHFVVVKEALLQTVKEAVGADEWSDDLSTAWEGAYDGLATAIKKAMG

SEQ ID NO: 16425 - protein, 146 aa, Phaseolus vulgaris
MGAFTEKQEALVNSSWEAFKGNIPQYSVVFYTSILEKAPAAKNLFSFLANGVDPTNPKLTAHAESLFGLVRDSAAQLRANGAVVADAALGSIHSQKALNDSQFLVVKEALLKTLKEAVGDKWTDELSTALELAYDEFAAGIKKAYA

SEQ ID NO: 16426 - protein, 146 aa, Vicia faba
MGFTQQQEALVNSSWESFKQNPSYSVLFYTIILEKAPAAKGMFSFLKDSAGVVDSPKLQAHAEQVFGMVRDSAIQLQATGEVVLKNGSLGAIHIQKGVVDPHFVVVKEALLKTIKEASGDKWSEELSIAWEVAYDGLATAIKKAMS

SEQ ID NO: 16427 - protein, 145 aa, Vigna unguiculata
MVAFSDKQEALVNGAYEAFKANIPKYSVVFYTTILEKAPAAKNLFSFLANGVDATNPKLTGHAEKLFGLVRDSAAQLRASGGVVADAALGAVHSQKAVNDAQFVVVKEALVKTLKEAVGDKWSDELGTAVELAYDELAAAIKKAY

SEQ ID NO: 16428 - protein, 145 aa, Vigna unguiculata
MVAFSDKQEGLVNGAYEAFKADIPKYSVVFYTTILEKAPAAKNLFSFLANGVDATNPKLTGHAEKLFGLVRDSAAQLRASGGVVADAALGAVHSQKAVNDAQFVVVKEALVKTLKEAVGDKWSDELGTAVELAYDELAAAIKKAY

SEQ ID NO: 16429 - protein, 159 aa, Medicago sativa
MSDEEHHFEPAADAGASKTYPQQAGTIRKNGYIVIKSRPCKVVEVSTSKTGKHGHAKCHFVAIDIFNGKKLEDIVPSSHNCDVPHVNRTDYQLIDISEDGFVSLLTDNGSTKDDLKLPTDDSLLTQIKDGFADGKDLVVSVMSAMGEEQICALKDIGPK

SEQ ID NO: 16430 - protein, 160 aa, Manihot esculenta
MSDEEHHFESKADAGASKTFPQQAGTIRKNGYIVIKNRPCKVMEVSTSKTGKHGHAKCHFVGIDIFNGKKLEDIVPSSHNCDVPHVNRTDYQLIDISEDGFVSLLTETGNTKDDLRLPTDENLLSQIKDGFAEGKDLVVSVMSAMGEERICSLKDIGPKN

SEQ ID NO: 16431 - protein, 160 aa, Solanum lycopersicum
MSDEEHHFESKADAGASKTYPQQAGTIRKNGYIVIKGRPCKVVEVSTSKTGKHGHAKCHFVAIDIFNAKKLEDIVPSSHNCDVPHVNRTDYQLIDISEDGFVSLLTENGNTKDDLRLPTDDTLLNQVKGGFEEGKDLVLSVMSAMGEEQICAVKDIGTKT

SEQ ID NO: 16432 - protein, 159 aa, Solanum lycopersicum
MSDEEHQFESKADAGASKTYPQQAGTIRKNGYIVIKGRPCKVVEVSTSKTGKHGHAKCHFVAIDIFTGKKLEDIVPSSHNCDVPHVNRTDYQLIDISEDGFVSLLTDNGNTKDDLRLPTDENLLSLIKDGFAEGKDLVVSVMSAMGEEQINALKDIGPK

SEQ ID NO: 16433 - protein, 160 aa, Solanum lycopersicum
MSDEEHHFESKADAGASKTFPQQAGTIRKNGYIVIKGRPCKVVEVSTSKTGKHGHAKCHFVAIDIFNGKKLEDIVPSSHNCDVPHVNRTDYQLIDISEDGFVSLLTESGNTKDDLRLPTDENLLKQVKDGFQEGKDLVVSVMSAMGEEQINAVKDVGTKN

SEQ ID NO: 16434 - protein, 159 aa, Solanum lycopersicum
MSDEEHHFESKADAGASKTYPQQAGTIRKGGHIVIKNRPCKVVEVSTSKTGKHGHAKCHFVAIDIFTGKKLEDIVPSSHNCDVPHVNRTDYQLIDISEDGFVSLLTENGNTKDDLRLPTDDTLLAQVKDGFAEGKDLVLSVMSAMGEEQICGIKDIGPK

SEQ ID NO: 16435 - protein, 160 aa, Dianthus caryophyllus
MSDDDHHFESSADAGASKTYPQQAGTIRKSGHIVIKNRPCKVVEVSTSKTGKHGHAKCHFVAIDIFNGKKLEDIVPSSHNCDVPHVNRVDYQLLDITEDGFVSLLTDSGDTKDDLKLPADEALVKQMKEGFEAGKDLILSVMCAMGEEQICAVKDVSGGK

SEQ ID NO: 16436 - protein, 159 aa, Senecio vernalis
MSDEEHQFESKADAGASKTYPQQAGTIRKGGHIVIKNRACKVVEVSTSKTGKHGHAKCHFVAIDIFNGKKLEDIVPSSHNCDVPHVNRTDYQLIDISEDGFVSLLTENGNTKDDLKLPTDDALLTQIKDGFGEGKDLVVSVMSAMGEEQICALKDIGPK

SEQ ID NO: 16437 - protein, 443 aa, Klebsiella oxytoca
MSGEQVDILVVDDDISHCTILQALLRGWGYRVALANNGLQALEKVREKVFDLVLCDIRMAEMDGIETLKEIKTFNPSIPVLIMTAYSSVDTAVEALKSGALDYLIKPLDFDKLQLTLSEALAHTRLSESPVTETPAAQFGMVGDSPAMRALLNNITLVAPSDATVLIHGESGTGKELVARALHASSARSRRPLVILNCAALNESLLESELFGHEKGAFTGADKRREGRFVEADGGTLFLDEIGDISPLMQVRLLRAIQEREVQRVGSNQTLSVDVRLIAATHRDLAEEVSAGRFRQDLYYRLNVVTIDMPPLRHRREDIPPLARYFLQRYAERNRKAVQGFTPQAMDLLIHYAWPGNIRELENAVERAVVLLTGEYISERELPLAITGTPVADAPHGDDSIQPLVEVEKEAILAALERTGGNKTEAARRLGITRKTLLAKLSR

SEQ ID NO: 16438 - protein, 113 aa, Deschampsia antarctica
MALAKAKEIAASSPVVVFSKSYCPYCTRVKQLFTKLGASFKAIELDVEGDGADMQSALAQWTGQKTVPNVFINGKHIGGCDDTLALEKSGKLVPLLREAGAISGSASKETMTA

SEQ ID NO: 16439 - protein, 574 aa, Salmonella enterica subsp. enterica serovar Typhimurium
MEMLSGAEMVVRSLIDQGVKQVFGYPGGAVLDIYDALHTVGGIDHVLVRHEQAAVHMADGLARATGDVGVVLVTSGPGATNAITGIATAYMDSIPLVILSGQVATSLIGYDAFQECDMVGISRPVVKHSFLVKQTEDIPLVLKKAFWLAASGRPGPVVVDLPKDILNPAKKMPYAWPETVSMRSYNPTTSGHKGQIKRALQTLASAKKPVVYVGGGAISAACYAPLRHIIETFNLPVVSSLMGLGAFPATHRQSLGMLGMHGTYEANMTMHNADVIFAVGVRFDDRTTNNLAKYCPNATVLHIDIDPTSISKTVNADIPVVGDARLVLEQMLELLAQDAPSQPQDDIRDWWQQIESWRARQCLKYDAESESIKPQAVIETLWRLTKGDAYVTSDVGQHQMFAALYYPFDKPRRWINSGGLGTMGFGLPAALGVKMALPKEMVVCVTGDGSIQMNIQELSTALQYELPVLVLNLNNRYLGMVKQWQDMIYSGRHSQSYMQSLPDFVRLAEAYGHVGLQINRPDELESKLSEALEHVRNNRLVFVDVTVDGSEHVYPMQIRGGGMDEMWLSKTERT

SEQ ID NO: 16440 - protein, 138 aa, Pyrobaculum aerophilum
MVLKWVMSTKYVEAGELKEGSYVVIDGEPCRVVEIEKSKTGKHGSAKARIVAVGVFDGGKRTLSLPVDAQVEVPIIEKFTAQILSVSGDVIQLMDMRDYKTIEVPMKYVEEEAKGRLAPGAEVEVWQILDRYKIIRVK

SEQ ID NO: 16441 - protein, 371 aa, Amycolatopsis mediterranei
MRIAVPREIKKHEYRVALTPAGVHELAGRGHDVFVETGAGVGSSITDEEYVAAGAKILTTADETWAEGELILKVKEPVAEEYGRLRRDQVLFTYLHIAADRPLTDALLAAGTTAIAYETVQTANGALPLLAPMSEVAGRLAPQVGAFSLMKPSGGRGVLPGGIPGVHPARVVVIGGGVAGLNAARVALGLGSDVEILDTNVDRLRQIDNDFGGRIRTVTSTRFSVEEAVLQADLVIGAVLVPGAKAPKLVSNDLVARMKPGSVLVDIAIDQGGCFADSHPTTHDDPTYTVHESVFYCVANMPGAVPRTSTYGLTNVTLPYAVQLAEHGWKAALQADAALAKGLNTHDGALTNGPVAVAHDLPHTPLDTVLA

SEQ ID NO: 16442 - protein, 295 aa, Anabaena sp.
DVPVNLYRPNAPFIGKVISNEPLVKEGGIGIVQHIKFDLTGGNLKYIEGQSIGIIPPGVDKNGKPEKLRLYSIASTRHGDDVDDKTISLCVRQLEYKHPESGETVYGVCSTYLTHIEPGSEVKITGPVGKEMLLPDDPEANVIMLAGGTGIAPMRTYLWRMFKDAERAANPEYQFKGFSWLVFGVPTTPNILYKEELEEIQQKYPDNFRLTYAISREQKNPQGGRMYIQDRVAEHADQLWQLIKNQKTHTYICGLRGMEEGIDAALSAAAAKEGVTWSDYQKDLKKAGRWHVETY

SEQ ID NO: 16443 - protein, 376 aa, Thermotoga maritima
MGSDKIHHHHHHMITTTIFPGRYVQGAGAINILEEELSRFGERAFVVIDDFVDKNVLGENFFSSFTKVRVNKQIFGGECSDEEIERLSGLVEEETDVVVGIGGGKTLDTAKAVAYKLKKPVVIVPTIASTDAPCSALSVIYTPNGEFKRYLFLPRNPDVVLVDTEIVAKAPARFLVAGMGDALATWFEAESCKQKYAPNMTGRLGSMTAYALARLCYETLLEYGVLAKRSVEEKSVTPALEKIVEANTLLSGLGFESGGLAAAHAIHNGLTVLENTHKYLHGEKVAIGVLASLFLTDKPRKMIEEVYSFCEEVGLPTTLAEIGLDGVSDEDLMKVAEKACDKNETIHNEPQPVTSKDVFFALKAADRYGRMRKNLT

SEQ ID NO: 16444 - protein, 295 aa, Anabaena sp.
DVPVNLYRPNAPFIGKVISNEPLVKEGGIGIVQHIKFDLTGGNLKYIEGQSIGIIPPGVDKNGKPEKLRDYSIASTRHGDDVDDKTISLCVRQLEYKHPESGETVYGVCSTYLTHIEPGSEVKITGPVGKEMLLPDDPEANVIMLATGTGIAPMRTYLWRMFKDAERAANPEYQFKGFSWLVFGVPTTPNILYKEELEEIQQKYPDNFRLTYAISREQKNPQGGRMYIQDRVAEHADQLWQLIKNQKTHTYICGLRGMEEGIDAALSAAAAKEGVTWSDYQKDLKKAGRWHVETY

SEQ ID NO: 16445 - protein, 295 aa, Anabaena sp.
DVPVNLYRPNAPFIGKVISNEPLVKEGGIGIVQHIKFDLTGGNLKYIEGQSIGIIPPGVDKNGKPEKDRDYSIASTRHGDDVDDKTISLCVRQLEYKHPESGETVYGVCSTYLTHIEPGSEVKITGPVGKEMLLPDDPEANVIMLATGTGIAPMRTYLWRMFKDAERAANPEYQFKGFSWLVFGVPTTPNILYKEELEEIQQKYPDNFRLTYAISREQKNPQGGRMYIQDRVAEHADQLWQLIKNQKTHTYICGLRGMEEGIDAALSAAAAKEGVTWSDYQKDLKKAGRWHVETY

SEQ ID NO: 16446 - protein, 194 aa, Hordeum vulgare subsp. vulgare
MMLSSAYSTPAADELGGPPPLPPPPGADVSVIVGALTGVLLGLFLFLIYAKHCRQRGRGGARGAAGGLGLGFRASSTCDRCRSGVSLSVVDALPVVRFGDMGGAAAAAQPECAVCLGTFDPAADELLRVLPKCRHAFHADCVDTWLEAHSTCPVCRRRVGKEDAFAVIPELEAADADWYPAREAEMQIVVRRPA

SEQ ID NO: 16447 - protein, 353 aa, Arabidopsis thaliana
MELSIGNPAVKYSAIVDTGSDLIWTQCKPCTECFDQPTPIFDPEKSSSYSKVGCSSGLCNALPRSNCNEDKDACEYLYTYGDYSSTRGLLATETFTFEDENSISGIGFGCGVENEGDGFSQGSGLVGLGRGPLSLISQLKETKFSYCLTSIEDSEASSSLFIGSLASGIVNKTGASLDGEVTKTMSLLRNPDQPSFYYLELQGITVGAKRLSVEKSTFELAEDGTGGMIIDSGTTITYLEETAFKVLKEEFTSRMSLPVDDSGSTGLDLCFKLPDAAKNIAVPKMIFHFKGADLELPGENYMVADSSTGVLCLAMGSSNGMSIFGNVQQQNFNVLHDLEKETVSFVPTECGKL

SEQ ID NO: 16448 - protein, 495 aa, Arabidopsis thaliana
MANSKYEYVKSFELEDEVMLPNLMVVRIDGRDFSRFSQVHEFEKPNDETALNLMNSCSAAVLEEFPDIIFAYGYSDEYSFVFKKTSRFYQRRASKILSLVASFFAAVYVTKWKEFFPQRKLLYAPSFSSKVVSCASAEVLQAYLAWRQQDCHANNQYDTCFWMLVKSGKSVSETQEILKDTQKQQKNELLFQKFGINYKTLPELFRQGSCLFKKKVEETVKHDENGNPVKRLRRKAVFVHSENIAGRSFWNEQPSLYNDLGHFTKDIGKIEPDFIRSFQFENKLLPLTWVVVRIDGCHFHRFSDVHEFEKPNDEQALKLMNSCAVAVLEEFEDIHFAYGVSDEYSFVLKKESELYKRQSSKIISAVASFFTSTYVLQWGEFFPHKELKYPPSFDGRAVCYPTYNILLDYLAWRQVDCHINNQYNTCFWMLVKSGKNKTQSQDYLKGTQTREKNELLSRQFGIEYNSLPVIFRMGSSVFRLKVSIALTLNLCIERL

SEQ ID NO: 16449 - protein, 678 aa, Crypthecodinium cohnii
GTSVDVLSFGKLSAWDTAPLFAMARLHWAGIFVLALACVAVAKDDEKKIDGPVIGIDLGTTYSCVGIYKNGRVEIIPNDQGNRITPSYVAFTEDERLIGEAAKNQATINPAQTLFDVKRLIGRRFKDSTVQKDIKLLPFDIVDKNGKPQISVKVKGETKQMAPEEVSSMVLTKMKETAENYLGKEVKHAVITVPAYFNDQQRQSTKDAGVIAGLNVLRIINEPTAAAIAYGLDKKAEKNILVYDLGGGTFDVSLLTIDNGVFEVVATNGDTHLGGEDFDQRVMQHFMKVFQKKHSKDMSKDKRAIQKLRREVEKAKRALSSTHQARLEIEALFDGVDFSETLTRARFEEINNDLFKNTLGPVKQVIEDSGLKKTQIDEIVLVGGSTRIPKVQQLIKDFFNGKEPNRGINPDEAVAYGAAVQAGILSGEGGQDLLLLDVTPLTLGIETVGGVMTKLINRNTVIPTKKSQTFSTYQDNQPAVNIQVFEGERPMTKDNHLLGKFELGGIPPAPRGQPQIEVTFEIDSNGILNVGAEDKATGKGEKITITNDKGRLTEEQIEKMIKEAEQFADEDKKVKERVDAKNSFDGYIHSMRSATEGSGDNKGLSEKMDEDEKEKILEALKDGQSWLDSNPEGDAEDIKEKHKEVEGICAPIVSKYYGVGGGGAGAADEDEDEAHDEL

SEQ ID NO: 16450 - protein, 199 aa, Pinus pinaster
DWVVVQQMRDYVEKYMKTGGQYWEDSNVAVVNILKYAESLTLAGDGMDAWVFDADETLLSNIPYYENYEYGGLAFDSKTFDAWVLEMKAPALPSSLLLYDRLSTHGFQIFTLTGRDEAQRNISVQNLVEAGYKGWAGLILREESDQGTSASVYKPKKRGELVKKGYRLWGRVGDQWSDLSGPYEASRSFKLPNPMYYIG

SEQ ID NO: 16451 - protein, 605 aa, Mucor racemosus
MADFTDSLIKNIGVHSSSPVMTSVNMGQLGEKLRQARTTTLASLSQALSKKPEAAAAAATAPNAVNESTTTPTTMQLPASEKATSQLEINVVEARNLTIADARKADTYCIVHYEGNTTSTLDKVDDGILPSTPLVIKSQVASGAFKAFEIMMSASSPKWMHRVNFDVTAGNKEITVFVYDRGNKLPNGEDRFLGMSSIVPNLVNKKTVELIFPLHGRPDDDQEVTGDVRLQVTFIDPKKANLKPEDFRIVRMIGQGSVGKVYEVIKRDSGRTYAMKVLSKRLLLAENEVDTAFNERNVLVQSLSSPFIANLKYSFQTTNHLFLVMDYFPGGELFDFLERERCLSEKRCQFFAAEIVCAFDNIHARNIVYRNLKPESILLDAHGHIALTDFGLCKQLKNKMDLIQGVPQVITQEYLAPEMVMQKPYGMAADWWSLGVLMFELLTGSPPFHSVEQGELFRQILEAPIKFPAGGCITEEAKDFICQLLERDPAKRLGSHGDVAQVKAHPFFKDLNWDVVYKKQMQLPFVPEVEEQLREEAIAAAAAISIPVTNSKTESTNANVMPVADQSKFKGFSYIREDVMAKKGEHRLGVNPEDEDPEVDFWFRQ

SEQ ID NO: 16452 - protein, 118 aa, Arabidopsis thaliana
NRKFKRTEQQLAAQRRIRRPFSVTEVEALVQAVEKLGTGRWRDVKVRAFEDADHRTYVDLKDKWKTLVHTARISPQQRRGEPVPQELLDRVLKAHAYWSQHLMHQLQTEPPSTQVEAL

SEQ ID NO: 16453 - protein, 476 aa, Arabidopsis thaliana
MSLMIRSSYVSHITLFQPRNSKPSSFTNQISFLSSSNNNPFLNLVYKRNLTMQSVSKMTVKSSLIDPDGGELVELIVPETEIGVKKAESETMPKVKLNQIDLEWVHVISEGWASPLKGFMREDEYLQSLHFNSLRLKNGTFVNMSLPIVLAIDDDTKEQIGSSENVALVCPQGDIIGSLRSVEIYKHNKEERIARTWGTTSPGLPYVEEYITPSGNWLIGGDLEVFEPIKYNDGLDHYRLSPKQLREEFDNRQADAVFAFQLRNPVHNGHALLMNDTRKRLLEMGYKNPVLLLHPLGGFTKADDVPLDVRMEQHSKVLEDGVLDPKTTIVSIFPSPMHYAGPTEVQWHAKARINAGANFYIVGRDPAGMGHPTEKRDLYDPDHGKRVLSMAPGLEKLNILPFRVAAYDTIEKKMAFFDPSRAKEFLFISGTKMRTYARTGENPPDGFMCPSGRNVLVKYYESLQESEAKQQAVVSA

SEQ ID NO: 16454 - protein, 547 aa, Acinetobacter baumannii
MYLYTDFDQQLINQRVAQFRDQTERYLAGKLSEDEYRPLRLQNGLYVQRYAPMLRIAVPYGLMNSKQLRKIAEVSTQYDRGYAHVSTRQNIQLNWPALEDVPEILAELATVQMHAIQTSGNCIRNTTTDQYAGVVAGEIADPRPTCELIRQWSTFHPEFAFLPRKFKIAVSALEEKDRAATAFHDIGVYIVRNEAGEMGYKIMVGGGLGRTPIIGSVIREFLPREDLIAYLEAVLRVYNLHGRRDNKYKARIKILVKALTPEVFAQKVEAEFEHTRETLKIQPEILKKLDEEFTPFDYQDLEDEDFTALFAEHPKFKQWFNINTHAHKVKGYRIVTISLKRAGIAPGDMTTEEMNFIADLADKYTFGELRTTHEQNIALADVPQKDLFDVWQALEQHNMARAHIGFITDIISCPGGDFCSLANAKSIPIAEAITRRFEDLDKVYDLGHLDLNISGCMNACGHHHVGNIGILGVDKKGAEFYQITLGGNSDHDASIGDILGPSFAAEAVPDVIEEVLNTYLDLRTEGERFVDTYRRVGIHAICLSRWL

SEQ ID NO: 16455 - protein, 139 aa, Arabidopsis lyrata subsp. petraea
STGKRSEREEDTDPQGSRGISDDEDGDNSRKKLRLSKDQSVILEETFKDHSTLNPKQKQALAKQLGLRARQVEVWFQNRRARTKLKQTEVDCEFLRRCCENLTEENRRLQKEVTELRALKLSPQFYMHMSPPTTLTMCP

SEQ ID NO: 16456 - protein, 589 aa, Cucumis melo
MLNFLSLRRSLHYFRHRRLQISPTAAISKPPLNSPRPFCTVSPSPSSSFDSELRKYLGYGALVIFCGAATYYSFPFPENAKHKKAQIFRYAPLPEDLHTVSNWSGTHEVLTRVFHQPEDLEQLEQVVKQANEKKARVRPVGSGLSPNGIGLSRLGMVNMALMDKVLEVDKEKKRVRVQAGIRVQQLVDGIKEYGLTLQNFASIREQQIGGIIQVGAHGTGAKLPPIDEQVIAMKLVTPAKGTIEISNDKDPELFFLARCGLGGLGVVAEVTLQCVERQELVEHTYISNMKDIKKNHKKLLADNKHVKYLYIPYTDAIVVVTCNPISKWRGPPKFKPKYTSEEAIQHVRDLYVESLKKYSASEERDINEFSFTELRDKLLALDPLNKEHVMKVNQAEAEFWRKSEGYKVGWSDEILGFDCGGQQWVSETCFPAGTLAKPNMKDIEYIEELKQLIEKENIPAPAPLEQRWTGRSKSPMSPASSTAEDDIFSWVGIIMYLPTSDARQRKEITEEFFHYRHLTQTLLWDKFSAFEHWAKIEVPKDKDELAALQARLRKRFPVDESNKARRALDPNKILSNNKLEKLFSSLDMV

SEQ ID NO: 16457 - protein, 317 aa, Oryza sativa Japonica Group
MASATNSSLSLMLLVAAAMASVASAQLSATFYDTSCPNALSTIKSVITAAVNSEARMGASLLRLHFHDCFVQGCDASVLLSGQEQNAGPNVGSLRGFSVIDNAKARVEAICNQTVSCADILAVAARDSVVALGGPSWTVLLGRRDSTTASEALANTDLPAPSSSLAELIGNFSRKGLDATDMVALSGAHTIGQAQCQNFRDRIYNETNIDSAFATQRQANCPRPTGSGDSNLAPVDTTTPNAFDNAYYSNLLSNKGLLHSDQVLFNGGSADNTVRNFASNAAAFSSAFTTAMVKMGNISPLTGTQGQIRLSCSKVNS

SEQ ID NO: 16458 - protein, 778 aa, Debaryomyces hansenii
MSNPNSVSTDNRVMNHNESNDSQNEDQTDSLLSTSSSVAKRNYKKIYGSTDEENLQSIELNNDVLELPKVVRESVPLEDDPNIPVMTFRYFILSTIFIVPGAFLDTMNSYRTTSAVYSIFFVQIVSHWAGKWMAKTLPKKNVNVCGFEFNLNPGPWSIKETAMITITANSGATGNLATNAISLAELHFNEKVNAAIAILFMWAIVFIGYSYAAIAKCFVLYDPQFTWPQALMQTTLLQSQARSDRDSKHGSMQMKVFFYVLLAVTIWEFLPEFAFPLTSSLAILCWIAPYNKTVNFIGSGMGGMGVLNFSLDWANITSSIMLYPYWIQVIQFLGFVLGAWIMIPLVKWGGVTSFKHGLMSNSLFLSNGTRYPTDELLTDDLRLNMTAYKYYGPVNLGAQRAWNMFFDYAAYISGIVWVVLFGYDQMKNSLNVLRNTYTTKDQNGGFTSIHLQYTDRLNKLQSKYEEVPMFWYLILFIISFSTLMFIFLSGQMFLPWWCCIVALALGSIIVTPLSWLYALSNFQLAIGTFNELFYGYMVQNMKSVHPVSAVVFGAISGSAWYRAQYHLLCMRLGFYIHLPPKAVFFSQIYGEIIGVPFNYIALRWVLDTKREYLDGTKEDPLHQWTGQTITSYHTNTINYVILGPKRLFYHYPLLPYGFLLGAIAPVALYILHRKFPNSRLKFRLWNTTVFFSTLSTFYGNLSTGYASKFIGGTVTMYWAYNYRHSLWKSYNYILAAAFDTGYNFAVLLIFLLFSFGRTIRMPPWWGNNEQSVERCFAL

SEQ ID NO: 16459 - protein, 1116 aa, Debaryomyces hansenii
MTIIIGTLFLPYTVKFDVGGRVDYDIDITQKDATVPNIQNDARNQQRKSVSAGMGTGISQSSILPSLSTSQQHTPRSGSPTFNDNASIMTGSDTDQVNSAQEFFHSHKRTPHDSQNILTDNLYDKLGSKLIQPRSRYSNVAFQSSVVDPKKKSEDAGLPGLKINRSSNNLTSLNNSSFSSYSNMIGLNPTTNSSTMSVPSTRQRTPISRQGFTLHSNSSSNSIPTRIKEVEEEEARESDYASDKSVDEDHIENFNDLVHGRTESKLTPFGGFSKPDLEDGILNQENIFEDAPWKVVLAGKGNVSLTKAVQIAVDAGGINDHKWVGTLAMPSDAVPNSVINGISDSLSENYDCEAVFPNDITFQGHYKSFCKQILWPTLHYQIPDDPKSKAFEDHSWGHYKLLNQLVADKIVDLYKKENGSSDPNDPNNMIWIHDYHLLLVPKMIREKLPEAKIGLFLHVSFPSSEVFRCFAQRKAILSGMLGANCITFQTDEYVRHFWQTCNRLLLADANEFGITYEGKFTMINTIPVGVDAKSLEGYLGSNEVNEWRNMIRERWSNKKLIVSRDKLEKLRGIKQKLLAYEKFLHSNPEYVDTTVLIQICPGTTQDSSYESEIMSIVGRINALTGDISFSQPVVLLQQDIGFEQYVALQCEAEVFVVASMREGLNLTCHEYIIATTEKKSPLMLSEFTGSSPLLNCNGEGAILINPWDLKRFAELFKVSLDMGQDEKVKRWTNCYKTICNHDSRNWVENCLQGINEGWDYDHSRNLNKLIPFTRDIFDSFYSRNDGGKRLFFLNLDTPSAIASTNDPSSKFHKLTSKSAVAAAGKNGAFSESSRFASLLNELLSDPLNHVYLTSYLKRSDLDTLYNRSPNLGLVAENGGYIKLTESDKWISIIDEVELEGWMPQVSQLIASKVERLPGSHMEVEDCTIRFHPGKSFENDRERSLSILGDCIQHVNELFSDQDGVHATLIRNVLIVQKNKLSMKALKFIISYYNQKKQGIKSESLIEEYQVKQVPGSAPSTPISETASLPPIKSPTSKIQKNLVTALFLSGGSTLIDEPGYEYANGLERSGEIPEVITVTVLGADSRTSATYCVSGKNELLGILSNPVSEPYKSHTA

SEQ ID NO: 16460 - protein, 662 aa, Debaryomyces hansenii
MSGPRKIQESTGSSSRRLSIAKLARSPISESPITSPSIRNGIHSHSFTANSPFLKEDSSRNYNECIESSSSKSSSKYNGSEVFHSGNEVADIPTSNGVETDFSTGMDDPKIIKQVHKHLKDQKVNALQMEGGDITRDLYKIADQEYRPKAPKRSRSLSSSEMETRRRGSTASSLNVPGGFRRQFIMNNTLRTRNPNFLTKNFVEFLSIYGHFAGEDLEDQNDLIACHYKAHIPNFDDSIDEESLLLPNQESVKINAKGTATDKKAYFLLLKAFIGTGVLFLPKAFSNGGLMFSSLVLAFFGLLSFWCYLILIHAKLATKVSSFGDIGLKLYGKWLQQLILTSIIISQIGFVAAYIVFTSENLKAFVGSVTSINTSDIHIMYFILIQLIIFLPLSLIRDITKLSLSALLANIFILIGLVTILYYSFYELLFLNHGAFGKDIEFFFNKESFSLFIGVSIFAFEGIGLIIPIQESMIYPNNFPRVLFSVIATISTIFIGIGSLGYLTFGKYVKTVIILNLPQDSPFVIMVQLLYAFAILLSTPLQLFPAIRLVESKLFTKTGKYSLRVKWLKNFFRFGFVLLTAVVALVGGQNLDRFVSFVGCFACIPLVYMYPPILHLKSCCKYSDTFNQAENRKRFWLGCLDCILVVIGGVAMIYTTYQIVVG

SEQ ID NO: 16461 - protein, 155 aa, Debaryomyces hansenii
MADEEHTFETADAGAALTFPIQCSALRKNGHVVIKSRPCKIVDMSTSKTGKHGHAKVHLVAIDIFTGKKLEDLSPSTHNMEVPNVGRREFQLLDIDDGFLSLMTNDGDTKDDVKVPEGELGDKIQSEFDEGKDLLVTIVSAMGEEAAISFKEAPK

SEQ ID NO: 16462 - protein, 794 aa, Debaryomyces hansenii
MASEEELINLFSKVGFNDKKSKEVCKNKKVSQSLAEIINESKVEETDEKKLSLLHALAVESKGGDVPRRELITKAIIDGRLKTNLQVTEAFKYVKENPETANNETMEEKSGVGIELSDSDVEREIKKYMEAHKSDIETKRYSIVPSLLGDVKKVPELKWAKPNLFKPIIDSLVLEMIGPKDERDVVKKEKKKSTKKQVETKKEAQIERSMFSEGFLGDLHKPGENPQKYPELMKEHLEFTKRKVFTRFPPEPNGYLHIGHSKAIMVNFGYAKYNGGNCYLRFDDTNPEAEEEVYFKSIEKMIDWLGYEPWKVTHSSDYFDELYDLAERLISLGKGYVCHCTAEEVKAQRGLKEDGTLGGERFACKHRSRSVEDSMAEFRKMKNGEYKSGEATLRMKQDLESPSPQMWDLVAYRVLNKPHHRTGDKWKIYPTYDFTHCLVDSFENISHSLCTTEFRLSRESYEWLCDELHVYRPAQREYGRLNITGTILSKRKIAKLVNEGIVRGWDDPRLYTLEAIRRRGVPPGAILSFINTLGVTTSTTNIQAVRLDSAIRAFLDQTTPRLMMILDPVEVEVENLPEGYEEMVEVPYKPGDTVKFGTRKVPFTKRFYIDRSDYRDSTSDDYFRLAPGQPVGLIRVPFNVSVKDVVKDDAGKVTKIIAHYDNDGTFKKPKTYIQWVPKSASSPIKVNEVRIQNQLFNSENPSAHPDGFLNDLNEQSEEIYRDAIVESAFTEIKEKSPLNIPIEGSEFNIKEKPSVETVRFQALRVGYFCMDKDSSADKLVLNRIVTLKEDSSKN

SEQ ID NO: 16463 - protein, 581 aa, Debaryomyces hansenii
MNSSHYQVSTSIEDVWTIINSLYMIYCTSLLPLAMIGIALFYSGLTQRRSSLTMLALPVFLTPFILIEWFIWGYSLCYSSSSNHFIGDLNFAVLRHMRDSVTNNYNTPRGEIWSINHFLFNGFMKVICVCLTFPGCIAERGRILPMVVFLFFWSVIIYNPVTYWFWNREGWLSVELNSLPVLDFAGGNCVHIVSGFTALAYSYILGPRNPKILYDYRSTNTGYIIIGTFFMICGWCGFVAGCDYKFTIECLYIILNVLLCASTSGIIWMLIDYYFSAIPLEGAPIESALSNHRDKIHVLRISSTNIRTIPSVTGASINQHYHDTKSNFVQRRKISIISFSSGIVTGLAVITPGGGYVSSPTDFWKSFVFGVLGGIIVNLSTRLKYFVQIDDALDIFAIHGVAGILGSLLTGIFANQRYNSKGGWVKGHWIQLGYQLLGCTVTAAYVFVLSCVFLYCIDLIPGLHLRMDKTFNQRMREERERVQAESTESPTSVDIEEQFVPHNTNEITYSEKLELLGTDCYEFNGEYFMDFMEFIKVIRPQDYPFDQFTEETETQYDSVNAIGSDYQLHPEGVNHLARKGE

SEQ ID NO: 16464 - protein, 865 aa, Debaryomyces hansenii
MHRPDNSSSRTHVSPSRSNTRSDPNMRRATSQSPSIRHISQRKVNTSERKPLLDRANSDMVDYQAAGNIPPSRSLLSSDIYRDDVESIVYNNAASDASCNEGHKRSSLTHAVTNEDMQSTRSEYLMGMNLNRENLSWKVVLPYYLPFLSWIHHYCPSFFVGDLVAGLSLVFFQLPLSLSYATSLAHVPVICGLYSLAISPLVYMVFGSVPQMIVGPEAAISLIVGQAVEPLLHHYKKKHSEKLDPVELVVAITFISGASLLGFGLGRFGFLDNVLSASLLKGFISGVGIVMAINSTIVMLGLTELLQEITEDPTKMDIHSPFDKMRFLFQHYKQFHILTFKISIIAFIVILLCRVFKNFMSKKNSNLSKKCVYLPEILFVVIVSTSLCAVNRWDEKGIEIIGKVTDISSSQILHNPVAVERWYLIKKLSTPGFLCAMLGFFESTTASKSLGSRYDLPISSNRELVALGAMNILVSIFGGLPAFGGYGRSKINAISAKTTMSGAIMGLCTIFTISYLLDALYYVPKCILSAITAVIGISLIDEAPHELWFHWKSKGYNELITFFITVMTTLFFSMEAGIAVGLVYSLIRVIKHSASSRIQILGRISGSDTFVNADVSHIPPNIGLLSDDVKHSHLPLNMFTDNNFTHLNLKVIEEIEGCLIVKIPEPLTFTNTSDLRGRLKRVEMYGSTKAHPAQRRTRDVTMTKYVIFDLNGMTGLDSSAAQILKELIKRYTNRNIYSFFVRVNDEEKLRYRLENTGITKLLAEVLESIKNNDDQNTFMFNKIKDNRKVSGLQRENSDILHPDMDEHMDIYNLTENSHTPYFEHISDVLKVIDYYEINDQLQSRNEFLDVDQAERRSSLPSVDIA

SEQ ID NO: 16465 - protein, 155 aa, Debaryomyces hansenii
MFRRALLNTRFAQPVIRTPFIQQGRFISTEIKDAIDRAVGSSKVVLFMKGTPEFPQCGFSRATIQMLGQQGVDPEKFAAYNVLEDPELRDGIKEYSEWPTIPQLYVNKEFVGGCDIVMSMAQSGELSDLLEANECLIPEEEGETTSANIQPNERS

SEQ ID NO: 16466 - protein, 66 aa, Staphylococcus aureus
MKQGTVKWFNAEKGFGFIEVEGENDVLVHFSAINQDGYKSLEEGQAVEFEVVEGDRGPQAANVVKL

SEQ ID NO: 16467 - protein, 363 aa, Triticum aestivum
MAAQLTAALPSYSPATTKAAAGGSSPSSHFLAYPSRPRNVRNGVRAQVSTTEPTAEPAPAAPAKPVKISKKQDEGVVTNKYRPKEPYVGRCLLNTRLTGDNAPGETWHMVFSTEGEVPYREGQSIGVIADGEDKNGKPHKLRLYSIASSALGDFGDSKTVSLCVKRLVYTNDAGEVVKGVCSNFLCDLKPGSEVKITGPVGKKMLMPKDPNATIIMLATGTGIAPFRSFLWKMFFEEHEDYKFNGLAWLFLGVPTSDTLLYKEEFEKMVEIGGENFRLDFAVSREQTNAAGEKMYIQTRMAEYKEELWEMLKKDNTYVYMCGLKGMEKGIDDIMVDLAAKDGIDWIDYKKQLKKAEQWNVEVY

SEQ ID NO: 16468 - protein, 121 aa, Nicotiana glutinosa
PVNQKSKRSELSQRRIRRPFSVAEVEALVEAVEHLGTGRWRDVKMRAFDNADHRTYVDLKDKWKTLVHTASIAPQQRRGEPVPQDLLDRVLAAHAYWSQQQGKQHVEPLKILDAKAQKVGA

SEQ ID NO: 16469 - protein, 350 aa, Emericella nidulans
MKSADRFSPVKMEDAFANSLPTTPSLEVPVLTVSPADTSLRTKNVVAQTKPEEKKPAKKRKSWGQELPVPKTNLPPRKRAKTEDEKEQRRIERVLRNRAAAQTSRERKRLEMEKLESEKIDMEQQNQFLLQRLAQMEAENNRLSQQVAQLSAEVRGSRHSTPTSSSPASVSPTLTPTLFKQEGDEVPLDRIPFPTPSVTDYSPTLKPSSLAESPDLTQHPAVSVGGLEGDESALTLFDLGASIKHEPTHDLTAPLSDDDFRRLFNGDSSLESDSSLLEDGFAFDVLDSGDLSAFPFDSMVDFDTEPVTLEDLEQTNGLSDSASCKAASLQPSHGASTSRCDGQGIAAGSA

SEQ ID NO: 16470 - protein, 195 aa, Thellungiella halophila
MTKMGFKPDSNPSPNPNESNAKEIRYRGVRKRPWGRYAAEIRDPGKKTRVWLGTFDTAQQAARAYDAAAREFRGAKAKTNFPTFLELNAAKDGGFARSPSQSSTVDSVSPTSARLVTPPQLELSLGGGGGGACYQIPVARRPVYFYNMTTFPAAAAATCGVQSESDSSSVVDFECGAEKKYRPLDLDLNLAPPAE

SEQ ID NO: 16471 - protein, 378 aa, Thellungiella halophila
MLSTLMKLLSACLWPSSSGKSSDSTGKQDGLLWYKDSGQHLLGEFSMAVVQANNLLEDQSQVESGPLSTLDSGPFGTFIGIYDGHGGPETSRFVNDHLFQHLKRFAAEHASMSVDVIRKAYEATEEGFLGVVTKQWPVKPQIAAVGSCCLVGVICGGRLYIANVGDSRAVLGRAMNATGEVIALQLSAEHNVSIESVRQEMRSLHPDDSHIVVLKHNVWRVKGLIQISRSIGDIYLKKAEFNKEPLYTKYRLREPIKRPILSGEPSITEHEIQPQDQFLIFASDGLWEQMSNQEAVDIVQNHPRNGIARRLVKMALQAAAKKREMRYSDLKKIERGVRRHFHDDITVVVIFLDTNVVSSAKGPSLSIRGGGMTFPKKL

SEQ ID NO: 16472 - protein, 557 aa, Acetobacter pasteurianus
MTYTVGMYLAERLVQIGLKHHFAVGGDYNLVLLDQLLLNKDMKQIYCCNELNCGFSAEGYARSNGAAAAVVTFSVGAISAMNALGGAYAENLPVILISGAPNSNDQGTGHILHHTIGKTDYSYQLEMARQVTCAAESITDAHSAPAKIDHVIRTALRERKPAYLDIACNIASEPCVRPGPVSSLLSEPEIDHTSLKAAVDATVALLKNRPAPVMLLGSKLRAANALAATETLADKLQCAVTIMAAAKGFFPEDHAGFRGLYWGEVSNPGVQELVETSDALLCIAPVFNDYSTVGWSGMPKGPNVILAEPDRVTVDGRAYDGFTLRAFLQALAEKAPARPASAQKSSVPTCSLTATSDEAGLTNDEIVRHINALLTSNTTLVAETGDSWFNAMRMTLAGARVELEMQWGHIGWSVPSAFGNAMGSQDRQHVVMVGDGSFQLTAQEVAQMVRYELPVIIFLINNRGYVIEIAIHDGPYNYIKNWDYAGLMEVFNAGEGHGLGLKATTPKELTEAIARAKANTRGPTLIECQIDRTDCTDMLVQWGRKVASTNARKTTLA

SEQ ID NO: 16473 - protein, 244 aa, Vitis vinifera
MGRGRVELKRIENKINRQVTFAKRRNGLLKKAYELSVLCDAEVALIIFSTRGKLYEFCSSSSMLKTLERYQKCSYGAVEVSRPSKELEQSSYREYLKLKSKFEALQRTQRNLLGEDLGPLNTKELEQLERQLETSLKQVRSTKTQFMLDQLSDLQNKEQVLVESNKALTRKLDEISVKNHLQLSWESGEQSMPYGHQQAQSQGFFQPLECNPTLQIGYNPAGSSQLSAPSNAQNVNGFIPGWML

SEQ ID NO: 16474 - protein, 690 aa, Cryptococcus neoformans var. grubii
MRKAMANDGQGTTESTEAAMENSQTNLSHTSRTTGPKGTLRVKVISARGLAVSHSPGAEPQPYVVIQFEQNEYVSRPPHPVTSASSVPFTTSTPQPIGTPNNLTRSSSGLGVGAISRAFADAVGRGKKKEDGSGTMTPKAEEPAGGSWLGKPGPGDPVWKEEVSFDVTSSKPTLHLSVYDRNRDGEGFLGMLDIKPVLQDGYVLDNWYKLDTRGDETVTGEVWIQMTYTIIRKRISLKPSDFEFLKLIGRGTFGRVFQVRKKDTRRIYAMKVLSKKEIVAKKEVAHTIGERKILQCSLECPFLVGLKFSFQTDTELYFVTDYKCGGELFWHLQKEGRFQRRSGGLQKEGRFSEDRARFYIAELVLALEHLHKYNIVYRDLKPENILLDATGHVALCDFGLSKPDLTDDKLTNTFCGTTEYLAPEVLLDEKGYGKHVDFWSLGVLLFEMCCGWSPFYAEQTQEMYRLICYGKIRFPKNVIGDDGKQFVKGLLNRNPQNRLGSHRGAVELKEHPFFKNIDWDLLYKKQITPPFKPIVDSDESVANFDPEFTNSSLLDAGIVPWEEVNANVDPGTASQPGKHSYLGPGAGISGSVPGGGGVAINKAQRPGLPGANGSPLTSSVQENFRGFTYTGESLMPQSMLADQSMDSDSDNENAVDDDEDDDEDEEEYEEDDDEENGIGSSRRECDVDMD

SEQ ID NO: 16475 - protein, 89 aa, Phaseolus vulgaris
DKKPSEQGAHINLKVKGQDGNEVFFRIKRSTQLKKLMNAYCDRQSVDFNSIAFLFDGRRLRAEQTPDELEMEDGDEIDAMLHQTGGSVF

SEQ ID NO: 16476 - protein, 638 aa, Colwellia maris
MGKIIGIDLGTTNSCVAVLDGGSVRVIENAEGDRTTPSIIGYTEDGETLVGQPAKRQSVTNPKNTLYAIKRLIGRRFEDEEVQRDIKIMPFGIVKADNGDAWVTARDKNVSPPQVSAEVLKKMKKTAEDYLGETVTEAVITVPAYFNDSQRQATKDAGRIAGLDVKRIINEPTAAALAYGMDKKEGDKVVAVYDLGGGTFDISIIEIDEVDGEHTFEVLATNGDTHLGGEDFDNRLINYLVAEFKKDQGMDLTSDPLAMQRLKEAAEKAKCELSSAQQTDVNLPYITADASGPKHMNIKVTRAKLESLVEDMVKATLIPLKQALKDADLSVSDVNDVILVGGQSRMPMVQKAVTEFFGKEPRKDVNPDEAVAAGAAIQAGVLSGDVTDVLLLDVTPLSLGIETMGGVMTKVIDKNTTIPTKQSQTFSTADDNQSAVTVHVCQGERKQASANKSLGQFNLEGIDAAPRGTPQIEVTFDIDADGILHVTAKDKNTGKEQKITIKASSGLSDEEVEQMVRDAEANADEDAKFEELVQVRNQADGMIHSTRKQVEEAGEELPSEDKEKIEAALTELETAIKGHDKEEIDAKTQALMEASAKLMEIAQAKQQAQSAPEGSADADAAPGDDVVDAEFEEVKDDK

SEQ ID NO: 16477 - protein, 390 aa, Paracoccus zeaxanthinifaciens
MTKAVIVSAARTPVGSFMGAFANVPAHDLGAAVLREVVARAGVDPAEVSETILGQVLTAAQGQNPARQAHINAGLPKESAAWLINQVCGSGLRAVALAAQQVMLGDAQIVLAGGQESMSLSTHAAYLRAGQKMGDMKMIDTMIRDGLWDAFNGYHMGQTAENVADQWSISRDQQDEFALASQNKAEAAQNAGRFDDEIVAYTVKGRKGDTVVDKDEYIRHGATIEGMQKLRPAFTKEGSVTAGNASGLNDGAAAVMVMSEDEAARRGLTPLARIASYATAGLDPAIMGTGPIPSSRKALEKAGWSVGDLDLVEANEAFAAQACAVNKDMGWDPSIVNVNGGAIAIGHPIGASGARILNTLLFEMQRRDAKKGLATLCIGGGMGVAMCLER

SEQ ID NO: 16478 - protein, 527 aa, Brassica napus
MEVLLKLPTSDSLLKDKFLGSAQILEASKGDDDHQELESAKAEMTEVKEENEKLKGMLERIESDYKSLKLRFFDIVQQEPSNNPTQDQNMVGLQKSTTDLSSFDQEHELVSLSLGRRSSSPSDNTSKKEDKEVNADEELTKAGLTLGFSNGSLSSQENSSGETWPSGKVTGKRSSPAPASCGDVEGEAGQQNNVKRARVCVRARCDTPTMNDGCQWRKYGQKIAKGNPCPRAYYRCTVAPGCPVRKQVQRCADDMSILITTYEGTHSHPLPLSATTMASTTSAAASMVLSGSSSSSSSAAEMIGNNLYDNSRFINNNKSFYSPTLHSPLHPTVTLDLTTPQHSSSSSLPSLNFNKYSNSFQNFPSTSLNFSSNPSLSSSTTLSIPAVWGSGYSSYTPYPYNNVQFGTSNLGKTVQNSQSLTETLTKALTSDPSFQTVIAAAISSMVGSNGEKQIVNPISNNVQQTATTNNIKGCGGYFSSLLMSNIIANNQTGASLDQPPSQPPLSMFKNSSSSSSTTSFVNKEEKS

SEQ ID NO: 16479 - protein, 206 aa, Triticum urartu
MSMSCGLCGANNCPRLMVSPIHHRHHHHQEHQLREHQFFAQGNHHHHHPVPLPPANFDHSRTWTTPFHETAAAGNSSRLTLEVGAGGRPMAHLVQPPARAHIVPFYGGAFTNTISNEAIMTIDTEMMVGPAHYPTMQERAAKVMRYREKRKRRRYDKQIRYESRKAYAELRPRVNGRFVKVPEAMASPSSPASPYDPSKLHLRWFR

SEQ ID NO: 16480 - protein, 213 aa, Aegilops speltoides
MSMSCGLCGTNNCPRLMFSPIHHRHHHHQEHQLREHQFFAQGNHHHHHHGAAVDHPVPPPPANPDHRRTWTTPFHETAAAGNNSSLTLEVGAGGRHMAHLVQPPARAHIVPFYGSAFTNTISNEAIMTIDTEMMVEAAHYPTMQERAAKVMRYREKRKRRRYDKQIRYESRKAYAELRPRVNGRFVKVPEAMVSPSSAASPYDPSKLHLGWFR

SEQ ID NO: 16481 - protein, 210 aa, Aegilops tauschii
MSMSCGLCGPNNCPRLMVSPIHHHHHQEHQLREHQFFAQGNHHHQHHGAAADHPVPLPPANFDHRRTWTTPFHETAAAGSSISRLTLEVGAGGRHMAHLSSARAHIVPFYGGAFTNTISNEAIMTIDTEMMVGPAHYPTMQERAAKVMRYREKRKRRRYDKQIRYESRKAYAELRPRVNGRFVKVPEAMASPSSPASPYDPSKLHLGWLR

SEQ ID NO: 16482 - protein, 213 aa, Triticum turgidum
MSMSCGLCGANNCSRLMVSPIHHHHHHHQEHQLREHQFFAQGNHHHHHHGAAVDHPVQPPPANFDHRRTWTTPFHETAAAGNSSRLTLEVGAGGQHMAHLVQPPARTHIVPFYGGAFTNTISNEAIMTIDTEMMVGPAHYPTTQERAAKVMRYREKRKRRRYDKQIRYESRKAYAELRPRVNGCFVKVPKAMASPSSPALPYDPSKLHLGWFR

SEQ ID NO: 16483 - protein, 212 aa, Triticum urartu
MSMSCGLCGASDCPHHMISPVLQHQEQHRLREYQFFTQGHHHHHHGAVADYPPPSPPSANCHHCRSWTTPFHETAAAGNSSRLTLEVDAGGQNMAHLLQPPARPRTTIVPFCGAAFTSTISNATIMTIDTEMMVGAAHNLTMQEREAKVMRYREKRKRRCYDKQIRYESRKAYAELRPRVNGRFVKVPEAAASSSPPASPYDPSKLHLGWFR

SEQ ID NO: 16484 - protein, 211 aa, Aegilops speltoides
MSMSCGLCGASNCPHHMISPVLQHHQEHGLREYQFFAQGHHHHHHDGTAADYPPPPPANCHHCKSWTTPFHETAAAGNSSRLTLEVDAGGQHLAHLLQPPAPPRATIVPFREGAFTSTISNATIMTIDTEMMVGAAHNPTMQERHAKVMRYREKRKRRRYDKQIRYESRKAYAKLRPRVNGRFVKVPEAAVSPSPPASPYDPSKLNLGLFR

SEQ ID NO: 16485 - protein, 213 aa, Aegilops tauschii
MSMSCGLCGASNCPHHMNSPVLHHHHHHQEHRLCEYQFFAQGQHHHHHGAAADYPPPPPANCHHRRSWTTPFHETAAAGNSSRLTLEVDAGGQHTAHLLQPPAPPRATIVPFCGGAFTSTISNATIRTIDTEMMVGAAHNPTMQEREAKVMRYREKRKRRRYDKQIRYESRKAYAELRPRVNGRFVKVPEATASPSPPTSPYDPSKLHLGWFR

SEQ ID NO: 16486 - protein, 213 aa, Triticum turgidum
MSMSCGLCGASNCPHHMISPVLQHHQHHQEHRLCEYQFFAHGHHHHHHGATADYPPPPPANCHHRRSWTAPFRETAAPGNSSSLTLEVDTGGQHLAHLLQPPAPPRATIVPFCGGAFTNTITNATIMTIDTEMMVGAAHNPMMQERQAKVMRYREKRKRRRYDKQIRYESRKAYAELRPRVNGRFVKVPEADVSPSPPASPYDPSKLNLEWFR

SEQ ID NO: 16487 - protein, 309 aa, Euglena gracilis
MTAYLKGVLKDFSNLVLQGEPTGCKGGPEPMALGCHPRPVSPRNAFGTAGAANMEDVVMAMDEDSSKFHSPDGLKLSDFDIGKRLGHGKYGSVYLARERRTKFLCALKVLKKKELTADAVEHQLRREIEIQTNVRHRHVLRLYAYFHDATRIYLVLEFAEKGELYGHLQRMTRFPEPLAAKFIRQLAEALKYLHSKNIIHRDIKPENLLVDHRGHLKLSDFGWSVHAPGQRRATLCGTLDYLPPEMVEQKVYNGAADIWCLGVLCFEFLVGKPPFEAEGQAATYKTSALSVIIFLLISPPEPETLCPSS

SEQ ID NO: 16488 - protein, 309 aa, Euglena gracilis
MTAYLKGVLKDFSNLVLQGEPTGCKGGPEPMALGCHPRPVSPRNAFGTAGAANMEDVVMAMDEDSSKFHSPDGLKLSDFDIGKRLGHGKYGSVYLARERRTKFLCALKVLKKKELTADAVEHQLRREIEIQTNVRHRHVLRLYAYFHDATRIYLVLEFAEKGELYGHLQRMTRFPEPLAAKFIRQLAEALKYLHSKNIIHRDIKPENLLVDHRGHLKLSDFGWSVHAPGQRRATLCGTLDYLPPEMVEQKVYNGAADIWCLGVLCFEFLVGKPPFEAEGQAATSKTSALSVIIFLLISPPEPETLCPSS

SEQ ID NO: 16489 - protein, 571 aa, Cucurbita maxima
MGNTCRGSFKGNIFQGYSQPEDSSTLYSKRNNSSSSARSNSDISPTSINTHNLIAQEFSKENKTKSKDNDYNQAFLSPTKKDFTMRKSAENQAYYVLGHKTANIRDLYTLGRKLGQGQFGTTYLCTEITTGIEYACKSISKRKLIAKEDVEDVRREIQIMHHLAGHKNIVTIKGAYEDSLYVHIVMELCSGGELFDRIIHRGHYSERKAAELTRIIVGVVETCHSLGVMHRDLKPENFLLVNKDDDFSLKAIDFGLSVFFKPGQIFTDVVGRPYYVAPEVLLKHYGPAADVWTAGVILYILLSGVPPFWAETQQGIFDAVLKGHIDFDSDPWPLISDSAKDIIRKMLCSRPSDRLTAHEVLCHPWICENGVAPDRALDPAVLSRLKQFSAMNKLKKMALRVIAESLSEEEIAGLREMFTAMDTDNSGAITFDELKAGLRRYGSTLKDIEIRDLMDAADIDNSGTIDYGEFIAATIHLNKLEREEHLVAAFRYFDKDGSGYITVDELQQACAEHNMTDAYLEDVIREVDQDNDGRIDYGEFVAMMQKGNAGVGRRTMRNSLNLSMRDGPGAL

SEQ ID NO: 16490 - protein, 558 aa, Cucurbita maxima
MGNTCRGSFKGNIFQGYSQPEESSTPNFKRNINGSSDHSPSSINTNNLISQAFAEENKTKSKDNDCKKDYTMRKSAENQAYYVLGHKTANIRDLYTLGRKLGQGQFGTTYLCTEIMTGIEYACKSISKRKLIAKEDVEDVRREIQIMHHLAGHKNIVTIKGAYEDSLYVHIVMELCSGGELFDRIIQRGHYSERKAAELTRIIVGVVETCHSLGVMHRDLKPENFLLVNKDDDFSLKAIDFGLSVFFKPGQIFTDVVGSPYYVAPEVLLKHYGPAADVWTAGVILYILLSGVPPFWAETQQGIFDAVLKGHIDFDSDPWPLISDSAKDLIRKMLCSRPSDRLTAHEVLCHPWICENGVAPDRALDPAVLSRLKQFSAMNKLKKMALRVIAESLSEEEIAGLREMFTAMDTDNSGAITFDELKAGLRRYGSTLKDTEIRDLMEAADIDNSGTIDYGEFIAATIHLNKLEREEHLVAAFRYFDKDGSGYITVDELQQACAEHNMTDAYLEDIIREVDQDNDGRIDYSEFVAMMQKGNAGIGRRTMRNSLNLSMRDGPGAL

SEQ ID NO: 16491 - protein, 196 aa, Ralstonia pickettii
MTATISLATLFGEARSQNGWLDRDVPDARLREIYDQMKFGPTSVNCSPARIVFVRSMEAKQKLAGAVAPANVDKVMNAPVVAIVGYDTRFYDRLPELFPHNPAVKSWFEGPEKAAFAETTAFRNGTLQGAYLIMAARAVGLDCGPMSGFNNAAVDAAFFAGTTIRSNFICGLGHGDPGRVFPRSPRLAFEQACTLA

SEQ ID NO: 16492 - protein, 477 aa, Hebeloma cylindrosporum
MVNVTYDDSGSLVAYTPDGTPIVYNLGDMAWIAASMALVWIMIPGVGLFYSGLLRRKNALSMIWTSLASIAVVSFQWFFWGYSLAFSETGNAFIGDLKYFGLKGVLDQPSIGSSRIPAILFCIYQLMFAAITAALAVGAIAERGRLGPLLVFIFVWSTIVYDPIANWTWNTNGWSFILGGLDFAGGTPVHISSGTAALAISIFLGKRRGYGTERLAYKPHNTTYVILGTVFLWFGWFGFNGGSALSANLRAIQACIVTNLAASVGGLTWMLWDYRIERKWSAVGFCSGAVSGLVAITPASGFVGAPAAVAFGVLGGTACNFATQLKFVLGYDDALDIFATHAIGGIVGNLLTGLFAQASVAGFDGITEIPGGWLDRHYIQLAHQLADSVAGFAYSFVMTTIILWVMHIIPGLTLRTTEEAEILGVDDAEMGEFAYDYVGIDQEIGHTLDTGLTATGGGREPDHAKAVSTSSVEEKSA

SEQ ID NO: 16493 - protein, 423 aa, Mesorhizobium sp. HN8A1
WGFDGSSTMQAEGRSSDCVLKPVALYPDPARTNGILVMCEVMMPDGVTPHESNSRATILDDEDAWFGFEQEYFFYKDGRPLGFPESGYPAPQGPYYTGVGYKNVGDVARKIVEEHLDQCLAAGINHEGINAEVAKGQWEFQIFGKGSKKAADQIWMARYLLLRLTETYGIDIEFHCKPLGDTDWNGSGMHCNFSTKFMREVGGKAYFEALMAQFDKNLMDHIAVYGPDNDKRLTGKHETAPWNKFSYGVADRGASIRVPHSFVKNDYKGYLEDRRPLGANEQVVEIETVPTGSLGLDIALGVGGLPRGRIIEIYGPESSGKTTLALHTVAEAQKKGGICAFVDAEHALDPVYARKLGVDLENLLISQPDTGEQALEICDTLVRSGAIDVLVVDSVAALTPRAEIEGEMGDSLPGLQARLMSQA

SEQ ID NO: 16494 - protein, 423 aa, Mesorhizobium sp. HB5A4
WGFDGSSTQQAEGHSSDCVLKPVAVYPDPARTNGVLVMCEVMMPDGVTPHASNKRATILDDEGAWFGFEQEYFFYKDGRPLGFPESGYPAPQGPYYTGVGYSNVGSVARQIVEEHLDLCLAAGINHEGINAEVAKGQWEFQIFGKGSKKAADQMWMARYLMQRLTEKYGIDIEYHCKPLGDTDWNGSGMHANFSTAYMREVGGKAYFEALMAAFDKNLMDHIAVYGPDNDKRLTGKHETAPWNRFSYGIADRGASIRVPHSFVKNDYKGYLEDRRPLGANEQVVEIETVPTGSLGLDIALGVGGLPRGRIIEIYGPESSGKTTLALHTVAEAQKKGGICAFVDAEHALDPVYARKLGVDLENLLISQPDTGEQALEICDTLVRSGAIDVLVVDSVAALTPRAEIEGEMGDSLPGLQARLMSQA

SEQ ID NO: 16495 - protein, 193 aa, Cucumis sativus
  misc_feature (193)..(193): Xaa can be any naturally occurring amino acid
  unsure (1)..(193): unsure at all Xaa locations
TGDEGNNEYKKGLWTVEEDKILMDYVKAHGKGHWNRIAKKTGLKRCGKSCRLRWMNYLSPNVKRGNFTEQEEDLIIRLHKLPGNRWSLIAKRVPGRTDNQVKNYWNTHLSKKLGIKDQKTKQSNGDIVYQINLPNPTETSEETKISNIVDNNNILGDEIQEDHQGSNYLSSLWVHEDEFELSTLTNMMDFINX

SEQ ID NO: 16496 - protein, 489 aa, Beta vulgaris subsp. vulgaris
MGSNTNINFSKNYGNEAAGDGGVGGSGRPPGSGLGSGNFSLARQLSVYSLTFDEFQNTLGGMGKDFGSMNMDELLKNIWSAEETQCMAPGAGAGTAAVAAAAAVVGSGIQEGGSSGGYLQRQGSLTLPRTLSQKTVDEVWKDIAKEFNGGKDGGGGSNVPQRQQTLGEITLEEFLVRAGVVREDTQVVGKPNNNNNTSAGAGIFGDFARPSNGNNGNTGFGINFQQPGRGVELMGNHIAETNHQMSLQAANLPLNVNGVRTSQQQQQQQTPTQLSHSQQPQQQQQQQQQQQQQQPLFPKQAAVSYASAMTLPNNAQLGNVGVRGGIMGLGDPGINSNMVQSAAPQGGGGMGMVGLGGGGAIGVPAGSPAALSSDGLGRSNGDSSSVSPVPYMFNGGLRGRKGIHAVDKVVERRQRRMIKNRESAARSRARKQAYTMELEQEVQKLKEENQELRKKQAEIMEMQKNQVMEMINAQSGSRKKLRRTQTGPW

SEQ ID NO: 16497 - protein, 392 aa, Stigmaphyllon puberum
DLEPVNPVDVPVTAAGALKSYKLAAKAISRLQSLPSGNISLLCDVLVKEVRDLTGYDRVVVYKFHEDEHGEVVSECRISDLESYLGLHYPATDIPQASRFLFMKNKVRMICDCLAPPVKVIQDERLPQPLSFCGSTLRSPHGCHAQYMTNMGTIASLVMSVTINEDDDTMDGDQQQMTRKLWGLVVCHHNSPQFVPFPLRYACEFLIQVFGVQINKEVELAAQVREKHILQIQTMLCDMLLRDAPVAIITQSPNVMDLVKCDGAALYFKNKIWLLGVTPSKEQIRDIAQWLLEYHSGNTGLSTDSLMEAGYPGASALGDAVCGMAAVSITSRDFLFWFRSHTAKAVKWGGAKHDPDDKDDLRKMHPRSSFKAFLEVVKWRSMPWEDVEMDAI

SEQ ID NO: 16498 - protein, 392 aa, Mascagnia dipholiphylla
DLEPVNPADVPVTAAGALKSYKLAAKAISRLQSLPSGNISLLCDVLVKEVRDLTGYDRVMVYKFHEDEHGEVVSECRRSDWESYLGLHYPATDIPQASRFLFMKNKVRMICDCLAPPVKVIQDERLPQPLSLCGSTLRSPHGCHAQYMTNMGTIASLVMSVTINEDDDMMDGDQQQMTRKLWGLVVCHHAGPRFVPFPLRYACEFLIQVFGVQIHKEVELAAQVREKHILQIQTMLCDMLLRDAPVVIITQSPNVMGLVKCDGAALYFKNKIWLLGVTPAEEQIRDIAEWLLKYHSGNTGLSTDSLMEAGYPGASVLGDAVCGMAAVSITSRDFLFRFRSHTAKEIKWGGAKHDPDDKDDGRKMHPRSSFKAFLEVVKWRSTPWEDIEMDAI

SEQ ID NO: 16499 - protein, 392 aa, Aspidopterys elliptica
DLEPVNPADVPVTAAGALKSYKLAAKAISRLQSLPSGNISLLCDVLVKEVRDLTGYDRVMVYKFHEDEHGEVVSECLRSDLESYLGLHYPATDIPQASRFLFMKNKVRMICDCVAPPVKVIQDERLPQPLSLCGSTLRSPHGCHAQYMTNMGIIASLVMSVTVNEDDDMVDGDQPQMARKLWGLVVCHHTSTRFVPFPLRYACEFLIQVFGVQINKEVELAAQVREKHILQIQTMLCDMLLRDAPVAIITQSPNVMDLVKCDGAALYFKNKTWLLGVTPTEEQIRDIAEWLLEYHSGNTGLSTDSLMEAGYPGASALGDAVCGMAAVSITSRDFLLWFRSHTAKEIKWGGAKHDPDDKDDGRKMHPRSSFKAFLEVVKWRSMPWEDIEMDAI

SEQ ID NO: 16500 - protein, 392 aa, Caucanthus auriculatus
DLEPVNPADVPVTAAGALKSYKLAAKAISRLQSLPSGNISLLCDVLVKEVRDLTGYDRVMVYKFHEDEHGEVVSECHRSDLESYLGLHYPATDIPQASRFLFMKNKVRMICDCVAPPVKVIQEERLPQPLSLCGSTLRSPHGCHAQYMTNMRIIASLVMSVTVNEEDDMVDGDQPQMARKLWGLVVCHHTSTRFVPFPLRYACEFLIQVFGVQINKEVELAAQVREKHILQIQTMLCDMLLRDAPVAIITQSPNVMDLVKCDGAALYFKNKTWLLGVTPTEEQIRDIAEWLLEYHSGNTGLSTDSLMEAGYPGASALGDAVCGMAAVSITSRDFLLWFRSHTAKEIKWGGAKHDPDDKDDGRKMHPRSSFKAFLEVVKWRSMPWEDIEMDAI

SEQ ID NO: 16501 - protein, 392 aa, Malpighia stevensii
DLEPVNPADVPVTAAGALKSYKLAAKAISRLQSLPSGNISLLCDVLVKEVRDLTGYDRVMVYKFHEDEHGEVVSECRRSDLESYLGLHYPATDIPQASRFLFMKNKVRMICDCVAPPVKVIQDDRLPQPLSLCGSTLRSPHGCHAQYMTNMGIIASLVMSVTVNEDDDMVDGDQPQMARKLWGLVVCHHTSTRFVPFPLRYACEFLIQVFGVQINKEVELAAQVREKHILQIQTMLCDMLLRDAPVAIITQSPNVMDLVKCDGAALYFKNKTWLLGVTPTEEQIRDIAEWLLEYHSGNTGLSTDSLMEAGYPGASALGDVVCGMAAVSITSRDFLFWFRSHTAKEIKWGGAKHDPDDKDDGRKMHPRSSFKAFLEVVKWRSMPWEDVEMDAI

SEQ ID NO: 16502 - protein, 392 aa, Madagasikaria andersonii
DLEPVNPADVPVTAAGALKSYKLAAKAISRLQSLPSGNISLLCDVLVKEVRDLTGYDRVMVYKFHEDEHGEVVSECRRSDLESYLGLHYPATDIPQASRFLFMKNKVRMICDCVAPPVKVIQDERLPQPLSLCASTLRSPHGCHAQYMTNMGIVASLVMSVTVNEEDDMVDGDQPQMARKLWGLVVCHHTSTRFVPFPLRYACEFLIQVFGVQINKEVELAAQVREKHILQIQTMLCDMLLRDAPVAIITQSPNVMDLVKCDGAALYFKNKTWLLGVTPTEEQIRGIAEWLLEYHSGNTGLSTDSLMEAGYPGASALGDAVCGMAAVSINSRDFLLWFRSHTAKEIKWGGAKHDPGDKDDGRKMHPRSSFKAFLEVVKWRSMPWEDMEMDAI

SEQ ID NO: 16503 - protein, 392 aa, Rhynchophora phillipsonii
DLEPVNPADVPVTAAGALKSYKLAAKAISRLQSLPSGNISLLCDVLVKEVRDLTGYDRVMVYKFHEDEHGEVVSECRRSDLESYLGLHYPATDIPQASRFLFMKNKVRMICDCVAPPVKVIQDERLPQPLSLCASTLRSPHGCHAQYMTNMGIVASLVMSVTVNEEDDMVDSDQPQMARKLWGLVVCHHTSTRFVPFPLRYACEFLIQVFGVQINKEVELAAQVREKHILQIQTMLCDMLLRDAPVAIITQSPNVMDLVKCDGAALYFKNKTWLLGVSPTEEQIRDIAEWLLEYHSGNTGLSTDSLMEAGYPGAAALGDAVCGMAAVSITSRDFLLWFRSHTAKEIKWGGAKHDPDDKDDGRKMHPRSSFKAFLEVVKWRSMPWEDMEMDAI

SEQ ID NO: 16504 - protein, 392 aa, Rhynchophora phillipsonii
DLEPVNPADVPVTAAGALKSYKLAAKAISRLQSLPSGNISLLCDVLVKEVRDLTGYDRVMVCKFHEDEHGEVVSECRRSDLESYLGLHYPATDIPQASRFLFMKNKVRMICDCVAPPVKVVQDERLPQPLSLCASTLRSPHGCHAQYMTNMGIVASLVMSVTVNEEDDMVDSDQPQMARKLWGLVVCHHTSTRFVPFPLRYACEFLIQVFGVQINKEVELAAQVREKHILQIQTMLCDMLLRDAPVAIITQSPNVMDLVKCDGAALYFKNKTWLLGVSPTEEQIRDIAEWLLEYHSGNTGLSTDSLMDAGYPGASALGDAVCGMAAVSITSRDFLLWFRSHTAKEIKWGGAKHDPDDKDDGRKMHPRSSFKAFLEVVKWRSMPWEDVEMDAI

SEQ ID NO: 16505 - protein, 392 aa, Microsteira sp. Davis et al. 38-01
DLEPVNPADVPVTAAGALKSYKLAAKAISRLQSLPSGNISLLCDVLVKEVRDLTGYDRVMVYKFHEDEHGEVVSECRRSDLESYLGLHYPATDIPQASRFLFMKNKVRMICDCVAPPVKVIQDERLPQPLSLCASTLRSPHGCHAQYMTNMGIIASLVMSVTVNEEDDMVDGDQLQMARKLWGLVVCHHTSTRFVPFPLRYACEFLIQVFGVQINKEVELAAQVREKHILQIQTMLCDMLLRDAPVAIITQSPNAMDLVKCDGAALYFKNKTWLLGVTPTEEQIRDIAEWLLEYHSGNTGLSTDSLMEAGYPGASALGDTVCGMAAVSITSRDFLLWFRAHTAKEIKWGGAKHDPDDKDDGRKMHPRSSFKAFLEVVKWRSMPWEDVEMDAI

SEQ ID NO: 16506 - protein, 392 aa, Mascagnia sepium
DLEPVNPADVPVTAAGALKSYKLAAKAISRLQSLPSGNISLLCDVLVKEVRDLTGYDRVMVYKFHEDEHGEVVSECRGSDLESYLGLHYPATDIPQASRFLFMKNKVRMICDCLAPPVKVIQDERLPQPLSLCGSTLRSPHGCHAQYMTNMGTIASLVMSVTVNEDDDMVDGDQPQMTRKLWGLVVCHHTSPRFVPFPLRYACEFLIQVFGVQINKEVELAAQVGEKHILQIQTMLCDMLLRDAPVAIITQSPNVMDLVKCDGAALYFKNKTWLLGVTPTEEQIRDIAEWLLEYHSGNTGLSTDSLMEAGYPGASALGDAVCGMAAVSITSGDFLFWFRSHTAKEIKWGGAKHDPDDKDDGRKMHPRSSFKAFLEVVKWRSMSWEDIEMDAI

SEQ ID NO: 16507 - protein, 318 aa, Litchi chinensis
MAAGFYFFLLVLFAFGASLQANGQLCPNFYESTCPQALSIVHKGVVAAIKNETRIGASLLRLHFHDCFVNGCDGSLLLDDTSTFVGEKTAVPNNISVRGFNVVDQIKAKLEKACPGVVSCADLLAIAARDSVVHLGGPSWKVRLGRRDSTTASRALANTSIPPPTSNLSALISSFSAQGLSLKDLVALSGSHTIGLARCTSFRGHVYNDTNIDSSFAQSLRRKCPRSGNDNVLANLDRQTPFCFDKLYYDNLLKKKGLLHSDQQLFKGGSADPFVKKYANNTSAFFKDFAGAMVKMGNIKPLTGRAGQIRINCRKVNK

SEQ ID NO: 16508 - protein, 588 aa, Zea mays
MCGILAVLGCSDWSQAKRARILACSRRLKHRGPDWSGLYQHEGNFLAQQRLAVVSPLSGDQPLFNEDRTVVVVANGEIYNHKNVRKQFTGTHNFSTGSDCEVIMPLYEKYGENFVDMLDGVFAFVLYDTRDRTYVAARDAIGVNPLYIGWGSDGSVWIASEMKALNEDCVRFEIFPPGHLYSSAGGGFRRWYTPHWFQEQVPRTPYQPLVLREAFEKAVIKRLMTDVPFGVLLSGGLDSSLVASVTKRHLVETEAAEKFGTELHSFVVGLEGSPDLKAAREVADYLGTIHHEFHFTVQDGIDAIEEVIYHDETYDVTTIRASTPMFLMARKIKSLGVKMVLSGEGSDELLGGYLYFHFAPNKEEFHRETCRKVKALHQYDCLRANKATSAWGLEVRVPFLDKEFINVAMGMDPEWKMYDKNLGRIEKWVMRKAFDDDEHPYLPKHILYRQKEQFSDGVGYNWIDGLKSFTEQQVTDEMMNNAAQMFPYNTPVNKEAYYYRMIFERLFPQDSARETVPWGPSIACSTPAAIEWVEQWKASNDPSGRFISSHDSAATDHTGGKPAVANGGGHGAANGTVNGKDVAVAIAV

SEQ ID NO: 16509 - protein, 437 aa, Phaeosphaeria nodorum
MSSADTQKKPFNLAIVGGGISGLTLAITLLEHGVDLTIYEAAPHFGEIGAGVALGPNAGRAMEGMSPKILEAFLKCKTGNKSKHDAWFTIRVGDERRADKDGFVRPGKKVGDALFDVPLSGGGGRGGIYRAQFLDEMVKSVPEGVAKFDKRMVDLTDAEDGSGDMVIHFADGSKAQHNAVIGCDGIKSKARTWLVGKDHPAKDAFFSGKYAYRGLIPMDQAIEMLGEEVATNSQMFLGYHGHLLTFPVQNGKTMNVVAFSSRETWDDEKWVVSTSKEEMEADFAGWGEHVQRIVRAMQKPDIWALFMHPPCETYTKGRVCLLGDAAHATTPHQGAGAGMCIEDSFIMASLIKEAKSIEDVLRAFHAFDQVRRGRTQKNVLTSKEGGLMYEFELEGHGDDLDKIEEAYLNRMQWIWNIDLDAQLREAKEIMKNAKIQA

SEQ ID NO: 16510 - protein, 386 aa, Arabidopsis thaliana
MAKPVSIEVYNPNGKYRVVSTKPMPGTRWINLLVDQGCRVEICHLKKTILSVEDIIDLIGDKCDGVIGQLTEDWGETLFSALSKAGGKAFSNMAVGYNNVDVEAANKYGIAVGNTPGVLTETTAELAASLSLAAARRIVEADEFMRGGLYEGWLPHLFVGNLLKGQTVGVIGAGRIGSAYARMMVEGFKMNLIYFDLYQSTRLEKFVTAYGQFLKANGEQPVTWKRASSMEEVLREADLISLHPVLDKTTYHLVNKERLAMMKKEAILVNCSRGPVIHEAALVEHLKENPMFRVGLDVFEEEPFMKPGLADMKNAIVVPHIASASKWTREGMATLAALNVLGRVKGYPIWHDPNRVDPFLNENASPPNASPSIVNSKALGLPVSKL

SEQ ID NO: 16511 - protein, 646 aa, Petunia x hybrida
EGPAIGIDLGTTYSCVGVWQHDRVEIIANDQGNRTTPSYVGFTDTERLIGDAAKNQVAMNPINTVFDAKRLIGRRFSDPSVQSDIKLWPFKVIPGPGDKPMIVVTYKGEEKQFAAEEISSMVLTKMKEIAEAYLGTTIKNAVVTVPAYFNDSQRQATKDAGVIAGLNVMRIINEPTAAAIAYGLDKKASSAGEKNVLIFDLGGGTFDVSLLTIEEGIFEVKATAGDTHLGGEDFDNRMVNHFVQEFKRKNKKDISGNPRALRRLRTACERAKRTLSSTAQTTIEIDSLYEGIDFYSTITRARFEELNMDLFRKCMEPVEKCLRDAKMDKSSVHDVVLVGGSTRIPKVQQLLQDFFNGKELCKSINPDEAVAYGAAVQAAILSGEGNEKVQDLLLLDVTPLSLGLETAGGGMTVLIPRNTTIPTKKEQVFSTYSDNQPGVLIQVYEGERARTKDNNLLGKFELSGIPPAPRGVPQITVCFDIDANGILNVSAEDKTTGQKNKITITNDKGRLSKEEIERMVQEAEKYKSEDEELKKKVEAKNALENYAYNMRNTIKDDKINSQLSAADKKRIEDAIDEAIKWLDNNQLAEADEFEDKMKELESICNPIIAKMYQGGAGGATMDEDGPSVGGSAGSQTGAGPKIEEVD

SEQ ID NO: 16512 - protein, 177 aa, Arabidopsis lyrata
MENMGTRVIEPLIMGRVVGDVLDFFTPTIKMNVSYNKKQVSNGHELFPSSVSSKPRVEIHGGDLRSFFTLVMIDPDVPGPSDPFLKEHLHWIVTNIPGTTDATFGKEVVSYELPRPSIGIHRFVFVLFKQKQRRVIFPNIPSRDHFNTRKFAVEYDLGLPVAAVFFNTQRETAARKR

SEQ ID NO: 16513 - protein, 473 aa, Salmonella enterica subsp. arizonae serovar 62:z4,z23:--
MSRLVVVSNRIAPPDNKGGAGGLAVGVLGALKAAGGLWFGWSGETGNEDEPLKKVTKGNITWASFNLSEQDYEDYYCQFSNAVLWPAFHYRLDLVQFQRPAWEGYMRVNALLADKLLPLIKENDIIWVHDYHLLPFASELRKRGVNNRIGFFLHIPFPTPEIFNALPPHDELLEQLCDFDLLGFQTENDRLAFLDSLSSQTRVTTRSGKHHIAWGKDFQTEVYPIGIEPDEIALQAAGPLPPKLVQLKAELKNVKNIFSVERLDYSKGLPERFLAYEALLENYPQHRGKIRYTQIAPTSRGEVQAYQDIRHQLETEAGRINGRYGQLGWTPLYYLNQHFDRKLLMKIFRYSDVGLVTPLRDGMNLVAKEFVAAQDPANPGVLVLSQFAGAANELTSALIVNPYDRDDVAAALNRALTMPLAERISRHAEMLDVIVKNDINRWQERFIHDLKEVTPRSAERRQQNNVATFPKLA

SEQ ID NO: 16514 - protein, 402 aa, Salmonella enterica subsp. enterica serovar Typhimurium
MNEFPVVLVINCGSSSIKFSVLDVATCDVLMAGIADGMNTENAFLSINGDKPINLAHSNYEDALKAIAFELEKRDLTDSVALIGHRIAHGGELFTQSVIITDEIIDNIRRVSPLAPLHNYANLSGIDAARHLFPGRASGGGIDTSFHQTLAPEAYLYGLPWEYFSSLGVRRYGFHGTSHRYVSRRAYELLDLDEKDSGLIVAHLGNGASICAVRNGQSVDTSMGMTPLEGLMMGTRSGDVDFGAMAWIAKETGQTLSDLERVVNKESGLLGISGLSSDLRVLEKAWHEGHERARLAIKTFVHRIARHIAGHAASLHRLDGIIFTGGIGENSVLIRQLVIEHLGVLGLTLDVEMNKQPNSHGERIISANPSQVICAVIPTNEEKMIALDAIHLGNVKAPVEFA

SEQ ID NO: 16515 - protein, 415 aa, Nitrosospira sp. NpAV
MNAKNLFKLGVIGLYGMATLALSTLDISPAAAHGERSQEPFLRMRTIQWYDMKWGPDTTKVNDFATMTGKFHLAENWPRAVGKPGRAFFNVGSPSPVFVRLSTKLNGEPTYISGPLEIGRDYAFEVKLKAPIPGSHHMHTMVNIKDAGPIAGPAAWMNITGSWDDFTNPVKLLTGETIDTETFNFNNGIFWHLLWLGLGCFWIGYYVARPMFLPRSRVLLAYGDDLLLDPMDKKVAWIVLIATLALVWGGYRYTETKHPYTVPIQAGESKVQPMPVKPNPIAIKVTHANYDVPGRALRVTMSVTNSGDTAYRIGEFTTAGVRFINKVGLKHLDRNYPKELVATGLSFDNDAPIQPGETREVKMEAKDALWEVQRLMALLGDPESRFGGLLMTWSDSGDRNINSIAGAVIPVFTKL

SEQ ID NO: 16516 - protein, 825 aa, Pichia guilliermondii
MNRDDPRLTYNHPYKPYDIQVQLMDAIYDTIQNKYKVGLFESPTGTGKTLSIICSSMTWLRNYKKTQDHSTMGSNSSNDNDPNQTSDSDEEPDWVKEAHIKNIRSRTSGLAIDYERHLEELSQTPHAGHTVELGQRTHKRKKRATNDDDFLPDDYNSDTDSNSVETKNAKLQQEINQIMKRVDGSDGKTPGFVNTCPVTIFFSSRTHSQLSQFAHQLSITSFESSLGEIAERIKFMPLSSRKQLCIHPKVSSLSSVSAVNDACVELQQKSDKRCEFMPRVNNPESDQLVQRFADYSFAVIKDIEELHELGADLKVCPYYASRRNIENSEIIALPYQMLLQQATRKSLGLSIKDSIVIIDEAHNLLDVISSINSVSITRKELSSVIASLKLYYNKFTKRLNSGNRIHLMKLIKLCSLVETYIKNCEIQNKCVPGSDVLIDELFQGSTGDLLNIHRIEKYLDKSKIAYKIQTYIEQSREESDEKQASSPLLFKVTAFLKSLVNPSKEGRFFWDKINDDTEIKYLLLDPSEMFRDVVESARCVLLCGGTMEPVEDYYRYLFPYVPGEKIKKFTCGHIVPQENIEVLTVSSRKTTVFDFSYHKRNDPSMLRELALSLQDICERVPNGIIVFAPSYKYLNQLISTWRKDGNLAKISTLKQVFLESSDSTSIESILRDYGAAARGSGAILFSVVGGKMSEGVNFSDELARAVIMLGLPYPNAFSGELIAKRKFIEETTLSKGGTQAMAKKNSREYYENICMRAVNQSVGRSIRHANDYSVIVLFDTRYNSSHIQSKLSGWMRSSIRPERESFDMTLERIADFFAAKTLTKR

SEQ ID NO: 16517 - protein, 861 aa, Saccharomyces cerevisiae YJM789
MDKKEYSETFYHPYKPYDIQVQLMETVYRVLSEGKKIAILESPTGTGKTLSLICATMTWLRMNKADIFTRMETNIKTNEDDSENLSDDEPDWVIDTYRKSVLQEKVDLLNDYEKHLNEINTTSCKQLKTMCDLDKEHGRYKSVDPLRKKRKGARHLDVSLEEQDFIPRPYESDSENNDTSKSTRGGRISDKDYKLSELNSQIITLLDKIDGKVSRDPNNGDRFDVTNQNPVKIYYASRTYSQLGQFTSQLRLPSFPSSFRDKVPNEKVKYLPLASKKQLCINPKVMKWKTLEAINDACADLRHSKEGCMFYQNTNEWRHCPDTLALRDMIFSEIQDIEDLVPLGKSLGICPYYASREALPIAEVVTLPYQYLLSESTRSSLQINLENSIVIIDEAHNLIETINSIYSSQISLEDLKNCHKGIVTYFNKFKSRLNPGNRVNLLKLNSLLMTLIQFIVKNFKKIGQEIDPNDMFTGSNIDTLNIHKLLRYIKVSKIAYKIDTYNQALKEEESSKNENPIKETHKKSVSSQPLLFKVSQFLYCLTNLTSEGQFFFEKNYSIKYMLLEPSKPFESILNQAKCVVLAGGTMEPMSEFLSNLLPEVPSKDITTLSCNHVIPKENLQTYITNQPELEFTFEKRMSPSLVNNHLFQFFVDLSKAVPKKGGIVAFFPSYQYLAHVIQCWKQNDRFATLNNVRKIFYEAKDGDDILSGYSDSVAEGRGSLLLAIVGGKLSEGINFQDDLCRAVVMVGLPFPNIFSGELIVKRKHLAAKIMKSGGTEEEASRATKEFMENICMKAVNQSVGRAIRHANDYANIYLLDVRYNRPNFRKKLSRWVQDSINSEHTTHQVISSTRKFFSMRSLNSR

SEQ ID NO: 16518 - protein, 176 aa, Burkholderia cenocepacia J2315
MSSRRIAVRRSGVHGKGVFAVAPIKAGERVVEYKGERISWKEALRRHPHDPSEPNHTFYFALDEGGVIDGKIDGNSARWINHSCAPNCEAEEVKGRVYIHALRDIEPEEELFYDYGLVIDAKLTKKLKREYACHCGAESCRGTLLATSDEGGKKKKKKDKKDGKSASGSKDKKHKK

SEQ ID NO: 16519 - protein, 384 aa, Burkholderia cenocepacia J2315
MRSATAPRSKLPDVGTTIFTVIGQLAAQHNALNLSQGAPNFAPDPALVEGVARAMRDGHNQYAPMAGVIALRERLAEKTEALYGARYDPATEITVIASASEGLYAAISALVHPGDEVIYFEPSFDSYAPIVRLQGATPVAIKLSPEHFRVDWDEVAAAITPRTRMIIVNTPHNPTATVFSADDLERLARLTRDTGIVVLSDEVYEHVVFDGAQHQSVARHRELAERSVIVSSFGKSFHVTGWRVGHCLAPAELMDEIRKVHQFMVFSADTPMQVAFAEILARPDSYLGLSAFYQAKRDLLARELADSRFELLPSEGSFFMLARFRHFSDESDGDFVLRLIRDARVATIPLSAFYTDGTDAGVIRLSFSKDDATLVEGARRLRSL

SEQ ID NO: 16520 - protein, 470 aa, Burkholderia cenocepacia J2315
MKAESNGRPAAGAKLSGQPALQQTLGTCQLWGIAVGLVISGEYFGWSYGWASAGTLGFVITALFVAAMYTTFIFSFTELTTSIPHAGGPFAYARRAFGPTGGYLAGAATLVEFVFAPPAIALAIGAYLHVQFPGLEPKHAAMGAYLVFMALNIVGVQIAATFELVVTLLAIFELLVFMGVVSPGFAWSNFTKGGWSGADHFSLGAFHGMFAAIPFAIWFFLAIEGVAMAAEEAKNPKRSIPIAYVAGILTLVALAIGVMVFAGGAGDWTKLANINDPLPQAMKYIVGANSGWMHMLVWLGLFGLVASFHGIILGYSRQIFALAREGYLPEWLAKVHPRFKTPYRAILAGGVVGIAAIYSDELIQFGGQTLTANIVTMSVFGAIVMYIVSMAALFKLRRSQPNLERPFRAPLYPIFPAFAILAALVCLGTMVYFNGLVALVFVGFLAVGYAYFLATRAQRASAPGDALLEE

SEQ ID NO: 16521 - protein, 567 aa, Burkholderia cenocepacia J2315
MSHSKDLEPRTTTGARLLVDALLANHVERVFCVPGESFLAVLDALADDTARIQTVVCRHEAAAANMAEAVGKLTGRPGIAFVTRGPGATHASIGVHTAFQDSTPMILFVGQCAREHLDREAFQEIDYRRMFGQMAKWVAQIDDPRRIPEYLSHAFHVATSGRPGPVVLALPEDVLSDACAPQPVAPAAKRIAAAPSAAQLDELRERLARAERPFAIVGGSGWTPDACANLRTFVERWQLPVACAFRFQDTIDNAHPNYAGDVGLGINPALAKRIRDADLLLVIGPRLGEATTGGYTLLDIPKTRQTLIHVHQGADELGRVYAADLPIVSGMPEIAAPLAALEPPERPAWAGAAADAHRAYREWHAPLPMPGDVQLGDVMVQLRERLPHDAILTNGAGNYAIWLHRHFAYRHYRSQLAPTSGAMGYGLPAALAAKSLYPQRAVVALAGDGCFMMAGNELATAMQYGLNIVAIVVNNGHFGTIRMHQERNYPGRVHGTGLTNPDFAAYARAFGAHGETVERTADFAPALERALTCGLPAVIEIRIPQDASTPAATLEQIREQGRRARGA

SEQ ID NO: 16522 - protein, 289 aa, Burkholderia cenocepacia J2315
MDLGFIGLGEMGQAIATNLLKAGHTVRVWNRSRERAEPLAAFGAQIVDTPADAFRGDAVFSMLGDDAAARAVFDDALLAQAPRGLIHVNMATVSVALAESLAHAHASRGIDYVAAPVMGRPDVAAAARLTIMAGGPAEAIDRVQPLFDAIGQKTWRFGSLPQHANVAKIAANFTLASAIETLGEASALLGAHGVAMRDFLDVITSSVFPGPVYEGYGAMIAERRYEPARFKARLGLKDVRLALEAGDATSVPLPVASVVRDSLLDALAHGGGDQDFAVLGEAALRRAGR

SEQ ID NO: 16523 - protein, 756 aa, Burkholderia cenocepacia J2315
MDEQLKQAALAYHLNPKPGKISVTPTKPLSNQLDLSLAYSPGVAAACEAIHADPLDAQKYTSRGNLVGVITNGTAVLGLGNIGPLAAKPVMEGKGCLFKKFAGIDVFDIELSESDPDKLVEAIAMLEPTLGGINLEDIKAPECFYIEQKLRERMKIPVFHDDQHGTAIIASAAILNGLKVVGKKLSEVKLVCSGAGAAAIACLDLLVNLGLTKSNILVADSKGVIYEGRGNLDPSKQRYAANTDARTLADAIVGADVFLGCSSAGVLKQDMVKTMGDKPLILALANPEPEIRPEDAKAVRPDAIVATGRSDYPNQVNNVLCFPFIFRGALDVGATTITEEMKLACVRAIAELAEETDQSEEVAKAYEGHSLEFGPDYLIPKPFDPRLIIKIAPAVAQAAMDSGVATRPIQDMDAYREQLGATVYRTGMVMRPVFAAAKQKEARIVFAEGEDERVLRAAQFVLLEKIAKPIIVGRPSVVDMRLQKIGSKLKAGVDFEIVDPEDDARYHRYWQAYQEIGARDGVTPEVAKAAMRKFNTLIGAMLVHLGDADGMICGMIDTFHSHLKFIEQVLGRAKGAEHFAAMNLLMLPGRNLFVCDTYVNELPSADQLADMTIQAAAEIERFGIAPKAALLSNSNFGSAPSASSRRMAEARKLIVERAPNLEVDGEMHGDAALSELIRKQAFPGTTLSGEANLLIMPNVEAANIAYNLLKMVGGEGVTVGPFLLGAAKPVHILTPAATVRRIINMTAVAAANVNTK

SEQ ID NO: 16524 - protein, 362 aa, Burkholderia cenocepacia J2315
MATPQFHPLRIRDVRPETADAVTVSFDVPPELRDAYRFTQGQFVTLKTHIDGEETRRSYSICVGTTDYDRDGELRIGIKRVRGGRFSNFAFDTLKPGHMIDVMTPDGRFFTHLNADHGKQYVAFSGGSGITPVLAIVKTTLELEPRSTFTLIYGNRSVDAIMFAEELEDLKNRYMNRFVLYHVLSDDLQDVELFNGVLDQAKCAEFLATLTPADAIDEAFICGPAPMMDAAEAALKAAGVPQAKVHVERFGTPLPQAGAPVVEITDQTPAADLEIVLDGKKRKLRLPYEGVSLLDVGLRAGLALPYACKGGVCCTCRAKVVEGEVRMEKNYTLEEHEVEDGFVLTCQCHPISDKVVVSFDER

SEQ ID NO: 16525 - protein, 889 aa, Burkholderia cenocepacia J2315
MSTPLKTLITKLNPLCRHATERAASACLARGHYEVDLEHLFLALLDEATGDLPLALRASRVDPHALHADLERELTRLKTGNTRTPVFSVHLIALFEQAWLIASLDSQLGRIRSGHLLLALLTAPDLAQFAQRMSSRFAEMNVTDLKHKFDEIMAGSSEAEPRQTDDEGSDVAPAADGMAPAAGPSKTPALDTYTTNLTQRARDGKIDPVIGREAEIRQAIDILMRRRQNNPIMTGEAGVGKTAVVEGLALRIAADDVPPPLRGVALHVLDMGLLQAGASVKGEFENRLKSVIDEVKKSAHPIILFIDEAHTIIGAGGQAGQNDAANLLKPALARGELRTIAATTWSEYKKYFEKDAALARRFQVVKVEEPSEPLAAAMLRGMSGLMEKHFNVRILDDAITEAVRLSHRYISGRQLPDKAISVLDTACAKVALAHSATPAAIDDTKKRIERIDAEIASLEREVAGGAAHDERLGELRGARDTALEQLAKDEERYEAERVIVAEITELRDALDRARGPSEDGQPVDVQATRDKLAERVAALHALQGSEPMVPLQVDGHVVAEIVAAWTGIPLGRMVKDEIDTVLNLQPLLSARVIGQDHALEAIAQRVRTATANLEDPNKPRGVFMFVGPSGVGKTETALALADILYGGERKMVTINMSEYQEAHSVSGLKGSPPGYVGYGEGGVLTEAVRRNPYSVVLLDEVEKAHPDVLEMFFQVFDKGTMDDAEGREIDFRNTLIILTSNVGSAAVMQACLNKPAEELPDPDTLAETLRPQLYKTFKPAFLGRMKVVPYYPISDDVLAEIIELKLERIRRRIEANHKAAFEWDESLVDAVLARCTEVDSGARNVDHILNGTLLPEIAGHVLGRIADGAAIARIAVRADEAGEFAYTVE

SEQ ID NO: 16526 - protein, 532 aa, Burkholderia cenocepacia J2315
MKSSIQRNIGPFALMLTGLGSIIGSGWLFGAWKAAKIAGPAAICAWIIGAVVILAIALTYAELGAMFPESGGMVRYARYSHGSLVGFISAWANWIAIVSVIPIEAEASIQYMSTWPYPWAHALFVNGELQTLGLLLSAVLVVVYFLLNYWGVKAFARANTAITIFKFLIPGLTILGLMLTSFHAENLGTASNTSFAPYGWSAVLTAVATSGIVFAFNGFQSPVNLAGEARNPARSVPFAVITSILLALVIYVLLQMAYIGSVNPADVAKGWAHFNFSSPFAELAIALNLNWLAILLYVDAFISPSGTGTTYMATTTRMIYAMERNNTMPKMFGNVHPIYGVPRQAMWFNLLVSFIFLFFFRGWSSLAAVISVATVISYLTGPISLMALRRSATDIERPLSIPLMKLIAPFAFVCASLILYWAKWPLTGEIILLMIVALPVYFFFQAKSGWTGWGADLKAAWWLVAYLPTMAVLSLIGSKEFGGYGLLPYGWDMLVVAAISLVFYFWGVNTGYRTQYLDERESHDEILEGVGA

SEQ ID NO: 16527 - protein, 400 aa, Burkholderia cenocepacia J2315
MTDAYICDAIRTPIGRYGGALKDVRADDLGAVPLKALIERNRDVDWAAIDDVVYGCANQAGEDNRNVARMSALLAGLPTAVPGTTLNRLCGSGMDAVGTAARAIKAGEARLMIAGGVESMTRAPFVMGKAASAFARQANIFDTTIGWRFVNPLMKQLYGVDSMPETAENVALDYDISRADQDLFALRSQQKAARAQQDGTLAEEIVAVTIPQKKGDAIVVSRDEHPRETSLEALAKLKGVVRPDGSVTAGNASGVNDGACALLLANAQAADQYGLRRRARVVGMATAGVEPRVMGIGPAPATQKLLHQLGMRIDQFDVIELNEAFASQGLAVLRMLGVADDDPRVNPNGGAIALGHPLGASGARLVTTALHQLERTGGRFALCTMCIGVGQGIAIAIERV

SEQ ID NO: 16528 - protein, 552 aa, Burkholderia cenocepacia J2315
MDIKRTVLWVIFFMSAVMLYDNWQRDHGRPSMFFPSATHTAPAAAGGASGTGATTAGDVPAAAAGAAPSTTAPAAQAQLVKFSTDVYDGEIDTRGGTLAKLTLKKQGDGKQPDLYITLFDHTAGHTYLARTGLLGGDFPNHNDVYTQLNPGSTSLTGDQNTLKLSFESPVKGGVKVVKTYTFTRGSYVIGVDTKIDNVGTAPVTPTVYMELVRDNTAVETPMFSHTFLGPAVYTDAKHFQKIDFSDLDKNKANFEKSADNGWVAMVQHYFASAWIPQQGAKRDIYAEKIDPALYRVGVKQPVAAIAPGQSADVQARLFAGPEEERMLEGIAPGLELVKDYGWVTIIAKPLFWLLEKIHGYVGNWGWAIVLLTVLIKAVFFPLSAASYKSMARMKEITPRMQALRERFKSDPQKMNAALMELYKTEKVNPFGGCLPVVIQIPVFISLYWVLLASVEMRGAPWILWIHDLSQRDPFFILPVLMAVSMFVQTSLNPTPPDPVQAKMMKFMPIAFSVMFFFFPAGLVLYYVVNNVLSIAQQYYITRKLGGVKKKPA

SEQ ID NO: 16529 - protein, 468 aa, Burkholderia cenocepacia J2315
MSLFRKKNVDRMIAGAQAAGLKKALGAIDLTFLGIGAIIGTGIFVLTGTGAVQAGPALMLSFVIAAIACGLAALSYAEFASTIPVAGSIYTYSYATLGELVAWIIGWDLMLEYGLASSAVSVGWSGYLQSLLQGFGLSLPTVLTAAPGAVPGVTTWFNLPAFLVMIVITTLLSIGIRESTRINNIMVFIKVSVVLLVIAVGLFHVTPANWKPFMPHGWNGVFGAAAVMFFAFIGFDAVSSAAEEVKNPKRDLPIGIIASLAVCAVLYVTVAAVATGIVPSAQYANISHPISYALQVAGEKWVAGFIDLGAVLGMLTVILVMSYGQTRVIFAMSRDGLLPAALSRVHPRYATPFLTTWLVGLFFGLIAALVPLNVLAELINIGTLAAFSMVSIAVLVLRRTHPELPRAFRCPGVPVVPILAVASCLFLMLNLQPVTWAAFGIWLVIGLVIYALYSRHHSKLAHGHPDAH

SEQ ID NO: 16530 - protein, 1148 aa, Burkholderia cenocepacia J2315
METQEKKGYCTLCRSRCGTINVVRGDMMIKVRPDDTHPTGHAMCMKGKAAPELVHSPNRVLYPMRRTRPKGAADPGWQRIGWDEALAEIAGRLAYFKRENGAESVAFGVTTPSGTPMSDSIDWVERFVWLFGSPNICYATEICNWHKDSAHAFTFGCGIPVADYRHAELIVLWGNNPANTWLAQADAIAKSRRNGARLIVVDPRPTALAREADLWLRVQPGTDGALAMAIARQMIATGNVDDAFVREWTNGPLLVRADTGRFLRERDLDGEASGNRYVVWNATLERLECAGEESATRSADLLTTGVRRVAIRDAAGRCVEVDCTPAFDLYAKALDAYTPEQAAALTGVAAADIVKAAAMLRPHQAIAYHAWSGVGMHTNATQTERAIATLYALTGAFDTRGSNREWTKQPANAVSSYAMLSPQQRAKALGLAERPLGPPAQGWVTARDVYRAILDGEPYRVRALFAFGTNMVMSQADGGLAHEALCALDFHVHCDLFETPSSRYADILLPVNTPWEREGLRLGFEIDERAVELVQLRQRMVPPRGESRADYDIVFDLAVRLGMQDAFFGGSIEAGWNHVLEPLGLDVASLRAHPEGLYRPLPQRERQYAAATPDGVRGFNTETLRVELYSERLHRHGYPPVPQYVPPQHGDDARADNRRRFPCTLTSMKNGYYCHSQHRGLPSLRRRAPYPMAELNDALAAEHGIVDGDWCVIETTNGSARFKARVVPELARNVIVAEYGWWQACDEVGLDALAAGGRDNSNFNQLVSATRLDPVSGSSPLRSVRCRIRRDPSVDPARRAWKGLRDFVVSAIREEASGVRTVTFRAADGGALPDYLPGQHVTLHIPSLGDGGTTRAYSLTGAAHEDDRRSYAISVRHQKGQTRDGAAFEGAMSSYIHGVLKVGDPVLLGAPGGTFVVPPASRQPVVMFAGGIGITPFISYLESIRDLADRAPESRLFYANLNSRTHAFRDRIETLKQRLPTLDVVNCYNQPGDEIPGRDFQLHGYLSADVVADDLIRRRARFYLCGPEPMMEAITAGLIARGVPPFDIFKEAFRSPSRPTLDPSKRYAVQFTRSRRTATWTPGDGSLLSFAESLGIALPSGCRVGQCESCAVKVVSGEVSHPSGQGPDEADLCLACQAIPATDISIDA

SEQ ID NO: 16531 - protein, 311 aa, Burkholderia cenocepacia J2315
MVFTGNANPALAQEVVNILGIPLGKAMVSRFSDGEIQVEIQENVRGKDVFVLQSTCAPTNDNLMELMIMVDALKRASAGRITAAIPYFGYARQDRRPRSARVAISAKVIANMLEIAGVERIITMDLHADQIQGFFDIPVDNIYATPILLGDLRKQNYSDLLVVSPDVGGVVRARALAKQLNCDLAIIDKRRPKANVAEVMNIIGEVEGRTCVIMDDMVDTAGTLCKAAQVLKDRGAKQVFAYATHPVLSGGAADRIAASALDELVVTDTIPLSAESLACSKIRSLTSASLLAETFSRIRRGDSVMSLFAES

SEQ ID NO: 16532 - protein, 397 aa, Burkholderia cenocepacia J2315
MTDVVIVSAARTAVGKFGGSLAKVAAPELGATVIRAVLERAGVKPEQVSEVIMGQVLTAGSGQNPARQSLIKAGLPNAVPGMTINKVCGSGLKAVMLAANAIVAGDAEIVIAGGQENMSASPHVLPGSRDGFRMGDAKLVDTMIVDGLWDVYNQYHMGITAENVAKEYGITREEQDAFAALSQNKAEAAQKAGRFDDEIVPVSIPQRKGEPLQFATDEFVRHGVTAESLAGLKPAFAKDGSVTAANASGLNDGAAAVLVMSAQKAAALGLTPLARIKAYANAGVDPSVMGMGPVPASRRALERAGWTPGDLDLMEINEAFAAQALAVHKQMGWDTSKVNVNGGAIAIGHPIGASGCRILVTLLHEMVKRDAKRGLASLCIGGGMGVALAVERVGAAA

SEQ ID NO: 16533 - protein, 399 aa, Burkholderia cenocepacia J2315
MSKQLQDAYIVAASRTPIGKAPRGVFKNTRPDELLVHAIKSAVAQVPGLDTKVIEDAIIGCAIPEAEQGLNVARMGALLAGLPQTVGGVTVNRFCASGITALAMAADRIRVGESDAIFAGGCESMSMVPMMGNKPSMSPHIFDRNEDFGIAYGMGLTAERVAEQWKVSREDQDAFSVESHRKALAAQQAGEFNDEIAAYTISERFPNLATGEIDVKTREIKLDEGPRADTSLEGLAKLRTVFANKGSVTAGNSSQTSDGAGALLVVSEKVLKEFNLTPLARFVSFAVRGVPPEIMGIGPKEAIPAALKAAGLKQDDLDWIELNEAFAAQSLAVMRDLGLDPSKVNPMGGAIALGHPLGATGAIRAATVVHGLRRRNLKYGMVTMCVGTGMGAAGIIERL

SEQ ID NO: 16534 - protein, 187 aa, Burkholderia cenocepacia J2315
MPTSPNRKLVVLDRDGVINVDSDAFIKTPDEWIALPGSFEAIARLNHAGYRVVVATNQSGIGRGLFDMAALNEMHLKMHRAAAAVGARIDAVFFCPHTAEDHCDCRKPKPGMMQMIAERFEIDPDHTPVVGDSLRDLQAGVAVGFQPHLVLTGKGKKTLAAGNLPPGTKVHDDLRAFALDFLSHEHE

SEQ ID NO: 16535 - protein, 477 aa, Burkholderia cenocepacia J2315
MSFESLGLAEPLVKAVNELGYTSPTPIQQQAIPAVLGGGDLLAGAQTGTGKTAGFTLPILQRLHTFYAEHRGAKRAVRALILTPTRELAAQVEESVRAYSKYLKLRSTVMFGGVSINPQIDALKRGVDIVVATPGRLLDHMQQKTIDLSDLDILVLDEADRMLDMGFIHDIKRVLAKLPPQRQNLLFSATFSDEIKALADSLLDSPALIEVARRNTTAESVAQKIHPVDRDRKRELLTHLIREHNWFQVLVFTRTKHGANRLAEQLTKDGISAMAIHGNKSQSARTRALAEFKNSTLQVLVATDIAARGIDIDQLPHVVNFDLPNVPEDYVHRIGRTGRAGATGEAVSLVCVDEKQLLRDIERLIKREIPQEVIAGFEPDPNAKPEPIQQRRGQQQPRGGGGGGNRQPRAGGSGQPAAKRDGHAQPKAAKPRTQGGAGAGGNGGGRPAGGGNGARPANGNAAHANRNRSSRSGQRGH

SEQ ID NO: 16536 - protein, 329 aa, Burkholderia cenocepacia J2315
MQKILVARPIFPDVIERLKQYFEVDWNDGDALAPDALAARLADKDGALTAGDPVGAATLAAAPRLRVVANMAVGYNNFDMAAFNAANVLGTNTPDVLNESTADFGWALMMAAARRIAESEHWLRAGHWQKWAYDGFLGADIHGSTLGVIGMGRIGQALARRARGFGMQVIYHNRSRVAPEIEAELNAEYVSKDALLARADHVVLVLPYTKENHHTIGAAELAKMKPTATLTNIARGGIVDDAALAVALRDGTIAAAGLDVYEGEPSVHPALLEVPNVVLTPHIASATEKTRRAMADLAADNLIAALGEGPRAGRPPNPINPDVIGKPRA

SEQ ID NO: 16537 - protein, 299 aa, Burkholderia cenocepacia J2315
MNTPAPTGFRCGMIAIVGRPNVGKSTLMNALVGQKISITSRKAQTTRHRITGINTFDDAQFVFVDTPGFQTRHSTALNRSLNRAVTSTLTSVDVILFVIEAGRFGPDDQKVLDLIPPGMPTLLIANKIDRVNDKASLFPFMQKVSELREFTELVPLSAQKPEDIKRLLDTIKPYLPEGEPIYGEDELTDRSSRFLAAEILREKVFRWTGDELPYTSTVLIDKFEEEGRLKRIFATILVERDSHKAMVIGKKGEKLKQISTEARMDMEKLFDGPVYLETFVKVKSGWADNEAGLRAYGYE

SEQ ID NO: 16538 - protein, 461 aa, Burkholderia cenocepacia J2315
MSRLIIVSNRVAPISEGEPAAGGLAIGVYDALKETGGMWFGWSGEVVASGAPQPQIRIEERGPVTFATVGLSRRDYDQYYRGFSNATLWPAFHYRADLIQYDRHEFDGYRRVNVWLAQQLVPLLQDDDVIWVHDYHLIPFARALRDAGVKNRIGFFLHIPFPAAQVLVNVPPHRELVESLCAFDLLGFQTEPDLRAFCDYVEFEADGDVERDGHTVHVRAFGQTLRAAAYPIGVYPDEIASLAQAGEHGKAVRTLATSLRGRQLIMSVDRLDYSKGLVERFRAFEKLLEHQASIRNRVSFLQIAPSTRADLRAYQDIRLQLEAESGRINGRYAELDWAPILYIHRQYDRQVLAALYRLARVGFVTPLRDGMNLVAKEYVSAQNPDDPGVLVLSRFAGAARELTGALIVNPIDIDGMADALSQALTMPLAERRARYADMIAQLRENNVSVWRDNFLRDLQHV

SEQ ID NO: 16539 - protein, 455 aa, Burkholderia cenocepacia J2315
MKNLQRHLSARHIRFLALGSAIGTGLFYGSASAIQLAGPAVILAYVLGGAAVYMVMRALGEMAVREPVAGSFGHYATENLGPFAGFVTGWTYTLEMVIVAIADITAFGIYMGFWFPDVPQWIWVLGVVAIICGLNLCHVKVFGELEFWLSIIKVGAIVAMIGGGVAILLTGMHFGHSADMPTFANLWNHGGFLPNGVGGLIASLSVVIFAYGGIEVIGMSAGEAKDPERVIPRAINAVPARILLFYVLTMVVLMSISPWTGVGSDGSPFVQIFSALGVKSAATILNLVVISAAISAINSDIFGAGRMMFGMARQGQAPRVLMTTSRHGVPWVTVLVMAGALLVGVLLNYLMPKDVFLVVAAIATFATVWVWLMILLSQVAMRRRLSSAEVAALKFKVPLWPVAPALTIAFMGFVIVMLGWFDDTRVALYVGAAWLALLAAVFYARIRPKFAAASR

SEQ ID NO: 16540 - protein, 322 aa, Burkholderia cenocepacia J2315
MSQNDFAFTRDSLYGTQAEPSFAGATSFMRRRFSRDLDGVDLAITGVPFDSAASHRPGTRFGPRGLRIASTGIAWERPWPWSFDPFDVLAAVDYGDCAFDLGQPEAVPGAIERHADAILARGCAMLTLGGDHFITYPLLKAHAKVHGPLSLVHFDAHTDTWPDRDVKRIDHGTMFYHAAREGWVVPERSAQIGIRTTNDDPMGFDIQDARHVHGSTPAAVAARIRERVGDHPVYLTFDIDCLDPAFAPGTGTPVSGGLSSHQAFEILRHLDGINLVGMDVVEVSPPYDHAEITSLAGATIALELICLYASRRRQKKEASIDG

SEQ ID NO: 16541 - protein, 632 aa, Burkholderia cenocepacia J2315
MNNNMFSKAAVWLVIALVLFTVFKQFDKPRVQEGVSYSQFMDDAKNGKVKNVIVQGRNLTVTPADGQKYQIVSPGDIWMVGDLMKYGVQVSGKADDEPNALMSALYYLGPTILIIVFWFYMMRQMQGGGKGGAFSFGKSRARLIDENNNAVNFSDVAGCDEAKEEVSELVDFLRDPQKFQKLGGRIPRGVLLVGPPGTGKTLLARAIAGEAKVPFFSISGSDFVEMFVGVGAARVRDMFEQAKKHAPCIVFIDEIDAVGRHRGAGMGGGNDEREQTLNQMLVEMDGFEANSGVIVIAATNRSDVLDKALLRPGRFDRQVYVGLPDIRGREQIMRVHLRKVPIANDVDAAVIARGTPGFSGADLANLVNEAALFAARRGKRIVEMQDFEDAKDKIFMGPERKSAVIREEAKRATAYHESGHAVIAKLLPKADPVHKVTIIPRGRALGVTWQLPEHDNETYSKDYLLDRLAILFGGRVAEELFMNLVSTGASDDFNKATQTARAMVARFGMTDALGPMVYVDDENDASPFGRGFTRTISEATQQKVDSEIRRVLDEQYGLARRLLEENRDKVEAMTAALMEWETIDADQINDIMEGRPPRSPKSSPAVGGDSSGGGSSAEVKPGNAPAPATPAA

SEQ ID NO: 16542 - protein, 280 aa, Burkholderia cenocepacia J2315
MAYLTPNEFVTRMVDAGESKLSMSTRDTLIRAYMAGAILALAAAFAVSITINTGNALAGSLLFPVGFCMLYLLGFDLLTGVFTLAPLAVIDRRPGATWGGVFRNWTLVFFGNFAGALTVALFMAIIFTFGFSEAPNAIGRKIGGIGEARTLGYAAHGAAGMLTLFVRGVMCNWMVSTGVVAAMMSTSVPGKVIAMWMPILVFFYMGFEHSVVNMFLFPSGLMLGAHFTIVDYLLWNEIPTVLGNLVGGLVFVGAALYSTHYKTAPKRAPAAPVGVVARKA

SEQ ID NO: 16543 - protein, 569 aa, Burkholderia cenocepacia J2315
MSTERNDAPAASNFIRNIIDDDNRTGKWGGRVETRFPPEPNGYLHIGHAKSICLNFSVARDYGGVCHLRFDDTNPEKESVEYVDSIVDAVRWLGFDWRKDAVDHQYFASDYYDKLYEFAELLIKRGKAYVDSQSADEMRANRGSLTEGGKPSPFRERTPEENLDLFRRMKAGEFKEGEHVLRAKIDMASPNMNMRDPVIYRIRYAHHYRTGDAWCVYPMYDYTHCISDALEGITHSLCTLEFEDHRPLYDWVLNELAEAGVFTRPLPQQIEFSRLNLTYAITSKRKLLQLVTEGHVDGWDDPRMPTIVGVRRRGFTPESIHLFCERIGVTKIDSWIDMSIFEGALRDDLDDKAARTVAVLDPLKLVIDNYPEDLEEACTAPVHPHHPDRGVRTFPISRELWIEREDFVENPPKGYFRLFPGNKVRLRYGYVIECTGFDKDADGNVTAVHCNYFPDSKSGTEGANTYKVKGNIHWVSAKHAQPAEVRIYDRLFKEPHPDAGGANFLEALNPDSKKIVQAYLEPGNGDVAPETRLQFERHGYFVADRVDSKPGKPVFNRIVGLRDSWGKPA

SEQ ID NO: 16544 - protein, 271 aa, Burkholderia cenocepacia J2315
MKINTLATWLIGVALVTAGTAAHADRLDDIKKAGVLRVATFDSNPPFGYVDAKSNHIVGLDVDYAKALADKLGVKLQLQPTNPANRIPFLTSGKVDLVLANFTITDERAKQVDFSIPYFSSGQQFLAKKGVLKSADQLNGLRVGADKGTTNEITLREKFPKATIVAYDDTPFAFAALRAGNVQAITQDGPKLIGLLANVPDKQNYEIPAFTISNDYMGVGVPKGETRLLGFVNDTLKGLEANGRATQIYDAWFGPTTKTPLTRIFRIGDKT

SEQ ID NO: 16545 - protein, 453 aa, Burkholderia cenocepacia J2315
MRPSACPGLVRVVAAADGGLCRIKLPGGRLDARQARAIAAAARRYGSGAIDATNRANLQLRGIRDGATDALTHALLEAGLGPRASAGDTAAEAAALAASDDVRNVLLSPLAGHDPTALVDSHALAVPLLDMLANEPRRGELSPKFSIQLDGGEAVAALDHPHDIWLAAWRRADGAVRLAAGLAGCPPVAPGDRPASVDVSPDQGVALVRALLRAFLDLAPADVTRMRALLAMCGERTLFERARRYLPFPLAADPALAGWRRTHADPALRFGAQPSRAAARCSVGAQFALGRLDAAQLERLAALAEADGDGTLSMTPWQGVFMHGVPNERAVAMREALKSLGLVGAASEPLAALVACTGSAGCAKAHADTKHDALALAARIGRPLDVHLTGCARHCALPHPATHTLVAVAPAHYDLYRRDATTGLGALLARHLTIDQAAVRLMDARHSQDTTDA

SEQ ID NO: 16546 - protein, 319 aa, Burkholderia cenocepacia J2315
MSPLRIRVERIDALTPAIRRLHLVAADGGPLPGFTAGAHIGVHVPLSPRSQRRAYSLVNAGGRADSIDRYEIAVLHAAAGSGGSQWMHACAPGDEFDIDPPRNDFPLVARARRHLLVAGGIGITPILAMARELASSGRPFTLHYAARDAVSMAYRDEVAALPGATCWFDDGEPSRGLPLADAIGAPERGTHLYVCGPAGLIEATLAAARHLGWRDDALHCERFAAPVATAENATVEVRLAGSGHVLNVPPGTSILDAMIEAGLDPLYDCRRGDCGVCAVRLLDGDPDHRDICLSDDDHASGAFCPCVSRAHGAHLVLDL

SEQ ID NO: 16547 - protein, 321 aa, Burkholderia cenocepacia J2315
MKPRIVAYKPLPDDVLAYLREHADVAQADGADALAAALGDADGAIGASLKVTPQMLDRAPRLKAWSTISVGYDNFDVADFTRRGIVLAHTPDVLTESTADTVFSLILASARRVVELAEWVKAGNWHRSIGPDLYGTDVQGKTLGIVGLGRIGGAVARRAALGFRMQVLYANRSAHAEAETQYGARRVTLDALLAQSDFVCLQVPLSPDTRHLIGAPEFAKMKRSAILINASRGPVVDEAALVDALRAGTIRAAGLDVFEKEPLPADSPLLQMKNVVALPHIGSATHETRHAMARCAAENLVGALAGTLCTNLVNPDALAHA

SEQ ID NO: 16548 - protein, 393 aa, Burkholderia cenocepacia J2315
MTDVVIVSAARTAVGKFGGSLAKVAAPELGATVIRAVLERAGVKPEQVSEVIMGQVLTAGSGQNPARQSLIKAGLPNAVPGMTINKVCGSGLKAVMLAANAIVAGDAEIVIAGGQENMSASPHVLPGSRDGFRMGDAKLVDTMIVDGLWDVYNQYHMGITAENVAKEYGITREEQDAFAALSQNKAEAAQKAGRFNDEIVPVSIPQRKGEPLQFATDEFVRHGVTAESLAGLKPAFAKDGSVTAANASGLNDGAAAVLVMSAQKAAALGLTPLARIKAYANAGVDPSVMGMGPVPASRRALERAGWTPGDLDLMEINEAFAAQALAVHKQMGWDTSKVNVNGGAIAIGHPIGASGCRILVTLLHEMVKRDAKRGLASLCIGGGMGVALAVERP

SEQ ID NO: 16549 - protein, 865 aa, Burkholderia cenocepacia J2315
MRIDKLTTKFQEALADAQSLAAGRDNQYIEPVHVLAALVAQQDGSARSLMSRAGVHVQALQGALNEAISRLPQVTGTGGDIQIGRELAGLLNQADKEAQKLNDTFIASEMFLLAVSDDKGDAGKLARQHGLTRKALEAAIAAVRGGSQVHSQDAESQREALKKYTVDLTERARAGKLDPVIGRDDEIRRSIQILQRRTKNNPVLIGEPGVGKTAIVEGLAQRIVNGEVPETLKGKRVLSLDMAALLAGAKYRGEFEERLKAVLNDIAKDEGQTIVFIDEIHTMVGAGKAEGAMDAGNMLKPALSRGELHCIGATTLDEYRKYIEKDAALERRFQKVLVDEPSVEATIAILRGLQEKYELHHGVDITDPAIVAAAELSHRYITDRFLPDKAIDLIDEAASKIKMEIDSKPEEMDKLDRRLIQLKIEREAVKKEQDEASQKRLQLIEEEIERLGREYADLEEIWTAEKAAVQGSAQLKEEIEKVRADIARLQREGKLEKVAELQYGKLPQLESQLKQVTQAEEQEQHNPTRPRLLRTQVGAEEIAEVVSRSTGIPVSRMMQGEREKLLHIEEKLHERVVGQDEAISAVADAIRRSRAGLADPNRPYGSFLFLGPTGVGKTELCKALASFLFDSEEHLIRIDMSEFMEKHSVARLIGAPPGYVGYEEGGYLTEAVRRKPYSVILLDEIEKANPDVFNVLLQVLDDGRMTDGQGRTVDFKNTVIVMTSNLGSQVIQAMTGSPQDEIKDAVWLEVKQHFRPEFLNRIDDVVVFHALDRSNIESIAKIQLARLHDRLAKLDMALDVSPAALEQIAKVGYDPVFGARPLKRAIQQEIENPVAKLILAGRFGPKDVIPVDVNDGQFVFDRVVH

SEQ ID NO: 16550 - protein, 412 aa, Burkholderia cenocepacia J2315
MKPIQKSNKLLNVCYDIRGPVLEHAKRLEEEGHRIIKLNIGNLAPFGFDAPDEIIQDMIRNLPASSGYSDSKGVFSARKAVMHYTQEKGVVGVGLDDIYIGNGASELIVMATQALLNDGDEVLLPAPDYPLWTAAVSLSGGTPVHYVCDEQNAWMPDLDDIRRKITPNTKAIVVINPNNPTGALYSDELLLELLEIARQHGLIVFADEVYDKIVYDGLEHTALGALSEDVITVTFNSLSKSYRSCGYRAGWMAVSGLGGDNRRRAKDYLEGLGILSSMRLCANVPGQFAIQTALGGYQSINELIVPSGRLYKQRELAYDMLTSIPGVTCVKPQAALYMFPRLDPKLYPIQNDQQFILDLLLEERVLLVQGTGFNWTTPDHFRVVFLPNLDDLTDSINRIARFLDGYRKRHSV

SEQ ID NO: 16551 - protein, 297 aa, Burkholderia cenocepacia J2315
MATIGFIGLGIMGAHMARNLLKGDHQLVVNGAFPIPDDLRGSAKVVANSTEVAQHADIIISMVPDTPDVRNVLFADDGVAKGLTAGKLVIDMSSISPLDTQAFAKQINALGCDYLDAPVSGGEVGAREATLTIMVGGPEKAFERAKPLFEKMGKNITLVGDNGAGQTCKVANQIIVALNIEAVGEALLFAARSGADPERVRQALMGGFAASRILEVHGARMTKRTFDPGFRIELHQKDLNLALDGARKLGLALPHTASAQQLFSVCASHGGKAWDHSALVRALEIMSNFEIGQTPAA

SEQ ID NO: 16552 - protein, 392 aa, Burkholderia cenocepacia J2315
MTEAVIVSTARTPLAKSWRGAFNMTHGATLGGHVVAAALERAKLDPARVEDVIMGCANPEGATGANIARQIALRAGLPVSVPGMTVNRFCSSGLQTIALAAQRIIAGEGEIYVAGGVESISCVQNEMNRHMIQEGWLVQHKPEIYWNMLQTAENVAKRYGISKERQDAYGVQSQLRAAAAQEAGLFLDEIVPITVLAGIADKATGRLFTQEVTVSADEGIRPDTTLEGVSKIRSAVPGGVITAGNASQFSDGASACVVMSAEAAQREGLQPLGAFRGFAVAGCEPDEMGIGPVFAVPKLLKQAGLKVDDIGLWELNEAFAVQVLYCRDTLGIPEDRLNVNGGAIAVGHPYGVSGARLTGHALIEGKRRGVKYVVVTMCIGGGQGAAGLFEIL

SEQ ID NO: 16553 - protein, 294 aa, Burkholderia cenocepacia J2315
MQTAVGFIGLGVMGTPMALNLARAGTPLVVWSRSHGSDDALRDAGARVADDIDDVFASCRTVILMLANDAAIDAALARGTRAFAARVGAHTIVNMGTNAPDYSRALADEIAAASGRYVEAPVSGSRKPAEAGQLVVMLAGAPDDVEAVRALVKPLCRDSFVCGDVPSALTMKLAVNLFLITMVTGLTEATHFAQRHGIDLARFADVLNAGPMASDVSRVKLGKLVAADFSVQAAITDVLKNARLVAESARGIGIASPLLDICHALYGETERAGHGAADMVAVIRAIEQRTRDVR

SEQ ID NO: 16554 - protein, 514 aa, Burkholderia cenocepacia J2315
MTSSINSSPLNAIADQALGLDDAAAPAAVEPASDEPSFASLGLSPEIVSALQAAGYVKPTPVQQRAIPVGIAGRDLLVSSPTGSGKTAAFMLPAIETFAQLQKTQAQQPRAPREPNQGDRRARRPQPVARPGLLVLTPTRELAMQVTTAASTYGKHLKRLRTVSILGGVAYGQQLMLLAKNPEILVATPGRLLDHLERGRIDLSELKMLVLDEADRMLDMGFIEDIETIVDATPDTRQTMLFSATLDGKIGSLTSRLLKDPERIEIQQRLESRANIAQTVHYVDDRDHKDRLLDHLLRDDALDQAIIFTATKIDADQLAGRLADAGFESAALHGDLPQGARNRTIRALRERRVRVLVATDVAARGIDIPGITHVFNYDLPKFAEDYVHRIGRTGRAGRSGIAVSLVHHAEQGALKRIERFVRSPLPVNVIEGFEPRKAPPRNGGNGGRGRPGGGNGGRRFGGKPGGGYGGNGNGRSYGGGNGGGWSGKPGGSRDGGPRRDGQRSGGPRRSNSAS

SEQ ID NO: 16555 - protein, 417 aa, Burkholderia cenocepacia J2315
MALIVHKYGGTSMGSVERIKNVAKRVAKWHQAGHQMVVVPSAMSGETNRLLGLAKEISSQPSPRELDMIASTGEQVSVGLLSIALQEIGVEAVSYAGWQVPIKTDSAFTKARIHSIDDERVKDDLNAGKVVIITGFQGVDPDGHITTLGRGGSDTSAVAVAAALGAEECLIYTDVDGVYTTDPRVVEEARRLDRVTFEEMLEMASLGSKVLQIRSVEFAGKYQVKTRVLSSLTDPLIALDEEMRSGTLITFEEDETMEKAVISGIAFQRDEARIAVMGVPDKPGIAYQILGPVADANVDVDMIIQNQSVEGKTDFTFTVGRGDYQKAMDILTNQVQGHVSAERVQGDPKVSKVSVVGVGMRSHVGVASKMFRTLSEEGINIQMISTSEIKISVLIDEKYMELAVRALHKAFELDQAS

SEQ ID NO: 16556 - protein, 407 aa, Burkholderia cenocepacia J2315
MTQETLHLPIYMDYSATTPVDPRVVDKMVPYLREQFGNPASRSHAYGWDAERAVEEAREQVAALVNADPREIIWTSGATESDNLAIKGAANFYKGKGKHIITVKTEHKAVLDTCRELERDGFEVTYLDVKDDGLIDLDVFKAALRPDTILVSVMHVNNEIGVIQDIETIGEICREKGIVFHVDAAQSTGKVAIDLAKLKVDLMSFSAHKTYGPKGIGALYVRRKPRVRIEAQMHGGGHERGMRSGTLPTHQIVGMGEAFRIAREEMATENERIRMLRDKLLRGLSQIEETYVNGDMDHRVPHNLNISFNFVEGESLIMAIKDVAVSSGSACTSASLEPSYVLRALGRNDELAHSSIRFTVGRFTTEQEVDFVIDLLNSKIAKLRELSPLWEMHQEGIDLSTIEWAAH

SEQ ID NO: 16557 - protein, 384 aa, Burkholderia cenocepacia J2315
MPTTPVFPSRLPNVGTTIFTVMSALAAEKGAVNLGQGFPDFDCDPRIVDAVSAAMRNGHNQYPPMAGVAPLRDAIADKIAQVYGRRYDPASEITVTAGATQALLTAILCAVHPGDEVIVVEPTYDSYLPSIELAGGKPVFVTLEAPDYAIPFDRLAAAITPKTRMILINTPHNPTGTVWREADMRKLEDIVRGTNVLILSDEVYEHMVYDGARHESVARYPELAARSFIVSSFGKTYHVTGWKVGYVAAPAALTAEFRKVHQFNVFTVNTPMQIGLADYLRDPAPYLSLAGFYQHKRDFFRAGLERTRFKLLPCTGTYFQCVDYSAISDLPEAEFSKWLTSEIGVAAIPVSAFYHEPHESGVVRFCFAKQESTLASALERLARL

SEQ ID NO: 16558 - protein, 587 aa, Burkholderia cenocepacia J2315
MNMPSAEFSTSEPLSPPDSDSIGGTVLMKALADENVEFIWGYPGGSVLYIYDELYKQDKIQHVLVRHEQAAVHAADAYARSTGNVGVCLVTSGPGVTNAVTGIATAYMDSIPMVVISGQVPTAAIGQDAFQECDTVGITRPCVKHNFLVKDVRDLAETVKKAFYIARTGRPGPVLIDIPKDISKTPCQYEPIKSVSLRSYNPVTKGHSGQIRKAVSLLLTAKRPYIYTGGGIILADASRELNQFADLLGYPVTNTLMGLGGYRASDKKFLGMLGMHGTYEANMAMQHCDVLIAIGARFDDRVIGDPAHFASRPRKIIHIDIDPSSISKRVKVDIPIVGDVKEVLKELIEQLQTAEHGPDTEALAQWWKDIEGWRAKDCLKYDRESEIIKPQYVVEKAWELTDGNAFVCSDVGQHQMWAAQFYRFNKPRRWINSGGLGTMGFGLPAAMGVKMAHPDDDVLCITGEGSIQMCIQELSTCLQYDTPVKIISLNNRYLGMVRQWQQIEYSKRYSHSYMDALPDFVKLAEAYGHVGMRIEKTSDVEPALKEALRLKDRTVFLDFQTDPTENVWPMVQAGKGITEMLLGSEDL

SEQ ID NO: 16559 - protein, 595 aa, Burkholderia cenocepacia J2315
MSVKPTLSKPIGGEDASSPVVVARRLWPYLKPLLWVMVAGVLAMAVVAATEAGIPALLKPLLDRGFGTKGDVTAKLYVPIAVVGLALVRAAAQYASNYLLQYVSNRILLDLRIEMFNRMIHTGVSFFQRETASTVINAVVFEVNQVLNVLLGVLITLVRDSLTVVFLLGYLFYLNWRLTLIVAVLLPCIGWLVGKINRRLRRLNREHQMLTNQLAYIVEETVGGYKVVKIHNGEQYEISRFNELSRRLRGYSMRMIVSGGLAQPLTQFLASIALAVVLTIAVVQSANDQTTVGGFVAFVTAMLLIISPLKHLMDVNQPLQRGMTAAELIFGLIDEPREPEGGGKPLERATGRIRFNDVSFAYHAGTGKPTLDRVSFDVAPGEMIALAGPSGSGKTTLVNLMPRFFDPTSGEILVDGVALPEYRLRDLRDQIAMVSQDVVLFNDTIASNVAYGQSPDRERVTAALRAANLLSTVEAMPDGLDTLVGDNGMRLSGGQRQRLAIARAIYKDAPILILDEATSALDSESERHVQAALETLMKGRTTLVIAHRLSTIERADRILVMDGGRIVESGSHAALLASGGLYAHLHRIQFQQEAG

SEQ ID NO: 16560 - protein, 494 aa, Burkholderia cenocepacia J2315
MSDSVAKPVDATFDQFGLAADILKAIAEQGYTTPTPIQAQAIPVVLAGRDVMGAAQTGTGKTASFSLPIIQRLLPQANTSASPARHPVRALILTPTRELADQVAANVHAYAKHTPLRSAVVFGGVDMNPQSAELRRGVEILIATPGRLLDHVQQKTANLGQVQILVLDEADRMLDMGFLPDLQRILNLLPKERQTLLFSATFSGEIKKLASTYLRNPQTIEVARSNSTNANVTQIVYDVAEGDKQAAVVQLLRDRGLKQVIVFCNSKIGASRLARNLERDGVVASAIHGDKTQIERMQALDAFKRGEIEALVATDVAARGLDIAELPAVINFDLPFSAEDYVHRIGRTGRAGATGDALSLCSPNERKQLADIEKLIKRPLEMQTLKLDKPARHRHDERGGERGGERGGERGGRRDRDEHRGASGRRSSGSAERGGHHRRHEAPVDDFFLKPYEPSASAKQPDDAQPAQQPEKKGPKRQVAALLGGFGMPRKPSA

SEQ ID NO: 16561 - protein, 516 aa, Burkholderia cenocepacia J2315
MNLGATFVFVLLFIGVTIIGFLAANWRRGDLAHLDEWGLGGRRFGTIVTWFLLGGDLYTAYTFVAVPALVFGAGAMGFFALPYTILIYPFAFVVFPKLWSIAKRHGYVTAADFVNARYGSRMLALAIAVTGIVATMPYIALQLVGIEVVIGALGFDTTGFVGDLPLIIAFAILAAYTYTSGLRAPAMIAIVKDVLIYVTIAAAVIVIPAKLGGFGHIFSAVPPAKLLLKAPDATSLNGYSAYATLAIGSALALFLYPHSVTAILSSSSGNSIRRNMAMLPAYSFVLGLLALLGYMALASGVKDMPQYAPYFKAFGPNFAVPALFLEYFPSWFVGVAFAAIGIGALVPAAIMSIAAANLYTRNIHREFVNRNMSHDQETHVAKLVSLIVKVGAVAFILGLPLTYAIQLQLLGGIWIIQTLPAIVLGLYTRVLDHRGLLAGWAAGIVCGTWMAISLKLASSIFTIHLFGLAIPGYAAVWSLVVNLVVSVAVSVLVRVMGMAHAEDRTRPEDYLDVVEG

SEQ ID NO: 16562 - protein, 474 aa, Burkholderia cenocepacia J2315
MSRLIVVSNRVAAGEDTRPSAGGLAVGVMDALRETGGVWFGWNGEIVGAPDAEPAIQRDGNVTYATVGLTRRDYDQYYRGFSNATLWPVFHYRGDLARFDRQEYAGYLRVNAMLAKQLAALLRPDDLIWVHDYHLLPFAHCLRELGVKNPIGFFLHIPFPSPDMLRLVPPHEELVKFMCAYDVAGFQTEADKQAFTDYIERRGIGAASDDDGMLHAHGRVVKVAAYPIGVHPDAIAQAAVQYGTRKPVKMLREALGDRKLVMSVDRLDYSKGLVERFQSFERMLANAPGWQGRVSLLQIAPPTRSDVQTYQHIRETLEGEAGRINGRFSQLDWTPIQYLNRKYERNLLMAFFRMSQVGYVTPLRDGMNLVAKEYVASQDPADPGVLVLSEFAGAAAELTGALLVNPYDLSQMAEALERALSMPLAERQARHEENLARLRENDLSVWRDTFVADLRSVAAAASVTRRAGRRVAHA

SEQ ID NO: 16563 - protein, 582 aa, Burkholderia cenocepacia J2315
MSTVSGESSSPLAPPTGRHEAFIRSLTEIVGQQDVLTNERDTRRYRTGFRFGEGRTLAVVRPGTLLQQWKVLQACVAANVIVICQASNTGLTGGSTPDGDDYDRDIVIVSTARIRKVHVIKSGKQVICLPGATLDQLEQTLKPLGREPHSVIGSSCIGASVIGGVCNNSGGALVQRGPAYTEMSVFAQVGADGRLKLVNHLDVRLGAVPEEILARLDNGDFSERDIVDGDASGSDHHYAEHVRDVDADTPARYNADPLRLHEASGSAGKVMVFAVRLDTFPIEAGAKVFYIGTNDIDELTDIRRHALTQFKRLPIAGEYLHRDAFDIAQKYGKDTFLMIRHFGTKRMPMLFGFKSKCDAWFDRLGFLPRHLSDRVMQAVSNLFPNHLPPRIRDYGKRYEHHLMLKVSADTADEARSFLTSFFAKRTGAFFECTPAEGDKAFLHRFAAAGAAIRYRNVHTRDVEDIVALDIALRRNDRDWFETLPPDIDAPIAIKLYYGHFLCHVFHQDYIVKKGNDCLALEHAMWKLLDARRAEYPAEHNVGHLYHAKPALKAFYEGLDPCNCFNPGIGQTSKFAKYREAHD

SEQ ID NO: 16564 - protein, 128 aa, Burkholderia cenocepacia J2315
MQRHMLKSKIHRAAVTHCELHYEGSCAIDEDLLEAAGLIENERIDIWNINNGERFSTYAIKGERGSGMISLNGSAARRAQLGDLVIIAAFAMVDEAELQAGWKPKLVFIDEGNKIKGHRDHVPTQNWT

SEQ ID NO: 16565 - protein, 559 aa, Burkholderia cenocepacia J2315
MYQYDQYDQTIVDERVAQYRDQVRRRLSGELSEDEFRPLRLQNGLYMQRHAYMHRIAIPYGNLRSDQLRMLARIAREHDRGYGHFSTRSNIQFNWVQLEETPEILAKLASVQMHAIQTSGNCIRNITADQFAGVAQDEEIDPRPWAEILRQWSTFHPEFAWLPRKFKIAVSGSKRDRAAVQIHDLGVYLKKNAQGEVVASILAGGGLGRTPIIGAVIKEDLPWQHLLTYCEAVLRVYNRYGRRDNLYKARIKILVKALSPAKFAQQVEEEWQHLKDGPSTLTQAELDRVSQYFKPPVYEKLADTDASFEQHLLENKAFARWVERNVAPHKVPGYAAVTLSLKDHRVAPGDATDAQMDLVADWADAYSYGELRVSHEQNLILANVKKRDLFALWEKAKAAGFATPNIGLLTDIIACPGGDFCSLANAKSIPIALAIQQRFDDLDYVYDLGELSLNISGCMNSCGHHHVGNIGILGVDKDGAEWYQVSLGGEQGTGQNGARLGRVIGPSFSAEEVPDVIAKLIDTFVEARLDGERFVDTYDRIGIAPFKERVYAARQAVNA

SEQ ID NO: 16566 - protein, 343 aa, Burkholderia cenocepacia J2315
MAFNVTLKQSGRQFQVESDETVLAAALRQNVHLPYGCKNGACGSCKGQIVSGQIEQGPHAASALSNDERTRGLALLCCSKAQCDLEIDVREIAGVDGVQVKKLPCRIAALERKADDVMVVKLQLPANERLQYLAGQYVEFILKDGSRRSYSMANAPHEEGPIELHIRHMPGGKFTDHVFGAMKERDILRFEGPLGTFFLREDSDKPIVLLASGTGFAPIKAIIEHVKHSGITRPMTLYWGARRKKDIYLAELAEQWAREIPNFKYVPVLSEPDDADQWTGRTGFVHRAVIEDLPDLSGHQVYACGAPVMVESAQRDFTQHHALSADEFYADSFTSAADLAHPV

SEQ ID NO: 16567 - protein, 459 aa, Burkholderia cenocepacia J2315
MTQQQRSFDAIVAREQGLRHALTSGQMAMIAIGGAIGTGLFLGSGFAIGLAGPSVLVSYAIGALIALLLMGALAEMTVAHPTAGSFGAYAEHYVGPLAGFLVRYAYWFAVVFAIGTEISAIAVFMKYWFPAVPGWYWVIGFSALLIAVNLASVTLYGTVEYAFSLLKIAAIVVFIVLGAYLVWAAPAASGIGFANYTAHGGFMPKGPWGTWVAVIVAIFSYMSIEAVAIAAGEARDPQHAVTRAFRSTVFRLVLFYLLTLSLMLAIVPWTQAGTDESPFVKVMAATHVPYAAGVINFVLLIAALSAMNSQLYVTTRMMFSLSRARLAPAVFGRLGANGVPRAALWISTSGVAVAAVLVAVAPDTAFTVMMAIAMFGALFTWLMIFVTHLRFRSQYRGPALAFRMWGHPFGSLLGAGLVAAILLTTAFTREFRMTMVVGVVFVVLLTLAYALHYRHQHAR

SEQ ID NO: 16568 - protein, 67 aa, Burkholderia cenocepacia J2315
MATGIVKWFNDAKGFGFITPDEGGEDLFAHFSAITMNGFKTLKEGQKVSFDVVQGPKGKQASNIQAV

SEQ ID NO: 16569 - protein, 534 aa, Burkholderia cenocepacia J2315
MSGHPPPSASITVRDAVVDLLRQFGIDRVFGNPGSTELPMFRDFPDDFRYVLGLHEAVVVGMADGHAQATGNAAVVNLHSAAGVGNAMGNLFTAFKNRTPLIVTAGQQARAILPFDPFLGATQAAELPKPYVKWSIEPARAQDVPAAIARAYRIAMQEPRGPVFVSIPVDDWDQPAERLPRRDVSSIVRPDPDALARLGDALDAARRPAFVVGAAVDRAGAWDDVVRLAERHRARVYVAPMSGRCSFPEDHPLFAGFLPAIREKIIARLDGHDLVFAFGAPAFTYHIEGFGPHVPPGATLVQLVDDPGVAAWTPSGDAVVGNLRLAARDLLARPAPPERPMPAARAPRVRVDAPAAGERMSVAFALQTLADVRDASDIVVEEAPSARPVMQEHLPFTRSGTFYTMDSGGLGYGMPAAVGVALAQPGRRVIGLIGDGSSLYSIQALWSAAQLKLPITFVILNNRRYAALQDFAPVFGFGPGDPVQGTELPDLDFVALAQGMGCRGVRVAEAAKLRDTLTDALRAATPVVVEVEIA

SEQ ID NO: 16570 - protein, 228 aa, Burkholderia cenocepacia J2315
MNRRPIIDPEVLPVEGTGAGLPVIDSRLMTPSGLRERFARTLEWSVEPGEARLQEGVDPRSAAVLVPLVVRESGLTVLLTQRADHLNDHAGQISFPGGRREPFDRDATATALREAKEEIGLAAERVEILGALPDYLTGTGFCVTPVVGLVHPPFTVQADTFEVAEIFEVPLAFVMNPANHQVRVFRWEGGERRFFAMPYPNGEPGGHYFIWGATAGMFRNLYRFLAAG

SEQ ID NO: 16571 - protein, 398 aa, Burkholderia cenocepacia J2315
MNTTADSLVTLAARVDAIQPFHVMELMKEAQRLESLGRDVIHMGIGEPDFTAPEPVVEAAAAALRRGVTQYTSALGIAPLREAIAAHYAHAYGLTISPERIVVTAGASAALLLACLALVGRDDEVLMPDPSYPCNRHFVAAAEGRPVLVPSGPDARFQLTEHDVRTHWNDRTRGVLLASPSNPTGTSLEPDELKRIVEAVRARGGFTIVDEIYQGLSYDAAPVSALSFGDDVITVNSFSKYFSMTGWRLGWLVVPPALVGTFEKLSQNLFICPSALAQHAALACFEPATLDIYETRRLEFKRRRDFIAPALERLGFTVPVMPDGAFYVYAHCGGVAHPAAGDSAALTQAMLHDAGVVLVPGMDFGVHAPRDYIRLSYATAYSRLEEAVDRLATLFGEH

SEQ ID NO: 16572 - protein, 332 aa, Burkholderia cenocepacia J2315
MRVILFSSRQYDDDSFTAANRPFGYRLHFQPSHLDAETAILAHGYDVVCPFVNDTVDAAVLERLADGGTRLIALRSAGFNHVDLAAAERLGIAVVRVPAYSPHAVAEHAVALILALNRRLPRAVARTREGDFSLNGLLGFDLHGKTVGVIGTGIIGSVFAKIVMGFGMHVLAHSVPPYNDELIAFGARYVELDELLHRADIVSLHCPLLPSTHHLINERTLARMKHGAMLINTGRGGLVDAQALVDALKSGQLGHLGLDVYEEESGLFFEDHSDLPLQDDVLARLLTFPNVIVTSHQAFFTREALAEIAHTTLLNIEAWHAGAPQNVVTANR

SEQ ID NO: 16573 - protein, 650 aa, Burkholderia cenocepacia J2315
MGKIIGIDLGTTNSCVAIMEGNQVKVIENSEGARTTPSIIAYMDDNEVLVGAPAKRQSVTNPKNTLFAVKRLIGRRFEEKEVQKDIGLMPYSIIKADNGDAWVEAHGEKLAPPQVSAEVLRKMKKTAEDYLGEPVTEAVITVPAYFNDSQRQATKDAGRIAGLEVKRIINEPTAAALAFGLDKAEKGDRKIAVYDLGGGTFDVSIIEIADVDGEMQFEVLSTNGDTFLGGEDFDQRIIDYIIGEFKKEQGVDLSKDVLALQRLKEAAEKAKIELSSGQQTEINLPYITADASGPKHLNLKITRAKLEALVEDLVERTIEPCRIAIKDAGVKVSDIDDVILVGGQTRMPKVMEKVKEFFGKDPRRDVNPDEAVAVGAAIQGQVLSGDRKDVLLLDVTPLSLGIETLGGVMTKMINKNTTIPTKHAQVYSTADDNQGAVTIKVFQGEREMAAGNKLLGEFNLEGIPPAPRGVPQIEVTFDIDANGILHVGAKDKATGKENKITIKANSGLSEAEIDQMIKDAEANAAEDHKLRELADSRNQGDALVHSTKKALTEYGDKLDAGEKEAIEAALKSLEDVLKDTSADKAAIDAKVEELGKVSQKLGEKMYADMQAQQAGAAGAAGAAEGAAHAGGAQQAADDVVDAEFKEVKKD

SEQ ID NO: 16574 - protein, 402 aa, Burkholderia cenocepacia J2315
MTHITADQMARVKATAPVLAEHGATITKHFYQRMFARHPELKNLFNQTHQKTGSQPETLAKAVYAYAANIDNLGALGGAVSRISHKHASLNIRPEHYPIVGENLLASIVEVLGDAVDADTLEAWRVAYGQLAQIMIGAEADLYANAAWSGFRPFKVARKVRESDEITSFYLTPADGGEAPTFEPGQYVTVKRFVGELGVDQPRQYSLSDAPHGQWLRISVKREAGKPEAIPAGKVSMLMHDGVEEGAIVEVTAPMGDFSLKRDVDTPVVLISGGVGITPMMSMASALIAAGSPRDVRFIHACRSGAVHAFRDWLNDTVGEHANVKRTVLYELVGPNDRVGIDHDLEGRLTPERVQQYALVADADYYICGPVAFMKAQRDALVALGVAPERVNTEIFGSGALE

SEQ ID NO: 16575 - protein, 379 aa, Burkholderia cenocepacia J2315
MHIGVPAETRANEARVAATPETVKKYAAAGHRVSIAKGAGSAASYPDEAYVAAGAELTDQSAAFAADLVLKVQAPTDAELPLLKRGAVLVGMLEPFNGEQAAKLAAAGVTGFALEAAPRTTRAQSLDVLSSQANIAGYKAVLVAASLYPRFMPMLMTAAGTVKAARVLILGAGVAGLQAIATAKRLGAVIEASDVRPAVKEQIESLGAKFLDVPFETDEEREAAQGVGGYARPMPPSWLGRQAALVHERAKQADIVITTALIPGRPAPTLISVDTAQSMKPGSVLVDLAAGRGPEIDGRKGGNCPLTVADQVIVHHGVTIAGYTNLASMVASDASALYARNLLDFMKLIVTKEGTLNIDLTDDIVAATLLCRDGELARK

SEQ ID NO: 16576 - protein, 785 aa, Burkholderia cenocepacia J2315
MIGATMPSNSYSNPPVTRHMSTQASSKAKLREAALDYHEFPTPGKIAIAPTKQMINQRDLALAYSPGVAYACEEIVENPLNAARFTARSNLVGVVTNGTAVLGLGNIGPLASKPVMEGKAVLFKKFAGIDVFDIELNESDPHKLVDVIAALEPTFGGINLEDIKAPDCFIVEREARKRMKIPVFHDDQHGTAIVVAAAVTNGLKVVGKDIKKVKLVASGAGAAALACLDLLVDIGLPLENITVTDLAGVVYKGRAELMDPDKERFARETDARTLAEVIDGADIFLGLSAAGVLKQEMVKGMAERPLILALANPTPEILPELALEVRPDAVLATGRTDYPNQVNNVLCFPFIFRGALDVGATTITREMEIAAVNAIAELAQHEQSDIVATAYGIQDLSFGPEYLIPKPFDPRLIVKIAPAVAQAAMDGGVATRPIEDMEAYRVHLQQFVYHSGTTMKPIFQIARAAPEEKKRVVFAEGEEERVLRAVQIIVDEKLAKPILIGRPSVIEHRIQRYGLRLTPGTDFTVVNTEHDERYRDFWQTYHKMMARKGISEQLARVEMRRRTTLIGSMLVKKGEADGMICGTISTTHRHLHFIDQVIGKRPGCSVYAAMNGLVLPGRQIFLVDTHVNVDPTPEELAEITIMAAEEVRRFGIEPKVALLSHSNFGTSNAPSAKKMRDTLAILQETAPELKVDGEMHGDVALDAALRKEILPESTLEGDANLLILPNIDAANIAYNLLKTAAGNNIAIGPILLGAAQPVHVLTESATVRRIVNMAALLVADVNAAR

SEQ ID NO: 16577 - protein, 585 aa, Burkholderia cenocepacia J2315
MNRPLSGYIARVLPGVALLANYRRAWLARDLYAGIALSAVLVPVGMSYAQAAGLPAITGLHASVAALLAYALLGPSRILVLGPDSALAALIAGAIVPLAGHDPPRAIALAGALALSAGTICILLGVLDLGFVTDLLSRPIQYGYLNGIAIALALGRLPELLGMPVSAGDVFSSVPHIVHALAGGRFSVAAGLLGVAVLATIILFKQVAPRWPGVLIAVLAATIVARLPPLHGIPTVGALPAGLPAPRLPAVSLADLSALASGAVAVALVSFADISMLSRALSARAGDAPNRNQELIALGAANLLAGMTQGCAVSSSASRTPVAIAAGAQSQITNLVAAACITILLVAAPALLIFVPRTALAAVVIYAAFGIADVRSVVRLYRMRRGECLISMLCFAGVIGMGVVPGILLASALSLLSFVWRAWHPYDAVLGRLTGVRGYHDIARHPGAAQTSGLVLFRWDAPLFYANVEIFCEHLRAAIARSTKPVTRIVVAAEPVTDIDVSAADRLVALHAELAERGIAMNFAEMKGPVKDRLRAYGLFDVFGAASFFPTVTDAVARHVRRPGRQTRPCKRKRATRRRVSHETR

SEQ ID NO: 16578 - protein, 399 aa, Burkholderia cenocepacia J2315
MRTLALLVVNAGSSSVKFSIFAYPPHGDPVQRPLHDGEAVAAGNGVSIRFDADPDGSLPLGAGDPYRAVLAQIAMWIRVRLPHITLGAIAHRVVHGGARYTEPVIVDGDVLDELRTLTPLAPLHQPHSLDAIDALRNAFPDVPQIAVFDTAFHRTLPRTEQLLPLPHAWFDRGVRRYGFHGLSYEYLSVALDDSFGARAHGRVIAAHLGSGASLCALRECRSVATTMGFSALDGLMMSTRCGTLDPGVVLHLLEADNLSGDALGHLFYHESGLKGVSGASGDPRVLLECEAAGDPLARDALALYVHRIVRETGALTALLGGLDMLVFTAGIGEHSAPLRERICASLGWLGIELDTRANVDNAHVVSSASSAVTVVVEPTNEAWIAARAAVRVLRGNRDA

SEQ ID NO: 16579 - protein, 316 aa, Burkholderia cenocepacia J2315
MPRELNQPMGGNEMPRFGGIATMMRLPQATTTDGLDACFVGVPLDLGTSNRSGARFGPRQIRTESVLLRPYNMATRAAPFDSLQVADIGDVATNPYDLKDSVRRIEEAYDAIVANGCRPITLGGDHTIAWPILRALHRKYGKVAVVHVDAHADVNDTMFGEKIAHGTPFRRAVEDGLLQCDKVTQIGLRGTGYHADDFDWCRQQGFTVVQAEDCWNKSLAPLMAQVRERVGDTPVYLSFDIDGLDPSFAPGTGTPEIGGLTVQQGLEIVRGMKGLNIVGADLVEVSPPYDPAGTTALTGANLAFEMLCVMPGVAYR

SEQ ID NO: 16580 - protein, 492 aa, Burkholderia cenocepacia J2315
MSEPTPLHYLDYAATTPADPRVIEAMTACLGFDGIFGNPASSSHAAGRLAKDKVEHARAQVAALIGADADEIVWTSGATESNNLALKGYAENATGKRHLITSRLEHKAILDTMANLSKHGTQVTFLTPDAHGEITADAVAAAIGPDTGLVSLMLVNNEIGTLTDIGAIAGIVHAAGALLHVDAAQALGKTPIDVRALGIDMMSMSAHKVYGPKGIGALFVRREIASRIAPQIHGGGHERGLRSGTLATHQIVGMGVACALAAEKLDGETARIAALGARLTGALFALGDVTQNAAAARRIPHTLSLTVHAPGFFPFMLGDALAVSSTSACNSTSGAPSHVLTAIGLDAETAGRTVRISFGRFTTEQDVDFAIGCFARAIEQCRAAAATGFTASRQITPADLKAIRNAGFRAVICNRPDGEGDDQPAFEEIAAAARELGMDARYLPVERDRIGDAEVDAFGALVDTLPKPVLAYCRSGSRSGMLWNRLSARRTA

SEQ ID NO: 16581 - protein, 766 aa, Burkholderia cenocepacia J2315
MKQTETQQQAAFDYHEFPTPGKISVVASKPLVTQRDLALAYTPGVASVCESIAADPLQAHRFTSRGNLVGVITNGTAVLGLGNIGPLASKPVMEGKAVLFKKFAGIDVFDIEINETDPDKLVDIIAGLEPTFGGINLEDIKAPECFTVEQKLRERMKIPVFHDDQHGTAITVSAAFINGLKVVGKSIKEVKVVTSGAGAAALACLDLLVDLGLPVENVWVTDIEGVVYRGRTTLMDPAKSRFAQETDARKLAEVIGGADVFLGLSVGGILTADMLKEMAARPLILALANPTPEIFPELAHETRDDVVIATGRSDYPNQVNNVLCFPYIFRGALDVGATTITREMEIAAVHAIAGLAEEEQNEVVAAAYGAYDVSFGAQYLIPKPFDPRLIVRIAPAVAKAAMEGGVATRPLANLDAYVEQLQQFVYHSGAFMKPLFATARQLVRDGGKARIVFTEGEDERVLRAVQVIVDEKLARPILVGRPEVLLARIERFGLRLRLGQDVEVTNPEYDERFPQYWTKYWELRCRDGISKEMARVEMRRRLTLIGAMMVQLGDADGMICGTVGEYHNHLRFVDEVIGKKPGASTYAAMNILLLDQRTVALVDTHVNDNPDAEQIAEFTIAAARQMEWLNLTPKVALLSRSNFGSGSAASGVKMRRALEIVREQAPDIEADGEMHGDCALDEGLRAKLLPMSPLKGAANLLVCPNVDAGNIAYNLLKTEAGSNVAVGPFLLGVNAPVNILTSSATVRRIVNMAALTVIEANRGVAG

SEQ ID NO: 16582 - protein, 329 aa, Burkholderia cenocepacia J2315
MQANRHQVRIDALIDAAQDIRCFRVSRVDGQPFDAYEPGAHIDVTAPSGITRQYSLCGNPDERGSYLFAVKKEARSRGGSRSLHDDVSVGAELSIGTPRNLFRLTDDASEHVLVAAGIGITPLLSMAYALHKRGARYRLHYFARSRDHAAFVDELSAGPFAAHVTFHYGVEPDALAAELGRCMESIDPTAHVYTCGPGPFMDAVVAAAATRIPEDAIHLERFAAEPVAADAGNAEAGSGPAGGFEVRLHRSGQSVRVAPDTSIVDALATIGIEVDTSCGEGVCGTCMVPVLDGEPDHRDHCLSKAERASNTVICCCVSRARSAVLVLDL

SEQ ID NO: 16583 - protein, 687 aa, Burkholderia cenocepacia J2315
MNAPTAVVPGWELDTAPFHAGELAVQQRAGVTDAASAAGRRGIRRFMPDQHRTFFAQLPFFVLGGVDAHGQPWATLRAGAPGFVTSPDPRTLRIAARALPGDPLAGAWHVGAPLGGLGIEFDTRRRNRVNGVVRAVDGDALTIAVEQSFGNCAKYIQGRKPTFVARDVDASVAPDVSDALGDADRALLAQADTFFVASANTSAGAGAARGADVSHRGGMPGFVRVDDARTLTTPDFSGNRFFNTLGNLQHDPRAGLLFVDFDSGDLLYVAAHAEIVWDGPVVASFDGAQRVVRFHVREVRRMRAVLPFRWSAVERAPQFAAMAMASSGAAATAGEVPSAAAPASAPAWRSLRIAKIVDEARAIRSFHFEPADGGALPAYEAGQHLTLRIALPDSDAPAIRSYTLSDAPGGAHYRITVKREGRVSAWLHDHAQAGMTLDAQMPRGRFTFDVASPRPAVLVSAGIGITPMVAMLRRALADGTPSRRVVFVHGAREAADRPFAAELARSAAADARVSLHWFDSHPHEGSAARGGRIDIGQLKRVLSFDDYDFYLCGPSAFMRDLYDGLRALNVPDERIRFEAFGPSSVSRSATRAAAEPAAASVPVMFRRTGREAAWTPADGTLLEFAEGQRVAVPAECRSGSCGTCATRVLSGAIDYAQTPDAPVEPGCALLCVARPAQGATAPLVLDR

SEQ ID NO: 16584 - protein, 403 aa, Burkholderia cenocepacia J2315
MQSRPIYMDYSATTPVDPRVVAKMVPFLHEQFGNPASRSHAYGWDAEHAVEEARAHVAALLGADPREIVWTSGATEGNNLAIKGAAHFYQGKGKHLVTVKTEHKAVLDTCRELERQGFDVTYLDVREDGLLDLDALQQALRADTILVSVMLANNETGVIQPVADIGALCRARGIVFHCDAVQAAGKIPVDVNALNVDLLTVTAHKVYGPKGIGALYVRRKPRVRLEAQMHGGGHERGMRSGTLPTHQIVGMGEAFRLAKEEMADESRRVGALRDRLLAGLSTLDEVYVNGDLARRIPHNLNVSFNFVEGESLIMGIKGVAVSSGSACTSASLEPSYVLRALGRSDELAHSSIRFTLGRFTTEAEVDSVIAQVRDTVGKLRELSPLWDMHLEGVDLDTIEWAAH

SEQ ID NO: 16585 - protein, 445 aa, Burkholderia cenocepacia J2315
MSTILESLPTGQKVGIAFSGGLDTSAALHWMKLKGAVPYAYTANLGQPDEDDYDAIPKRAIEYGAAGARLIDCRAQLVAEGIAALQSGAFHITTAGVTYFNTTPIGRAVTGTMLVAAMKEDGVNIWGDGSTYKGNDIERFYRYGLLVNPDLKIYKPWLDQTFIDELGGRAEMSEFMNQAGFAYKMSAEKAYSTDSNLLGATHEAKDLESLESGIKIVNPIMGVAFWRDDVKIAAEEVTVRFEAGQPVALNGVEFNDQVELLLEANRIGGRHGLGMSDQIENRIIEAKSRGIYEAPGLALLYIAYERLVTGIHNEDTIEQYRENGRRLGRLLYQGRWFDPQAIMLRETAQRWVARAITGEVKIELRRGNDYSILSTKSPNLTYQPERLSMEKVASTFSPRDRIGQLTMRNLDITDTRDKLRVYSQVGLLTPGEASALPQIKGDGDK

SEQ ID NO: 16586 - protein, 296 aa, Burkholderia cenocepacia J2315
MEIAFIGLGNMGGPMAANLLKAGHALTVFDLDAHAVDAAVRAGATAAASPREAAARGSLIITMLPAAQHVRAVYLGDDGVLAGARAGATLIDCSTIDPGTVRAVADAAAQRDFPLADAPVSGGTGGAQAGTLTFMVGADAPLFERIRPVLLDMGRNVVHCGGTGTGQIAKICNNLLLGISMMGVSEAMALGAALGIEPAVLAGIINTSTGRCWSSDAYNPYPGVSDTAPAARGYAGGFAANLMLKDLGLATEAARSAHQPVWMGALAQQLYQSMSQQGLGTLDFSACVKLYEAQPA

SEQ ID NO: 16587 - protein, 344 aa, Burkholderia cenocepacia J2315
MKALDRILESARRQPMRIALCEADDPRVLHAAARATRDGIARIVLVGDRAAIHAAAARDALDLDGMTLVDPATAPQRDAYADALHALRKAKGMTADAARDAVLDPLCHANLMVRLGDADGSVAGAVHATADVVRAAIQLIGVDPAFRIVSSFFLMMLCEPFHTIKGGLIFSDCALVVDPDAGQLAEIAMAAADSAHALLGEAPRVAMLSFSTSGSAHHAAVDKVTAATARVRELRPALAIDGDVQLDAAIVAEIAERKIAHSQVGGHANVLVFPSLEAGNIGYKLAERIGRAKAVGPLLQGLRRPANDLSRGCGADDVYHVIAATTVQAQAAMQRAATGEVAPA

SEQ ID NO: 16588 - protein, 605 aa, Burkholderia cenocepacia J2315
MSEQSTSLRASTSGPQDMTPSEAFVETLAANGVTDMFGIMGSAFMDAMDIFAPAGIRLIPVVHEQGAGHMADGYARVSGRHGVVIGQNGPGISNCVTAIAAAYWAHSPVVIVTPEAGTMGIGLGGFQEANQLPMFQEFTKYQGHVTHPARMAEFTARCFDRAQAEMGPTQLNIPRDYFYGKVKVEIPQPRRLDRGPGGEQSLNDAADLIAQAKFPVIISGGGVVMADAIEECKALAERLGAPVVNSYLHNDSFPANHPLWCGPLGYQGSKAAMKLLSRADVVIALGSRLGPFGTLPQHGMDYWPKDAKIIQIDADHKMLGLVKKISVGICGDAKAAAVALAQRLDGRTLACDGSRGERADQIATEKAAWEKELDDWTHERDAYSLDMIEEQKNEKTFNGGRYLHPRQVLRELEKAMPEDVMVSTDIGNINSVANSYLRFNKPRSFFAAMSWGNCGYAFPTIIGAKVAAPHRPAVSYAGDGAWGMSLMETMTCVRHNIPVTAVVFHNRQWGAEKKNQVDFYNRRFVAGELDNQSFAAIARAMGAEGITVDRLEDVGPALKRAIDMQMNEGKTTIIEIMCTRELGDPFRRDALSKPVRMLDKYKDYV

SEQ ID NO: 16589 - protein, 541 aa, Burkholderia cenocepacia J2315
MPGQGNAHPSVPLSRSAHPGAGHGKFKKQLSLTDLTFIGLGAIFGSGWLFAASHVSTIAGPAGIFSWLLGGFAVLLLGIVYCELGAALPRAGGVVRYPVFSHGPLLGYLMGFITLIAFSSLIAIEVVAARQYAAAWFPGLTVEGSSDPTTLGWLVQAALLCFFFYLNYSSVKTFAKANNIISIFKFIVPLSVIAVLFTFFKPANLTVHGFAPFGMPGIEMAVSAGGIIFAYLGLTPIVSVASEVRNPQRTIPIALILSILLSTLIYVLLQLAFIGSIPTAMLAAGWHDVSKAFSLPYRDIALALGVGWLAVMVVADAMISPSGCGNIYMNATPRVVYGWAKTGTFFKVFTRVDEASGIPRAGLWLTFGLAIFWTLPFPSWEALINIVSAALVLSYAVAPVSVAALRRTAPDLPRPFRASAFGLTGPASFVIAALIVYWSGWSTVSWLLGLQIVMFAIYLACRRWVPTAHLSLAEQVRSSAWLIAFYAAMIVLSYLGGFGGTGRLAHPYDTVVVAAVALVIYYWGANTGVRTDKLQLDDDED

SEQ ID NO: 16590 - protein, 402 aa, Burkholderia cenocepacia J2315
MGETINDGRRVLVIGGGIGGLATALALARQGIRVKLLEQAERIGEIGAGIQLAANAFNALDALGVGEAARGRAVLTDWLQLMDAIDAREVARIDTGAAYRDRFGNPYAVIHRADIHLSIYEAVKDHPLIEFRTSTQVCGFEQDGNGVTVIDQHGERYRADAVIGCDGVKSAIRQALIGDAHRVTGHVVYRAVVEVDNMPKDLQINAPVVWAGPHCHLVHYPLRGGRQYNLVVTFHSREQETWGVRDGSKEEVLSYFDGIHPLPKQMLDRPTSWKRWATADRDPVERWSAGRATVLGDAAHPMTQYIAQGACQALEDAVTLGAAVAQTDGDFEAAFALYERVRIPRTARVLYSAREMGRIYHAKGVERQVRNGLWVGRTDAQFYDALDWLHGWRAEDCLKTAA

SEQ ID NO: 16591 - protein, 673 aa, Burkholderia cenocepacia J2315
MPDSRPMPRTTFKPQVVLLALAVIGALLVVCALHPSEAGALFSAGQQWVIARFDWFYVLAVTGFLVFLVLIAASDFGNIRLGPDDAEPEFSFVSWTAMLFAAGMGIGLMYFGVGEPMQHFLKPPTVDPGTPAAAREAMLMTFFHWGFHAWAIYGLMGLVLAYFGFRYNLPLTLRSGLYPVLRERINGWIGHTVDAFALVGTVAGIATTLGYGVMQLSAGLHTVAGWDTGSNLFRIGLVAVVVILAGVSAATGLDKGVRRLSELNLLLAFLLLAFVVVAGPTAFLLRALGDNIGQYLSSLVDLSFRTYAYAPPREEGWFGGWTILYWAWWVSWSPFVGMFIARISRGRTIRQFVIGVLLVPTAFNLVWMTVFGNSAIWLDTHGAAGALAQTATNVDALLFRFFDFLPLPQLLSIVAIVLIAVFFVTSADSGAFVIDQIATRGSAQSPVWQRLFWAALLGVTAAVLLVAGGLGALQAMTLIAALPVAIIMLALCYGLWRGLAADRAHYSQDVAPATSFWTGQHWRHRLTHILRQTTEAEARQFVAETVEPALRKVAAELRASGVDAHVQRDGDDAVRLTVPTAEHRDFVYGVRVTAKSAAAFLVREAAEPDEARAHVYGIVTFFEDGRLGYDVEYLRGDEVIADVLRQYERYVSLAADKRTHLLSRAPGHATEAE

SEQ ID NO: 16592 - protein, 424 aa, Burkholderia cenocepacia J2315
MPSHADSPAAHHAGSLTIFQGAALYIGAVLGTGVIALPALAAEVAGPASLLAWAALVVLSGPLAATFAALGARYPDAGGVSTYARRAFGPKAAAIVGWCFYFAVPAGAPAAAMFGGAYVAAVTGGGHTTIIVTAAALIATVSAANAFGVTVSGRMQLVLSVLLVALLLAAVLASAPHARTANLHPFAPHGWLAVGQAAALLVWSFAGWEAITHLAAEFRRPAHDMPRSAGIAVVVVGFLYLSVAAASVTVLGPSAGASGAPLAELIAGGIGGHAQVLAAAAALLLTLGTMNAYFAGAAKLGAALGRDGALPAWLAQGSQVGGVPRRSLGVIAVLAAVALAATALSDVGPKPLVLVTSGCFVMVYGLGAAAALKLLPRGGIAYRCAWISLIAVAGLFVTTGWYFLCPLLLAGGALLYLQVTGARR

SEQ ID NO: 16593 - protein, 371 aa, Burkholderia cenocepacia J2315
MLIGVPKEIKNHEYRVGLTPAGARELTRHGHRVLVQRGAGTAIGLLDDDYTAAGASLSDGAEDIFARADMIIKVKEPQPAECAMLRRGQILYTYLHLAPDPDQAAALVKSGAVCVAYETVTGPGGGLPLLAPMSEVAGRMSIQVAATHLESPRGGRGLLMAGVPGVPAAHVVVLGAGVVGTGALQMAVGLGARVTVLDNNVNRLRQLDLVFANRIATVCSNAQTVDEAVRDADVVIGAVLVPGASAPRLVTRDMIATMRKGAVVVDVAIDQGGCFETSHATTHAAPTFVVDGVVHYCVANMPGAVARTSTFALNNATLGHALALADKGWKQAMLDDPHLRAGLNVCDGHITYEAVALALGLPYVPATGVLG

SEQ ID NO: 16594 - protein, 468 aa, Burkholderia cenocepacia J2315
MAMMSESTGSVQAAPAMEDAPRALSQTLSVRDAVMITVSGVTPASSIFVIAPFAIQQAGSGAVLSFVLGGVLALAFALCYAELSAAHRSAGGEYVMAKRVFGTLPGYLTFITVLSVSVFIPAVLASGAAPYLNNALGTHFSNQSVALTIVLLSYLLGMLNIKTNAWITGAFLVVEIGVLMLIAGLGFGSPHRGAEVLIAPVVASGNALVPATLAAIVPAIGTAIFCYNGFGSAAYLAEDLRGGNRNVAKAVIYSLLVILVVELVPLTAIVLGAPSLTELTKSADPIGYVVRSLSNPAVSRVVSGGIFLSVFNAIIAIVITMGRLLYSSGRHALWSRTCNRAFSAIHPRLESPWLATIALAIPSAGLVFVSSLDELTAFTVDLLLLIYLVVGLAALASRFVRRDVEHHYRMPLWPVTPLVAVAGAAYTLVTTLATATKPTDLIIIAGLLVAALVMYVAWARHSEAFRAL

SEQ ID NO: 16595 - protein, 468 aa, Burkholderia cenocepacia J2315
MSRLVVVSNRIADPRKAAAGGLAVAVKDSLQETGGVWFGWSGRLRGGDDQAARGDDVQIQNVGGIQLATIDLDPQDYDAYYLGYSNNVLWPVFHYRLDLAQFDRRFADGYRRVNQLFARKLSTLLRPDDVIWVHDYQLIPLAAELRAMGCTNPIGFFLHIPMPPPPIMAAIPEHEWLMRSLFAYDLVGFQTESDLLHFEHYVEAEAGAARLPDGRLRAFGRTLSAGAFPIGINVDEFESLARDRDGLDMFERMRDEYSRRQLLVGVDRLDYTKGLPQRVHAFRQLLEQYPENRDRATLIQIAAPSREDLGAYDDLRREMDSLCGAINGDYGELEWMPMRYIHRTVARKRLPGLYRASRVALVTPLRDGMNLVAKEFLAAQDAADPGVLVLSRFAGAAEQLKSALLVNPYDTQGTAQAIQRALTMPLEERRQRHAALMAIMRKTDVHWWRTRFLEALTEAAEVAAAAES

SEQ ID NO: 16596 - protein, 401 aa, Burkholderia cenocepacia J2315
MEDAVIVSVARTPIGKAFRGMFNDTEAPALGGHVVRAALERAGVAPADVDDVLIGCAAQQGTQGYNIGRLSAAAAGLPASVPGMAIDRMCSSGLMSIASAARSIGAGDARIVVAGGVESISLTQNKHKNAYRARSQAVLEHQPDAYIAMMETAEIVSRRYGISRAAQDAFALQSHQRTAGAQAAGRFDAEIAPLDVRRALFDEEGNPAGHEAVRAARDEGVRADTTAERLAGLKPSWSGGKLVEQGEFVTAGNASQLSDGAAAVVVMSRAEATRRGLTPLGAFRALAVAGCAPDEMGIGPVFAIPKLLARFGMTVADVGLWELNEAFACQALYCRDTLGIPDDRLNVDGGAIALGHPFGMSGTRMTMHALLEGARRGVRHAVVTMCIGGGMGAAALFDVGA

SEQ ID NO: 16597 - protein, 349 aa, Burkholderia cenocepacia J2315
MSDSRFHRLTVADVIAESDDACSFVFDVPAALRDAFAYRPGQFLTLNVPCADASVARCYSLSSAPGIDAAPKITVKRVRDGRASNWLCDRVKAGDALDVLPPAGVFTPRTLDGDLLLFAGGSGITPVLSILKSALVHGRGMLTLIYANRDERAVIFRDELQQLAQRHPGRLRVMHWLDSVQGIPQQRHLEELARPFSQQETFICGPALFMENALAAMLGLGLPRARVHVERFASLPDAPAQAGGAPADAAPATSTSGATAAIETVLDGDAFAFDGAPGETLLDAMLRAGVPAPNSCRMGQCGACMCRIERGAVALDRNHVLDDDEIAAGWTLACCARPASDALRVVFPD

SEQ ID NO: 16598 - protein, 594 aa, Burkholderia cenocepacia J2315
MYRYTDFDRALVRSRAAQFRDQLERWQQGTLGEDAFRPLRLQNGWYVQRHAPMLRVAVPYGELSSAQLRVLARIARDYDVPDDATYRAACDAQALLGTLRLPTRSAHFTTRTNVQFNWIPLAKAADVMDLLATVDMHGIQTSGNCIRNISCDERAGVAPDEIADPRPFAEVMRQWTTLHPEFAFLPRKFKIAITGATEDRAATDWHDVGLKLVRDDAGALGFRVSVGGGMGRTPMIATLLRAFLPWQHVMNYIEAIVRVYNRYGRRDNKYKARIKILVKTEGQRYIDDVEEEFRQIVDLDGGPHTIPQAEFERVAASFVPPRLKPRTLDLADANARVAAQASRHPAFARWLARNVADHRDPALRIATLSFKRRLQAPGDASPEQLDALAELADRFSAGEARVTHTQNVVLPWVHVDDLFLLWENARAIGLASANVGLLTDMIACPGGDFCALANARSIPVADAIAERFDDLDLLHDVGDIDLHISGCINSCGHHHSGHLGILGVDKDGAEWYQVTLGGSDGSSASGPARPGKVIGPSFSADEIVDVVDAIVNAYLDARIDANGRGERFIDTVRRIGTEPFKAAANAARHQEEPA

SEQ ID NO: 16599 - protein, 350 aa, Burkholderia cenocepacia J2315
MHTSPPAAPERAHLRLGFVALSDAAPLIVAQRLNLGARHGLTLELSRQPSWAAVRDKLLSGELDAAHALYGLVCGLQLGIGGPRADMAALMVLNRNGQAITLSGGLADAYRETANVRAAFATLGRKPLLAQTFPTGTHAMWLNAWLASHGVDPLRDVRSVVIPPPEMVAALAGGELDGFCAGEPWHAVAEACGAGRTVAVTSEIWPDHPEKVLATRRDFVALYPATARALVRTLVDACAWLDSAAHRREAADWLASPDALGVPARLIAPRLLGDYGAGPFATPPLPIRFHDGGAVNRPDPREALWFLSQYRRWGMLDGSHDDAGIAAAIAQTALYDAAVAEGGAAGPSRA

SEQ ID NO: 16600 - protein, 312 aa, Burkholderia cenocepacia J2315
MTIDILLTQPLPDTIDAELSARYTVHRLYAAEQPEALLDRVAPRIRGVVTGGANGLSAALMDRLAALEIIAINGIGTDAVDLDRARARGIHVTTTPDVLTDDVADMALGLILMTLRDLGAGERIVRAGRWGKTAQPLATQVTGKRLGIVGLGRVGRAIARRAQAFRMPVSYFGPREHRDSGYRFVPDLATLARDSDVLVIAASADHGNVLVTADVLAALGPQGFLINVARGKLVDEAALVRALADGTIAGAGLDVFANEPHVPAALLELDRVVVQPHRASATHETREAMGRIVLANLAACFAGQRPPTSVTR

SEQ ID NO: 16601 - protein, 572 aa, Burkholderia cenocepacia J2315
MPDSNESRPSRVRLLKGLLPIRRAAAIRDIVAGISLASMDIPQVLGYARIAGMPAVTGLYTVFLPLVAFACFGASRHLVVAADSATATIFASRLSSMAPAGSADYAALAGMVALLTAAMLLLARIFKLGFLADFLSRTVLVGFLAGVGVQVSIAMLGDMFGLAVPYPASRSLAQLDYVVTHLAHTHRPTLALAALVVVAILACKRFLPRVPMPMIAVVGSIAASAAFGFAAHGIAVLGPVAGGLPPLRWPSVTWQQFLDLVPVAASCFVMIIAQSAAAARVFAQQYGEDVDTNADILGLAAANAAAALGGAFVVNGSPTQTAMADGAGVRSQIGHLAFAVVVAVVLLFFSPYLQYLPHAVLAGIVFTIALGLINVRSLAAIREESPGEFTLALITAAAVVTVGVEQGILLAVALSLMRHVRHSYQPHTMVLEPVAGNGRWQPVPTRRGAMTAPGLIVYRFGADLFFANDHRFAAEVTELVEAAPVPPRWFVVDAGAITDVDYSAARTLTDLVRSLHARGIGVLFGRVNRYLRADMDRHGITEVVGATCIFATLHQALEAAGTTPAPQEPGTV

SEQ ID NO: 16602 - protein, 320 aa, Burkholderia cenocepacia J2315
MTELLHGDGAIRRTTPYGSSIENTYAGVLSFMRRNYSRVLDGIDVAISGVPLDLATTYRSGARLGPAAIRAASVQLAELNPYPWGFNPFDDLAVVDYGDCWFDAHNPLSIKPAIVEHTRAILRSGAKMLTLGGDHYITYPLLVAHAERYGKPLSLIHFDAHCDTWADDDPDSLNHGTMFYKAVKEGLIDPATSVQVGIRTWNDDFLGIERLDAAWVHDQGARAAVERIVAIVGARPAYLTFDIDCLDPAFAPGTGTPVAGGLSSAQALAIVRGLGAVNLVGADVVEVAPAYDHADITAIAAAHVACDLLCLWRQKKVAAR

SEQ ID NO: 16603 - protein, 656 aa, Burkholderia cenocepacia J2315
MCGIDGFLNSVAFDEETARGTLARMTASLAHRGPDGQGIWVDPEAGIALGHRRLAIVDLSVHGRQPMASACGRYVLVFNGEIYNHRELRAELERAGRAPAWRGHSDSEVLIAAIVAWGVEATLRRATGMFAFALWNRASRVLTLARDRIGEKPLYYGRIGDALVFASELKALRGYPGFDGTVDRDALCLYLRQSSVPAPYTIYRGIRKLPPGTYIQFEHARDTPRLRAYWTLEQVIEAGRAQPFEGTPDEAVGQLDAILRQAVARQMEADVPLGAFLSGGVDSSAIVALMQAQSATPVDTFTIGFHEAGYDEAGYAKAVARHLGTRHTELYVTADHALGVVPKLPSIYDEPFSDASQIPTFLVSELTRRHVKVSLSGDGGDELFGGYTRYFLTPRLWRKLHRVPGAVRARIAAALHALRPDHADQLAAVAQGAWGGGVEARESTSRIGDRLHKLGHVMTAESRIGLYRLLMSSVHHPERIALSGQEPPTPLDTVSAWPAHLSFAEQAMAIDTLTYLPTDILAKVDRAAMAVSLETRMPFLDHHVVEFAWRVPASVRLPEGQSKALLRRLLDRYVPSALIDRPKQGFCAPVDHWLRGALRDWAEALLRPSRLREEGFFDAAAVERLWRQHQTGRMNWQHQLWTVLMFQAWLEAQRAA

SEQ ID NO: 16604 - protein, 459 aa, Burkholderia cenocepacia J2315
MQDNSLRQSLKQRHITMIALGGVIGAGLFVGSGAIIATAGPAAILSYLIGGVIVTLVMFMLGEMASRNPDSGSFSTYASSYLGEWAGFAVGWLYWFKSMMTITVEAILLGAILHDFLPWLPIWGGALFMLVTLIASNAYSVRSFGEAEYWLSFAKVATIIVFMALGASILLGFQPRIPAPGLVNLTDHGGFMPNGISPVLAGVMVVIFSLGGSEIAAVAAGESENPSRNVIRAIKSVIVRVMVFYVGSVSILILCMPWTDKANLKSPYVSLFGMAGFTEAAVAMKIVLFVSFMSVMNSFLFSNSRMLFSLSQRGHAPAVFGRTNAKGVPMNALVLCLAICVSILGIHFVSGGDLFLMLAKSSGAFVMIVWIFIIVAHFAMRRQTKHEQRDPTAFRAWFYPVSNWVALLALVAVLGSQAFNPDSRFQFWFTVLTALAIVAAYFLRRKQPSFGQAAGAKGR

SEQ ID NO: 16605 - protein, 423 aa, Burkholderia cenocepacia J2315
MSQVISVRRPAADASFGQALKNAVAAAILTAILTIPVLGLQLKLDGYQVVLTPHWRPVWIAVAAVFLFQLFKPWLMRAKAVVKLPAAPTMGARQQRVIIWVLLAVGLVWPFFGSRGAVDVATLALIYVILGLGLNIVVGFAGLLDLGYVGFYAVGGYTYAMLNQYFGLSFWECLPIAAIAAATFGFLLGFPVLRLRGDYLAIVTLGFGEIIRLLANNLTSLTGGPDGISSIPKPTVFGFEMARSASVEGAKTFHELIGLEYSGEHMVIFLYLIALLLVGFTLFVTSRLIRMPMGRAWEALRDDEIACRSLGLNPTRIKLSAFTLGAAFAGIGGAFFAARQGLVNPESFTFIESALILAIVVLGGMGSQLGVILAAILLTVLPEVARGFAEYRMLIFGLVMVLMMMWRPQGLLPASRPHVELPQ

SEQ ID NO: 16606 - protein, 382 aa, Burkholderia cenocepacia J2315
MMRDAANFEPADSRVTHPAFWNALPERWTSDVEETLVCCHVRQETHDVKSFFFRSPQGRTFSFEPGQFITLELDIDGETINRCYTISSSPARPHTISITVKRVPGGKVSNWLHDNLQPGAAVRVLGPAGEFTCARHPARKYLFLSAGSGVTPLMSMSRAHHDLAEDRDILFVHSARTPDDIIFARELDLIASNHTNFRTSFVVERVGARTNWPGVTGFLTLPLLKLIAPDFMEREIFTCGPAPYMKAVRDLLDEAGFDRKQYHEESFSFETLAQTASDEVLAELVPAAEGVDATTKQYTVSFAKSNREIACGSEQHVLDAARQSGVRLPASCTQGMCGTCKVKLVSGQVEMKHNGGIRQREIDQGMVLLCCSKPLSDLVIDK

SEQ ID NO: 16607 - protein, 309 aa, Burkholderia cenocepacia J2315
MKPELLVLIALRGDAHREIAASFDVRYAPTPDARERAIAEHGSTIRAVLTNGSTGLTAAEIDRLPRLTFVSALGAGYEHIDVAHAKARGIVVVTGAGTNDDCVADHAFALLLAAVRNVVQLDAKTRAGVWRDGLSMPPNVSGKKLGIVGLGKIGEKCARRAAGFDIEIGYHNRSEKPVPYRYFDRVDALAQWADFLIVATPGGAGTRHLIDRTVLDALGPGGFLVNVSRGSVVDTAALADALRERRIAGAGLDVYEGEPEPPRALTDLDSVVLTPHMGGWSPEALDRSVRQFLDNAARHFAGQPVLTPV

SEQ ID NO: 16608 - protein, 321 aa, Burkholderia cenocepacia J2315
MSDATLTVRVARKWHEARDICGFELVSEDGSPLPRFDAGAHIDVHLPGGLVRQYSLCNHPEQRDRYQIAVLREADGRGGSRAIHDEVRQGDTVRIGMPRNQFPLASDAPHHLLLAGGIGVTPILSMAERLCSAGIPFDMHYCARSADRMAFVERINAAGFRDRVRFHVDDGDPAQRLDLATVLAAAPEGTHLYVCGPRGFMDAVLNAARERGWGETRLHYEFFGGAVVSSGADRAFQVRIASSGKVIDVPAECTVIAALAAHGVDVLTSCEQGVCGTCVTRVLEGEPDHRDAYLTDDEKAAGDQFMPCCSRSRTDLLVLDL

SEQ ID NO: 16609 - protein, 330 aa, Burkholderia cenocepacia J2315
MIRQPHTGRDAPMNDHTHFQPLGGNEMPRCGGIATMMRLPHVASAEGLDACFVGVPFDLGTSNRTGARFGPRQIRTESVLLRPYNMATRAAPFDSLQIADIGDVAINPYNLHDSIARIEAAYDAILEHDCKPITLGGDHTIALPILRAIHRKHGKVALIHVDAHADVNDTMMGEKIAHGTPFRRAVEEGLLHGDKVTQIGLRGTGYAAEDFDWCREQGFRVVQAEECWNKSLAPLMEEVRARIGDAPVYISFDIDGIDPAYAPGTGTPEIAGLTVPQALEIIRGAKGLNIVGCDLVEVAPPYDPFGTTALLGANLAYELLCVLPGVAYRD

SEQ ID NO: 16610 - protein, 400 aa, Burkholderia cenocepacia J2315
MTEAFLCDAIRTPIGRYGGALSGVRADDLGAVPLKALVERNRDVDWTAIDDVIYGCANQAGEDNRNVARMSALLAGLPEGVPGSTINRLCGSGMDAVGVAARAIKSGEAALMVAGGVESMTRAPFVMGKAASAFARQADIYDTTIGWRFVNPLMKQLHGVDSMPETAENVAVDYNVSRADQDLFALRSQQKAARAQQDGTLAEEIVSVMIAQKKGDPVIVSRDEHPRETSLEALAKLKGVVRPDGSVTAGNASGVNDGAAALLLANEATAKRFGLTPRARVLGIATAGVAPRVMGIGPAPATQKLLARLGMTIDQFDVIELNEAFASQGLAVLRMLGVADDDPRVNPNGGAIALGHPLGASGARLVTTAMYQLHRTNGRFALCTMCIGVGQGIAIAIERV

SEQ ID NO: 16611 - protein, 372 aa, Brassica napus
MSSTSFTDLLASSGVDPYEQDEDFLGGFFPETTGSGLPKFKTAQPSPLPISQSSRSFAFSELLDSPLLLSSSHSLISPTTGAFPFQGFNGSDFPWQLPSQTQTQTQTPNAASALQEETYGVQDLQKKQEDPVPREFADRQVKVPSYMVSRNSNDGYGWRKYGQKQVKKSENPRSYFKCTYPNCVSKKIVETTSDGQITEIIYKGGHNHPKPEFTKRPSSSSANARRMLNPSSVVSEQSESSSISFDYGEVDEEKEQPEIKRLKREGGDEGMSVEVSRGVKEPRVVVQTISEIDVLIDGFRWRKYGQKVVKGNTNPRSYYKCPYQGCGVRKQVERSAEDERAVLTTYEGRHNHDVPNRATSLMKTEHTLGLKY

SEQ ID NO: 16612 - protein, 490 aa, Brassica napus
MAASSLLPIDNNTTRQNMSGSANWSRRSSASLEDLEIPNFRSFAPSSVSISPSTCFSPSVFLDSPAFVASSANVLASPTTGALITNERNQKNVTKEEKNNNNNINYFDFSFQTQSSTLSAPTTTATNSSIFQSQEQERKNQSDQWSQTLNNSNNQQAGSYNGREQRKGEDGYNWRKYGQKQVKGSENPRSYYKCTFPSCPTKKKVERSLEGQITEIVYKGSHNHPKPQSTRRSSSSSSSTFHSAVFNASLDNSFSHSDSLAIQQDDNTTSGSVGDDEFERGSSVVSREEECGSEPEAKKWKGESETNGGNGNGSKTVREPRIVVQTTSDIDILDDGYRWRKYGQKVVKGNPNPRSYYKCTTIGCPVRKHVERASQDLRAVITTYEGKHNHDVPAARGSGYATNRQVQDPSSAPIRPAAIAGHTNYTTSRPPYTLQMLQNNNNTNAGRFGYAMNSHNNIQTQQNEFVGGGFSRAKEEPNDESSSFFDSFLS

SEQ ID NO: 16613 - protein, 149 aa, Cucumis sativus
MDVRKGPWTAEEDSVLFNYVNCHGEGRWNAVARCTGLKRTGKSCRLRWLNYLRPSVRRGNITLQEQLLILELHFRWGNRWSKIAQYLPGRTDNEIKNYWRTRVQKQAKQLNCDVNSKQFRDAMRYVWMPRLLERIQASTDSTTTIVDVI

SEQ ID NO: 16614 - protein, 332 aa, Litchi chinensis
MARSVSFLLFVVSLIAFAPLCFSAKHNDGYLFPQFYDHSCPKALQIVKSVVAKAVAKEARMAASLLRLHFHDCFVKGCDASLLLDSSGTIISEKRSNPNRNSARGFEVLDEIKSALEKECPHTVSCADILALAARDSTVLAGGPSWEVPLGRRDSRGASLSGSNNNIPAPNNTFQTILTKFKLQGLDIVDLVALSGSHTIGNSRCTSFRQRLYNQSGNGQPDLTLDQSYAAQLRTRCPRSGGDQILFFLDFVSPTKFDNSYFENLLASKGLLNSDQVLVTKSKESMDLVKKYAAHNELFFQQFAKSMVKMGNISPLTGSKGEIRKNCRKINS

SEQ ID NO: 16615 - protein, 322 aa, Thermodesulfovibrio yellowstonii DSM 11347
MENLIEIAQKVLTIEAESLQTLKERINEDFLKAVEIIHNSKGRVVVTGIGKSGLIGRKIAATLASTGTPSFFMHPAEASHGDLGMVTEEDVVIAISNSGETDELIRLIPFLKYFNVKIVAITGNTQSTLAKQADAVLDVSVKEEACPFGFIPTASTTATLAMGDALAVALIMRNGFKKEDFAFFHPGGSLGRRMLTKVKDLMHTGDELPVCFPQTVMLDAVLEISSKRLGVVVVVDENKRILGIITDGDVRRGVQRYGKDLFDLKACQIMTINPKTINEDELAAVALSVMQKYSITSLVVPNSDGTLEGLIHIHDILKKGIL

SEQ ID NO: 16616 - protein, 214 aa, Thermodesulfovibrio yellowstonii DSM 11347
MKFFIDTANVDEIKKAWEVGVIDGVTTNPSLLAKEGKEPVSLLKEICQIVDGPVSAEAVSLKYEDMLKESIELSKIHSNIVIKIPMTEDGLKTVRKLSQEGIKTNVTLVFSPTQALLAAKAGATYVSPFVGRLDDISHFGMELVRDIQIIFENYGFDTEVIVASIRNPLHVLEAARIGADIATIPYSVIKQLIKHPLTDIGIERFLKDWEKLKK

SEQ ID NO: 16617 - protein, 479 aa, Thermodesulfovibrio yellowstonii DSM 11347
MENILIRGVNWLGDAVMSLPAVRAIRKLHPTSNISILIKEKIADLFRWENTIDEVIIYSEGFTGKIKTIKELKNKKFKRAYLLQNALDAALITTVAGIPERVGWNRDCRRIFLTHPVPYHGEDRKIHHIDYFFEIPKRFNPSLLPDYPWINPSLKERLSARKELKNLKRPILALSPGAKYGDTKKWEAEKFIEVSKKFIGEYGSVVLFGSQGEDLEIKDSGIYNFIGKTSLRELICLLAECDILLCNDSGIMHLGYALGVPLVAIFGSTSPELTGPPKFAGKVIRAQVECSPCFKNRCPDIKCMKSIEVEDVWSALNEIIPSKKAVFFDRDGTLCKDANYLSKWEDFEVFPFIETLKELKNLGFLLIGISNQSGIARGIIREDFVKEVNQFFIDKYGFDDFFYCPHHPDERCFCRKPNPGMPLIARYKYGIDFRNSYVVGDKDIDMQLAQMIGAKGILISKDAKNLKEVVEIIKRDINA

SEQ ID NO: 16618 - protein, 222 aa, Thermodesulfovibrio yellowstonii DSM 11347
MLEKLAIFQILNENDIKTLEKNLKVYKFKKRETIFNEGDIPQWFHVLIKGKIKISKFSNNGKEIILELLDAPDFFGTLALLKNIPYPASAIAIDDCDIGNIPSKTFLQIVNKYPELQSEILHHVTMRLKSGIESLKNIALVDVLSRIVYQILKLANKYGKKVSEGILIDLKLTKQEIAEMSGTTTETAIRIMSKLKKEGYITEQNRKIIIKDIEMLLNLLKD

SEQ ID NO: 16619 - protein, 608 aa, Thermodesulfovibrio yellowstonii DSM 11347
MCGIVGLTDRDNFHLLSKMNNILFHRGPDDSGEFIDKESGFAFAMRRLAIIDIEGGKQPMSNEDNSLWVICNGEIYNSPELRKNLIKKGHIFKTKNSDVEVLLHLYKEKGTQLLQDLNGMFAFVIYDKNKGILFGARDRIGIKPFYYCYKNGKFAFSSEMKSLLILPWISKEINPESLYHYISLQFVPAPYSIFLDIKKLPAGHYFIYDLHKKELIINKYWELNVSELENKSVDEWKELIIQKLKESIKRWTLSDVPIACSLSGGLDSSTVVGILASEGFSDLRTYSLGFKSIEEQEFNELPLARKVAEKWNTDHHEVVIDAKRILNDLEKMVWHLDEPYAGGLPSWYIYEIIGEDVKVALTGTGGDELFGNYGRYKVHERGLWYKFLKAMKESILNHNFSEIKNAFRYPKGYFYWKYFSDAVKDKIIFNDYNQKYKTEAYLENIWHESGTKNPRNAVAYIDFRLQLPEEFLHVTDRFSMAHSVEARVPFLDHELVELVFKMPPAMRTGWNEPKSFFKSIIKNLLPEELWNAPKRGFILPLTLWTRKDLKFLIKESLSPDYLKKQGIFSEKVYDKIVNPHLEGKKDYTQQVWTFLMFQMWYKKYVLGD

SEQ ID NO: 16620 - protein, 368 aa, Thermodesulfovibrio yellowstonii DSM 11347
MIYLDYNATTPLEPRVKEEIIRTFEEFGNPSSSHSYGKNARKIIETARKKVAELIEAEPEEIIFTSGGTESNNLAIFGRALCFSKGHIITSSIEHPSVLNPCRQLLRMGYDVTFLPVSPGGIVDPEDVKKAIKKDTILVTIMHSNNETGIIQPIKEIGEILLEKEIPFHTDCAQSIGKVPVSVNELPVTMLSLAGHKFYAPKGIGALYIRKNFIIKPVLLGASHEKGLRPGTENTAYIAGLGKASEIISQEFSQITEHLHHVTEPLLNGLLEIHNVKFNGKKAPRLPNTINISIKGILADEFVERLSGKVAISSGSACHAGTRKPSHVLLAMGVSPEDALSSIRISTGKFTTVDEVMETIEIIKQELE

SEQ ID NO: 16621 - protein, 247 aa, Thermodesulfovibrio yellowstonii DSM 11347
MVILETKNLAKKYGGVEVLNNVNLKVYKGEILGMIGPNGAGKTTLMNLICKLTDITAGEIFYKGQLINDRKPYEIAKMGISRTFQVVKPFKGLTVLENVMVGAFYGKKQAKNKTEARQIAMEALQIVGLINEKDKEPSILPIAQRKKLELARALAMDPELLILDEVMAGLNPKELDDIMKEILLLKERGITIIAIEHVMKVIMGISDRVVVLHLGQLICEGKPNEVCNHPQVIEAYLGNKFAQRGIA

SEQ ID NO: 16622 - protein, 555 aa, Thermodesulfovibrio yellowstonii DSM 11347
MEPATGLKLDYNHKLTIKEFPYIVRWREDRCKRCGQCTAVCPNGAIKPAVKYTRVIESGGDTPKPRPVRRIIHVIEQVNNMENYCTGCAMCALVCPNNAIEPEYNPQNKFLFYKNRGGEGYKRGGRRNDPGVSTLDRIKFTRISMLTDPALDAGRHEFRVRSYIGRILPPEELPLKVKDGKLVVDKSSGKFIPPVREIFPIMIGSMSIGALSPHMWEGLAMGVAYLNEVEGIPVVMCSGEGGFPPRLLKSRYVKYFVLQIASGYFGWDSIIHTLPYMTEDPAAIEIKYGQGAKPGDGGLLMAPKVIKLIAEIRGVPKYVDLPSPPTHQTKYSIEEAVMKMIQSMSMAFGFRIPVYPKISGTKTAKAVLNNLARNPYAAALCIDGEDGGTGAAYNVSLDKMGHPIASNIRECYLDLVKQGKQNELPLIAAGGIGKKGNLAANAAALIMLGASAVAIGKYIMQATADCLGDEYNRCNLCNTGKCPRGITTQDPKLYRRLDPDKVAERVVEIFKAADVELRKIFAPMGRSTELPIGMSDGLSIDDKAMAERLEISYAC

SEQ ID NO: 16623 - protein, 632 aa, Thermodesulfovibrio yellowstonii DSM 11347
MGKAIGIDLGTTNSVVAVVVGGEPVVIPNQEGQRTTPSVVAFTDKGERLVGQVAKRQAITNPENTIFSIKRLMGRKYNSQEVQEAKKRLPYKIVEAPNGDAHVEIMGKRYSPPEISAMILQKLKQAAEDYLGEPVTEAVITVPAYFDDSQRQATKDAGRIAGLNVLRIINEPTAAALAYGLDKKKEEKIAVYDLGGGTFDISILEIGEGVIEVKATNGDTYLGGDDFDIRVMDWLIEEFKKQEGIDLRKDRMALQRLKEAAERAKIELSSAMETEINLPFITADASGPKHLLMKLTRAKLEQLVDDLIQKSLEPCKKALSDAGLSQSQIDEVILVGGQTRTPKVQKVVQDFFGKEPHKGVNPDEVVAVGAAIQAAILKGEVKEVLLLDVTPLSLGIETLGGVFTKIIERNTTIPTKKSQIFTTAADNQTAVTIKVYQGEREMAADNKLLGVFELVGIPPAPRGIPQIEVTFDIDANGILHVSAKDLATGKEQSIRITASSGLSEEEIKKMIREAEAHAEEDRRKKQIAEARNEADNMIYTVEKTLRDMGDRISEDERKRIEEAIEKCRRIKDTSNDVNEIKAAVEELAKASHRVAEELYKKAGASQQGAGSTTQSKKEEDVIEAEVEDKDNK

SEQ ID NO: 16624 - protein, 603 aa, Thermodesulfovibrio yellowstonii DSM 11347
MNGQAKGSLKTFLIWLIIGISIIALFNIINVPQKTEKEIIFSEFLLKVQNSEVDEVLIKDNTITGKLKDGSQFKTYYINYPELIKELSSHGVKISVKPPDQTPWYINFLISWGPVIFLVFLWILFMKQMQAGSSRAMSFGKARAKMISNKSVKVTFSDVAGIEEVKEEVKEIVDFLTNPQKYIKLGAKIPKGILLVGSPGTGKTLLAKAIAGEAGVPFFSISGSDFVEMFVGVGASRVRDLFDQAKKNSPCIVFIDEIDAVGRQRGAGLGGGHDEREQTLNQLLVEMDGFESNEGIIVLAATNRPDVLDPALLRPGRFDRQIVVPLPDVKGRLEILKVHTKKILLNSDVDLEKIARGTPGFSGADLANLVNEAALIAARRNSDTVHMNDFEAAKDKVLMGVERKSMVLSEEERRITAYHEAGHALVAKLTPATDPIHKVSIIPRGRALGVTQQLPLDDRYTYSREYLYGTLKVLLGGRVAEEIALGTMTTGAGNDLERATELARKMVTEWGMSERMGPLTFGKREEHVFLGREIAKHRDYSDKTAEEIDEETKRIVTEAYSQTRELLEQNRTILDAIARALLERETLEGPEIEELISESKKAA

SEQ ID NO: 16625 - protein, 461 aa, Thermodesulfovibrio yellowstonii DSM 11347
MPDVRIKTLPPPHGGKLVERVVRDPEMARKLMQKCSAVYDIKPTLFKGNPVRNVYREIMSVCYGFFSPVEGSMTKADLESVLEKRRLTSGWVFPYPILFDISEEDFKKLGVGAGDWLLLRLKGEPFAILEIEEVYEIAPGEVAVRTFGTPEHNPEVVKVPFDQKHTGYNIYCSLNPIILAGKYTIINEPKIRPPFDRFWYPPKRSREEFEKRGWTTVIAHQTRNVPHTGHEALMKNAAYIGDIEPSHGIVVNAIVGAKRIGDFPDEAIVEGHEMVHLAGYIKPERHLVTFTLWDMRYGNPIESLIHAVIRQNMGISFHMFGRDHAALGEYYDIYATQILWSKGIPSFGFDAPPYAVEGGFYLRPQNIAEFWYCPKCLEFAYSANCNHKGIYSRYSGSFIRGLINEGVTPPPQIYRPEVYKVVVKWWQKFGYPFNNEKYLKEREERLEVDLPHMELPAHLKK

SEQ ID NO: 16626 - protein, 285 aa, Thermodesulfovibrio yellowstonii DSM 11347
MMKIGFIGLGNLGKAMAKRLISEGVELIVWNRTIDKAKELGCLIANTPSELISQVDMLILNLKDSIAVKDVLINQNGLIYGNCENKIVIDTTTNHFEEVLEFYSLLKEKRAYYLESPVLGSVIPASQGLLTVLVSGDKTAFERAKFILEKIGKSIFYLEKEGVATKMKLINNLVLGSFMATLAEAIVFAEESGIDKERAIEILLSGAGNSMVLNVKKQKIIDEDFTPHFTNALIYKDLDYIHDLAKLLKRPLFTGSILKEIYATALLKGVENEDFSSIYKIFKNF

SEQ ID NO: 16627 - protein, 234 aa, Thermodesulfovibrio yellowstonii DSM 11347
MELLNIKNLNTGYGDLQILRNISLRINKGEIVALLGSNGAGKSTLMRSIVGRLRVWSGEIVFKGQNITNLPPEKIVKLGISLAPERRRIFSGMTVKENLEIGAYQRRNGFKERIEKVFSIFPRLYERRNHLGGDLSGGEQQMLAIGRALMNEPDLLLIDECSLGLAPTIVENIIEVIKEINKSGVSLLIVEQDVQMALEISNRAYVMEVGEITISGESKKLINDARIKESYLGM

SEQ ID NO: 16628 - protein, 589 aa, Thermodesulfovibrio yellowstonii DSM 11347
MEIEKYFKIKFKKLWLDDFAVFWRLIKEHRLRLLFALLCSLSISGINGAIAWSVKPAMDQIFIKKSAEFLYLIPLLVIILFSLRGVFTFINNYIMNSVGSKIVKFVRDALYEKLLKLPMSFFCRDSSGNLISKVLNDADLLKSTVSNTIKDFLVEGLTVIVLACVAFYRRWDLALLSFVVIPLMLYSMTEFGKRMKDIGMKTRLRIAKITTLLHETLQGIKIIKAFTMESDMKQRYRNALHEHYRNIMREVRTEEFTNLISETIAGIGVAIILFYGGYLVVNDKISSGDFFSFATAVILMYTPLKRLSRVNASFQRGRNVIERLREIIFVEHEPEKGEKREINGHIVFKNVSFRYPLSKDYTLKDINFEIQAGETVAIVGPSGAGKSTIADLLAGFWYPTEGDILIDGVSIRDFSLHSLRSQIALVTQDIILFNDSVINNIKFGNISSTKEEVERAAIMADAHDFIIKLPKGYESMVGEKGILLSGGQKQRITIARAILREPKILIFDEATASLDTESEEKIQRALEQMRKGRTTLVIAHRLSTIKRADKIIVMDKGRIIEQGTHEELLAKGGLYSELWHLQFSEPSFS

SEQ ID NO: 16629 - protein, 337 aa, Thermodesulfovibrio yellowstonii DSM 11347
MQFIDYVKIYVKAGDGGRGCISFRREKYVPKGGPDGGDGGKGGDVIIQASSELHTLLDHRYQKVYKAQRGQHGKGSNMKGKDGENLIIKVPVGTVVKDAETEEVLADLDEEEKYFIVAKGGRGGFGNAHFATPTNQAPRYAQPGEKGQERWVILELKLLADVGLIGLPNAGKSTLISVISSAKPKIADYPFTTLIPVLGVVKYENYQSFVVADIPGLIEGAHKGAGLGHQFLRHVERTSLLLHLVDVSDFSESDPREDFEKIQKELELYNPALTKKPFAVVGTKIDIAYKGDRLGKLKKYCEEKGIDFFPISAVKKEGIDKLLHYLSEKVGKKCGLL

SEQ ID NO: 16630 - protein, 405 aa, Thermodesulfovibrio yellowstonii DSM 11347
MLIVQKYGGTSVANIERIKAVAERVSKTAKEGNKVVVVVSAMAGETDKLIGLAHQVCSDPPEREMDLLLSSGERVTAALTAMALYGLGHKAIALTGRQMGIITDAVHTKARIEKIIATRAVKALEEGYIVVVAGFQGITEDEDVTTLGRGGSDLTAVAIAAALNADLCEIYTDVDGVFTADPNIAPNARKLEKISYEEMLELASLGAKVLQTRSVEFAMKYNVPVVVRSSFNWNPGTLVTKEDKDMEKVVVSGIAHDKNQAKITILKVPDRPGIAAKLFKAVADANIVVDMIVQNISSDGKATDISFTVPKTDAKKALELTEKISKELGAEGVLLNEDIAKISIVGVGMRTHSGVAAQMFEALANHGINIMAISTSEIKISCLINAKYTELAIRVLHDTFKLGEQ

SEQ ID NO: 16631 - protein, 395 aa, Thermodesulfovibrio yellowstonii DSM 11347
MKIILAYSGGLDTSVAIKWLKEKYGADVIAFCADIGQEENFQEIAEKAIKTGASNVYIEDLKEEFIRNFVFPMLRANAVYETGYLMGTSIARPLIAKTQIDIAIKEKAEAVAHGATGKGNDQVRFELTYYALKPDIKVIAPWREWEFDSRSSLIEYAQKHNIPVQATKEKPYSIDRNLFHISYEGGILEDPWNEPPQDMYTMVIPPEKAPDKPVYIEITYESGNPVVLNGEKLSSVELFNKLNKIAGENGIGRVDIVENRYVGIKSRGVYETPAGTVLHIAHKAIESITMDRELMHLRDSLIPRYSELIYYGYWFSPEREALQKLIDETQKNVTGTVRLKLYKGNCIVVGRKSPYSLYSIEHATFEKDRVYNQKDAEGFIKINALRLRMLKKSND

SEQ ID NO: 16632 - protein, 576 aa, Thermodesulfovibrio yellowstonii DSM 11347
MAKMKGAEILIECLKREGVKHIFGYPGGVILDIFDLLYDDPDIKLILTRHEQGATHAADGYARVSGKPGVVLVTSGPGATNTVTGIANAYMDSVPLVVFTGQVPTFLIGNDAFQEADIVGITRPCTKYNILVKDVKDLAKQVREAFYIATTGRPGPVLIDLPKDVTQGKTEFIWPEKIHIRSYNPTYEGNVYMIKKAAQEIAKAKKPVIIAGGGCIISNAHEYLKELAEFTQIPVANTLMGLGSFPGTHELSLGMLGMHGTYYANMAVQNSDLIVAIGMRFDDRVTGKTDAFAPNAKIIHIDIDPTSIRKNVRVDIPIVGDVSRVLQVLNKILKEEVKPQWKEIRQAWLKQINQWKKERPLTYEFDEAVIKPQYVIEKIYEVTKGDAIITTEVGQNQMWAAQFYKFDKPRRLVTSGGLGTMGYGFPAAIGAQLAFPDMTVIDIAGDGSIQMNIQELATAVIYNLPVKVAIINNSYLGMVRQWQEIFYGERYSHTYLSTAPDFVKVAESYGAVGLRATKPSEVEPVIKEALSIRKPVFMDFVVDWKEKVYPMVPPGAPIDQMIFEEKKKERKLKAVK

SEQ ID NO: 16633 - protein, 396 aa, Thermodesulfovibrio yellowstonii DSM 11347
MIAERTKKVKPSPTLAVDSKAKELKAKGFDVVNFGVGEPDFDTPEHVKEAAIKAIRDGFTKYTPVGGIDELKEAIIDKLERDNGLKYGKENILVSCGAKHSLYNIAQALFGPGDEVMIPSPYWVSYPDQVLINDAQPVIVETYEEDNFMLQPEVLENKITPKTKALILNSPSNPTGFIYSKKVLEKVAEIALKHNIYIISDEIYEKLIYDDEKHISIASLGEEIKEKTIVVNGLSKSHAMTGWRIGYAAGPVEIIKTMTKIQSQSTSNPTSIAQKAAVAALSGPQDCVEKMRQEFERRRNYLVAGLNSIGGISCKMPKGAFYAFPNISKVLGKKVSNNQINSSMDLSIYLLEQAKVALVPGSAFGAEGYIRISYATSMENLSKGIERIRKALEELK

SEQ ID NO: 16634 - protein, 513 aa, Thermodesulfovibrio yellowstonii DSM 11347
MEKTGLRAFLAVILSMAILFGSQYLYTKYYKPSEVQQQPVEVKKEDKKQIPQSVQPEPLKKEEPKQISKDIKYREVSIENDVFKVILSNEGATIKSVELKKYKDNSGKPIILTSSDILPLSISKDGKFNYSKVMFNIDDSNVSFKNSNQAVVVFTYNDSNIFLKRTFFFNKTDYVIDIKEEVKGFGSYYVTLGKDFGIFEKEDSPHWGPVILKEADRIELNPSKIKETNTYKEGVKWIAQEDKYFFSAIVPVTKANQFVVLPYNGDALTGVEFNDGINSYRVFAAPKEYDYLKKFNVGLEHIVDFGFFSIIARPLFWFLKLLYSLIGNYGIAIIILTILVRIPFIPIVNRGQKSMQKLSELQPKLMQLKEQYKNDPQRLQKEMMELYKKYKINPMSGCLPMLLQIPVFFALYKILTIAIELRQAPFMFWIHDLSAKDPYYVLPIIMGATMLIQQKMTPSTADPTQQKIMLLLPVVFTFLFLSFPSGLVLYWLINNLFGIAQQFYINKKIKKSV

SEQ ID NO: 16635 - protein, 318 aa, Thermodesulfovibrio yellowstonii DSM 11347
MKKNIALFIIFIVAVCLLPFFISGYWLRVLTQTFMFAAIATGSNIIIGYTGYPAFGNIAFFGIGAYVTGVLMTKYEISFIATLPFCALGGFIVAILLGIPLLRLKGHYFAIATVGVMEAMKKIVDNMTEITGGGLGLTLPIMEGDPAYIYKFFYYTILLIMLLSIAIAFIVWKSKFGYALRAIRIDEDAASVMGINTALYKTFAWGISGALVSIAGGAYAYWLTYIDPSTVFVTSYSVKMFAMILLGGATTIFGPMLGAFILELISEIVWSKFIEIHGMILGLLIILVVLFIPKGLFETFKGGFSFRKLVINLRENRL

SEQ ID NO: 16636 - protein, 314 aa, Thermodesulfovibrio yellowstonii DSM 11347
MPDGIKLITGNANPELAKKVSDYLQIPLTETMVSTFSDGEIMVQIKENIRGSDAFVIQPTCTPVNHNIMELLLIIDALKRASAGRITAVIPYYGYARQDRKVQPRVPISAKLIANLITVAGANRVLSIDLHAGQIQGFFDIPVDHLFAIPVILDYLKKNNLLNNITVVSPDAGGTERARAFAKKINAPLAIIDKRRDAPNVSKVMHVIGEVKDRDALIIDDMIDTGGTLVQAANALKEKGAQRVFAACTHAVLSGPAIERLNNSVLEEVIVTDTIPVYDKKDKCPKIKVLTVAHLLGEAIKRIHEETSISSLFV

SEQ ID NO: 16637 - protein, 67 aa, Thermodesulfovibrio yellowstonii DSM 11347
MAFEGRVKWFNESKGFGFIQQDGGQDVFVHYTSIKGDGFKTLKQGDRVKFDVVEGDRGPKAVNVEKV

SEQ ID NO: 16638 - protein, 224 aa, Thermodesulfovibrio yellowstonii DSM 11347
MSDSEVIKILKEMPIFQNLSDEHLLLISKGFSINKVKEGKFIFYQSEESTDLYIILDGAVKACLLDPEGKELILNIFKKGDFFGELSLLDGKPRSATVIALKDSVVGILKREQFLTLLKNNPMIAISLLSALVERIRMTDEMLGAMAFLDVSRRILKYILNIAQKEGEKTEEGYIKINKITHRELASCTGASREAVTKALKILKFKGIIFEKNGHFFISPDIEI

SEQ ID NO: 16639 - protein, 127 aa, Thermodesulfovibrio yellowstonii DSM 11347
MLRSFLRAKLHLAKVTEANLFYEGSISVDIELLELAGILPYERVWISNMNNGERFDTYVIPAAKGSRTIGLNGPAAKKAKVGDRIVIFSYGYLLENEIPLHKPKIIILDENNNPVKIYSASIYPESV

SEQ ID NO: 16640 - protein, 529 aa, Thermodesulfovibrio yellowstonii DSM 11347
MKVLVSDSISSKGVEILKKAGFEVDVKTGLKPEELKSIIGEYDALIIRSATKVTAEIIDAADKLKVIGRAGTGVDNVDKIAATKKGIVVMNTPGGNTITTAEHAIAMLFSLARRIPQATASMKSGKWEKKKFMGVELYNKTIGIIGLGRIGSEVAKRTQCMGMNVLAYDPFLSDERAEELGITKTDLDKIFAEADFITIHTPLTSETKYLINKNTIEKMKKGVYIINCARGGIVNEKDLYDAIQSGKVAGAALDVFEKEPPEEGYALITDERVICTPHLGASTLEAQENVAVAIAEQVVDYLINGTIRNAVNFPSIPFDQVPLIRPYLVLLERMGSFVSQIFTKSIKQVQIEYLGEISNLNTQALTAAALKGILDPILGEPVNYVNASFIAKERGIEVREIKGKEAGDYQSLVRITLISKDDRAVIAGTLLSRKDPRIVQINDISMEIIPEGNMIFLRNHDRPGVIGNIGTLLGQNNINIGHMHFGRKEAGGIAFSVISVDATLTDDIIEKIKQLPNVLEVRPVYISVH

SEQ ID NO: 16641 - protein, 257 aa, Thermodesulfovibrio yellowstonii DSM 11347
MIQTLKTDGGVKMGEMLKVKNLHVSVEGRKVLEDINFSMDYGEIAVLFGPNGAGKTTFIMTLMGFPKYKIEKGKIIFKGVDVTHMDVSERAKLGMGISFQRPPVVRGVSLKKLLNIVGNGIKEEEILQYAEKLNLISHLDRDVNDGFSGGEVKRAELLQLLMQKPELVFIDEPESGVDLENIVLIGEITNQLLGRGQRIKDPKKSAIIITHTGYILDYINADKGYILLNGKLQCRGNPRDILSEIKKNGYRRCFTCQ

SEQ ID NO: 16642 - protein, 289 aa, Thermodesulfovibrio yellowstonii DSM 11347
MKCGYVALIGRPNVGKSTLINTVIGEKVSIVTEKPQTTRNRITGIKNLPNAQIIFIDTPGIHKPRHKLGEFMVKEAQEAMDMVDLIVFMVEPEAPGNDELSIIERLKKLNKPVILAINKIDTVAKQNLLPLIELYNDLHPFQEIIPISALKKDGIERLVERIIFYLPDSPILYPEDMLTDQAERFMVAEFIREKIMKYTHDEIPYSVAVDIERWEETEKLISIGANIYVEREGQKIIIIGKKGERLKKIATEARLDIEKFLGTKIFLEVWVKVRKKWRQKDMLLKSLGY

SEQ ID NO: 16643 - protein, 139 aa, Thermodesulfovibrio yellowstonii DSM 11347
MAEKILIVDDEPDMLKLLSMILREKTPYEITTTNNPIEAVELAKKGDFDLVITDLKMPGLDGLQLLEEVKKRDEDVPVIIITAYGTIDAATEAIEKGGFDFITKPFKKEQILFTIEKALKWLRVQRENKMLKEKLKEGL

SEQ ID NO: 16644 - protein, 217 aa, Coprothermobacter proteolyticus DSM 5265
MKFFLDTAFVEEIRAAKEWGILDGVTTNPTLVAKTGKGFMEVVQDILNIVEGPVSIEVVAQDAQGMVEQAQQLRRLGEQVVIKIPATQEGIKAVKVLSQEGIPTNVTLIFQPLQALLAAKAGATYVSPFVGRLEDIGHDAMDLVFDIKNIFDNYGFETQIIVASIRHPKHVLDAARMGADICTVPFKVMEQLFKHALTDRGLEQFLADWSKVPGRPF

SEQ ID NO: 16645 - protein, 315 aa, Coprothermobacter proteolyticus DSM 5265
MRKTAFNDVSVTLARPFVKWAGGKAQLLDTFRDYYPRALQTGRVKRYIEPFVGGGAVLFDILQSYNVKEAFVFDINEDLINAYNVVKYCVNELIEILSFLEREYLRADEEERKHMYYDIRNLYNNANKQPGLNVERAAQFIFLNHTCFNGLYRVNKAGLFNVPAGRYKNPKIYDEENLYSVSNVLKKVSIFAADYKASLNYVDKDSFVYIDPPYRPLTATARFTSYSRYDFTDDDQIELAQVFREMNKMGALLMLSNSDPKNVDLNDSFFDELYKDFHIYRVYAKRSINAKADGRASISELIVTNYKVKRGVYEI

SEQ ID NO: 16646 - protein, 394 aa, Coprothermobacter proteolyticus DSM 5265
MRAYFDHCRSTYVDKSVIDEMIPWWTEKYWAPSSFTYTGTTAAEAIENSQMAYAKFFGGKPDEVHFAPSHAVANNIAIQGVLNNVESGTVPHVITTSIEHGTTMDLVKQLEKLGKIKVTYLPVDSNGLVDLDALSESLGKDTVLVTMAAVNYMVGTIQPVKDISKIIRDVNPEVLIHYDLTWALGRLADLALAPYADIITASIERIHGPKGVTALWVKKGVPVKGPIYGSQAYSRIVPGTPDVPSIVGAAKALELMQDGLEQKIEHMKHIRNRLINETMELVPETLLNGPEGDLRSPSNVCLTFRYVEGESVEMYLDMEDITVDTGSACANPFLEANHVILAMYGDYERAHGAIRMTFTWTTTDEEVDKFLEVIPGIVAKLRKISPLAPKVYKE

SEQ ID NO: 16647 - protein, 316 aa, Coprothermobacter proteolyticus DSM 5265
MGVDGRPMAVISGTANRPLAEKIVSELGMDLLPVEIYHFKDGETGIRIKESVRGYEVFLIQPTSPPVNENLMQLLIMLDALRRASVAEITVIMPYYGYARQDRKSKPREPISARLVAELIEAAGADRVVAVDLHVPQIQGFFKVPVDNLTAMPLFADYVRREKPLLQDVVIASPDVGGVVRANGLAYRLDNRPLVICDKRRTAANVAEIVHVIGDVVDKDVLIVDDIIDTGGSLIKAAQVFKDRGARSIWAFATHGLFSEGAVDAIEKSVIERVVVTDTVRSEYSSEKVQVVSVARLIAEAIKRIRTNQSISALFD

SEQ ID NO: 16648 - protein, 309 aa, Coprothermobacter proteolyticus DSM 5265
MKLIECVPNFSEGRRQEVMDAIVNSMKESANVIILDVEADPSHNRMVVTMVGEPQQVLSAMKNGARKAVELIDLNQHQGEHPRIGAVDVVPFVPLFNATMQECNELALEFGQWMWDELKVPVYLYAESARMPERKRLPNIRKGEFEGLKEAIKEPERHPDIGEPVIHPTAGATAVGARNFLIAFNLYLNTADKGVADKIAKAVRESSGGLVNIQAKGMFIEEKGLAQVSMNLLDYTKTPLYRITELVKLEARRFGVEVVEGELIGLMPLGAALNSLSYYLQIPKLDANQILDVAVLSRLAESQDDEQQQ

SEQ ID NO: 16649 - protein, 485 aa, Coprothermobacter proteolyticus DSM 5265
MNDQYRTPYYSGLLAYIAKHRASFHMPGHKRGRGVHPDFKAFLGENVFLLDLTEVQGVDYLHKPTGILREAMDLLADAYGAKESFFLVNGSTVGNQAALMAVGGPGKKILIARNSHRSVVGGLILNGSIPVYLPVNVDPELGITTSVSPEVLREYLDKHDVDAVFLTNPNYYGVSGNIRELVDIVHEHGLPIVVDEAHGAHFHFHQALPLSAVDAGADLVVQSTHKTLSSMTQSSWMHMNGDLVDVELLKAALRTLQSSSPNYVLMASLDVARMQMATEGAELLSSALNVAQYLREAINEIPGLQCFGRERVGKYGIFDVDLTKITITVLGLGLTGYKVEQLLNDELGVEVELSDPNNILAFVTIGDDYDNADKLIKAMSNLSERFFGKLPPLETAAVHTFPVLPEVVLTPREAFFAEKKVVPFREAVGAISAESVVLYPPGIPVIAPGERITEESFDYVMKRKEEGAEVQGTADPELEFIQVLK

SEQ ID NO: 16650 - protein, 317 aa, Coprothermobacter proteolyticus DSM 5265
MKKKILPFLLLILALLIPLVFNARPSIVAYINLAIIYAVSAVGLNLLLGVAGQISLGHAAFMGIGGYTSAILMIRYGIPSIVSVLAGGLLAGLFGLIIGFPALRLKGFYLAIATMALGTAVTDVIKRMEILGADRGLTNVPPVTIFGYQFSSEFAKYYLYLAILLLTIFLVNNLLKSKTGMAFRAMRDSEVAAKVFGINISYYKVLAFVISSFLAGVAGAMYGHSLSYLHPDMFGFGLSIEFLAITIIGGIGTLWGPVLGSALWVIVPRLFGTKLEAMAGVLFGVILILVVLFLPRGLSELIMRINKLFKKEEGERS

SEQ ID NO: 16651 - protein, 299 aa, Coprothermobacter proteolyticus DSM 5265
MSTLSKSGIVSLVGRPSVGKSTLINNLVKQKVSIVTPRAQTTRRPIRAILNTEDGSQIVFVDLPGAKKPYDALGEYLLDSVWRNVGDSDLALFVVDGSSVPPGPGDIFVARNLMKTGVPALLVMNKSDLICDDQVEERLRMFESLGDFVGSVAISALNGSNLDRLVNLVLDHLDEGPQFYPEGMQTDQPLEQFIGEIIREKIMLLTSDEIPYAVESQVDFLDEQEDIIRINATIYVERESQKPIIIGANGQMIKQIGTLARKELEVVLGKHVFLGLWVKVKENWRNNKEALYYFGYHVE

SEQ ID NO: 16652 - protein, 449 aa, Coprothermobacter proteolyticus DSM 5265
MKSIVLKFGGSTLKSKGDLEKIQNILRLRQTPFVLVVSAVNGVTNMLKEALDNLATLDIEEFLENMEHIYQAFLRNPSLELHQRVFAIRDFLLGAQLIGEAPPFVYDYVLSHGERCSSLLLTIHLNGRGITCSEMLPEQFGLITDGTYGNATVDLSQTEAHVKQHFEEDQNYVVPGFYGVCDGKVTVLGRGGSDYTATSLAYCLSAERVELYKDVPGFMSCDPKFLKEAKPIRQLSYDEAAELSYFGAKILHHSAIEPASKGHIPVHIYNMNTFNSQEGPDTVISADSCITHGVVKSISFTDDVAVIQFAGENVGRVPGILGTIASTLGNANINIKSVITSQTSINVLISKQDIDKCKKATQRMNIPHVENILYKADISLIAAVGDGLLKRHSVAARIFSAVSKQGINVEMISAGASNVTIYFLVRTADRQKALKAIHEEFFSGGEQNP

SEQ ID NO: 16653 - protein, 89 aa, Coprothermobacter proteolyticus DSM 5265
MCCYIICSAPTYEGVNVTGGTKMYTGTVKWFDAKKGYGFITRDDGEGDVFVHFSAIEGNGFKSLDQGDKVEFEIVNGPKGPQAAKVVKK

SEQ ID NO: 16654 - protein, 400 aa, Coprothermobacter proteolyticus DSM 5265
MKILVLNAGSSSLKFQLFDMEDESVMAKGIVERIGLDKPFLSYSKGTDKIKFDKEEPINHKDALQWVLNTLTSHEYGVITTLQEIGAVGHRVVHGGEEFTGSVLITEEVIEALERNKNLAPLHNPPNLTGIYATKAVLPEVPMVGVFDTAFHATMPERAYLYALPIELYEKYKVRRYGFHGTSHRYVAMEAARRLGKTLSELRIISAHLGNGASVCAIQGGKSIDTSMGFTPLEGLVMGTRSGDLDPAIPIWMMRELGMSFDEVDNLLNKKSGVFGLVRGRSFDMRDIEDWMAAGDEEAKKAMEVYCYRLKKYIGGYAAVMGGVDVLIFTAGVGENSPIVREMVCEGLEFLGIKLDKEKNNSRGDAIISAADSKVVVMSIKTNEELMIARDTYEIVRGLT

SEQ ID NO: 16655 - protein, 366 aa, Coprothermobacter proteolyticus DSM 5265
MNRLEKFILVINPGSTSTKLALFRALENEVEVAVEENVSVPVDLLEQKPHYVDQIDFRLQQVLEFIDKHGVRSDQILCIASRGGPIKPLPAGTYQITKEIEQDIMQERILSPHSSLIGPVVAFRLSQEWGVPAYFTDPVSVDEFIPEAKISGLPEIPRYSALHALNLRAVARKYAESKGKSIDELTAVIAHLGGGFSIAALEKGKLIDSTNPNEEGPFQLERAGSLPVSDFVNYIYENWPDQKNLRRRISGKGGLVAYFGTNDFREILKLAKEDKDKALVLESMYYQVAKYIAAMNAVLRNEAEVIIFTGGIVYNDEAVDGIKRYSSWLKKPYAIYPGGYEMEALATGAFRAFKGIEPLRVYGGTD

SEQ ID NO: 16656 - protein, 391 aa, Coprothermobacter proteolyticus DSM 5265
MAHLAERLNNLGSEGAFEVLAKTKVLEAQGKKIAHFEIGEPDFDTPENIKKAAYEALEKGYTHYVPSLGVPEAREAYAKYVSKTRNVEVDPGQIIVTAGAKPLIFYTMMALVNPGDEVIYPDPGYPIYSSAVRFAGGVPKPIVLREENNFRLDVDELKRMVTPKTKVIIVNSPHNPTGSVLNKEELKAILDLADGEHLFILCDELYHRIYYNGEMAPSMYEFPEAKEKVILMEGFSKIYAMTGWRLGYGVLPPDLVPWFSKLQTNVYSHAPAFVQVAGIEAYNGPQDAPKAMVEEFKRRRDYIVPRVNSMDLVHCVEPQGAFYAWLNIKKLNRPSNEVAEYLLNEAGVAVLTGTSFGESGEGYLRMSYAASMEDIKYGLDQLEKYLPKLVK

SEQ ID NO: 16657 - protein, 303 aa, Coprothermobacter proteolyticus DSM 5265
MKNFDELLESVKKANPVKVAVAQANDMEVIETVKMATEKGIAQFYLVGDAKEIQEKCQQLNVDMNKVEIIDEPELENAPRAAVSLVSSGKAQVVMKGLIHTADYLRAILDKEIGLRKDKSLLSHVGVFQVPAFDRFIILTDAAMIIAPDLQQKVSIIENAVVVARALGIEMPKVAALSAVETVNPDMVSSVEAAILAKMSERGQIKNCIVDGPLAFDNAISKEAAEHKGIKSPVAGAADILLVPDIEAGNILYKSFTYAAGASMAGIVVGAKAPVVLTSRADTAESKLYSIALAVQVANSQSQ

SEQ ID NO: 16658 - protein, 120 aa, Coprothermobacter proteolyticus DSM 5265
MLITVLKSKIHNARVTVCNVDYEGSLSLDEELIKQANLRPYEKVLVANVTNGERFETYIIPAPANSREVGLNGAAARSAVVGDRVIVMAFAMKEPDEEVDTTVLIMDEENNIKEVKKLKA

SEQ ID NO: 16659 - protein, 348 aa, Coprothermobacter proteolyticus DSM 5265
MFSKAVSLPIFWMIGENIMGDIKDVLSQYNMVFHRPLVVTGSGVTSELGENYFSSYKRVSINSNHISDVEKVKAQARSVGSDLLIGFGGGKVIDVAKMAATELNLPFLSVPTATSNDAVASPVAVINFGDYVKSMGAMAPIGVVADLNILRNQPRKQFLAGVGDLFSNISALADWQLAADRGFERVDPVAAYLSRNAVENLFRAIENGSDLYATLVEGLVVSGVAMVLAGNSRPSSGAEHLISHALDRFPIHDLHGLQVGVAAFFTLRLHGMDHLRYKKLLSQIGFPCSWQELNVDRETFMKAVQLAPQTRSGRYTILSEVTPELLQEAYDEVYGVSVSGDGEFSIQD

SEQ ID NO: 16660 - protein, 390 aa, Coprothermobacter proteolyticus DSM 5265
MNEVFISMPLRTAISKFGGSLKDIPAPEIAGKVINAILEETHLPPDAFDDVVLGNVIQAGEKMNAARQAAIYGGISDSVPAMVVNRVCGSGLQAVITAAMEIQSGYASCVLAGGMENMDKAPYILSNGRYGARMGDTTLYDAMLMDGLNDAFTGKHSGLITDEYLVPKYGVTREEQDQFAYESHMKAAKAIQEGKFSSQIVPIQVSKEFVFQVDENVRPDTTLERLAKLRPAFKEGGTITAGNAPSLNSGAAAMVLSTEKVANKFNLPVFGRILSCAVSAVDPNFFGIAPIPAVKNALEKASLSINDIDLFEINEAFAAIAIVVQRELSIPEEKLNVNGGAVALGHPIGASGAMLVTKILYELRNRQAKLGCVSLCIGGGQGIALIVERV

SEQ ID NO: 16661 - protein, 84 aa, Coprothermobacter proteolyticus DSM 5265
MYNEIAPKIGEERRGKKMYAGTVKWFDAQKGYGFITRDDGEGDVFVHFSAIEGDGFKTLNEGEKVEFEVSRGAKGPQAAHVVKK

SEQ ID NO: 16662 - protein, 221 aa, Coprothermobacter proteolyticus DSM 5265
MVQSISNFFSMILNWLYSVVPNYPVDIILMTILLKLILEPLTYQQLRTSFVISRIQGELQEIAKKYKNDPQQAAQEQSKIYKEHGVNPLIGCLLPLLQIPIFFGLYGSLVQNPNFKGLPFLWVPDISKPDPTWITVIAMVVVTYFQFKFTSQATTDPAMQRQQNMMMWIFVIMIGWIARSFPFGVALYWMAFSLISILESFIIRKMVERQFAEKNAAAAQK

SEQ ID NO: 16663 - protein, 419 aa, Coprothermobacter proteolyticus DSM 5265
MIFIDTAEIIVYGGKGGDGAASFRREKFIEKGGPDGGDGGKGGDVYLVTDPALLTLYDFKYQKEFRAEDGEPGRSQKQFGKDGKDLFIRIPVGVIVADLETQTVVDMDKPGMKLLVARGGRGGKGNARMATATRRAPRFRELGHEGEMRRLRLELKLVAHVGLVGLPNAGKSSLISVISKAKPEIAPYPFTTRSPVLGIVKKAEQSFVVSDVPGLIEGAHEGKGLGLTFLRHVERTKVLAIVIDAAAIDGYEPMQAYETIIGELRAYNPNLLEKPRVLVLNKIDLLQPEHIDQLKVQFADKESHVVLTSAATGEGTNQLVDVLFELISPTLSTEEPTAEFMTMELPPLPEDFSIRREDEYWVVEGRWARYISRYDTTQPWDFQYVQREIRRKKLEEMLRQMGAKEGETVVIHDKAFEIL

SEQ ID NO: 16664 - protein, 347 aa, Coprothermobacter proteolyticus DSM 5265
MEAKSRLKLPRSYSPYLDVRETEVAIKLIKDSFQRKLSKALNLQRVSAPLMVNAHTGLNDNLNGVEKPVSFTSKDGSQVEIVQSLAKWKREALHRYGFLPGEGIYTDMNAIRPDEVVDNLHSFYVDQWDWEIVITEAERNLPFLKRVVRKIYRIIRDTERDICKRFPSLPGPFLPSRIHFIHSEELQKMYPDLSPKEREDAVVKTFGAVFIIGIGYPLKDGLPHDGRAADYDDWITITEKGYHGLNGDIIVYYPLLDQAVELSSMGIRVNSKSLLEQLEFRGELHKKDLPYHKRLLSGELPLTMGGGIGQSRLCMIFLRKVHIGEVQASVWPQETMEECLAAGIPML

SEQ ID NO: 16665 - protein, 894 aa, Dictyoglomus thermophilum H-6-12
MSRKLCDICGVNPATIRVYTIKNGQRRILDICEECYAKQRRQERSYSPLESLFFGDLFRDFFGEDFGLPFEGSLGRERESIDLNDYLSNVSKDLLQQAAKKAIDFGKKQVGTEHLLYVLLDNDVVNEILKQFKISPQEIKAYIDNNAPKGGFKPEGEEVEVDISPRLKSALERAFMAARDLEHNYIGPEHLLIGLAEEEEGFAANVLRKYGLTPQALRQATIRVVGRGKEAGKGVRRSNTPTLDKFSRDLTELARQGKLDPVIGRAKEIETVIEVLARRKKNNPVLIGEPGVGKTAIVEGLAQRIVKGEVPEVLRDKRLVELNINTLVAGTKYRGELEERVKQILDEIIANQDSLIIFIDEIHTIVGAGAAGEGSLDIANAFKPALARGELHLIGATTLNEYQKYIEKDPALERRFQPIFVSEPTVEQTIMILRGLRDRFEAHHKVKITDEAIIAAAELSDKYITNRYLPDKAIDLIDQAAARVRIMMTSRPAEIQELEAKIQSLKREQEYASSRKQYDRAKELEEQIQKLEKELQEKTEAWKKEIASDVPEVRAKHIAEIVSSLTGIPVTELTTDEKERLLKLEEKLHERVVGQDEAIKAVSDAIRLARAGLREKNRPIATFLFLGPTGVGKTELARALAWAVFGDEDAIIRIDMSEYMERHTVSRLIGAPPGYVGYEEGGQLTEKVRRRPYSVILLDEIEKAHPDVHNILLQVFDAGRLTDGKGRVVDFTNTIIIMTSNIGSDIIQANLTATGRDKLSYEQLKEKLMDILKRYFRPEFLNRIDEIIVFHALTKEQVRDIVKLQLERVRRTARAQNIELVFDESVVDFFAEIGYSPEFGARELKRKIRNELETKLAKAMLEGAIQEGDKIRVVYNKEKNTIEFEKITEEAKIN

SEQ ID NO: 16666 - protein, 382 aa, Dictyoglomus thermophilum H-6-12
MFGDGTPFVGLKGLFFLSGPDNSPATGEAYRGVYSSISWAGVPLLAKFFFQLVFCGTAATIVSGAVAERIKYISFIIFSFIMSMFIYPIVGHWIWGGGFLSKLGMLDFAGSTVVHSVGGWAALVGAILLGPRFGKYADDGSIKPIPGHNLSLATLGTFVLWLGWFGFNPGSTMSADPQAISHIVITTNTAAASAILSSTITSWILLGKPDLGMTLNGCLAGLVAITAPCAFVDIPSSIVIGLIAGFLVVVSVIFFDRIKIDDPVGALSVHLVNGVFGTLSVGIFAKEGVTSFSTVNGLLFGGGLKLFLIQLIGVLSVGIFVLLTSLITWYILKSTIGIRVSLQEEIEGLDIGEHGNSAYPEFLIRKPNISFISVVKPEEVRK

SEQ ID NO: 16667 - protein, 356 aa, Dictyoglomus thermophilum H-6-12
MEERIKVRLKKHNFTLKLVEEYLLPDIKKAAKMIVEKYKKGKKVLIFGNGGSAADAQHIVAELVGRFLKERKGIPAIALTTNSSNLTSISNDYGFDEVFERQVEALLEEEDVVIGISTSGNSPNVVKALKKAKELKGTTIALSGKNGGEMIKYADISIVVPFHMTPHIQEAHITIGHILCDLIEEELFPSKNRAIFLDRDGTINEDKGYVYKPEDLIILPYVIEALKLLQKKFLIIVVTNQSGVERGYYTTEDVDKFHRYLYYTLSKEEVYIDDFYYCPYLEGECRKPNPGMLLQAAKDWNIDLEKSYMIGDKSSDVEAGKKAGCKTIILGKEDPLADFSAKNLLEAAKWILEKDS

SEQ ID NO: 16668 - protein, 435 aa, Dictyoglomus thermophilum H-6-12
MFIDRAKIYVKAGDGGNGCVAFRREKFVPRGGPAGGDGGKGGDVIIEADENLDTLLDFHYKRHYYAERGEHGKGKNQKGKDGEDLIIKVPTGTLIFDAETGELIADLVSHGQRVVVARGGKGGRGNTHFATSTRQAPYFAEKGEKGEERWLYLELKLLADVGLVGLPNAGKSTLLSKISNANPEIAPYPFTTKTPNLGVVEREDITFTVADIPGLIEGAHENKGMGDEFLRHIERTLVLVFVIDAADLVTPPQKAYEILKKELYLYSPKLLEKPRIIAINKIDLPEAQERLPEIEKWLKNEGVPYVFISAKEGINIDKLLELMEKYVRERKESIPVVEVDKEIQETKEGRVETEEIPEVIREKDLWILKDKKTESLANKLDLYNPQAFSYFSNYIKRRGIIKLINRAKVKDGEKIKIGDYIFKYNAKTNSLEILE

SEQ ID NO: 16669 - protein, 399 aa, Dictyoglomus thermophilum H-6-12
MKVLVLNCGSSSVKYQVFDMKDEKVLAKGLAERIGLDGSRIVYQRGVESKKVFEIPLPTHKKAIEEIFRLLVDKNDGILSSLNEIDAVGHRVVHGGDKFIESVLVNDEVYNTFKGILDLAPLHNPYNLQGVDACLELMPGVPQVLVFDTSFHQTMPEEAYIYALPYEWYEKYKIRRYGFHGTSHYYVSRRVAELIGRPVEELKIISCHLGNGASITAIKNGKSIDTSMGYTPLEGLVMGTRCGDIDPAIPILLMEKENLSPKQIDEILNKKSGILGISGVSSDFRDVGEAAEKGNKRAELALKVFAYRVKKYIGAYHAILGGLDVLVFTAGVGERGPLERSLICSGLEHLGIKLDPEKNKVKGEELKISTPDSKVEVWVIPTNEELMIARETVRVVGKK

SEQ ID NO: 16670 - protein, 502 aa, Dictyoglomus thermophilum H-6-12
MKTLYESDFIVIRDETKCIRCKVCVRQCANDVHEYDEEEDRIISDNSRCVGCHRCVALCPTKAITIMRNPLEFRENYQWNARAIKDIYKQAETGGILLTGMGNDKAYPIYWDKLLINASQVTNPSIDPLREPMEIKTFIGRKPEKLEFDEEGRLLTKMPPQLELEVPVMFSAMSFGSISLNACESLARAAVEVGTYWNTGEGGLHKKLYPYKHRAIVQCASGRFGVDIEYLYSGAAIEIKIGQGAKPGIGGHLPGEKVGEEVSATRMIPIGTDALSPAPQHDIYSIEDLRQLIFALKEAVNYEKPVGVKIAAVHNVAAIASGIARAGADFIAIDGFRGGTGAAPTRIRDNVGIPIELALAAVDSRLREEGIRNQVSIIVAGSIRNSADVIKAIALGADAVYIGTAALISLGCHLCQNCHTGKCNWGIATQDPKLVKRLNPEIGARRAANLLKAWAHEIKEMLGGMGINAIESLRGNRLMLRGVGLTEKELSILGVKHAGEGM

SEQ ID NO: 16671 - protein, 316 aa, Dictyoglomus thermophilum H-6-12
MFKVLITPRSFEKIKDKFEEVFKEEGIEVMLNPFGRVLTEEEMRELIRDVDGLIVGIDPVTSKVLKNANKLKVISKYGVGVDNIDILEAKKRNIVVTNTPGANSNAVAELTVGLIINVLRKINLSDKKTREGRWDRFIGNELSEKTLGVIGTGSIGRRVIELLKGFNLRVLCFDKYPDYEWASKEKVFYVTLDELLRSSDVVSIHVPLTEETYHMISEKELRMMKKNAVLINTSRGGIVDEDALYRFLKEGRISGAGLDVFEKEPPQNSPLLQLDNVVVTSHIGAHTEEAVANMAKLAVENLLLALKGREPLSRVC

SEQ ID NO: 16672 - protein, 579 aa, Dictyoglomus thermophilum H-6-12
MKYLARLFKLIKPYWGYFILGLFCILVGNGAQLYAPKFLGELLDQLSNVKDLAVLNRLSLIIILLLFLRSLFLYGQIYIFSFIGHRVVADLREKLFSKIQYLSLDYLNRWNSGDLIARTLQDTQLIQTSFLSGIADLFYAIVLLLGVLIIVVLTDWQLALATFLVIPLFVFSISGIGKEIQKWSLAVQRKIADLTRIIQESIKGARVVRVFSQEETEIKRFKEENEKNFFRNLKIARLTAIQIPLSSFLSALALVFILWLGTRKIAKGEMTLGTFVAFLTYVGMAIDPTQTILRVLAGLRQAYAALERIFEVLEMGKEVLEVKNPIVLPPIKGFVEFDNVSFTYDGINWVLKDINLKVRAGEKIAIVGSSGAGKTSLVNLIPRFIDPTKGVVRIDGYDIRKVSLKSLRSQIGFVPQETIIFHGTVRDNISYGNPYVSFEEIVEAAKMARAHDFIMKLPQGYDTIIGEGGINLSGGQAQRIAIARTILLKPRLIILDEATSALDSESEAFVQEALEELMRGKTAFIVAHRLSTIKRADRIVVLENGEIVEEGTHEELLKLGGVYLRIIKWQLEESKDKNE

SEQ ID NO: 16673 - protein, 313 aa, Dictyoglomus thermophilum H-6-12
MGQKCLALYSGTSNRELAEEVAKYLGVELGEIEIRRFSDGEIYARIARSVRGAEVYVIQSLGSRVNEYFMELLIIIDALKRASAGEVTAVIPYYAYARQDRKTKSREPITAKLVANLLTVAGASRVVTMDLHAGQIQGFFDIPVDNLSALPLFTRYFQDKNLKDPVVVSPDIGGVTRARALADRLHTPLAIIYKRRPAPEVAEVEEIIGDVEGRDVIICDDIITTGNTLFSAAKLLKLKGARDIYAAVTHGILTNDAHKKLEESEIKELVVTNTLPIPVEKRVPKLTIISIGNLLGEAIKRISNKDSLSSLFD

SEQ ID NO: 16674 - protein, 401 aa, Dictyoglomus thermophilum H-6-12
MIKRAKRIENLPPYLFARIDQLKEEAIKRGIDVISLGIGDPDQPTPMPVVQKLCEEALNPENHRYPSYEGLLEYRKAVADWYKYRFNVELDPKREVLSLIGSKEGLVHMIWGLVDKGDIVLCPDPGYPVYRISTLLAEGEPYSIPLKIENRFLPKWEDIPSDIAKRAKVMFLNYPSNPTGAVIDKKGLEEAVRFAKEYDIVILYDNAYSEITFDGFVAPSILEVDGAKDIAVEFSSLSKTFNMTGWRIGYAVGNADLISILSTVKTNVDSGVFQAIQYAAIEALNNLRDFPKESVKIYQKRRDMVLDAFKGMGVDILPPKGTFYVWVPVPEGFTSTDFAAFLLEEIGVLVVPGIGYGEYGEGYIRISTTINENRLIEALKRVKEFFGRDDWKSKKPSLLLK

SEQ ID NO: 16675 - protein, 250 aa, Dictyoglomus thermophilum H-6-12
MKETIGKEMLRLENLKVEVKDEVILENINLSLNEGVHVLLGPNGTGKSTLLGAIMGLSKYKTSGKIWFYNEDITDLTPDQRFKKGIFLAYQLPPAVRGVRLKDILKKILNIDPKKNLPEEVYTYLRELDLDESFLEREINYGFSGGERKKSEILQLLLAKPKLAMLDEPDSGVDIDSLKLIGEALRKISKESNLLIVTHNLKVLDYVNPNSVIVLLDGKYIYKDGIEIIHQIEERGYEYVRRLAYAQNLS

SEQ ID NO: 16676 - protein, 105 aa, Dictyoglomus thermophilum H-6-12
MFVVVETGGKQYKLSVGSTVRVEKLQANVGDEVVLDKVLLVGKDDEVLIGQPYVEGAKVIAEVVKQDKYPKVIVFKFKRKKHYRRKYGHRQPYTQLSVKEIVLPQ

SEQ ID NO: 16677 - protein, 297 aa, Dictyoglomus thermophilum H-6-12
MQQYRPLPSFGGLPFTNPEKAKVLIISYPLEVTTTYKKGTKEGPQAILSASYNLELYDEELDDIPAEIGIYTYPDLLLSLGNVEKVLEEIEELTFNIIDYDHFPIFIGGEHTITKGILRAYNKKYKHFSVLHLDAHSDLRNEYEGTKNNHACALREASETLDIVQVGIRSMSEEEKKYVKERDNIKVYFDYKFQERFNTTLIEDILKSLKDEVYITLDFDVFNPAEMPAVGTPEPGGLSWYQVLSLLREVFKNKKVIGIDLVEFSPIPGLIYPDYMAARLIYKIIGYYKKYSLEKRL

SEQ ID NO: 16678 - protein, 407 aa, Dictyoglomus thermophilum H-6-12
MGLIVQKYGGTSVGSIDRIKNVAQRIAKYYKEGHKLVVVVSAMGDTTDDLIEMAEAINPNPNPREMDFLLSSGERISAALTAMALQSLGIPAIALSGKQAGIMTDAIFTKANIKKIEPKRILEELEKGNVVIVAGFQGYEPEKGDVTTLGRGGSDATAVALAAVLKADICEIYTDVDGIFTADPRVVPNAKKLDFISYEEMLEMAGQGAQVMQLRSVDLAATHHVPVVVRSSFNENSGTLIGEVKEVESKQKVKGIAHNKSIAKITVVGVPDKPGIAHKIFAPLGEKSINVDDIVQNVSKDGITDLSFTVSEKELNEALKIVEKTAKEIGAKEVIYDNNVGKVSIVGWGIQSTPGIAAKMFGILASEGINIEMITTSEIKITCIIKRDLVEKAVKALHEGFNLGGEE

SEQ ID NO: 16679 - protein, 225 aa, Dictyoglomus thermophilum H-6-12
MEVKKFLKNVPLFEDFSDDELEKLLLICKEKSYPKDSIIFQKEDPGNFFFLICSGRVKVIIETEEGKEGILAILYPTEFFGEMSLLDGEPRSATVVALEETNVIIIERNEFLSLLYKHPELALKILKTLSLRLRKANRQIETLMFLDASGRIARLLIDIARDRGKKVDEGVLIDLEFTRQELGNLIGVSRETTIRILKSFEEEGILSIERNHIIIKDIKELERRV

SEQ ID NO: 16680 - protein, 597 aa, Dictyoglomus thermophilum H-6-12
MPYSLREDEKLEEKISIDILRRLFRYLKPYKKEILIVLLLIFVVMIVDLANPYLMKIAIDRFIKNKDPRGLITVGFVVLLLNLISAFCAKKRTERIAGITHRVILNIRQDLFNHIQKLSFAFFDERPVGKILARVIGDVNSLTNLFNMSVTNLIPDTFTIIATAGIMFYLNARLATYGLLMFPFLLITLFSIQTISRKRWQVVRKKNSTLNAFTHENYSGIRVVKYFNAENYRKNIFSELAWDVRQAFVRAVRINDLFWPMVEFSWGIGSIITFYFGIKMIKSGSITVGLLIAFSNYIAMFWRPIMNLSNFYNNLVTSMASAERIFEIMDINPNIVEDEDARDLEIKGEVEFRNVSFSYDGKKKVLKNVSFKVNPGERVALVGHTGAGKTTIVNLLCRFYDPDEGEILIDGVNIKKIKLESLRRQVAVMFQDTFLFSGSIKENIRYGRLSASDEEVISTAKEVYAHDFIMSLEKGYDTKVQERGLRLSTGQRQLVSLARTLIADPKILILDEATASIDTHTERLLQKGIEKLLKGRTSFIIAHRLSTIQNADRILVIEDGRVVEEGNHEELMRRKGIYYNMFMSQFKFWEEEREVVS

SEQ ID NO: 16681 - protein, 557 aa, Dictyoglomus thermophilum H-6-12
MLMTVAEAIIKYMQEEEGIEVIFGYPGGAVIGFYDALYNSSLKHVLVRHEQGAAHAADGYARSTGKVGVCVATSGPGATNLTTGIATAYMDSVPIVAITGQVKTSAIGKDSFQEVDTRGITMPITKHNYLITDPHEALRIVKEAFYIAKTGRKGPVLIDIPSDIFLSKIEYSVPSKVELLGYKPNYEPHPLQIKRAAQLIKESEKPIILAGGGVIASEASQELIKFAERINAPVVTTLMGKGAIPETHELSCGFIGMHGAAYANYAINDSDLIIAIGVRFSDRSTGKVETFAPNAKIIHIDIDPAEIGKNVQPYVPIVADAKRALEKLIEVVEPKTNPIWWEKIKDWKNKYPLRYRMSNEVIKPQYVIERIYELTKGEAIVVTEVGQNQMWAAQYYKVKRPRQFITSGGLGTMGFGFPAAIGAQIGNKDKVVIDIAGDGSIQMNIQELATAASEKLPVKIFILNNSCLGMVRQWQELFYERRYSCTLLDVAPDFEKLAEAYGAYGRRVEKIEELDEAIEWALNINDSPVIVDIKVNREENVFPMIPAGGSIDKMLID

SEQ ID NO: 16682 - protein, 336 aa, Dictyoglomus thermophilum H-6-12
MYRIAIVNSSSFGKYFPEHIERLKKIGDVERFTLPGDLHGKELAEKLMGFNIIVASVTPFYDKEFFEYKDETLLITRHGIGYNNIDIKSATEKGTIVTKVPGIVEREAVAETAVALLMTVIRKIREASLTAREGKWEERAKFIGWEVKDKIVGIIGYGNIGSRVGEILKNGFNAKIIAYDPNIPPEVLKEKGVEPVSLEELIRNSDIISLNASLNEKSRHMISDKEFSMMKDNVIIINTARGELMDEEALIRAIKSGKVAGVGLDVMKDEPPDPQNPLLHMENVVVTPHIAAYTYECLKGMGDKVVADVERVVNQEIPEEIINKEVLERLPWIKKS

SEQ ID NO: 16683 - protein, 394 aa, Dictyoglomus thermophilum H-6-12
MKRKVYLDYAATTPIRKEVYEEMKLFLKEKFGNPSSIHNFGREVKKAIEEAREKIAKAIGAESDEIIFTSGGTESNNMAIKGVAFALSHKGRHIITSQIEHHAVLEPCHFLEKIGFEITYLPVDKEGYVDPDDLKKAIRKDTILISIMHANNEIGTIEPIREISNIAKEHDIYFHTDAVQTVGHIPVNVNDLGVDLLSLSAHKFYGPKGIGALYIRKGTRIEPIIHGGSQENNKRAGTENVAGIIGMGKALELAISEMEREQKRLTELRDYFINQVEKRIPEVYLNGPRVNRLPNNINFSFAQIEGETLLLHLDLEGIAVSTGSACSSKSLEPSHVLSAIKLPAKLAQGSIRFTIGLYTQKEDLDYTIKVLENTIEKLRSISPDRQEWRMSRTE

SEQ ID NO: 16684 - protein, 823 aa, Dictyoglomus thermophilum H-6-12
MMDKLTQRAYRVLLLAQEEARRLNYSTVGTEHILLGLIREEGGIAAQVLINLGLDLNHLRNEIERLIGRGDGTSYGALPFTSRAKKVLEYASESAQELNHNYIGTEHLLLGLLKEGEGVAAHVLEGMGVRLEDVTIEILKLLGEPIDPTKIRGRQQMNTSTNNSLKKKRTVTATLDEFGRDLTQLARQGKLDPIIGREKELERIIQILSRRTKNNPVLVGEPGVGKTAIVEGLAQKIVEGDVPDTLLNKRIVAIDMGSIVAGTKYRGEFEERMQRIIEEVKMAKDVILFIDEIHTLVGAGAAEGAVDAANILKPSLAKGEIQLIGATTPSEYRKYIEKDGALERRFQPIMVDEPTPEETIQILKGLKERYENYHRVKITDEAIEEAVKLSVRYITDRFLPDKAIDVIDEASARVRLRKQKNTAQSNLELELARIREQKEIAIRNQAFERAAQLRDEERKIEEYLRNFIDTTAPSNFGVVTPEDVAQVVATWTGIPVAQLLIEERERLLRMEEELHKRIISQDEAVRVVSRAIRRSRSGLKDPRRPIGVFMFLGPTGVGKTELARALAEYLFGNENALIRFDMSEFMEKHTVSRLIGAPPGYVGYEEGGQLTEKVHRRPYSVILLDEIEKAHSDVFNILLQIMDEGQLTDGHGRRVSFKNTILIMTSNFGAEYFKQEASIGFASKEDREKSFDKIKELILSEMKKYFRPEFLNRLDEIVFFRPLTKDDLKQILELLLKPVRERLREKRLDLEISDEVKEFLLEKGYDPQYGARPLKRTIQYYMEDPLAEFILQGEFKEGDVIKAELDKKGNIVFRKLAFAKEPS

SEQ ID NO: 16685 - protein, 209 aa, Dictyoglomus thermophilum H-6-12
MINALANGLGYILELFYKLTGNYGVAIIFLVILVRIILYPLTHAQLKSLFMQQKIQPEIKKIQEKFKDDPKEMNKQIMLLYQQYKINPMMGCLPLLIQFPILIALYQLLLHYKYAVTPKFLWISDLTKPDYILLIVMALVTYFSGELSSLASSPEQKSQQRIMNIFTTMLFTGMFLLYKVPAGVMLYWLVSSLFQLLQQVIVFRLHKGG

SEQ ID NO: 16686 - protein, 504 aa, Dictyoglomus thermophilum H-6-12
MEEYILEVRNIYKSFTGTKPVLEGVSFSLKKGEIHALLGENGAGKSTLIKIISGVLQPDHGDILLKGKKVHFSNPLDAQRHGIAAVFQELALFPELSVAENIFIGHYKYKTPFKSINWKDLYKEAKDFLSSLGIEIDPKVPVKNLSIAERQIVEIARVLSINPEILIMDEPTSSLTLEETQRLFSIIKSLKERGTSIIFISHRLEEVFEIADRVTVLRDGQYIGTKNVSETNVDELIQMMVGRKLEDMYPKVEAKRGELLLKVDGLTRSGEFYDVSFELFEGEVLGIAGLVGSGRTEVAQTIFGIRKKDKGKIYVRGREVDIKSPKDAISLGIVYVPEDRHQHGLLLPMDIVCNITLPVLESLASRGIIDRREEEILTKRYFEILDIRASGIRQKVMSLSGGNQQKVVLAKWLATKPKVLILDEPTRGIDVGAKVAIYQLINKLAQEGYGIILISSEMPEIIGMSDRILVMHEGRIVGTISRKEATQEKILSMALGRKIYSKSL

SEQ ID NO: 16687 - protein, 397 aa, Dictyoglomus thermophilum H-6-12
MKEKIIYFDHAATTPIKKEVLEEMIPYLTEQYGNPSTIYKLGREAKKAIELARERVAKALNADIEEIYFTSGGTESDNWALKGTALANRDKGRHIITTTIEHHAVLNPLKYLEKIGFEVTYVPVEPNGIVDPNKIKEAIREDTILISVMLANNEIGTIQPIKEIAKIAKEREIIIHTDAVQAVGQIPINVKDLGIDLLSLSAHKFYGPKGVGALYIRKGTRIHPFLQGGAQERNKRAGTENVAGIVGLGKAIEIANKNLNEYASKLQKLRDKLIDGVLSKIDYVRLNGDRYQRLPNNANFSFEFVEGESLLLLLDTKGIAASSGSACTSGSLEPSHVLLAIGLEPEVAHGSLRITLGEDNTEEDIDYLLEVLPEIVSKLREMSPLYESVKKEGNKDV

SEQ ID NO: 16688 - protein, 397 aa, Dictyoglomus thermophilum H-6-12
MKKEKVVLAYSGGLDTSVAIKWLMQKYSLDVITLTVDIGQGINLDEIKNKAENLGVEKAYVLDLKEEFVKDYIIPAIKSNAMYERVYPLATALSRPLIAKYLVKIAKENGAKYVAHGCTGKGNDQVRIDLGVKALAPDLEIIAPVREWNFSREEEIEYALENNIPIPVSRKSPYSIDENLWGRSIEGGILEDPWQEPPEDIYLWTRFENREPSYIEITFERGVPVELNGVRKDVVEIIEELNKIAGSYGIGRIDHIENRLVGIKSREIYEAPAAIVIIRAHEALEDMVLPRELAHYKKMLEDKYAELVYYGLWFDPFREALQAFMDKTQDRVTGKVKIKLLPWSFSIVGRESPYSLYDHGLATYDKGSTFSTESAVGFIKLFGLQNYLYALKGGNND

SEQ ID NO: 16689 - protein, 650 aa, Dictyoglomus thermophilum H-6-12
MNYYPEEEILGKAYDSRIMRRLLKYAKPYLRYLILALVLIILITLLKLVNPYIIKNSIDKSINPIKTLSINGKEIRVYYIDEKIPIDLLQRYNGIIKNFEGKKYILLEDLNKLSLKDRTIVRFKDINNLKKSALNYFLILILIFILTYAQVYILNLTSQKIIFDMRKELFEHILKLPLSFFDKNPVGRLVTRVTNDIETLQQMYNSVITSFVVDIFLILGLSIVMLIINWKLALICIVSLPIVGYISFIFRKYAREAYRNFRIRLARLNAYLAEHINGVRVTQVFAREKENEKEFKEINNKLLEAQLRNVFVNAIFRPAVSALGSIVSAFLIFFGGWQIMNNQMSFGTIFLFLSYLGSFFQPIQDLAEKYDILQDAMASAERIFLLRDEKITIDSPPNPIRLNNLRGEIEFKNVWFAYDKEWVLKDLSFKIEPGEKVAFVGATGAGKTSIINLITRFYDVQKGEILIDGINIKDIDLRDLRRQISVVLQDVHLFATTILENIRLNRDDIPEEKVIEAAKLVNADKFIRELPQGYYTPVQERGATLSAGQRQLIAFARALVFDPKILILDEATANIDTQTEKLIQDAIEKVIQGRTSIIIAHRLSTIKKVDTIYVMHKGRIVEKGNHQELIKKRGIYYHLYKLQSLNYANK

SEQ ID NO: 16690 - protein, 586 aa, Dictyoglomus thermophilum H-6-12
MRYLLKLIKIAKPYWGYLIISAISLLILTGLNLIGPWLIRSLIGIITNISQYPNARVDIIRISLILVLSYILGIIFQFLRNYFSHYAAWHLVADVRMMVYDKLQNLSYRYFVDKQTGQLMSRVVNDTANLEMLIAHAVPDLISNLLILIGIAVILFIINPILAALSLIPIPFLLLSSTVFAKKIMPIFRKAQKALADLNADLQDNLSGIREIQLFNKQEKEYKKIKEKVYNQIHALLSALKLSAIFHPTVGFLSSLGNLIVVSVGGIMALSGKIQVQDIVGFLLYLGMFYQPINALAQILENVQQALAGAERVFEVLETEPEIKEKENATELKNVKGKITFENVTFSYNPGVPVLKNISFEINPGEMVAFVGPTGVGKTTIMYLINRFFDPDSGRIKIDDIDIRDVTLKSLHENISMVLQDVFLFNGTIFENIAYGKENATLEEVIEAAKIAHAHEFIERLPKGYFTEIGERGIKLSGGQKQRLAIARAVLKNAPILILDEATSSVDTETESEIQKAINNLAGTRTILIIAHRLSTVKRADKIIVLKDGEIVEIGTHEELMKRKGLYYKLCSVQFAEDKMAEIVRS

SEQ ID NO: 16691 - protein, 297 aa, Dictyoglomus thermophilum H-6-12
MANTKLAYIGIVGKPNAGKSTLINLLVGEKVSIVADKPQTTRQRILGVLTLEDAQFIFLDTPGWFPPKHLLGEYMQKTIKKTIEDSDIVLYVIDSSVELDEDNRTLLKFVKDQGKPYLVLLNKIDMVSPKVLEERKKEVISLGVEEERIMEISALYGTNKELLIEKLKEIAPEGDFLYPPDMLTDQTDKFFISEIIREKIIHLTYQEVPHSVAVYVDEIEERKNGNLLYIRATIVVERPTQKAIIIGKDGQMLKKIGTLARMEIEAYYQKQVYLDLWVKVREKWRKKPEMLRELGYE

SEQ ID NO: 16692 - protein, 370 aa, Dictyoglomus thermophilum H-6-12
MIIGVPKEIKPEENRVAIVPGGVETLVKRGHKVLIEKGAGLGSGFSDEEFIKAGAIILERHEDVFYEAELILKVKEPLPEEYDLLSEGKILFTYLHLAASQDLTLNLLKRKIIGIAYETVQTDDGFLPLLAPMSEIAGRMAPQEGAKYLEKTFGGRGILLGGVPGVPPANVVIIGAGNVGFNSARIAYGMGASVTVLDINPRKLRYIDDYFQGKVITMFADEYNIRMAVEYADLIIGAVLVPGAKAPKIITRELLKNMKKGSVLVDVAIDQGGCAETSRPTTHKDPIYEEEGVIHYTVANMPGAVPRTSTRALTLNTLPYVIEIADKGWKRAVMENKSLARGVNIAYGRVTHEQVAKAFNLPYVPLEEVI

SEQ ID NO: 16693 - protein, 620 aa, Dictyoglomus thermophilum H-6-12
MRRDDKTSRGQLPQRGFGPRPFGGPGRGGPHFNFEKVEIKDPWGTLKKLLKYMVLYKWGFIFAFLLVVISSILGIIGPYLIGRAIDLYILPRRFEGFFNFLLLLGGIYLLSSFLAWLQGYIMLKTTQSLVFTLRRDLFNKFHSLPIKFFDLRPYGDLMSRITNDVDNISMVLATSVIQFLSAVVSLTGIIIMMLRISLPMTLVSLLNIPLTIILTNFISKKTRNYFYANQTLLGKLNGIIEEDISGLKIIKIFNREEKEIRKFEEVNNDLTQVGIRAQIFSGSIGPLMNLLNNLGFALIAGVGGFFAYRKMITVGDITVFINYSRQFTRPINELANQYNMIQSAIASAERLFEIMDEEDEKDTVDGAVELQDIKGEVEFKNVWFSYVKEKPVIKNVSFHVKPGEIFALVGPTGAGKTTIASLVARFYDVDEGEILIDGIDIRRIRRRDLRKYLGIVLQDTLLFSTTVRENIRYGRLDATDEEVEEAAKLAHAHDFIIKLPQGYDTVLSEDGGRLSQGQRQLIAIARAILANPRILILDEATSNVDTVTEKYIQKAMLNLMSGRTSFVIAHRLSTVKNADMILVINNGEIIERGTHEELIRKKGFYYHLYMSQFADEVEIK

SEQ ID NO: 16694 - protein, 606 aa, Dictyoglomus thermophilum H-6-12
MAKIVGIDLGTTNSLIAYLEGGRPTIIPNAEGSRLTPSVVAFTKDGQLLVGEPAKRQAIVNAERTIKSIKRHMGTNYKVKIDDKEYTPQEISAMILRKLKKDAEAYLGEPIEKAVITVPAYFSDAQRQATKDAGAIAGLEVVRIINEPTAAALAYGLDKEGHQKILVFDLGGGTFDVSILEIGEGVFEVIATAGNNRLGGDDFDERIVNWLVEMFMEEHGINLKEDRTALQRLFEAAEKAKIELSSKLQTEINLPFIAMKGNTPLHISVTLTRAKFEELTYDLVEKTKEPTERALKDAGLSPSQIDKIILVGGATRMPCIQEWIKKHFGKEPQRNVNPDEAVALGAAIQAGVIGGEIRDIVLVDVTPLSLGIETLGGVFTKIIERNTPIPVSKSQIFTTAADYQTSVEIHVLQGERALAKDNISLGRFILDGIPPAPRGVPQIEVTFDIDVNGIVHVSARDKATGREQRITISNAIRLSEEEIKRMTEEAKRFEEEDRKRREEIETKNQAEHLIYTARKTLKDYGDKVSKDLVQRVEDKIKNLEELIKPERINVEQVKKGMEELTQALGEIGQFMYQSASAAGNPGQGQTNENPGGKTIDGDYKVN

SEQ ID NO: 16695 - protein, 525 aa, Dictyoglomus thermophilum H-6-12
MERYKLLVSDPIAESGLNKLKEFFEVDYRPGLPKEELLNIIGDYSALVVRSETKVTKEVIEKAKNLKVIGRAGVGVDNIDVEEATRKGILVINAPEGNTIAACEHTIGLMLAISRKIPQAFSLLKQGKWERKSFIGNELYGKTLGLVGLGRIGSEVAKRAKSFKMRVIAYDPFISPEKAKELDVELYSDLHSLIKEADYISLHLPLTQETKNLIGKKELEMMKPTAYLINCARGGLVDEDALYEVLKEKKIAGAALDVFKNEPINPDNPLLTLDNVVLTPHLGASTQEAQEKVALIVAEDIIRFFKGEMVSHAVNLPIQISPDILPFVKLGEKLGKLLAQITNANPEELEIKICGDLAQKIETSLASAVVKGFLEPILGEDVNLINAMAMAKDRRLKIVEVRTEEMDTYRSSIRLRLKTEKGIIDVSGTVSRGQERVLAIQDYYLDLALSQYLLIAFHIDRPGIIGKVGTVLGKNNINIAAMQVGRKEIGKDAVMVLVIDNPVDEKVLKELREIENIKEVYYVCL

SEQ ID NO: 16696 - protein, 1169 aa, Oryza sativa Japonica Group
RHELRPARYWRTSDDFVYVASEVGVIPMDESKVVMKGRLGPGMMITVDLQTGQVLENTEVKKSVASANPYGSWLQQSTRSIKPVNFQSSVAMDNETVLRHQQAFGYSSEDVQMVIETMASQGKEPTFCMGDDIPLAVLSQKPHMLFDYFKQRFAQVTNPAIDPLREGLVMSLEVNIGKRRNILEVGPENADQVTLSSPVLNEGELESLLNDSKLKPKVLSTYFDIRKGLDGSLDKAIKVLCDEADAAVRNGSQLLVLSDRSEALEPTRPAIPILLAVGAIHQHLIQNGLRMSASIVADTAQCFSTHQFACLIGYGASAICPYLALETCRQWRLSNKTVNLMRNGKMPTVTIEQAQRNFIKAVKSGLLKILSKMGISLLSSYCGAQIFEIYGLGQEVVDLAFCGSVSKIGGLTLDELGRETLSFWVKAFSEDTAKRLENFGFIQSRPGGEYHANNPEMSKLLHKAVREKSDNAYTVYQQHLASRPVNVLRDLLELKSDRAPIPIGKVEPATSIVERFCTGGMSLGAISRETHEAIAIAMNRIGGKSNSGEGGEDPIRWSPLADVEDGYSPTLPHLKGLQNGDTATSAIKQVASGRFGVTPTFLVNAEQIEIKIAQGAKPGEGGQLPGKKVSAYIARLRNSKPGVPLISPPPHHDIYSIEDLAQLIYDLHQINPKAKVSVKLVAEAGIGTVASGVSKGNADIIQISGHDGGTGASPISSIKHAGGPWELGLSETHQTLIQNGLRERVVLRVDGGFRSGLDVLMAAAMGADEYGFGSVAMIATGCVMARICHTNNCPVGVASQREELRARFPGVPGDLVNYFLFVAEEVRATLAQLGFEKLDDIIGRTDILKAKHVSLAKTQHIDLKYLLSSAGLPKWSSSQIRSQDVHSNGPVLDETILADPDISDAIENEKEVSKTFQIYNVDRAVCGRVAGVIAKKYGDTGFAGQLNITFTGSAGQSFGCFLTPGMNIRLVGEANDYVGKGMAGGELVVVPVEKTGFVPEDAAIVGNTCLYGATGGQVFVRGKTGERFAVRNSLGQAVVEGTGDHCCEYMTGGCVVVLGKVGRNVAAGMTGGLAYILDEDDTLVPKVNKEIVKMQRVNAPAGQMQLKGLIEAYVEKTGSEKGATILREWEAYLPLFWQLVPPSEEDSPEACAEFERVLAKQATTVQSAK

SEQ ID NO: 16697 - protein, 342 aa, Pseudomonas putida
MKDQMHQVTVNFSDGVSRSFDVEAGTSILDAAIESEIPLLYQCRSGSCSTCIAQLTEGEAHTRAGASSTLLASEYASGQRLLCLCQAQSNCSFDVPYGSEVGSSAAREVHAFIDSVDRIASNVMRLTLELAEGEWMEFRPGQFMQIQVPGFEVVRSYSPSSTTADVPKMEFLIRLLPGGAMSSYLQEKAAQDEVLTLSGPYGAFFLREESRRAPHIFVAGGTGLAPILSMIDSLRQGGGRKPPMLLSFGCLNPQALFSLENIELRQQWLPSLDVRICVDHDPEPGMHHGNPVSALREGDVTSPDTVAYLCGPQPMIDAATKRLIELGVNPANIFAEQFVASH

SEQ ID NO: 16698 - protein, 244 aa, Gossypium barbadense
MVYPNESLEDSPQKKMGRGKIEIKRIENTTNRQVTFCKRRNGLLKKAYELSVLCDAEVALIVFSSRGRLYEYANNSVKATIERYKKASDSSNTGSVAEVNAQFYQQEADKLRNQIRNLQNTNRHMLGESVGGLPMKELKSLESRLEKGISRIRSKKNELLFAEIEYMQKKEIDLHNNNQLLRAKIAENERKQQSMNLMPGGSSNNFEAIHSQPYDSRNYFQVDTLQPAANYYNPQQQQDQIALH

SEQ ID NO: 16699 - protein, 356 aa, Lotus japonicus
MSLLSDLINLNLSETTDKIIAEYIWIGGSGLDMRTKARTLPGPVSDPSQLPKWNYDGSSTGQAPGEDSEVILYPQAIFRDPFRRGSNILVICDAYTPAGEPIPTNKRHAAAKVFSHPDVVAEVPWYGIEQEYTLLQKEVNWPVGWPIGGFPGPQGPYYCGIGADKAFGRDIVDAHYKACLYAGVNISGINGEVMPGQWEFQVGPSVGISAGDEVWVARYILERITEIAGVVLSFDPKPIKGDWNGAGAHTNYSTKTMREDGGYEVIKKAIDKLGLRHKEHIAAYGEGNERRLTGRHETADINTFLWGVANRGASIRVGRDTEKEGKGYFEDRRPASNMDPYVVTSMIADTTILWKP

SEQ ID NO: 16700 - protein, 85 aa, Rickettsia prowazekii
MKGTKEMPACGFSGTVVAILNKLGVEFSDINVLFDTALREDLKKFSDWPTFPQLYINGVLVGGCDIAKELYQNGELEKMLKDVVV

SEQ ID NO: 16701 - protein, 316 aa, Triticum aestivum
MASASRLGLVVLVAMASAASAQLSSTFYDTSCPNALATIKAGVTTAVQNEARMGASLVRLHFHDCFVDGCDGSVLLADTGSFIGEQGAAPNNNSIRGMNVIDNIKTQVEAVCKQTVSCADILAVAARDSVVALGGPTWTVLLGRRDSTTASKTNAENDLPPPTFDLQNLTTLFGNKQLSMTDMVALSGAHTIGQSQCRFFRNRIYNETNINTTFATSLRANCPQSGGDSSLAPLDTQTPNGFDNAYYTNLMSQKGLLHSDQVLFNGGGADNTVRSFASSAATFNSAFTTAMVNMGNIAPKTGTQGQIRLVCSKVNS

SEQ ID NO: 16702 - protein, 1130 aa, Glycine max
MSTSRPSQSSSNSRRSRHSARMAQATVDAKIHATFEESGSSFDYSSSVRVSGTADGVNQPRSDKVTTAYLNHMQRGKMIQPFGCLLAIDEKTCKVIAYSENAPEMLTMVSHAVPSVGDHPALGIGTDIKTLFTAPSVSGLQKALGCADVSLLNPILVHCKTSGKPFYAIVHRVTGSLIVDFEPVKPYEVPMTAAGALQSYKLAAKAITRLQSLPSGNMERLCDTMVQEVFELTGYDRVMAYKFHEDDHGEVIAEITKPGLEPYLGLHYPATDIPQASRFLFRKNKVRMIVDCHAKHVRVLQDEKLQFDLILCGSTLRAPHSCHAQYMANMDSIASLVLAVVVNDNEEDGDTDAVQPQKRERLWGLVVCHNTTPRFVPFPLRYACEFLAQVFAVHVHKEIELEYQIIEKNILRTQALLCMLMRDAPLGIVSESPNIMDLVKCDGAALIYRNKVWRLGVTPSEPQIREIALWLSEYHMDSTGFSTDSLFDAGFPSALSLGDVVCGMASVRVTAKDMVFWFRSHTAAEIRWGGAKHEAGEKDDSRRMHPRSSFKAFLEVVKARSLPWKEYEMDAIHSLQIILRNAFKEDTESLDLNAKAINTRLSDLKIEGINDLKIERMQELEAVTSEIVRLIDTATVPILAVDVDGLVNGWNIKIAELTGLPIGEATGKHLLTLVEDSSTDRVKKMLNLALLGEEEKNVQFEIKTHGSKMDSGPISLVVNACASRDLRDNVVGVCFVAHDITAQKNVMDKFIRIEGDYKAIVQNRNPLIPPIFGTDEFGWCCEWNPAMMKLTGWKREEVMDKMLLGEIFGTQMAACRLKNQEAFVNLGVVLNKAMTGSETEKVPFGFFARNGKYVECLLSVSKKLDVEGLVTGVFCFLQLASPELQQALHIQRLSEQTASKRLNALSYMKRQIRNPLCGIVFSRKMLEGTDLGTEQKQLLRTSAQCQQQLSKILDDSDLDTIIDGYLDLEMAEFTLHEVLVTSLSQVMTKSNGKSIRIVNDVAGHIMMETLYGDSLRLQQVLADFLLISINFTPNGGQVVVAGSLTKEQLGKSVHLVKLELSITHGGSGVPEVLLNQMFGNNGLESEEGISLLISRKLLKLMNGDVRYLREAGKSAFILSAELAAAHNLKA

SEQ ID NO: 16703 - protein, 203 aa, Bradyrhizobium yuanmingense
ARQTQIKEFASFPTLEQLPLWGFDGSSTQQAEGHSSDCVLKPVAVFPDGARTNGVLVMCEVMMPDGKTPHPSNKRATILDDSGAWFGFEQEYFFYKDGRPLGFPTAGYPAPQGPYYTGVGYSNVGDVARKIVEEHLDLCLAAGINHEGINAEVAKGQWEFQIFGKGSKTAADQMWMARYLMLRLTEKYGIDIEFHCKPLGDTD

SEQ ID NO: 16704 - protein, 199 aa, Bradyrhizobium yuanmingense
QIKEFASFPTLEQLPLWGFDGSSTQQAEGHSSDCVLKPVAVFPDGARTNGVLVMCEVMMPDGKTPHPSNKRATILDDSGAWFGFEQEYFFYKDGRPLGFPTAGYPAPQGPYYTGVGYSNVGDVARKIVEEHLDLCLAAGINHEGINAEVAKGQWEFQIFGKGSKTAADQMWMARYLMLRLTEKYGIDIEFLCKPLGDTD

SEQ ID NO: 16705 - protein, 203 aa, Bradyrhizobium yuanmingense
ARQTQIKEFASFPTLEQLPLWGFDGSSTQQAEGHSSDCVLKPVAVFPDGARTNGVLVMCEVMMPDGKTPHPSNKRATILDDAGAWFGFEQEYFFYKDGRPLGFPTAGYPAPQGPYYTGVGFSNVGDVARKIVEEHLDLCLAAGINHEGINAEVAKGQWEFQIFGKGSKTAADQMWMARYLMLRLTEKYGIDIEFHCKPLGDTD

SEQ ID NO: 16706 - protein, 750 aa, Chlamydomonas reinhardtii
MAGVPAPASQLTKVLAGLRHTFVVADATLPDCPLVYASEGFYAMTGYGPDEVLGHNCRFLQGEGTDPKEVQKIRDAIKKGEACSVRLLNYRKDGTPFWNLLTVTPIKTPDGRVSKFVGVQVDVTSKTEGKALADNSGVPLLVKYDHRLRDNVARTIVDDVTIAVEKAEGVEPGQASAVAAAAPLGAKGPRGTAPKSFPRVALDLATTVERIQQNFCISDPTLPDCPIVFASDAFLELTGYSREEVLGRNCRFLQGAGTDRGTVDQIRAAIKEGSELTVRILNYTKAGKAFWNMFTLAPMRDQDGHARFFVGVQVDVTAQSTSPDKAPVWNKTPEEEVAKAKMGAEAASLISSALQGMAAPTTANPWAAISGVIMRRKPHKADDKAYQALLQLQERDGKMKLMHFRRVKQLGAGDVGLVDLVQLQGSELKFAMKTLDKFEMQERNKVARVLTESAILAAVDHPFLATLYCTIQTDTHLHFVMEYCEGGELYGLLNSQPKKRLKEEHVRFYASEVLTALQYLHLLGYVYRDLKPENILLHHTGHVLLTDFDLSYSKGSTTPRIEKIGGAGAAGGSAPKSPKKSSSKSGGSSSGSALQLENYLLLAEPSARANSFVGTEEYLAPEVINAAGHGPAAVDWWSLGILIFELLYGTTPFRGARRDETFENIIKSPLKFPSKPAVSEECRDLIEKLLVKDVGARLGSRTGANEIKSHPWFKGINWALLRHQQPPYVPRRASKAAGGSSTGGAAFDNY

SEQ ID NO: 16707 - protein, 749 aa, Chlamydomonas reinhardtii
MAGVPAPASQLTKVLAGLRHTFVVADATLPDCPLVYASEGFYAMTGYGPDEVLGHNCRFLQGEGTDPKEVQKIRDAIKKGEACSVRLLNYRKDGTPFWNLLTVTPIKTPDGRVSKFVGVQVDVTSKTEGKALADNSGVPLLVKYDHRLRDNVARTIVDDVTIAVEKAEGVEPGQASAVAAAAPLGAKGPRGTAPKSFPRVALDLATTVERIQQNFCISDPTLPDCPIVFASDAFLELTGYSREEVLGRNCRFLQGAGTDRGTVDQIRAAIKEGSELTVRILNYTKAGKAFWNMFTLAPMRDQDGHARFFVGVQVDVTAQSTSPDKAPVWNKTPEEEVAKAKMGAEAASLISSALQGMAAPTTANPWAAISGVIMRRKPHKADDKAYQALLQLQERDGKMKLMHFRRVKQLGAGDVGLVDLVQLQGSELKFAMKTLDKFEMQERNKVARVLTESAILAAVDHPFLATLYCTIQTDTHLHFVMEYCDGGELYGLLNSQPKKRLKEEHVRFYASEVLTALQYLHLLGYVYRDLKPENILLHHTGHVLLTDFDLSYSKGSTTPRIEKIGGAGAAGGSAPKSPKKSSSKSGGSSSGSALQLENYLLLAEPSARANSFVGTEEYLAPEVINAAGHGPAVDWWSLGILIFELLYGTTPFRGARRDETFENIIKSPLKFPSKPAVSEECRDLIEKLLVKDVGARLGSRTGANEIKSHPWFKGINWALLRHQQPPYVPRRASKAAGGSSTGGAAFDNY

SEQ ID NO: 16708 - protein, 251 aa, Arabidopsis lyrata
MGRGRVQLKRIENKINRQVTFSKRRAGLLKKAHEISVLCDAEVALVVFSHKGKLFEYSTDSCMEKILERYERYSYAERQLIAPESDVNTNWSMEYNRLKAKIELLERNQRHYLGEDLNAMSPKELQNLEQQLDTALKNIRTRKNQLMYESINELQRKEKAIQEQNSMLSKQIKEREKILRAQQEQWDQQNHGHNMPPPPPPQQHQIQHPYMLSHQPSPFLNMGGLYQEEDPMAMRRNELELTLEPVYNCNL

SEQ ID NO: 16709 - protein, 70 aa, Mesorhizobium loti
MATGTVKWFNSTKGFGFIQPDDDGQDVFVHISAVERAGLSNLVDGQKIKYEIEQDRRSGKSSAGSLSKVG

SEQ ID NO: 16710 - protein, 200 aa, Mesorhizobium loti
MGKYKDHREPRRHRHDDDAASFTERPSEPSYFQRPSIVTADPVDAEVVWFNTSKGFGFVKLPQGIQAYLHIRVLEAAGSRGVSEGTRLKVTTEESPRGGHQVAQVLEVGDQTARTQLHTRCAGESTAGTSAQLESEATVKWYNPEKGFGFIAPENGEKDIFVHATALTRSGLSMLMEGQKVFVQCGQGKKGLEVRSIRLA

SEQ ID NO: 16711 - protein, 630 aa, Mesorhizobium loti
MCGIFGIVLKNEGTPVCAAAVERCADALAHRGPDASGLYINQSVAFAHRRLSIVDAHSRANQPYRDANTGVVVTYNGEIFNYREIKAELRDMGFSFSTVSDTEVLILSYIAWGKSFLNRLDGIFAFALFDPRKSLVLIARDRLGVKPLYYTICDVGLLFASQPNALIRWPGVMHGPDMIGALSFLSYRAVVGARTLFAGISKLEPGHLLEIRNGRHTSERWWNLSARISRSKPDYSDIRRLFGSAVERQLVADVPVAALLSGGLDSSILAYEASARSQIRPVCYTGKVETPDYDETAYAMEVAAEFGLTHRVVPIGEPSDINAVAELVRLRGHPLGMHNETAMFTLAKAISKEHKVVLTGEGADEIFAGYSRLFRTPYDYNRSKIITALPPALAQIARRRLGLGVHCSQLQFFLERYSYFPADEIRSLAIDGQMRTEHEMELFDHFSTQFAEAGGDFFSKISYVLVSTHLPALLEMVDNTTMAAGLEARVPYTDHQLVTAAMAMPGSQRLRWRSPIASAQALWHPVASFSERLDVSKYPLRREYRSVLPKSVLSRKKMGFPLPLGQWAVGEGATEYRRLLFDKDSPLGDLFDPAALRRWFKAGRRNPSDSFGRKFWLLANLGIFFKEVFS

SEQ ID NO: 16712 - protein, 396 aa, Mesorhizobium loti
MLAHRTNLFGTSGTAAARAAAKAAADAGKEIIDLTAGEIWSELAPTIRDGAIDAINKGVNRYTDSVGMVELREALARKISLDTGQIWKAEEVAVTSGAKQALFNAAMVLLNPGDEVIIPAPYWTTFPAQVLIAGGTPVFVDTKSNGYVPRPEHIKEAVTERTRAIVVNTPSNPAGAVYDVETLMAIAELAVSRNLWIIFDECYGDFVHGGHTHHPIVSVAPEIRARALIVNSFSKSLALTGWRIGYLAGPKGVINAVKALQSHTTSNPNVIAQHAVLAHLQRGGSDYEGKLRSRLTSARRVGLDVLSSLTRVPVARAQGGFYFYLDLSHLLRPGAEDGASTTADDIVTGLLAEAGVAAVSGTAFGDPAGLRLSYGIPPEKLATGLARLVEFLNAWK

SEQ ID NO: 16713 - protein, 418 aa, Mesorhizobium loti
MRPVYLDNNATTRVDPEVVQAVLPFFTDQFGNPSSSHDFGASAGAAVRKARLRVQTLIGAEFEDEITFTSGGTESDNAAILSALEVMPERTEIVTSAVEHSAVLTLCAHLEKTRGIKVHRIPVDRHGRLDLDTYKAALTPRVAIVSIMSANNETGTIFPVVELAELAKEVGALFHTDAVQAVGKLAIDLKSTAIDMLSLSGHKLHGPKGVGALYVKRGVRFCPLIKGGGQEGNRRAGTENTPGIVGLGVAADLALKFMDDANTRVKALRDRLEKELLQRIPHAFVAGDLLKRLPNTANIAFGDIEGEGILHFLNREGIACSSGSACACGSLEPSHVLVAMNIPNSAAHGAIRFSFSRNNGEEDVDRVLEVMPGIVKKLRELSPSASQARGLQSAPGLGDKANPTTVSGPGECNAQLFR

SEQ ID NO: 16714 - protein, 621 aa, Meiothermus ruber
MAKAVGIDLGTTNSVIAIMEGGSPVVLENAEGERTTPSVVAYKGSDQLVGRVARRQAVLNPEGTVFEIKRFIGRRWEEVQDEVKRVPYKVVKGPDGGVRVDIAGKLYTPEEISAMILRKLVDDASKKLGEKITKAVITVPAYFNNAQREATANAGRIAGLEVLRIVNEPTAAALAYGLDKKGHETVLVFDLGGGTFDVTVLEIGDGVFEVKATAGDTHLGGSDFDHAIVNWLAEEFKKESGGVDLKADRQALQRLIEAAEKAKIELSAVTETTISLPFIGLDPISKTPLHLERKLTRAKFEELIQPLLKKIRGPVEQALRDAGLSASQIDEVLLVGGSTRVPAVQQIVKEMLGKEPNRSVNPDEVVALGAAVQAGVLTGQVEDVVLLDVTPLSLGVETKGGVFTVLIPRNTTVPTRKSEIFTTAEHNQPSVEIHVLQGERPMAADNKSLGRFRLECIPPMPAGVPQIEVTFDIDANGILHATAKEKSTGKEASITIQNTTTLSEQEIERMIKEAEANAEADRKRKEHADLKNNLDAARIQAERVMGEKESTAEAKSRLEAAISRAKTLVDTDGSDADLRQATEELLAALQAYEQGAAAGSQAQSSTPKSDDVIDADYKPAD

SEQ ID NO: 16715 - protein, 552 aa, Thermoanaerobacter tengcongensis MB4
MKLKGAQVVIEVLKEMGVDNVFGIPGGAVIPIYDALYDSDIRHILATHEQMAAHMADGYARATGKVGVCIATSGPGATNLVTGIANAYMDSVPVVAITGQVPTYLIGKDAFQEVDITGITMPITKHNFVVKSPEKLADTLREAFAIAKSGRPGPVLVDIPKDIQNAEIEYERKGEIEYKNGIKEIISEESLSKAVELILESKKPVIFAGGGVIWGEACGELLEFAEKTNIPVATSLMGLGCFPGDHPLSLGLIGMHGSRFANLAVYHSDLVIAVGTRFSDRVAGKAGGLAPKAKFIHIDIDAAEIGKNVEVDVGIVGKIKKVLKLLADRVPSMERREWLEEVEELRVKHGLRYKKDDMLRPQWIVEKIQELSNDDLIIATEVGQNQMWAAQFYKFKKPRTFVTSGGLGAMGFGLPASIGAQVGRPDKRVVNIAGDGSLRMNIHALETAAFYNIPVIIVLLNNQALGMVRQWQYLFNEKRFSQTDLNPHLNFAKIASDFGVEGIRVTTKEDFEKAFKKAYSEKKPFMIECIIDKDEMVLPFIPAGGTVEDTIA

SEQ ID NO: 16716 - protein, 287 aa, Thermoanaerobacter tengcongensis MB4
MGFKMPKDITEGMSSLGKAKSELSISKLLVLGFLGGAYIALGGLLAIRAAGALPDSFGSLQKFIFGAVFPLGLILVVIAGAELVTGNMMTQPMAYFDRKIDLKGLLKNWTFVYIGNFIGSVFVAYFLAYKTGLIMEVAKMGEIPKALPWALYAVKIANAKVSLSWWQAFLRGIGCNWLVALAVWMAYSAEDIIGKIFAIWWPIMGFVAIGFEHSVANMFFIPLGIYAGQDPLYVNFAKSAEGILLNVPILKATWENFIVNNLIPVTLGNIVGAGFFVATIYWYVYRK

SEQ ID NO: 16717 - protein, 472 aa, Thermoanaerobacter tengcongensis MB4
MSTPLYDALMEYVKKETVPFHMPGHKQGRVLPKEYIENLAKIDLTEVPGLDNLHNPDGPILEAEKLAAKTFGSKQAFFLVNGSTAGIYAAMYAVLNPTDKVLVMRNSHKSVYNGVVLTQSIPVYLLPEIDYENGIAMGIDVERLEEVLQKERDVKAVVVTYPNYYGFCSDIEKIVDIVHKYGKILIVDEAHGAHFPFSNNLPKSSIKAGADIVVQSLHKTLTSFTQTSILHLNSDRVDVDRLKYSLSLFQSTSPSYILMSSIDMAREYMEKEGKKRLEEVIQLALYVRREIDKMEGIRCLGEDIVGRYGIVDFDVTKLTISVKNLGIEGPEAEDFLRRECNIQVEMSDVYNILAMVTVGDDEKRVKMLLEGLKKLSKNRKRVKFGDRILFPSLPEMELTPSEAVRKKKVRVPFEKAEGAISADFVTPYPPGVPLICPGERIEKDMVKYIEVLYNKGIKVLGIQDNLLSVCEI

SEQ ID NO: 16718 - protein, 374 aa, Thermoanaerobacter tengcongensis MB4
MRIGVPKEIKTAESRVAITPAGVEAFVKNGHEVYIEKDAGLGSGITNEEYEKAGAKILPTAKEVYDIADMIMKVKEPQPSEYDYLKEGQVLFTYLHLAPDKQQTEALLRQKVVGIAYETVQLDNGSLPLLTPMSEVAGRMAVTIGAYLLTSINQGRGIVMGGVPGVEPAEVVIIGGGTVGTNAAKVAVGMGARVTILDVNPARLAYLDDIFGGRVTTLMSNSFNIAESVKKADLLIGAVLIPGARAPKLVTEEMVKTMKKGAVIVDVAIDQGGCVETCDRTTSHTDPYFIKHGVVHYSVPNIPGAVPRTSTFALTNVTLPYALEIANKGYKRALLENRALLKGLNVYKGMVTYKPVAEAQGLEYVDPVEALNKA

SEQ ID NO: 16719 - protein, 469 aa, Thermoanaerobacter tengcongensis MB4
MYNKLTNEIVEELKKIVGTNNVIYDDPDALEAYSHDEVAEKHYAHMPEAVVKPSSAEEIARIMKLANKYKIPITPRGAGSGLSGGAVPVYGGIVLSVERMNRILEIDKENLVVVVEPGVVTNEINNAVKEYGLFYAGYPMSVETCYIGGNVAENAGGGRAVKYGVTGRYVIGLEVVTPTGDIVHLGGKVMKDVTGYDLIHLMVGSEGTLGIFTKIYLKLMPLPQAKVDLLVLFHDMDTAIKVVPKIMTFGRIIPTSIEFMDDLSFKAACKYLNEKIPFEEAGAMLLIELDGNNKTELEEQYEIIGNLCMENGAIEVYVADNATTSERIWRIRRNIAEAWKQFSPHQSLEDVVVPISEIPTFLKKIREISNKYRVPIPCYGHAGDGNIHATPIKPPELSMEEWHEKLEKLLEEMYVVVKELGGVISGEHGIGHKRKKYLPLVLEPAHIEMMRAIKKALDPDLILNPGKII

SEQ ID NO: 16720 - protein, 388 aa, Thermoanaerobacter tengcongensis MB4
MNFEDRIAKRAKAIEISTIRYFFNMAREVEGAISLAIGEPDFITPEHIRNAAKKALDEGMTGYTVNAGLIELRREIADYLKRRYSLYYDPEKEILVTIGATEAIYVTLSTLAEEGDEVLIPEPSFVAYHPCTVIAGAKSVFVPTYEEDDFILRADVLEKYITERSKVLILPYPNNPTGAVMPKEALEEIAKVVEKHDLIVVTDEIYSELVYGGFKHTSFASLPGMWERTITINGFSKSYAMTGWRLGYIAAPEHFTKHIAKLHQYAVTAAATMCQYAGIEAMRNGDEDIIKMREEYDKRRKFLLESVREMGLSCFEPKGAFYIFPSIKTTGLTSMEFAKRLLYEAKVAVVPGNAFGEHGEGYVRLAYATSMENLEEAVKRMKEFMAKL

SEQ ID NO: 16721 - protein, 298 aa, Thermoanaerobacter tengcongensis MB4
MNQIIECVPNVSEGRDQEKISELIKEVVSTEGVKLLDYSSDKDHNRTVITFVGDKEGVKEAAFKLIKKASEIIDMRYHKGEHPRIGAVDVVPFVPVKNVTMEECVQIARELGERVGKELNIPVYLYEEAATTPERKNLENIRRGEYEGFFEKIKQPEWKPDFGPSEMNPKSGAIVIGARNFLIAFNVNLGTNDIEIANKIAKAVRFSSGGYRYVKAMGVELRERGIVQVSMNLTDFNKTPIYRVFETIKAEASRYGVNVVGSEIIGLVPSKALLDVADYYLRLENFSMDMVLENRIYE

SEQ ID NO: 16722 - protein, 260 aa, Thermoanaerobacter tengcongensis MB4
MNKKSLFLAFAVVFALAFMLSGCGSKFNTVDQIKQKGVIVMGTSADFPPFEFHKVEGGKDEIVGFDIDIANAIAKKLGVKLEIKDMDFKGLIPALQAGRVDMVIAGMTPTAERKKSVDFSDLYYDSRQVVVVKNDSPISKFDDLKVKTIAVQIGTTSEEAAKKIPNVKLKQLNRVSDEFMDLQNGRCDAIVVEDTVAKAYLKEYKDMKILYMDEINNVENGSAVAVAKGNKSLLDVVNEVIKELKQSGEYDKLVDKWFKQ

SEQ ID NO: 16723 - protein, 394 aa, Thermoanaerobacter tengcongensis MB4
MREAVIVSAVRTAIGKFGGSLAGIPVVDLGAIVIKEALKRAKVAPEQVDEVFMGIILQAGLGQNPARQSAVKAGIPVEVPATTINMVCGSGLRTVAMAAQAVMLGDADIVVAGGMESMSRAPYLLRDARWGYRMNMPSGELVDEMVYDGLWDVFNQYHMGITAENIAERYKISRQEQDEFALRSQNLAEAAIKAGKFEEEIVPVPIPQKKGDPIEFKVDEHPRFGTTMEDLAKLKPAFKPDGTVTAGNASGINDGAAAVVVMSRDKAKELGVTPLATIKSYAYAGVDPAVMGLGPIYSTRKALDKAGLKIEDIDLIEANEAFAAQAIAVARELNFDMEKVNVNGGAIALGHPIGASGARILVTLLHEMKRRGSRLGLATLCIGGGMGISMIVEM

SEQ ID NO: 16724 - protein, 459 aa, Thermoanaerobacter tengcongensis MB4
MNLFRKKSVDQLLEAAEKTGLNKKLTAIDLAALAIGSVVGTGIFVSTGEGALRAGPGVIISYIIGGITAALAAFIFAELVTMFPVAGSTYTYSYVAFGELIAWIIGWDLLLEYLVSASAVASGWSGTFVGLLKSFGITLPEAITKPPISGGIMDLPAILITAFVAWILYIGVRESATTNNIIVLVKIGVILLFLFLGFSHVKLSNLTPFAPYGWKGIMSAAAIIFFAYIGFDAVSTAAEETKNPTRDVPLGLVMAMVVILALYISVAVVLVGMVPYKTIIPDNALPGALMSIGINWGSALVATGAAVGMISTLLITLYGQIRIFMVMARDGLLPEVFSHIHPKYRTPHINTVITSLVAAIIAGFLPLDIIIELCNIGTLSVFVIVSIGILVLRVKMPNVERKFRVPAVWLVAPLTAAFSLYLMASLPWVTWLRFGIWMLVGLIIYFAYGRYHSVLNVQK

SEQ ID NO: 16725 - protein, 613 aa, Thermoanaerobacter tengcongensis MB4
MCGIAGWVNFNMDLSLQNEVIEKMTDTLKKRGPDGSGVWLSKHCVLGHRRLIVIDPQGGIQPMIKKYGEKNFVIIHNGELYNMDELKNELISLGYTFNTRSDTEIILTSYIEWGPLCVKKFNGIFAFAIWDEVQNRLFIARDHLGIKPLFYTIKNGSLIFGSEIKAILAHPHVKPEIDSQGLAEIFVMGPSRTPGCGVFKDIKELKAGHYLIFTKNGVNISKYWSLQSLPHEDSLEKTAEKIRYLLKDSSVRQLVSDVPLCSLLSGGLDSTAVSFFANEELKQKGHKLITYSVDYVGNDKYFTPNEFQPNSDADWVKFVANKLDTDHNYVFIDNEELAHALKPALYARDLPGMADIDSSLYLFLKEVKKGATVALSGEGADEVFGGYPWFRNKESIRSHTFPWTRMVNERMKLLLPEVVNYIRPLEYLNDRYNEALNEVPKLNGEDPYNARMREMFYLNITRFMPMLLDRMDRMSMAVGLEARVPFLDYRLVEYVWNIPWEMKNLNNREKGILRYALKGYIPDEVIERKKSPYPKTHNPVFKNIVKKWLKQIINDSTSPLLQLVDKKAIAELIETDAKAYDPAWFSQLMGSPQLFAYLVQINMWLKDYKISIV

SEQ ID NO: 16726 - protein, 501 aa, Thermoanaerobacter tengcongensis MB4
MSLSYLTPEFKVLRDYDKCINCKVCMRECSFEVHSYDEHLDKMVSNDMNCVNCQRCVVLCPTQALTIIKHPQTFKEHANWTYDAIRDIYRQAETGGVLLSSMGNDRPYPVYWDKMVINASQVTNPSIDPLREPIELRVYLGRKPDRIEIDENLNVKTKMPPQLKLETPIMFSAMSYGSISYNAHAALARAAEELGIFYNSGEGGLHKDFRKYGKNTIVQVASGRFGVDREYLNIAAAIEIKIGQGAKPGIGGHLPGEKVSEDISATRMIPPGSDAISPAPHHDIYSIEDLAQLIYALKEATDYQKPVGVKIAAVNNVAAIASGIARAGADYIAIDGFRGGTGAAPKRIRDNVGIPIEFAIAAVDARLRSEGIRHTISLVAAGSIRNSADIVKAIALGADAVYIGTAALIALGCHMCQKCYTGKCNWGIATQDPNLAKRLNPEIGYKRLVNLVQAWSHEIKEMLGGMGINDIESLKGNRLMLRGIGMTQKELDILGILAAGE

SEQ ID NO: 16727 - protein, 601 aa, Thermoanaerobacter tengcongensis MB4
MEYQQEEIMAKPFDWKIMKRLLTYAKPYWFYILIGVIAILLVTVSNLLRPYLVQQAIDNYINNPHISKEQAIQGVIRIGSLYIVIITVAFLINYGQVYLIQYTGQKIIFNLRQQIFEHLQKLSLSFFDRNPVGRLVTRVTNDTDTLNEMYTSVITNLFNDVFIIAGIVIAMVSYNLKLAFIALSTTPLILTGMYIYRKLASQAYRLVRVRLARINAFLSEHISGMKIVQLFVTENKKMEEFKKINKEYYDANMRQLTIFAIFRPSMDVIYSLTLALLIWYGGRDIIAGKIEFGVLYAFVNYLQQLFQPIFDISEKYDILQSAMASAERIFILLDTKEEVKDPEDPIPLEEVKGKIEFKNVWFSYNGKEWVLKDVSFEVNPGETVAFVGATGAGKTSIINLLCRFYDIQKGEILIDGIDIRKVRQQDLRKHIGIVLQDVFLFTGDIKSNIRLNNKNITDNDIYRVAKYVNAHQFIKKLPEGYNSKVTERGSTLSAGQRQLLAFARALAFNPKILVLDEATANIDTETERLIQDALEKLTKGRTTLVIAHRLSTIQHADKIIVLHKGRIREIGTHQELLQKKGLYYNLYMLQYKDQLSESKIS

SEQ ID NO: 16728 - protein, 104 aa, Thermoanaerobacter tengcongensis MB4
MYAIIETGGKQYMVREGDVLKVEKLNYPEGEVIALDKVLAVSFEDGNVEFGKPYLENVKVTAKVLEHGKGPKIRVFKYKPKKNYRRRQGHRQPYTKIQIEKIEK

SEQ ID NO: 16729 - protein, 424 aa, Thermoanaerobacter tengcongensis MB4
MVFIDTARIYIKAGDGGNGFISFRREKYVPYGGPDGGDGGKGGDVIFIADPNLSTLLDFKYKRKYIAENGENGKSKNQYGKDGEDLYIKVPVGTTIINDETGEVIADLIKPYQKAIVLKGGKGGRGNAKFATPTLKTPRFAESGEKGREMWVRLELKLLADVGLVGFPNAGKSTLLASCSRARPKIANYPFTTLTPNLGVVEHKGKSFVMADIPGLIEGAHRGEGLGHDFLRHIERTKMLIHVVDVSGSEGRDPVEDFEKINEELRLYDERLVTLPQIVAANKMDLPEGKEKYPRFEEEIKKRGYEVYPISALTKEGLDALLDKTIEILSSIPAEKIEEVPEVIVYNPPEEEETLEVEVKGNTYYLKGSKIDKLLKRINLQDEHSLRYFEILLRKSGVIDALKEKGFKSGDVINVRDFEFEYYE

SEQ ID NO: 16730 - protein, 606 aa, Thermoanaerobacter tengcongensis MB4
MGKVIGIDLGTTFSCVAVMEGGQPVVIPNSEGTRTTPSVVAFTKEGERLVGHPARRQAIINPERTIMSIKRHMGTDYKVKIDDKEYTPQEISAMILQKLKADAEAYLGEKVTQAVITVPAYFNDSQRQATKDAGRIAGLEVLRIINEPTAAALAYGLDKEGNQKVMVYDLGGGTFDVSILEIGDGVFEVLATSGNNHLGGDDFDQRIIDWLADNFQKEHGIDLRKDRMALQRLKEAAERAKIELSSAMVTNINLPFITADASGPKHIDVNLTRAKFEELISDLVESTVGPVKQALSDAGLKPEDIDKVLLVGGSTRIPLVQETVKKIMGKEPHKGINPDEAVAIGAAIQAAVLAGEIKDILLLDVTPLSLGIETLGGVFTKIIERNTTIPVRKSQIFTTAADNQTSVEIHVLQGERPLAKDNKSLGRFILSGIPPAPRGVPQIEVTFDIDANGIVHVSAKDLATGKSQQITITGSTNLSEEEIQRMINEAKQYEEQDRKKREEIEIRNRADSLIYQAEKTMKDLGDKMTQAEKDEINKEIENVRKALEGTDVEAIKAASEKLSEAFYKVSTRLYQQAAGSANPGGSQGTSQGNVYEADYKVEDDNK

SEQ ID NO: 16731 - protein, 298 aa, Thermoanaerobacter tengcongensis MB4
MAYRAGFVALIGRTNVGKSTLLNAILKEKVAITSPKPQTTRNTIRGILTTEDYQIIFVDTPGIHKPKSKLSEFMIEVAKRTLKDVDLILYMVEPDTSIGPGDRYILDNLKEVDTPVILVVNKIDLVPAERVEEAIKVFKSEYNFKDVVAISASLGTNVEVLKEKIVSFLPEGPRYYLDDYITDQPEKLIVAEIIREKMLYFLEEEVPHGVYVEVESIKEREDKEIVDIDAYIYCEKESHKGIIIGKNGQMLKKIGQAARQDLEEFYGKQVFLQLWVKVRKGWRDNEKLLRKLGYAIDK

SEQ ID NO: 16732 - protein, 495 aa, Thermoanaerobacter tengcongensis MB4
MKKLDQTQTPLFDALMEYVNNNTIPFHVPGHKKGEGMAKKFLDFVGKNVLSMDVTVFQQVDSLHKPTGPIKYAQELAAEAFGADATFFSIHGTSGAIQAMILSVMGEDEKIIVPRNIHKSVTSGIILSGAIPIYMQPEIDKNIGVALNVTPETVEKTLRQHPDAKAVLIINPTYYGVSTDIVKIAEIVHDYGAILMVDEAHGPHLKFNEKLPISAMEAGADICAQSTHKIIGSMTQSSMLHVKGDRIDINRVKQVMSLLQTTSPSYILLASLDVARMQMATEGKELLDRTIELAEYARREINKIKGLYCFGEEIVGRDGAYDFDPTKVTITAKGLGITGHQLERILAEKYYIQVELSDMYNVLCVFSIGDTKEKVDYLLRALREISDELYDENIEVAKPIDIPEIPELVVSPRYAFNAPTVALPLRESVGQISAEFLMAYPPGIPVLCPGERITMEIIEYVEKMKEANLSIQGTEDPEANYIKVVNYRQALNVIA

SEQ ID NO: 16733 - protein, 267 aa, Thermoanaerobacter tengcongensis MB4
MEKGKETKDILVVDDSVLIRLMVKDILGGEGYNVVAAATSEEAVRKIKSRKELFDLIIVDINLPDQNGFEFIRNLKSEEKYRHIPVIILSIDATVPSIKRAVEAGAVDYLVKPFKAEELVKRVVKLVGSVKKEDRYPELKDLLKKEVNRARRSNTNLSLILAHCEGKIAGEISKIAGKIRSKLRDIDAVFEINENTLALVLPVTGREGAEVVVKKIQGELRGSWRYAISIYPDNGKDEEELIGFAKESLMKEESNSSQEDDKEKEEK

SEQ ID NO: 16734 - protein, 395 aa, Thermoanaerobacter tengcongensis MB4
MNLSQNALQITPSMTLEITAKARQLKAEGVDVIDFGVGEPDFDTPDYIKEAAIEAIKKGYTKYTPASGILELKKAICEKLKRENGLFYEPEQIVVSNGAKHSIYNALSAILNPGDEVIIPVPYWLSYPEMVRLAYGKPVFVQTKEENNFKITAEELTAAINPKTKALILNSPNNPTGAVYTRKELQDIAEVVEETGIFVISDEVYEKLIYEGEHVSIASLGEKIKELTIVVNGMSKAYAMTGWRIGYTASSLDVAKVMANIQSHTTSNPNSIAQYASVTALTGDGVAIKRMVEEFNKRRLYAVERISKMKGLKAVRPQGAFYVFVNIEEYVGKKVNGRKIKGSLDFATLLIEEANVAVVPALPFGMDNYIRISYATSMENIEKGLDRIENFLNKI

SEQ ID NO: 16735 - protein, 293 aa, Thermoanaerobacter tengcongensis MB4
MMRCKMGERVNFIDTGKFLTATKEYEEADIVLVGVPMDYSVSFKPGTRFGPSSIRQASYGLETYSVYLDRRLEDKKICDLGDLVLPYGNIEKSLRLIEEVAEKIVKDGKKGIFLGGEHLITYGILKSYIKKYGDKLAILHFDAHTDLREEFFDEPYSHATVLRKVWELSPKVKIYHFGIRSGEKEEFEFAEKNTNMFLYEVVEPLKNVMKEIKENFIYITFDIDVLDPAFAPGTGTPEPGGITAKEALEAIHLLKDFNVIGMDLVEVSPPYDVAGITSILAAKLVREAILSFF

SEQ ID NO: 16736 - protein, 395 aa, Thermoanaerobacter tengcongensis MB4
MNLSQNALQITPSMTLEITAKAKQLKAQGVDVIDFGVGEPDFDTPSYIKEAAIDAIKRGYTKYTPSSGIPELKKAICEKLLKDNGLSYTPEQIVVSNGAKHSIYNALSAILNPGDEVIIPVPYWLSYPEMVRLAYGKPVFVHTKEENDFKITAEELENAITPKTKAIILNSPNNPSGAVYTKEELEEIARVVEEANIFVISDEIYEKLIYEGEHVSIASFGEKIKELTIVVNGISKAYAMTGWRIGYTASSLEVAKVMSNIQSHTTSNPNSIAQYASVAALQGGEEEIEKMKEEFNRRRLYMVERVNKIKDLKCSTPKGAFYVMVNIEKYIGRELNGKTINGSLDFASALIDGANVAVVPALPFGMDNYIRMSYATSLENIKKGLDRIEDFLSKS

SEQ ID NO: 16737 - protein, 398 aa, Thermoanaerobacter tengcongensis MB4
MKILVQKFGGTSVSSEEKREKAVSKVIEAVKNGYNVVVVVSAMGRNGDPYATDTLINMAKSIYSDIPKRELDLIMNCGEIISSVLFAATLSNKGYKAKALTGGQAGIITDDNFGNAEVINVDPSRILEVLREGIIPVVAGFQGITQKGELTTLGRGGSDTTAALLGVALKAEAVEIYTDVDGIMTADPRIVSTAHIIDKISYNEVFQFAEQGAKVVHPRAVEIAMRGNIPLIIKNTMSDSGGTIITNYSDAYDSIYEVDKLVTGIANMNNRVQITIESTENVQDIFEKIGEEKISIDLISIFPDKQVFTISEADFEKLRRLFEKYGVKYSYRTNCAKVSIIGNRIRGVPGVMARVIKALSKRNIEIYQTADSHNTISCLVSQDKVEEAIRVLHDEFSL

SEQ ID NO: 16738 - protein, 401 aa, Thermoanaerobacter tengcongensis MB4
MKILVMNCGSSSLKYQLLDMENNKVLAKGLAERIGINDSLLTHQAEGKEKVKIQRDMKNHKEAIQLVLEVLVDKEIGVIKDMKEIDAVGHRVVHGGEYFTDSVLIDDEVIKKLEDCIDLAPLHNPANIEGIKACQQIMPGVPMVAVFDTAFHQTMPDYAYIYPIPYEYYEKHRIRRYGFHGTSHKYVSMRAAEILGRPIEELKIVTCHLGNGASITAVKNGKSIDTSMGFTPLEGLAMGTRSGSIDPSIVTFLMEKEGLTAHQVVDILNKKSGVYGISGISNDFRDIENAAFNEGNKRAMLALKVFAYIAKKTIGAYAAAMGGVDAIVFTAGVGENGPEMREFILEGLEFLGFTLDKEKNRVRGKEAIISTEDSRVKVMVIPTNEEYMIAKDTEKLVKGIK

SEQ ID NO: 16739 - protein, 331 aa, Thermoanaerobacter tengcongensis MB4
MSVMDNIIQKAKANKKKIVLPEGTEPRTLKAAEIVLKEGIADLVLLGKEEEIREKAKGLDISKAEIVDPEKSPNLERYAKEYYELRKNKGMTEEEAERLMRDPMYYGCMMVKLGDVDGMVSGAIHATADVFRPAFQIIKTAPNVKVVSSAFIMEVPECKYGSDGVFIFADCAINPNPTAEELAAIAIASAHTAKVLAGIEPKVAMLSFSTKGSASHELVDKVKRATEIAKELAPDLLIDGELQVDAAIVKEVGELKAPGSPVAGQANVLIFPDLQAGNIGYKLVQRLAKANAIGPISQGLAKPVNDLSRGCSVEDIVNVIAITSVQAQGIV

SEQ ID NO: 16740 - protein, 228 aa, Thermoanaerobacter tengcongensis MB4
MTISSVYNEMFDINRQKDMRKFFLNIAIEGYKKSFLKNETITIDCDKTYIAIITKGLIKQFISNKNGKIKVLYLLQPGEIFGEFSYLGGGFDLIEGQAIKDSEISIIFEDKLNSMLKTNPTMYKYIAHSMSRKFRIVTMQMSDLIFKDSMGRLCDFLIRVFYQEGKKIEKGYIIDIPLTHEDIANLIGCDRVTVTKGLNKLKKEGLIEIDGKKIIIKDLRYLENYADS

SEQ ID NO: 16741 - protein, 391 aa, Thermoanaerobacter tengcongensis MB4
MQNKGMMIMEVYLDNSATTKVRKEVIDKMLEVLEEEYGNPSSLHRKGYQAEKLLKEARENVACLIGGRPEGIIFTSGGTESNNLALIGVAESLKKKGNHIISSTIEHPSILNVLKFLEESGFKVTYIEVDKKGKVNPEDVENAINDKTILISIMAVNNEIGTIEPIEEIASIAKRNGVLFHVDAVQAAGKIEIDVKKQKLDMVSLSAHKIHGPKGVGALYLSEEVRIRPIIFGGGQEKNIRSGTENMPGIVGFGVASRLAKESLEEVSQKLMGLKKRLWEGISSEIKDVHLNGPEVEEGAPHILNVSFRGVRGEVLLHALEEEGIYVSTGSACSSKKRGGSHVLKAIGLKGDLLEGAIRFSLGIFNTEEDIDYTVDILKKKVDFLRRFKRR

SEQ ID NO: 16742 - protein, 66 aa, Thermoanaerobacter tengcongensis MB4
MVRGKVKWFNAEKGYGFIEREDGTDVFVHYSAIEGEGFKTLEEGQAVEFEVVQAAKGPQASKVRKL

SEQ ID NO: 16743 - protein, 216 aa, Thermoanaerobacter tengcongensis MB4
MKFFLDTANIEEIKEAYSLGVISGVTTNPSLVAKEGRDFKEVIREIAEIVDGPISAEVISDDHEGMVKEARELAKIHKNIVIKIPMTAEGLKAVNILSKEGIKTNVTLIFSANQALLAARAGATYVSPFVGRLDDINTDGMQIIEDIVTIFTNYDIQAEIITASVRHPIHVLEAAKLGAHIATVPYKVLMQMIKHPLTDIGIERFKEDWKKAGLKI

SEQ ID NO: 16744 - protein, 479 aa, Thermoanaerobacter tengcongensis MB4
MVESSGAKGVLRKKLPEHAMELAQEEKYRLKRELGWFELMLFVLGATIGAGIFVLPGVAAAKFAGPAIMISYALGGIVTIAVALAYTEFASMVPVAGSAYTYSYVALGEIFAWIVGWDLIFEFTMIASTVAVGWGGYFNSFLETVFGITLPQAISHDITHGGIVNLPAILGLLIVAWIALTGIRASGIANALFTTAKVFAILFVLTVGVFHIKLENWTTPFAPYGLAGIMTGAALTFFAYTGFDGITSLLEEVKRPERDIPIALIGGISLCALFYVAMSAVITGMVHWTKLDVPNPAAFVLMQVGIPWGGALISISVLFGLIATMLGNSLSASRILFAMGRDGLLPEWFAFVHPTRRVPRNAAYVIYTAAIIFAGFLSISELAELANIGGLTAFTLVTISVMVMRYTDPERKRIFKVPAIWVIGPIGIIGSLALIASLPVVTFIRFTVWLIIGLIIYFSYGYKHSKEGTGYYIGKENQK

SEQ ID NO: 16745 - protein, 437 aa, Thermoanaerobacter tengcongensis MB4
MVEERNKEELKRVLGTWDLVAFAIMTMVPIAPMGIYGVIAVVSHGHVPLAYTLAAIAMYFTAWGYAQFALRYPEAGSVYAYVRESVGFHAGFLAGWSILLDYILVPALVIMVSALWLEALTSISMIWWALLFIVLATFMNVLGIQLTSRAAWILFVFELFVLIVFIAVAIYKIASTPGLSFNLAPFYNPSDFSLHAVLAGTSIAVLSFLGFDIMTTLAEETVEARKNVSRAVRIVIPLVALMFVLQTYLGAVVHPGYKFADPDVAFFEITKEVGGNWLQMLAVLGTVLAWGIGDTMAAQAGISRVLFSMGRQGHLPKIFARIHPQYKTPYVATIFVALITGPLIYLLTLKDITSLVNFGALTSFIAMHLSLGYIFLAKEKRPLAVIMPAIGFIITAAVWWGLDKLAKELGFAWLILGFIYLAIITRGFRVKTTLPID

SEQ ID NO: 16746 - protein, 358 aa, Thermoanaerobacter tengcongensis MB4
MSEKILKITLKRYSVNKERAVEMGVKIAIVNSSSFGKHFPEHIERLKALGQVDRFELPHDMRGKALAEKLMGYSIIIASVKPYYDREFFEYKDETLLIARHGIGYDAIDIESATKKGTIVTIVEGIVEREAVAENAVALLLDVMRKVREASIKVKEGKWHERANFIGYEIKGKTAGIIGIGNIGSRVAEILKYGFGAEVIAYDPNLSKEEIIKREARPVSLEELLRSSDIISLNASLNERNYHMLSYKEFSMMKNNVFIVNTARGELIDTEALIKALREGKVAGVGLDVVEGEPIDENHPLLKFDNVVITPHTSAYTYECLKGMGDKVVSDAEKVLRGEIPDGVVNKEVLEGEKWKKI

SEQ ID NO: 16747 - protein, 324 aa, Thermoanaerobacter tengcongensis MB4
MFKVFVTRAIPEEGLELLRKYCEVEVSPYDRMLTKEELLEKIKDKDAVITQLTDKVDKEFFEAAKNVKIVANYAVGFDNIDLEEATKRGVYITNTPDVLTNATAELAWALLFAAARRVVEADKFMRAGKFQGWAPMLFLGKGVTGKTLGVIGAGRIGQAFAKMAKGFEMKILYNARTPKPEFEKETGAKYVDLDTLLKESDFVSIHLPLTPETRHLIGERELKLMKNSAILINTGRGPVVDEKALVKALKEKWIYAAGLDVYEREPEFEKELAELDNVVMLPHIGSATEEARRDMSVLVAQNIIDVIEGRVPRTLVNKDILNKR

SEQ ID NO: 16748 - protein, 357 aa, Thermoanaerobacter tengcongensis MB4
MGLALILVINPGSTSTKVAVFRDKEPVFTETLRHSTEELSKYKRIIDQFEFRTQAILDMLKEKGISLSQIDAIVGRGGLLKPIESGTYIVNEKMLEDLKKAERGEHASNLGAIIAYTLAKEHNIPAYIVDPVVVDELEDVARITGLPEIEKQSIFHALNQKAIARRLASDLGKRYDEVNLIIAHLGGGISVGAHRKGRVIDVNDALNGEGPFSPERAGGLPVLDLVKLCYSGKYTFEEMKKKLIGKGGIVAHLGTNDVREVYKMIENGDKNAELILDAMAYQTAKEIGSMAVVLKGKVDAIGITGGIAHNEDFVRRIRERVEFIAPVYVYPGEDEMLALAEGAYRVLTGEENPKTYS

SEQ ID NO: 16749 - protein, 298 aa, Thermoanaerobacter tengcongensis MB4
MRTFAELYEHVKNLPPKVIAVAQAADEDVLEAIKEAHEKGIVRAILVGDKEKIERIASSIGMSLKDHEIVEAKSNLDACREAVRLVSEGKADILMKGLVQTAEILRVVLDKEIGLRTGRTLSHVAVFESPYNRLILLTDAAMNIAPDLKVKIDIILNAIDVARQIGIDAPRVAILGAVETVNPDMQATLDAAILSKMSERGQIKGAIIDGPLALDNALSVEAARHKGIVSPVAGNADILVVPDIEAGNILYKAITYIAQRKIAGIIMGAKKPIVLTSRADSSDAKFNSIMLASLASNV

SEQ ID NO: 16750 - protein, 354 aa, Thermoanaerobacter tengcongensis MB4
MFKVLVINPGSTSTKVALYEDEKEIVRSDITHDVETLKNYKSVIEQLDLRLEAINKWLSENGIKVLELSAIVVRGGLIKPVQSGTYVVNDIMLEDLRKGVGGEHPSNLGGIIGRALADPYGIPVYTLDPVAVDEMEDVARISGLPELPRKSQSHALNIKACIHRYARENNLKEEELNMIVAHMGGGISVAAIKGGRIVDVNNANQMGPFSPERTGSLPSMKVVEMCYSGKYTLEEMKKKIVGMGGLVAHLGTNDAREVVKRIEAGDKKAKLVFEAMAYQIAKEIGRMAAVLKGDVKTIILTGGLAYSKPLIEIIIDMVGFIAPITLYPGGDEMEALRDGALRVLRGQETPKIYG

SEQ ID NO: 16751 - protein, 611 aa, Thermoanaerobacter tengcongensis MB4
MKDNNKIFRSMVLYLLIFIAIYAMVQLYSQATPQVTKIDYGELVRYISANQIKSITLSGNQVKGVFKNGTEFESSVPDITNFMSFVDPYILEGKLDFKYEPQVGPPWWVQMLPSLFLVGVLILFWYIFMQQAQGGGGSRVMSFGKSRARMVTDKDKRVTFNDVAGADEEKEELQEIVEFLKYPKKFIELGARIPKGVLLVGPPGTGKTLLARAVAGEAGVPFFSISGSDFVEMFVGVGAARVRDLFEQAKKNAPCIVFIDEIDAVGRQRGAGLGGGHDEREQTLNQLLVEMDGFSVNEGIIVIAATNRPDILDPALLRPGRFDRHIVVNIPDIKGREEILKVHARNKPLAPDVSLQVIARRTPGFTGADLENVMNEAALLAARKGLKQITMAELEEAITRVVAGPEKRSRIMSEKDKKLVAYHEAGHAVVAKLLPTTPPVHEVTIIPRGRAGGYTMLLPEEDKYYMSKSEMMDEIVHLLGGRAAEKLVLNDISTGAQNDIERATNIARKMVTEYGMSDRLGPMTFGTKSEEVFLGRDLGRTRNYSEEVAAEIDREIRRIIEEAYKRAESLLQENIDKLHRVAKALMEKEKLNGEEFEKVFNGEEIEGVSFA

SEQ ID NO: 16752 - protein, 388 aa, Thermoanaerobacter tengcongensis MB4
MNPNKYISDVVKKIPPSGIRKFFDLVTNSKDIISLGVGEPDFVTPWEIRKEGIETLCRGNTTYTSNLGLLELRIAISYFLKTHYDLNYDPEKEIMVTIGASEAIDLALRALLNDGDEVLIPEPSYVSYAPCVILTRGVPVFIPTDEKNNFILTPDDLRSKITSKTKALILLYPNNPTGAIMKKEDLEEIVDVIIEKDLIVISDEIYSELTYEGKHVSIASLPGMKERTILINGFSKAFAMTGWRLGYIAAEHEFIEAMNKIHQYTTICAPITAQYAAIKGIYECEEDIIKMRETYDQRRRFIVNGFREIGLDCFEPKGAFYIFPSIKKTGMTSEEFCEKLLKEEKVAVVPGNAFGPSGEGYVRVSYAYSIDKIAKALERIKRFAEKIL

SEQ ID NO: 16753 - protein, 384 aa, Thermoanaerobacter tengcongensis MB4
MDRIYLDNAATTPVDKRVLEAMLPYYSDVFGNPSSLYSYGQEAKKAIEEAREKVAKALGADSDEIYFTSGGSESDNWALKGVAYALKDKGNHIITTEIEHHAVLNTCRYLEKEGFKVTYLPVDEYGLVKPEDLKKAITDKTILVSIMFANNEIGTIEPIEELVKIAHEKNVYFHTDAVQAVGNVPIDVKKLDVDLLSLSAHKIYGPKGVGALYIKKGVKIHSLIQGGTQERNRRAGTENVPGIVGLGEAMELITKNLDSHINKLTFLRDKLINGILEKIPYARLNGHPTKRLPGNVNVSFEFIDGESLILNLDMAGICASSGSACTSGSLEPSHVLLAIGLPRELARGSLRLTIGKENTEEDIDKVLEVLPQIIKRLRSISQIV

SEQ ID NO: 16754 - protein, 410 aa, Thermoanaerobacter tengcongensis MB4
MLKGEKVVLAYSGGLDTSVIIPWLKENYECEIIAVCVDVGQREDLRYIKDKALASGASKVYIEDVKEEFVKDYIFPTLKAGAIYEGKYLLGTSMARPLIAKKLVEIAHKEGAKAIAHGATGKGNDQVRFEVSIRALDPSIKIIAPWRIWELKSREDEIEYAKKKGIPIPVTKEKIYSVDSNLWHVSHEGGDLEDPWNEPKSDIYDIVTPPEKVSDKPEYVYIEFEKGIPVKVNGKTLSPVKLIEELNEIGGRNGVGIVDLVENRLVGMKSRGVYETPAGTLLYIAHRELEYLVLDKETMRFKELVAQKYADLVYNGLWFSPLKTALDAFIDETQKNVTGVVRLKLYKGNVINAGAKSPYSLYNEEFATFGKDEVYNQKDAEGFINLFGLSLKIRALMEMGRKDMDEAVGR

SEQ ID NO: 16755 - protein, 627 aa, Thermoanaerobacter tengcongensis MB4
MSGDRKVDSKMPPIPHMGRGGGPRALVRGAEKAKDFKGTMKKFIKYLSEYKISIITVILLAILSTSFSIAGPKILSKAITKIFEGVMNRITGQGSGIDFEYIGRIILILIGLYGLSALFGYLQGWIMSGVAMKVTYKFRREISEKINRLPLKYFEGTNQGEILSRITNDVDTITQTLNQSLTQIITSVTTVIGVLIMMLTINWLMTLVALLIIPLSSLVIAFIVKYSQKYFREQQDYLGHVNGHVEEMYGGHHIVKAFNGEKKSIAKFDELNSTWYDAAWKSQFLTGVMMPLMNVIGNLGYVAVTVLGSWLVIKNAIEVGDIQAFIQYIRSFTQPIAQIANISNILQQTAACAERVFEFLEEEEEVPDNPKPIKLEDIKGDVEFRNVKFGYRPDKIVINNFSAKIKAGQKVAIVGPTGAGKTTIVKLLMRFYDVNEGAILIDGHDIREFSREDLRSLFGMVLQDTWLYNGTIMDNIRYGRLDATDEEVIKAAKAAHVHSFVKSLPGGYNMMINEESTNISQGQKQLITIARAILKDPKILILDEATSSVDTLTEIQIQKAMDYLMKGRTSFIIAHRLSTIKDADLILVMDHGDIVEQGTHEELLKKGGFYAKLYNSQFEREEEQLVS

SEQ ID NO: 16756 - protein, 475 aa, Thermoanaerobacter tengcongensis MB4
MVLLMTELQKRISFIGLVALGAAGVIGTSWIYTNSKFFAAYGAGGEIFGFVVATVIASLIALAYAELSTVFPRAGGEVVYTYVAFGKTTSFIAGWALVGAYLASLAFYVTASSLLLAWIFPQLEQGPYYVIAGTKIHLPELIVGIAITLLVFLVNYYGAHLASGIQIVMFGTMIVLGLLLVIVGFTHGQASNFWPAWSKDMNPFLSTMRFVLPAMTYLTGFELVAVLAEEANMPVRKIGISVILSVVLAGLFYTIVLLSSAWVIPWQETAKLKLGTIDAFKVAGFPALGWAAYFISVLGLVTSFVGLFAATPRLILSLSRAGVLPQTFTKTHPKYGTPVNALYLTLGFALGLGWLGKGAMVWFLDMGGFAIAIAWVLATLSLIKIRKKYPNLRGAYRTSATLLPLIGGIVAIIIAIATLIPGTPLSLAWPYEYIVLGVWAIVGVILYAKAPKGNEEEALKNLLGEYYEAIKKASD

SEQ ID NO: 16757 - protein, 316 aa, Thermoanaerobacter tengcongensis MB4
MARYTNSLKIFTGNSNPKLASEIAEHLGLKLADSEVGTFSDGEISVRIGESVRGASVFVIQSTCAPVNNNLMELLIMIDAFKRASAAEINAVIPYYGYARQDRKAKARDPITAKLVADLITAAGAHRVVTMDLHAPQIQGYFNIPVDHLLGGPILAKYFMDKELGDDVVVVSPDHGSVTRARYFAEKLNAPLAIIDKRRPKANVAEVMNIIGDVKGKKAILVDDLIDTAGTLVQAAEALLDHGAVEIYACATHGVLSGPAIERLKESPIKEVVITDTIPLPEEKKIDKIKVRSVAPLFAEAILRIHEGMSVSKLFT

SEQ ID NO: 16758 - protein, 533 aa, Thermoanaerobacter tengcongensis MB4
MKIIVTEKISENGIDYLKKYADVDVKTNISREELLEVIKDYDAIIVRSATKVDRELIEKGEKLKVIGRAGNGVDNIDVEAATQRGILVVNTPAGNTIAAAELTIGLMLAIARNIPQAYHAALNGDFRRDRFKGVELNGKTVGIIGLGRIGSLVASRLAAFNMRVIAYDPYMPDERFEKCGVKRVTLDELLEQSDFITIHIPKTEETKKMIGEKEFKKMKKGVRIVNAARGGIIDEKALYNAIKEGIVAAVGLDVLEVEPKYNVEHQDFHNPLLELPNVVFTPHLGASTYEAQENISIAIAQEVISALNGNLYGNIVNLPGLKSDEFSRLKPYMKLAEVLGALYYQINETPAKLIEVIYRGEVAKSNTEIVTLYAIKGFLKPILEEDVSVVNAKLRAKEMGIEIVEGKIEEIDHYSSLVILKITDTNGKRTQFAGTTYGEELRIVEYMGHKVNFEPTEYMLFVKNKDVPGVIGHIGNVLGDFGINISTMQVSPNKNDGTALMLVSTDKEIPEEAVESLNKLNSIIKAKAVKGLV

SEQ ID NO: 16759 - protein, 418 aa, Thermoanaerobacter tengcongensis MB4
MKIGLMGLGTVGTGVVHLIDQNGRNIEKKIGEKIEIKKILVKDPNKKRTPLAEGKITFNAEDILEDEEIDVVVEVMGKEHPALEYITKALQKGKHVVTANKEVIAKHGKELIKLATEKKVHLLYEASVGGGIPIIRPLKQCLAANKIYEIKGILNGTTNYILTEMKEKGLDFDDVLKDAQQKGYAEADPTDDIEGFDAARKLAILCMLAFNKFVLPEKIYTKGISFISKSDIQYAEEMGYTIKLLAYARIDEKERLEAWVHPVMIRKTNPLNGVNGVFNAILVDGNAVGEVMFYGQGAGMMPTASAVVADIMDVKNHIVIQNGCEEVDLIPIEDTFSKYYIRLIAFDRPGVMSKITGVLGNKGISLLSVVQKGSLGETAEIVLVTHIANTGKVLEALKEIEELKEVEKIESVIKVRED

SEQ ID NO: 16760 - protein, 475 aa, Thermoanaerobacter tengcongensis MB4
MANSTSSYLWRKKTLEMVLSETEAEQFKLKKTLTAIDLIALGIGAIIGTGIFVITGVAAAEKAGPAIVLSFILAGLACAFAAISYAELASMFPIAGSTYNYAYIAMGEFLAWIIGWDLILEYVFALPAISLGWSGYFTNLLGSIGINIPAWAANSAWQAPGTGGLINLPAIGILLAIAILNYIGVRETATVNNIGVAFKVFVVLFFIFTAVWYVKPANWSPFLPYGWAGVFHGAAIIFFAYIGFDAVSTAAEETKNPAKDMPIGILGSLGISTLLYIAVSAILTGVVSYTELNDPAPVAKALNLIGLNWARGLVSLGAIVGITTVLLVMFYGSTRIIFAMSRDGLLPPIFSKVHPKYRTPTLAIYLITIATTLVAGFFPIGVIAELVNIGTMLAFVLTSIATIVLRYTQPDLPRKFRAPGMPWTGILAIAFVLSLMVSLPWETWVRLIVWFVIGLFIYFGYGRHNSILAKQQTQH

SEQ ID NO: 16761 - protein, 248 aa, Thermoanaerobacter tengcongensis MB4
MKEALLEIKDLHVEVEDKHILKGLNLTIKKGEIHAIMGPNGSGKSTLCHAIMGNPRYRITGGEILFEGENITNLKVNERAKKGIFLSFQSPEEIPGITVDNFIRTSSTIVTGQNMSMLQFAKEMQKMLELLDMSAEYRTRYLNVGFSGGEKKKTEVLQMAFLKPKLVMLDEIDSGLDIDALKVVAETIKKLKTEDMAILVVTHYNRILNYLEPDVISVLMDGKIVKEGDKELARILEEKGYDFVRNGA

SEQ ID NO: 16762 - protein, 225 aa, Thermoanaerobacter tengcongensis MB4
MKELKYLRKIPYFSELEDEKLEKLHNIATLKPVKKGCIIFTEGQKGEAIYFVKTGKIKISKISSVGKEYTIKIMEEGDVFGESTLFIGGEYPATAEAIEDSEILELRNKDIEDLILKDTQIALSIIKILAKRLKYIAVVIENLALRDSVGRTASILLTFARERGISTKEGILVEIDLKRQELANLAGTSRENITRILSQMDRDGIIKLGKDKILIKDLEELRKML

SEQ ID NO: 16763 - protein, 380 aa, Thermoanaerobacter tengcongensis MB4
MIYFDNAATTWPKPEEVYLEVDRMLRNCGNPGRGGHRMALEASRVIFEARQEIASLFNIKDPMRVVFTLNTTEALNIALKGVLKEGDHVITSSMEHNSVARPLSRLKEQGVEVTIVKGSEEGKIDPEDIKRAVKKNTKMIAITHASNVTGTIMPIEEIGNIAREMNLIFLVDAAQTAGVLPIDVEKYNISLLAFPGHKGLYGPQGTGGLYVKEGIELVPLKEGGTGSRSELTLQPDLMPDKLESGTLNTPGIAGLKEGVKFVKKVGVNSIREREVKLTELLIEGLREIKKVRVYGPQKIEDRVGVVSITVEGMDVGEVSHILDREFDIATRAGLHCAPLAHSTIGTLKSGTLRFGIGYFNTEEEIIKAVEAIETIIQKNF

SEQ ID NO: 16764 - protein, 206 aa, Thermoanaerobacter tengcongensis MB4
MATIAMYLGQLLEFIHHYVGNYGVAIIVFTVFIRILLLPFYIQQMAMMKKMKEIQPLVEELKKKYGKDPQKLNMETMKLYQEKKINPFGGCLPMLLPLIILWPLFTMLRTYPAFSTASFLWMHSLAERDPYYIIPILATVTTYISSAMVATDKSQNSMNIMMSLFMGWITVTLPAGVGIYWVTSNIFQIVQQYIFMRETKTLKGES

SEQ ID NO: 16765 - protein, 322 aa, Saccharomyces cerevisiae
GIDPFTAILSEKPNVKWEDVAGLEGAKEALKEAVILPVKFPHLFKGNRKPTSGILLYGPPGTGKSYLAKAVATEANSTFFSVSSSDLVSKWMGESEKLVKQLFAMARENKPSIIFIDQVDALTGTRGEGESEASRRIKTELLVQMNGVGNDSQGVLVLGATNIPWQLDSAIRRRFERRIYIPLPDLAARTTMFEINVGDTPCVLTKEDYRTLGAMTEGYSGSDIAVVVKDALMQPIRKIQSATHFKDVSTEDDETRKLTPCSPGDDGAIEMSWTDIEADELKEPDLTIKDFLKAIKSTRPTVNEDDLLKQEQFTRDFGQEGN

SEQ ID NO: 16766 - protein, 340 aa, Saccharomyces cerevisiae
GIDPFTGEDNGGEDNKKLRGALSSAILSEKPNVKWEDVAGLEGAKEALKEAVILPVKFPHLFKGNRKPTSGILLYGPPGTGKSYLAKAVATEANSTFFSVSSSDLVSKWMGESEKLVKQLFAMARENKPSIIFIDQVDALTGTRGEGESEASRRIKTELLVQMNGVGNDSQGVLVLGATNIPWQLDSAIRRRFERRIYIPLPDLAARTTMFEINVGDTPCVLTKEDYRTLGAMTEGYSGSDIAVVVKDALMQPIRKIQSATHFKDVSTEDDETRKLTPCSPGDDGAIEMSWTDIEADELKEPDLTIKDFLKAIKSTRPTVNEDDLLKQEQFTRDFGQEGN

SEQ ID NO: 16767 - protein, 179 aa, Oryza sativa Japonica Group
MAGSGRDRDPLVVGRVVGDVLDAFVRSTNLKVTYGSKTVSNGCELKPSMVTHQPRVEVGGNDMRTFYTLVMVDPDAPSPSDPNLREYLHWLVTDIPGTTAASFGQEVMCYESPRPTMGIHRLVFVLFQQLGRQTVYAPGWRQNFKTKDFAELYNLGSPVAAVYFNCQREAGSGGRRVYP

SEQ ID NO: 16768 - protein, 179 aa, Oryza rufipogon
MAGSGRDRDPLVVGRVVGDVLDAFVRSTNLKVTYGSKTVSNGCELKPSMVTHQPRVEVGGNDMRIFYTLVMVDPDAPSPSDPNLREYLHWLVTDIPGTTAASFGQEVMCYESPRPTMGIHRLVFVLFQQLGRQTVYAPGWRQNFNTKDFAELYNLGSPVAAVYFNCQREAGSGGRRVYN

SEQ ID NO: 16769 - protein, 179 aa, Oryza rufipogon
MAGSGRDRDPLVIGRVVGDVLDAFVRSTNLKVTYGSKTVSNGCELKPSMVTHQPRVEVGGNDMRTFYTLVMVDPDAPSPSDPNLREYLHWLVTDIPGTTAASFGQEVMCYESPRPTMGIHRLVFVLFQQLGRQTVYAPGWRQNFNTKDFAELYNLGSPVAAVYFNCQREAGSGGRRIYP

SEQ ID NO: 16770 - protein, 179 aa, Oryza rufipogon
MAGSGRNRDPLVVGRVVGDVLDAFVRSTNLKVTYGSKTVSNGCELKPSMVTHQPRVEVGGNDMRTFYTLVMVDPDAPSPSDPNLREYLHWLVTDIPGTTAASFGQEVMCYESPRPTMGIHRLVFVLFQQLGRQTVYAPGWRQNFNTKDFAELYNLGSPVAAVYFNCQRETGSGGRRIYN

SEQ ID NO: 16771 - protein, 179 aa, Oryza rufipogon
MAGSGRDRDTLVVGRVVGDVLDAFVRSTNLKVTYGSKTVSNGCELKPSMVTHQPRVEVGGNDMRTFYTLVMVDPDAPSPSDPNLREYLHWLVTDIPGTTAASFGQEVMCYESPRPTMGIHRLVFVLFQQLGRQTVYAPGWRQNFNTKDFAELYNLGSPVAAVYFNCQREAGSGGRRVYN

SEQ ID NO: 16772 - protein, 179 aa, Oryza rufipogon
MAGSGRDRDPLVVGRVVGDVLDAFVRSTNLKVTYGSKTVSNGCELKPSMVTHQPRVEVGGNDMRTFYTLVMVDPDAPSPSDPNLREYLHWLVTDIPGTTAASFGQEVMCYESPRPTMGIHRLVFVLFQQLGRQTVYAPGWRQNFNTKDFAELYNLGSPVAAVYFNCQREAGSGGRRIYN

SEQ ID NO: 16773 - protein, 510 aa, Phormidium laminosum
MTSTVPAETSLNKFEKLKSEKDGLAVKSELEDFARLGWEAMDETDRDHRLRWMGVFFRPVTPGKFMLRMRMPNGILTSGQIRVLAEVVERYGEDGNADITTRQNLQLRGIRLEDIPDIFRRFEQAGLTSIQSGMDNVRNITGSPVAGIDADELIDTRGLVRKVQDMITNNGEGNPSFSNLPRKFNIAIAGCRDNSVHAEINDIAFVPAYKDGKLGFNVLVGGFFSAKRCEAAVPLNAWVDPRDVVALCEAILIVYGITGFGANRQKSRLMWLIDEWGMDKFGAEVEQQLGHPLQTAAPKDEILWEKRDHIGIHAQKKPGLNYVGLLVPVGRLYAPMFDLARIAEVYGDGEMRLTVERKRDHSRTCPMFSVASLLKEPLLEKFSVSPGLLVRSLVSCTGAQFCNFALIETKNRAMALIQELESELELARPVRIHWTGCPNSCGQPQVADIGLMGTKVRKDGKAAEGVDLYMGGKVGKHAELGTCVQKGIPCDDLKPILRNLLIEHFGARPK

SEQ ID NO: 16774 - protein, 414 aa, Methanosarcina mazei Go1
MTHQLFWFLSHICQIRGSKSMVKKVALAYSGGLDTSVCIPILKEKYGYDEVITISVDVGQPEEEIRKADAKAQKISNKHYTIDAKEEFVRDYIFPLIKANGNYEGYVMGTSVARPLIAKKVVEAAKKEGAIALAHGCTGKGNDQLRFEAVFRQTDMDVIAPMREMNLTREWEINYAKEHGIPVEATKSKPWSVDENIWSRSIEGGRLEDPSFVPPEEIFEWTKSAEDAPNEPRIVDIDFEAGVPVAIDGEKLGGYALVKKMNEIAGENGVGRTDMIEDRVLGLKARENYEHPAATVLLAAHADLEKLVLTRGELKFKKIVEEQWSEMAYAGLVDDPLFADLNAFIDKSQERVTGTVKVKLYKGALTILARSSPNALYSEDLVSFDSQTIDQKDAEGFAKYHGFQARMYRKVVGK

SEQ ID NO: 16775 - protein, 957 aa, Corchorus olitorius
MAPKAASVFLFLVLFSFVLCSCQALRHDDDQSEFFNLMKGSVSGKPLSDWEGKSFCNFTGITCNDKGYVDSINLSGWSLSGSFPDGVCSYLPELRVLDISRNKFHGNFLHGIFNCSRLEEFNMSSVYLRTTVPDFSRMTSLRVLDLSYNLFRGDFPMSITNLTNLEVLVSNENGELNPWQLPENISRLTKLKVMVFSTCMLYGRIPASIGNMTSLVDLELSGNFLSGQIPKELGMLKNLQGLELYYNQHLSGTIPEELGNLTELRDLDMSVNQLRGSIPESICRLPKLRVLQIYNNSLTGEIPGVIAESTTLTMLSLYGNFLSGQVPQNLGHASPMIVLDLSENNLTGLLPTEVCRGGKLLYFLVLDNMFTGKLPASYANCKSLLRFRVSNNHLEGPIPEGLLNLPHVSIIDLAYNNFSGTFPNEFGNARNLSELFMQNNKVSGVIPPEISRARNLVKIDLSNNLLSGPIPSEMGNLKYLNLLMLQGNQLSSSIPSSLSLLKLLNVLDLSNNLLTGNIPESLSALLPNSINFSNNKLSGPIPLSLIKGGLVESFSGNPGLCVPVHVQNFPICSHTYNQKKLNSMWAIIISIIVITIGALLFLKRRFSKDRAIMEHDETLSSSFFSYDVKSFHRICFDQHEILEAMVDKNIVGHGGSGTVYRIELGSGEVVAVKKLWGRTEKDSASADQLVLDKGLKTEVETLGCIRHKNIVKLYSYFSNFDVNLLVYEYMPNGNLWDALHKGWIILDWPTRHQIALGVAQGLAYLHHDLLPPIIHRDIKSTNILLDVNYRPKVADFGIAKVLQATGGKDSTTTVIAGTYGYLAPEYAFSSKATTKCDVYSFGVVLMELITGKKPVEADFGENKNIVYWISTKLDTKEGVMEVLDKQLSGSFRDEMIQVLRIAMRCTCKNPSQRPTMNEVVQLLIEADPCRLDSCKLSSNKTKEASNVTKVKNNQSEV

SEQ ID NO: 16776 - protein, 274 aa, Solanum pimpinellifolium
MNSTSMSSLGVRKGSWTDEEDFLLRKCIDKYGEGKWHLVPIRAGLNRCRKSCRLRWLNYLRPHIKRGDFEQDEVDLILRLHKLLGNRWSLIAGRLPGRTANDVKNYWNTNLLRKLNTTKIVPREKINNKCGEISTKIEIIKPQPRKYFSSTMKNVTNNNVILDEEEHCKEIISEKQTPDASMDNVDPWWINLLENCNDDIEEDEEVVINYEKTLTSLLHEEISPPLNIGEGNSMQQGQISHENWGEFSLNLPPMQQGVQNDDFSAEIDLWNLLD

SEQ ID NO: 16777 - protein, 392 aa, Glycine max
MVWVKHQIQQKDGYLSYSPPLLSSSSSSSSSSSSSSPPYPLGATFHKESSLPSSTPPPPPSGTRISPAVLFIIVVLAVLFFISGLLHLLIRFLIKHPSSASAQSNRHQELSTSDALQRQLQQLFHLHDSGLDQAFIDALPVFQYKEIVGLKEPFDCAVCLCEFSEKDKLRLLPMCSHAFHISCIDTWLLSNSTCPLCRGTLLTQGFSIENPIFDFDDLREDEGCPCNGENGFNTRQKTVVVEESVEKEKGVFPVRLGKFKKLSVKGGGESEVGETSSSNLDARRCYSMGSYQYVVGNSDLRVTLNHDEIGKGQVTRLTKGMELDDGKVSVEEGDVEAKKISSVSKGDSFSVSKIWLWPKKGKLPTSLDGQFGRPMPSYLNTGFPRMREPEGA

SEQ ID NO: 16778 - protein, 322 aa, Phleum pratense
GLLEILMAAGGKSLTPTEVAAKLPCAAKNPEAPDMVDRMLRLLASYNVVSCLVEEGTDGRLSRRYGAAPVCKFLTPNEDGVSMAALALMNQDKVLMESWYYLKDAVLDGGIPFNKAYGMSAFEYHGTDPRFNRVFNEAMKNNSIIITKKLLQLYDGFQGLGTLVDVGGGVGATMAAITAHYPTIKGINFDLPHVISEAPPFPGVTHVGGDMFKKVPLGDAILMKWILHDWSDQHCRTLLKNCYDALPVHGKVVLVECILPVNPEAKPSSQGVFHVDMIMLAHNPGGRERYEREYEALARGAGFAGFKSTYIYANAWAIEFTK

SEQ ID NO: 16779 - protein, 237 aa, Pisum sativum
MDWNTDTTVPFVPPPGSSLSFFYNYNNYNYSGIEASEAALGETQQRLLPVIDDETNKINNGKDYREKKKTKNKKNKLTSNQVDALERSFHEEIKLDPERKMKLSAELGLQPRQVAVWFQNRRTRWKTKQLEHSYDVLKQENQKLQEEVMVLKEKLKEKSDCRTQTFGDETVESPLEGLGWREIEGYKPYPNSHNQQGSTSSIQQAAEGYINSSFIVEDFDSVSLHQECHWPELPYYP

SEQ ID NO: 16780 - protein, 237 aa, Lathyrus odoratus
MDWNNERAVPFVPPPASSLSFFYNYNNYNYSGIEAGEAALGETQQRLLPVIDDETKMINNGKECQKKKKSKNKKNKLTSNQVDALERSFHEEIKLEPERKMKLSAELGLQPRQVAVWFQNRRTRWKTKQLEHSYDVLKQENQKLQEEVMELKEKLKEKSDGRTQTFGDETVESPLEGLGWREIEGYEPYPNSHNQQGSTSSIQQAAEGYINSSFIVEDFDSVSLHQECHWPELPYYP

SEQ ID NO: 16781 - protein, 237 aa, Lens culinaris
MDWNTDSTVPFVPPPGSSLSFFYNYNSYNYSGIERSEAALGETQQRLLPAIDDETNKINNGKDHREKKKTKTKKNKLTSNQVDALERSFNEEIKLDPERKMKLSAELGLQPRQVAVWFQNRRTRWKTKQLEHSYDVLKQENQKLQEEVIELKEKLKEKSDFRTQTFGNETVESPLEGLEWREIEGYEPYPNSHNQHGSTSSIQQAAEGYMNNSFIVEDFDSVSLHQECHWPELPYFP

SEQ ID NO: 16782 - protein, 237 aa, Vicia narbonensis
MDWNTDTTVPFVPPPGSSLSFFYNYNSYNYSGIEASEGALGETQQRLLPVIDDDPNKINNGKDNREKKKAKNKKNKLTSNQVDALERSFHEEIKLDPERKMKLSAELGLQPRQVAVWFQNRRTRWKTKQLEQSYDVLKQENQKLQDEVMELKEKLKEKADCRTQTFGDETVESPLEGLGWREIEGYNPYPSTYNQQGTSSSTQQAAEGYINNSFIVEDFDSVSLHQECHWPELPYYP

SEQ ID NO: 16783 - protein, 237 aa, Vicia sativa
MDWNTDSTVPFVPPPGSSLSFFYNYNNYDYSGIEASEGALAETQQRLLPVIDDDPNKINNGKDHRDKKKAKNKKNKLTSNQVDALERSFHEEIKLDPERKMKLSAELGLQPRQVAVWFQNRRTRWKTKQLEQDYDVLKQENQKLQDEVMTLKEKLKEKGDCRTQAFGDETVESPLEGLGWREIEGYNPYPSCYNQQGTTSSTQQAAEGYINSSFIVEDFDSVSLHQECHWPELPYYP

SEQ ID NO: 16784 - protein, 445 aa, Cucurbita maxima
MTEPSKVIHVRNVGHEISENDLLQLFQPFGVITKLVMLRAKNQALIQMQDVPSAVNALQFFANVQPSIRGRNVYVQFSSHQELTTADQNAQGRGDEPNRILLVTIHHMLYPITVEVLHQVFFPHGFVEKIVTFQKSAGFQALIQYQTRQCAISARTALQGRNIYDGCCQLDIQFSNLDELQVNYNNERSRDFTNPSLPSEPKGRPSQQPGYGDAGGMYALQASGAGPVGFPQMANAAAVAAAFGGGLPPGVSGTNDRCTVLVSNLNPDRIDEDKLFNLFSIYGNIARIKLLRNKPDHALVQMGDGFQAELAVHFLKGAMLFGKRLEVNFSKHPNITQGADTHEYANSNLNRFNRNAAKNYRYCCSPTKMIHISSLSQEVTEEEIVNLLEEHGPIINTKLFEMNGKKQALIMFDTEEQATEALVCKHASSLSGSIIRISFSQLQSI

SEQ ID NO: 16785 - protein, 190 aa, Rhizobium leguminosarum
LWGFDGSSTMQAEGRNSDCVLKPVAIYPDPARTNGVLVMCEVMMPDGVTPHASNARATILDDEDAWFGFEQEYFFYENGRPLGFPESGYPAPQGPYYTGVGYSNVGSVAREIVEKHLDLCLAAGINHEGINAEVAKGQWEFQIFGKGSKKAADQIWMARYLLQRLTEKYGIDIEYHCKPLGDTDWNGSGH

SEQ ID NO: 16786 - protein, 190 aa, Rhizobium leguminosarum
LWGFDGSSTMQAEGRNSDCVLKPVAIYPDPARTNGVLVMCEVMMPDGVTPHASNARATILDDEDAWFGFEQEYFFYQNGRPLGFPESGYPAPQGPYYTGVGYSNVGSVAREIVEKHLDLCLAAGINHEGINAEVAKGQWEFQIFGKGSKKAADQIWMARYLLQRLTEKYGIDIEYHCKPLGDTDWNGSGH

SEQ ID NO: 16787 - protein, 194 aa, Agrobacterium tumefaciens
EQLPLWGFDGSSTQQAEGHSSDCVLKPVAIYPDPARSNGALVMCEVMMPDGVTPHPSNSRATILDDEDAWFGFEQEYFFYQDGRPLGFPEQGYPAPQGPYYTGVGFKNVGSVAREIVEEHLDLCLEAGINHEGINAEVAKGQWEFQVFGKGSKRAADQIWIARYLLLRLCEQYGIDVEFHCKPLGDTDWNGSGI

SEQ ID NO: 16788 - protein, 195 aa, Agrobacterium tumefaciens
LEQLPLWGFDGSSTQQAEGHSSDCVLKPVAIYPDPARTNGVLVMCEVMMPDGVTPHASNSRATILDDEDAWFGFEQEYFFYQDGRPLGFPEQGYPAPQGPYYTGVGFKNVGSVAREIVEEHLDLCLEAGINHEGINAEVAKGQWEFQVFGKGSKRAADQIWIARYLLLRLCEQYGIDVEFHCKPLGDTDWNGSGI

SEQ ID NO: 16789 - protein, 193 aa, Sinorhizobium fredii
EQLPLWGFDGSSTNQAEGRSSDCVLKPVAVYPDPVRTNGVLVMCEVMMPDGKTPHPSNSRATILDDEGAWFGFEQEYFFYKNGRPLGFPEQGYPAPQGPYYTGVGYSNVGDVARKIVEEHLDICLAAGINHEGINAEVAKGQWEFQVFGKGSKKAADEVWMARYLLQRLTEKYGIDVEYHCKPLGDTDWNGSR

SEQ ID NO: 16790 - protein, 556 aa, Guillardia theta
MPYTRWLLPLIVAGAGAFNLSPAPLGGVARKSPVSPASSFITPPPLAARSSRRAARMGQGRTGNDFLATTMSSAVTPENPLKVVIAGGGVGGLFLAKALQKKGCKVLILEKTGKFARFGGPIQLASNALATIKGIDETLFTEVMEKFTFTGTRTNGIKDGIRTQWYTKFDAITKMAEYFNLPYTGVVDRPDLQEILLKSVGEDETVRRSSPVSRFEQLGDGKGVKVYLEDGTCEEADVLVGADGIWSTIRAQLWNQDAKGPKSGTTYSGYTCFAGDTIQRPDYYFDVGYQVYIGPGKYFVTSDVGRGRTQWYAFLALPEGTKSRASNLEYLQELFSKGKEGRWSEEVFKVLDATPEENIEQRDLFDRPPSVTKSWSKGHVTMIGDAVHPMMPNLGQGGCQAIEDAYVLSEILGTVEKREDIPGALRSFYFKRLPRTSVIQGLSRIASDLIVSAFDTPFQPAWVDNRYGPLGGPLGINNIFTRIFQPFMGLIFYAQFGYVYTFHPKKCTDEEIKNLVDTVMARHKKEAEATWKRVGMMSQAEIDAMEGREGAGLGFR

SEQ ID NO: 16791 - protein, 251 aa, Hydrangea macrophylla
MEFPNQSGEISPQRKLGRGKIEIKRIENTTNRQVTFCKRRNGLLKKAYELSVLCDAEVALIVFSTRGRLYEYANNSVKGTIERYKKACSDSTNTGSVAEINAQQYQQEASKLRSQIANLQNSNRNMLGESLGSLSPRDLKNLEGRLERGISRIRSKKNELLFAEIEYMQKREVDLHNNNQYLRAKIAENERAQQQQQHQQQMNLMPGGGSCEYELMPPTQPFDARNYLQINGLQSNNHHYSRDDQTALQLV

SEQ ID NO: 16792 - protein, 364 aa, Galega orientalis
MCGGAIISDFIPAAAALGGSRRVTADILWPNLRKPGTRKSFLLDDDFEAGFREFKDDSDFDDDEDEDDNVKGFTFGSSKSSKSFSKGPAAAKSVVPKSNEQAEKESKRKRKNQYRGIRQRPWGKWAAEIRDPRKGVRVWLGTFNTAEEAARAYDAEARRIRGKKAKVNFPEEAPVISSKRIKPNPEKNLNSFKPIGNKMFNFGENIENYYSPMEQVDQKPLVNNQYANMGLFAGNGVQLPSADVPAYFSSEHSSNSFDYSDLCRGEQGPKNPEITSMLSAPAPLQVQPQFVQAAANQQDDSAKTLSEELADIESQLKFFENSFDDNWGDASLASLLGGDVTQDGGNAMNLWSFDDMSSIAGGVF

SEQ ID NO: 16793 - protein, 383 aa, Brassica napus
MIKEKISSCVHPSDGIVESDKEVELDATKAKLEKVREENEKLKLLLSTVLTDYKSLQMHVSNVIRPQHEASMELDINSHDDFCVDVSLRLGRSDLNVSKNVDEIDKISLDKISDEISEGSDKKRSALGLGFQIQSCEDPDTDPTMKLDYLSKDFKNTKADNKCISSRKDIKTARNEDHQEALEVREHPGLKKTRVCVKAPCEDPSINDGCQWRKYGQKTAKANPLPRAYYRCSMSSNCPVRKQVQRCGEDDTSAYMTTYEGTHDHPLPMEATHMAAGTSAAASLLQSGSSSSASLSYYFPFHHVSFSTTNAHPTVTLDLTRPNYDPNQLPAHSSLSFSSSSSDRPSPSNSHTLSFSGLRSQAPLTKYSQMAPLSHQTKLSGQQ

SEQ ID NO: 16794 - protein, 432 aa, Solanum tuberosum
MAQILAPSAQWQMRMTKSSTDASPLTSKMWSSVVLKQNKRLAVKSSAKFRVFALQSDNGTVNRMEQLLNLDVTPYTDKIIAEYIWIGGTGIDVRSKSRTISKPVKDASELPKWNYDGSSTGQAPGEDSEVILYPQAIFKDPFRGGNNILVICDTYTPAGEPIPTNKRHKAAQIFSDPKVASQVPWFGIEQEYTLLQPNVNWPLGWPVGGYPGPQGPYYCGAGVEKSFGRDISDAHYKACLYAGINISGTNGEVMPGQWEFQVGPSVGIEGGDHIWCARYLLERITEQAGVVLSLDPKPIEGDWNGAGCHTNYSTLSIREEGGFEVIKKAILNLSLRHKGHISAYGEGNERRLTGKHETASIDQFSWGVANRGCSIRVGRYTEKEARGYLEDRRPASNMDPYVVTALLAETTILWEPTLEAEALAAQKISLKV

SEQ ID NO: 16795 - protein, 353 aa, Solanum tuberosum
MSLLSDLINLNLSDDTQKIIAEYIWIGGSGMDMRSKARTLPGPVTSPAELPKWNYDGSSTGQAPGEDSEVIIYPQAIFKDPFRRGNNILVMCDAYTPAGEPIPTNKRHAAAKVFCHPDVAAEETWYGIEQEYTLLQKEVNWPLGWPIGGFPGPQGPYYCGTGADKAFGRDIVDAHYKACLYAGINISGINGEVMPGQWEFQVGPSVGISAGDEVWVARYILERIAEIAGVVVSFDPKPIPGDWNGAGAHTNYSTKSMREDGGYEIILKAIEKLGLKHKEHIAAYGEGNERRLTGKHETANINTFKWGFANRGASVRVGRDTEKAGKGYFEDRPASNMDPYVVTSMIAETTIVG

SEQ ID NO: 16796 - protein, 357 aa, Solanum tuberosum
MAHLSDLVNLNLSDSSDKIIAEYIWIGGSGMDVRSKARTLSGPVDDPSKLPKWNYDGSSTGQAPGEDSEVILYPQAIFKDPFRRGNNILVICDCYTPAGEPIPTNKMCHNAAKIFSNPDVVVEEPWYGLEAEYTLLQRRNYWPLGWPIGGFPGLQGPYYCGIGSGKAFGRDIVDAHYKAYIYAGINISGINGEVMPGQWEFQVGLQVGIASGDEVWAARYILERITEIAGVVVSFDPKPIPGDWNGAGAHTNYSTKSMRNEGGYEVIKKAIEKLGLRHKEHIAAYGEGNERRLTGKHETADINTFKWGVANRGASIRVGRDTEKEGKGYFEDRRPASNMDPYIVTSMYAETTLLWNP

SEQ ID NO: 16797 - protein, 351 aa, Rhodococcus rhodochrous
MTTVEVPHGSRSVILTVSAVVEETADTRSIVFAVPDELRDKFAYRPGQFLTLRIPSDRTGSVARCYSLASSPFTDDAPKVTVKRTSDGYGSNWLCDNIATGQTLEVLPPAGVFTPKSLDHDFLLFGAGSGITPVISILKSALTQGGGKVVLVYANRDEKSVIFAEELRALAEKYPTRLTVVHWLESVQGLPTADQLAAIAAPYESYEAFMCGPGPFMDTVHQALNTVGMPRARVHAEVFNSLSGDPFADQAPVEVSDEDAADAATVEVELDGEVHKLSWPRKQTLVDIMLAKGIDVPYSCQEGECGSCACTVLEGKVEMENCDVLDPEDIEAGYILGCQARPVTDHLKIEF

SEQ ID NO: 16798 - protein, 154 aa, Bacillus cereus
SAKAASMNLTLAGVDIYDPATYAEMDAMVASFVERRKGKATEEDARKILKDENYFGTMLVYMGKAHGLVSGAAHSTADTVRPALQIIKTKPGVTKTSGVFIMVREEEKYVFADCAINIAPNSQDLAEIGIESAKTAELFGIDPRVAMLSFSTKG

SEQ ID NO: 16799 - protein, 541 aa, Vibrio salmonicida LFI1238
MDTQRNILLLALALVSFLLFQQWQVETNPQQPATVSTVQQTHKNGDVPTSSTANSDAPVDSAQSDKLITITTDVLTLKVDTLGGDIIESVLNKYDAELDSKAKFVLLKNDADHSYIAQSGLIGPQGIDSNTGRAQFTAKKTDYVLADGQNELRIPLTLEKNGITYTKTLIVKRDSYAIDVEYTVNNQSSAPATVEMYANLKQNLLDDGGSLTMPTYRGGAYSTEDTRYKKYSFDDMEDKNLSIDMTNGQGWAGMLQHYFASAWIPRNVNDATLTTRVAGDYGYIGVRMPSVTIPAGQEDTLTATLWTGPKLQPQMAATAKYLDLSVDYGWLWFIASPLHKLLSFIQSIVGNWGLAIMILTFIVRGAMYPLTKAQYTSMAKMRMLQPKLAAMRERIGDDRQRMSQEMMELYKKEKVNPLGGCLPIVLQMPIFISLYWALMESVELRHAPFFGWITDLSAQDPYYILPLLMGASMFLIQKMSPTTVTDPMQQKIMTFIPVMFTVFFLWFPAGLVLYWLVSNVVTLIQQTLIYRALEKKGLHSK

SEQ ID NO: 16800 - protein, 69 aa, Vibrio salmonicida LFI1238
MSKTTGIVKWFNEEKGFGFITQDNGGADVFVHFRAIASEGFKTLKEGQKVSFEVEQGQKGPQASNVVGE

SEQ ID NO: 16801 - protein, 526 aa, Vibrio salmonicida LFI1238
MSRNKDKYSIDNTDYTVGQDNVQKWGLDIHNTVFGISAGLIALFLIAVAVTDPETAKTVLNGLKSQIINAFDGLFMWSANIFVVFCLALIVSPFGKIRLGGDKAKPDYSMISWIAMLFAAGMGIGLMFWGVAEPVAYFTGWFGTPLGVEAYTPEARQLALGATMFHWGIHPWAIYGVVALSLAFFSYNKGLPLSMRSIFYPILGDRTWGWPGHIVDILAVLATLFGLATSLGLGAQQAASGFQHVFGIEGGLGLQVAIIFIVTLLAVVSVMRGIDGGVKIISNINMIIAIVFVVFVALVTFAVSMGAIPTTIMGYIENIIPLSNPSGRDDEAWMHGWTVTYWAWWISWSPFVGMFIARVSRGRTVREFLIAVLVVPTVFTVLWMSTFGGVAIDQVMNNVGTLGTDGLTDVSLAMFQMFDALPMGNVLSMIAVVLVLVFFITSSDSGSLVIDSITAGGKVDAPIPQRVFWAFMEGAIAVALLWVGGTQAVEALQAGAISTALPFTIILLVMCVSLLMGMRTEKHNRS

SEQ ID NO: 16802 - protein, 103 aa, Vibrio salmonicida LFI1238
MYAVFQSGGKQHRVSEGQTLRLEKLDVETGATVDFDNVLMIANGEEITVGAPLVAGGKVTAEVVQHGRGDKVKIVKFRRRKHSRKQQGHRQWFTEVRITGISA

SEQ ID NO: 16803 - protein, 392 aa, Vibrio salmonicida LFI1238
MKFVDEATIKVDAGDGGNGTVSFWREKFVAKGGPDGGDGGDGGDVYLEADENLNTLIDYRFNRFYDAERGKNGGGTNSTGRRGEDITLKVPVGTRAIDIDTGEKVAELMAHGMKIMVAKGGWHGLGNTRFKSSVNRAPRQKTMGTKGEVRELRLELLLLADVGMLGLPNAGKSTFIRAVSAAKPKVADYPFTTLIPSLGVVRARGNKSFVIADIPGLIEGAAEGAGLGVRFLKHLERCRVLLHVIDILPIDGSDPVQNALTIIDELERYSEKVAGKPRWLLFNKTDLLLEAEADEKIAEILEALAWEGAHFKIAAVSRTGTQEVCNELSDFMDTLPKEIMTDEEKAALKVDFMWDDYHKDAMSGKNVVTEDGDDDDDWDDEEDDGHVIYARD

SEQ ID NO: 16804 - protein, 324 aa, Vibrio salmonicida LFI1238
MATQFDFCKAGKNVLQIEIDALTQLNNYINDDFTKACQLMLECKRKVVIMGMGKSGHIGKKIAATLASTGTPSFFVHPGEASHGDLGMIEKGDVILAISNSGEAAEILALLPVIKRQGITLITMTSKSSSSMANVADVNLLITVPQEACPLALAPTSSTTATLVMGDALAMALLEARGFTSDDFALSHPGGALGRKLLLHLADIMHTDDELPMVTSDALIKTALLEVSEKGLGMTAIVDEDQKVIGIFTDGDLRRLLDNRIDIHTQTIGEVMAHTPSVASPNLLAVEGLNLMQDKKINGLLLCDENNRLVGALNMHDLLKAGVM

SEQ ID NO: 16805 - protein, 660 aa, Vibrio salmonicida LFI1238
MAKNLILWLVIAVVLMSVFQSFGPSDSSGRSVDYTTFVKEVGNSQVQEATFNNREIKVTKSDGTRYVTYMPVYQDPKLLDDLINQNVIVKGTPPEEQSLLESIFISWFPMILLIGVWIFFMRQMQGGGGKGAMSFGKSKAKMMTEEQINTTFDDVAGCDEAKEDVKELVDYLREPSRFQKLGGKIPTGVLLVGPPGTGKTLIAKAIAGEAKVPFFSISGSDFVEMFVGVGASRVRDMFEQAKKSSPCIIFIDEIDAVGRQRGAGVGGGNDEREQTLNQMLVEMDGFEGNEGVIVVAATNRPDVLDAALLRPGRFDRQVVVGLPDIRGREQILQVHMRKVPLGSGVEPSLIARGTPGFSGADLANLVNEAALFAARTNKRVVSMVEFELAKDKIMMGAERKSMVMTEETKTSTAYHEAGHAIVGRLVPEHDPVYKVSIIPRGRALGVTMYLPEQDRVSMNRQHLESMISSLYGGRLAEELIYGVDKVSTGASNDIERATDIARKMVTQWGFSESLGPLLYAEDQGDPFSGHGSSHQSKHVSPETLRLIDAEIRTIIDRNYARTRQILEDNMDLLHSMKDALMTFETIDAGQIDDLMERKTEIREPQGWGDDNQTKPEEKNEKPAEADVEIKTEESKVEESTEEEKPQVAEETKKDSDSSEK

SEQ ID NO: 16806 - protein, 861 aa, Vibrio salmonicida LFI1238
MRLDRFTSKFQIAISDAQSLALGQDHQYIEPTHLMVALLNQNGSTIRPLLTLLNVDVTQLRSKLTEILDKAPKVIGIGGDVQLSSNMGVIFNLCDKIAQKRKDTYISSEIFMLAAIEDKGPLGHLLKESGLTEAKISKSIDEIRGGEKVNDPNAEEKRQALEKFTIDLTEQAEQGKLDPVIGRDDEIRRTIQVLQRRTKNNPVIIGQPGVGKTAIVEGLAQRIINGEVPEGLKHKRVLSLDIGSLIAGAKFRGEFEERLKAVLNELAKEEGNIILFIDEVHTMVGAGKGEGSMDAGNMLKPALARGDLHCVGATTLDEYRKYIEKDPALERRFQKVIVDEPTVEDTIAILRGLKERYEIHHHVEITDPAIVAAATLSHRYISDRQLPDKAIDLIDEAASSIRMEIDSKPESLDKLERKIIQLKIEQQALVKESDDASLKRLDSLNLELREKERDYSELEEIWKAEKAALSGTQHIKTELDIARSNMDIARRAGDLNRMSELQYGRIPELEKQLDLAAQAEMQEMSLLKNKVTDAEIAEVLSRQTGIPVNKMLEGERDKLLKMEAMLHHRVIGQDEAVEAVSNAIRRSRAGLSDPNRPIGSFLFLGPTGVGKTELCKSLANFMFDSEDAMVRIDMSEFMEKHSVARLVGAPPGYVGYEEGGYLTEAVRRKPYSVLLLDEVEKAHPDVFNILLQVLDDGRLTDGQGRTVDFKNTVIIMTSNLGSEKIQQHFGELDYGGIKELVMDVVGQHFRPEFLNRVDEAVVFHPLGQENIKSIAKIQLQRLEKRLNEKDYQLKVSNEALTLISEAGFDPVYGARPLKRAIQTYIENPLAQDILSGKLRTGEEIKLKVRNGQLIATQNDDF

SEQ ID NO: 16807 - protein, 406 aa, Vibrio salmonicida LFI1238
MKMKLPIYFDYSATCPVDKRVADKMVQHMTMDGCFGNPASRSHRYGWQAEEAVDTARDNIAALLNADPREIVFTSGATESDNLAIKGAAHFYHKKGKHVITCKTEHKAVLDPCRQLEREGYEVTYLDPESNGLVDFAKLEAAMREDTVLVSIMHVNNEIGVIQDITAIGELCRSRKIVFHVDAAQSAGKIPLDVQEVKVDLISLSAHKMYGPKGIGALYVRRKPRIRLEAQMHGGGHERGFRSGTLATHQIVGMGEACRIAKEEMQKDYDHCLAMRDRLLDGVKDMEAVHINGDLDQRVPHNLNISFEFVEGESLLMALKDLAVSSGSACTSASLEPSYVLRALGLNDELAHSSIRFSFGRYTTAEDIDHAITQISQAVNKLRDMSPLWDMYKEGIDLNTVEWAHH

SEQ ID NO: 16808 - protein, 332 aa, Vibrio salmonicida LFI1238
MQHIKFSQFGRNPEVSTVPDMKLFTGNATPELAQRIAERLYISLGDATVDRFSDGEVAVQINENVRGSDVFIIQSTCAPTNDNIMELVVMIDALRRASAGRITAVIPYFGYARQDRRVRSARVPITAKVIADMLSNVGVDRVLTIDLHAEQIQGFFDVPVDNIFGTPVLLDDMRTRGLENPVVVSPDLGGVVRARATAKALGDVDIAIVDKRRPRANVSEVMNLIGDVDGRDCVIVDDMIDTGGTLCKAAEALKERGAKRVFAYATHAVFSGTAAHNIANSVIDQVVVTDSIPLSKEMAATGKVTELSLSRMLAEAIRRISNEESISAMFDH

SEQ ID NO: 16809 - protein, 270 aa, Vibrio salmonicida LFI1238
MSYVKPAELVQTMIDIGEAKVKTSSRDLLLRGTMAGIILSLAVVVAITTIVQTGVGIVGALVFPVGFCILSLMGYDLLTGVFGLAPLAKFDNRPGITWGRIFRTWGWVGLGNLIGSLLVAFLIALVFTMNFSVEAGAVGQKFIAAATSRTIGYAAHGMDGWITVFVKAILCNLMVCLGVIGNMTSRSVAGKIAAMWLPIFIFFALVFEHAVVNMFLFPLGMMLGADFTIMDWLNWNLIPTLLGNLVGGLLFTCIPLYLTHAKTAPSLDLK

SEQ ID NO: 16810 - protein, 555 aa, Vibrio salmonicida LFI1238
MCSIFGILDIKSDPTPLRKVALEMSKKLRHRGPDWSGIYSSDKAILAHERLAIVGLNSGAQPLYSKDKQHILAVNGEIYNHKELRAKYADDYDFQTDSDCEVILALYRDKGADLLEDLNGIFAFILYDEEKDEYLIGRDHIGIIPMYHGYDEHGNYYIASEMKALVPVCKSMSEFPPGHFYSSKDAEPTRYYVRDWMEYDAVKDNPTSKDDLKQALEDAVKRQLMTDVPYGVLLSGGLDSSITSAVAKKFAAMRIEDNEKSEAWWPQLHSFAVGLEGAPDLKAAREVANQIGTVHHEMTYTIQEGLDAIRDVIYHIETYDVTTIRASTPMYLLGRKIKAMGIKMVLSGEGADEIFGGYLYFHKAPNKKEFHEETVRKLLALNMFDCARANKSLAAWGVEGRVPFLDKEFIDVAMRLNPQDKMCGNGKMEKHILRECFEDDLPEAIAWRQKEQFSDGVGYGWIDSLRETAEVKVTDQQMESAKFRFPYNTPLTKEAYVYREIFEELFPLEDAAKCVPGGPSIACSSAKAIEWDESFKNCADPSGRAVQAIHNEAYS

SEQ ID NO: 16811 - protein, 552 aa, Vibrio salmonicida LFI1238
MSETETRPTNFIRQIIDEDLKSGKHSSVHTRFPPEPNGYLHIGHAKSICLNFGIAQDYQGQCNLRFDDTNPEKEDIEYVESIKNDVKWLGFDWSGDIHYSSNYFDKLYDYAVELIEKGLAYVDELTSDQIREYRGSLKEPGKNSPYRDRSVEENLALFEQMRDGKFKEGTICLRAKIDMASSFIVMRDPVIYRIRFATHHQTGDKWCIYPMYDFTHCISDALEGITHSICTLEFQDNRRLYDWVLENITIDCQPHQYEFSRLNLEYTIMSKRKLNELVTEKLVNGWDDPRMPTVSGLRRRGFTAGSIREFCKRIGVTKQENMIEFGSLESCIRDDLNENAPRAMAVLEPVKVVIENYEEGKVETLNVANHPNKPEMGTREVPFTREIYIEQDDFREEANKKYKRLVLGKEVRLRGAYVIQANRIEKDEAGNITTIFCSYDTETLGKNPADGRKVKGVIHWVSADKAFPAEIRLYDRLFTVPNSAALEDFSESINPESLITKQGFVEPSLVTAEAEAGYQFERTGYFCIDNKDSTPEALVFNRTVGLRDTWEG

SEQ ID NO: 16812 - protein, 524 aa, Vibrio salmonicida LFI1238
MSDVTDNMKSSSKNSSIKENESTAEKLGLDNPALWYSGGFIALFVSLALVNAELLSTIVNSGFAWAVSVFGPYWQILLLLTFLIGLGLAAGRTGRVILGGIDKPEMDGFRWMAIIFCTLLAGGGVFWAAAEPIAHFVSAPPLYGAQENVQQAAVNALSQSFMHWGFLAWAIVGSLTSIVVMHLHYDKGLPLKPRILLYPLFGKRVLTGHTGALIDACCIVAVAAGTIGPIGFLGLQVSYALNALFDIPDGFTTQLIIILFAIALYTISALSGLNRGMQMLSRYNVILASALMIYVLVFGPTNFIVNGYIQGVGSMIDNFIPMATYRGDEGWLSWWTVFFWGWFLGYGPMMAIFIARISRGRSIRQLISTISIIAPLVTCFWFTIVGGSGLAFEIANPGSVSSAFEGFNLPGALLAVTSQLPMPMVTSILFLILTTIFIVTTGDSMTYTISVVISGETEPNAIIRTFWGVMMGVTALILISLGSGGISALQSFIVITAVPVSLILLPSLWDAPRIAMRMAKEQGL

SEQ ID NO: 16813 - protein, 183 aa, Vibrio salmonicida LFI1238
MSKPAIFIDRDGVINVDRGYVHKRDDFEYIDGVFDAVKICKDMGYLLVLVTNQSGIARGIFTEEQFETLTEWMDWNFAEHDIDFDGIYYCPHHPEATVEQYKEECDCRKPNPGMFMSAQSFLDIDMEKSVMIGDKKEDMMAAQVAGVGTRILVRTGKPVTEEGEALATTVLDSIADVPKFLFA

SEQ ID NO: 16814 - protein, 404 aa, Vibrio salmonicida LFI1238
MQNIAMSSKLSSVCYDIRGPVLKHAKRMEEEGQKILKLNIGNPAQFGFDAPEEILVDVIKNLPTSQGYGDSKGIYSARKAVVQHYQRRGLLDLDVEDVYIGNGASELIVMAMQALLNNGDEMLVPAPDYPLWTAAVSLSGGNPVHYLCDEGADWYPDLDDIKKKITPNTKGIVLINPNNPTGAVYSRDFLLQIVEIARQNNLIIFADEIYDKVLYDGAIHTTLATLAPDLLTVTFNGLSKAYRVCGFRGGWMFLNGPKDHAQGYIAGLDMLASMRLCANVPMQHAIQTALGGYQSINELLLPGGRLLEQRDKAYELITQIPGVSCVKPKGAMYLFPKLDPKMYKIKDDQKFVLDFLIKEKVLLVQGTGFNWPTPDHFRIVTLPRVDDLEVAIGRLERFLHTYKQ

SEQ ID NO: 16815 - protein, 872 aa, Vibrio salmonicida LFI1238
MINVELPQLIKTLDKESHLALEQAAQLCVTRGGHEVLCEDFILAALNNPQSFWNKACIQYEVSTENLIEALQHGRQSRSSESNNPVISTALIEWLQESYLYSMLEMKLSEILSANLLLTLLAHPNKYGHTPYYRELSVIPLTDLKQQVEGLINSVTENKTVNHEHQDALSAYTTNYTQLAKDNKIDPVLCRDSEIRQMIDILARRRKNNPMIVGEAGVGKTALVEGLAIKIAQGEVPDILENVSLLSLDLGLLQAGASIKGEFERRLNLVIKAVQQSLTPIILFIDEAHTLIGAGGQAGSNDAANLLKPALARGELRTIGATTWSEYKKYIEKDPALARRFQPIKVDEPTVSQAITILRGLADKYEESHGVYVRDDAIVAAAELSARYITGRQLPDKAIDLLDTACARVKINLKAKPQPLEALFHIIAITQRELNCVLRDKQAGIHIDEKHIYDLENKLQETQSKAQHLEHDWLNQKELAEALLTSRINVAQCDDSQECEQLLSIQKETYHALMKAQSNQVLVSYETCPSLVAEVISHWTGIPMSTLLRGQASQVLTLHTQLKQQIKGQDQAIIALQKAIQATAAGLNNPNAPTGVFLFVGPSGVGKTQTALAIADLMYGGEQFLTTINMSEFQEKHTVSRLIGSPPGYVGYGEGGVLTEAVRQRPYSVILLDEVEKADSEVMNLFYQVFDKGVVNDGEGREINFKQTLIIMTSNLASEHIESLCNQDELPSVESLTKAIRPILNQYFKPALVARMNIVPFYPLDLESMEALVDIRMQQLSQQLQKQRIALYYDAHIISHIAKSCTLTETGARNIDAIINGQLKPAFSSQILLALAQKEPLKAISVNIDEDGQVYCQFEQHGTGEEDVCLPN

SEQ ID NO: 16816 - protein, 357 aa, Vibrio salmonicida LFI1238
MSKQQKILFIDRDGTLIVEPPVDFQVDRLDKLKFEPLVISSLLFLQEAGYRLVMVTNQDGLGTDSYPQDEFDAPHNMMMEFFESQGVKFDDVLICPHFEEDNCSCRKPKLGMVKEYLQGGKVDFQHSVVIGDRQTDLQLAENMAIRGIQYHPETMNWPAILKDLTVNAGTAEVIRTTKETDIKVFVNLDEQGGNEISTGLGFFDHMLDQIATHGGFQMKINVDGDLHIDDHHTIEDTALALGEALKEALGDKRGIGRFGFSLPMDECLAQCALDLSGRPYLKFDAEFSRDQVGDLSTEMVVHFFRSLTDTLACTLHLSSAGHNDHHIIESLFKAFGRTLRQAIKVEGNELPSSKGVL

SEQ ID NO: 16817 - protein, 872 aa, Vibrio salmonicida LFI1238
MINIELQSLVKRLTPGMKASLEAAAGECVQRGHFSIEFEHWFVQLLQQPTVGWQKAVEQTGMASESILEQLNNHLSSLPRGNDSAPSLSPQLVELLKDAWMIGSLNHAQLSMNEFHVLIVLKQRIEQGAYNGALSTWIKSLSSEWLNRQSITKTASSHLSSTSMLCGKNQGMEGNMSTPALDKYSQNLTQAARNGDLDPISGRGNEIRKAIDILCRRRQNSPILVGDPGVGKTAIVEGLAQQIVDGNVPPALKNVELRNLDLSLLQAGASIKGEFENRLKDVINEIKQSATPIIVFIDEAHTLIGAGGAAGQNDAANILKPALARGEFRSIAATTWAEYKQYFESDAALSRRFQVVSIGEPSEGDAIHMLSGVKTCLEKHHNVKVMQEAINAAVSLSIRYLPERKLPDKAISLLDTACSRIGLSQSAPPRQLEAVAEQICYVENEITTLNHEAALWSIDDDRLEQVQQRLIDLQEQHQEIGKCWEQEKTLVEEIIVLQTKLDEQFLNGDDLSENEDKFLLAIKMTELHAIQDDQPLVLPQVNEQTIAEVISLWTGIPVGNMLKEEVEHLMHLEKHIGERVIGQIAPIAEISKAIRMSRAGLTDLRKPVGVFLMCGPSGVGKTETALALTDLLYGGKRNITTINMTEFKEEHKVSTLLGSPAGYVGYGKGGVLTEAVRKNPYSVLLLDEMEKAHPGVHDIFYQIFDKGSISDSEGREVDFRNTIIIMTSNAADSAVVNGCADGRPSISILTKAIFPELQNFFKPAFLGRTTIVPYFPLNDEEMSKIAQLSLRRIEKRIKQHYNATFDYDTQVIELLVSMNQSPETGARAIEQLINRQLMPELANQCIVRMSQSQPISEVLLTVNGNKFQIDIK

SEQ ID NO: 16818 - protein, 507 aa, Vibrio salmonicida LFI1238
MLKSIRPLVFFPTFLVLVAALILSLVDLKSFTALTSAANSFVLDKFSWLFSFGSFYLLVLIVITYFSKISDVRIGGENSVPRISKPRWFMIVLCTTLAVGVLFWTTAEPIYHLHTPPESLGIEPGSPNAILFAFSAMFLHWGPTPYAIYAVPALIFALTFYNLKLPFSITSPLRPIFGRYINDKVADVIDALALYSLVVGMASSLGTGALTMLGGVSQFIDIERNAVTLGIFIAMIVVTFLVSAASGLTKGIARLSAANFWMLIALLVFVFICGPTVYILSIGVEGLGAYLQNFFRLSLFTGQAANDPWPQYWSVFYWAVWFAWAPITAMFLGKIARGYTVKEFIQMNVIYPSLFILVWVSVFSGTAVHMDTETNGGLNDILSNGGIEQLLYYIVHQLPFGGVTSFFLVLVAFISYVTAADSSTDAIGDLCTKGFNSDSEDGTSLPIKMLWGTIIGLVAWIMVSTVGIDGVKQLSNLGGLPATIIILCCSLTLIYWIRKPEMLTGKK

SEQ ID NO: 16819 - protein, 534 aa, Vibrio salmonicida LFI1238
MGFKSEKYSIESTDYEVGQDNISKWGMDVHNTVFVASVGLSLLFIITLLALPPADAKAAIDSLKGSVLSNFDFLFMWGANILLIFAIILAFSPLGKIRLGGDDAKPDYSKASWISMLFAAGMGIGLIFWGVAEPTAFFTNWFGTPLNVEPFTEAGRELALGATVFHWGLHAWAIYGMTALCLAYFVYNKGLPLSMRSVFYPLLGDRVWGRTGDVIDILTVLVTLFGLATSLGLGGTQAASGISHVFGIDNNIYLQQAVIVLIMGLAIISVLRGMDGGVKFLSNLNMVIAFVFLGLIAVLNFTTVLDSLVTALTGYVKNIIPLSQTSGREDTAWLHGWTVFYWAWWVAYAPFFGMFVARISRGRTVREFLLCVMLIPTMVTTAWMSIFGGVAIQQVIDKVGLLGAQQGISDVSLSLFHMLDAYPFGDILSFIAVALIIVFFVTTLDSGSIVIDGMTAGGKLEVPVKQKVVWAVISGAIAMVMLWIGGTQSIESLQSITIIAAMPFTIILLLGSVSLLKGLLTEVDKPKVATKRVN

SEQ ID NO: 16820 - protein, 298 aa, Vibrio salmonicida LFI1238
MEAQKVAFIGLGVMGYPMAGHLQHSGLETTVYNRSLDKALQWCTEYQGFLASSPAEAAKNCDIVFICVGNDDDVRSVVYGPEGVLEGMKENAILVDHTTVSADLAIELAQQCKQKKINFIDAPVSGGQAGAENGTLTIMCGGAKETFDQIVTTIDCYAKQATLLGDNGQGQRCKMVNQICIAGVLKGLSEALLLAEKSNLDIEQVVNVLKHGAAGSWQMENRAVTMAERKFDFGFAIDWMRKDLSICLNEAKQHNLSLPMTQEIDRSYAILQDLNLGRMDTSILIKSYDQPITNELAI

SEQ ID NO: 16821 - protein, 202 aa, Vibrio salmonicida LFI1238
MSLKLRIRLMDTHLLSHLLLNKPNSYSEDLLLHPRFKNTNFKQAAVLVPLVKRPSGLHLILTQRAAHLHHHPSQISFPGGKAEPSDLSLIHTAIRETNEEIGIQLEQIHPLVKLNTIPTISGYKVTPIVALIDENYTTAIDYGEVSSTFEAPLSHLLNPMNTTKHKVFNKKHTYELIFIPFNKKLIWGITAEIIHSMNHITN

SEQ ID NO: 16822 - protein, 632 aa, Vibrio salmonicida LFI1238
MGKIIGIDLGTTNSCVAVLDGDTPRILENAEGERTTASVVAYTDGETLVGQPAKRQAITNPQNTLFAIKRLIGRRFEDEEVQRDIEIMPYKIVKADNGDAWVEARGQKMAAPQVSAEILKKMKKTAEDFLGEEVTGAVITVPAYFNDAQRQATKDAGRIAGLEVKRIINEPTAAALAYGLDKKGGDRTIAVYDLGGGTFDISIIEIDNVDGEQTFEVLATNGDTHLGGEDFDNRMINFLVDEFKKEQGINLKNDPLAMQRVKEAAEKAKIELSSAQQTDVNLPYVTADATGPKHMNVKVTRAKLESLVEDLVVRTLEPLKVALADAGLSIDGITDVILVGGQTRMPMVQAKVAEFFGKEARRDVNPDEAVAMGAAVQAGVLSGDVKDVLLLDVTPLSFGIETMGGVMTKLIEKNTTIPTKADQTFSTAEDNQSAVTIHVLQGERKQATYNKSLGQFNLEGIQAAPRGMAQIEVTFDLDADGILNVSAKDKTTGKEQKITIQASGGLTPEEIEAMVQEAEANKDADKKFEELVVARNQADQMIHGTKKQVEEAGDALPADEKEKIDAAIKALESVKSGDDKDAIDTKTQELGQAAQKLMEIAQQKAQAQQSAEAGAQPKQEDDVIDAEFEEVK

SEQ ID NO: 16823 - protein, 372 aa, Vibrio salmonicida LFI1238
MIIGVPKEIKNHEYRVGMIPASVRELISHGHDVFVETKAGSGIGFTDDDYIAVGASILPTAEGIFAKAEMIVKVKEPQAVERAMLREGQILFTYLHLAPDFPQTEDLIKSKAVCIAYETVTDYMGRLPLLAPMSEVAGRMSIQAGAQTLEKSNGGRGLLLGGVPGVEPAKVVIVGGGVVGANAARMAVGMRADVTILDRNLDTLRSLDEEFQGRAKVVYSTVDAIEKHVLEADLVIGAVLIPGAAAPKLVTADHIKRMKPGAAVVDVAIDQGGCFETSHATTHADPTYIVDDVVHYCVANMQGAVARTSTFALNNATLPYIIKLADKGYKSALLEDKGFLDGLNVINGKITCKEVAESFNLDYITPEAALNA

SEQ ID NO: 16824 - protein, 111 aa, Vibrio salmonicida LFI1238
METIDKIKQQIAENHIILYMKGSPKLPSCGFSSQASQALMNCGEKFAYVDILLNPDIRAELPAYAQWPTFPQLWVEGELVGGCDIILEMFQKGELKPLVQEAAQRNAPEAE

SEQ ID NO: 16825 - protein, 286 aa, Vibrio salmonicida LFI1238
MKKEYNQFDAIVPPDMAKKAEDVGTYKATKAPFQSFYLAITAGVFISIAFVFYITVTTGAGDAPWGMVKLVGGLAFSLGLILVVICGGELFTSSVLTTVARASNKITTSQLLKNWCIVYFGNFIGAMFFVAMIWFAKMHLLDNGQWGLTAMKVAQHKLHHTFGQAVALGTLCNLMVCLATWMTFSCRSNSDKVLVMLLPVAMFVAAGFEHSIANMFMVPLGIAIHAFASPEFWTVINIDPSAFADLTISNFVVNNLIPVTIGNILGGGLLVGITYWNIYLKPDARH

SEQ ID NO: 16826 - protein, 398 aa, Vibrio salmonicida LFI1238
MSKLVLVLNCGSSSLKFAVIDAESGAEHLTGLAECLGLPEARIKWKLDGKHEAQLGEGAAHEEALSFMVESILASKPELKANLGAIGHRIVHGGEQFTSSALITDEVLKGIQDAATFAPLHNPAHIIGIEAAKHNFPELQNVAVFDTAFHQTMPEESYLYALPYNLYTDHGIRRYGMHGTSHLFITREVAGLLNKPVEEVNIINCHLGNGASVCAIKNGQSVDTSMGLTPLEGLVMGTRCGDIDPAIIFHLHDALGYSVEQINTMLTKESGLQGLTQVTSDCRFVEDNYGEKEEATRAMDVFCHRLAKYVAGYTATLEGRLDAITFTGGIGENSAPIREMVLNRLGIFGIEVDNEANLKARFGGEGTITTANSRVPAMVISTNEELVIAEDTAKLTGL

SEQ ID NO: 16827 - protein, 723 aa, Vibrio salmonicida LFI1238
MSRTIMLVPISAGVGLTSASLGVLRSMERKGVSVSFYKPISQPRHGGDQPDLTTSIVTSSSDIKAAEPTTVSRAEELLRNDQTDVLLEEIVARYKSISEDTDVTLIEGLVPTRKHPFANQLNGEIAKTLGAEIVFVATPGTDNPSQLKERIEVACSNFGGTKNKQIAGVIINKLNAPVDEAGRTRPDLSEIFDDADATTKTNLEVMQIFNSSPIRVLGCVPWKIDLIATRAIDMAKHLNAEIINEGEIATRRIKSITFCARSLPHMIEHFKPGSLLVTSADRPDVIVAACLAAMNGVEIGAILLTGGYEIPQSIADLCKPALDAGLPIFTAQGNTWQTSLNLQSFSLEVPADDKERIEFVNEHVASHIDGPWIDSLSEGTEGIRRLSPPAFRYQLTEFARKAAKRIVLPEGDEPRTVKAAAICSERGIATCVLLGNPEEIRRVAAQQGVELGAGVEIIDSESVREKYVARLVELRGAKGMTEVVAREKLKDSVFLGTMMLEAGEVDGLVSGAVHTTANTIVPPFQIIKTAPDASIVSSIFFMLLPDQVLVYGDCAINPDPTAEQLAEIAIQSADSAAAFGIDPRVAMISYSTGESGKGADVDKVREATKLAQAKRPDLIIDGPLQYDAAIMENVAASKAPNSPVAGKATVFVFPDLNTGNTTYKAVQRSADLVSIGPMLQGMRKPVNDLSRGALVDDIVYTVALTAIQASQAEEAEKAEKVIN

SEQ ID NO: 16828 - protein, 73 aa, Vibrio salmonicida LFI1238
MAIGTVKWFNNAKGFGFICPEGEDGDIFAHYSTIEMDGYRTLKAGQAVTYEIHEGPKGYHASEIKPLEGEAVK

SEQ ID NO: 16829 - protein, 478 aa, Vibrio salmonicida LFI1238
MAQSKVLIVEDDEGLREALIDTLELAGYEWVEADSAETALLILKKEPVDIVVSDVQMAGMGGLALLRSIKLNWPNLPVLLMTAYANIEDAVSAMKDGAIDYMAKPFAPEVLLNMVSRYAPVKNEQTGNAIVADEKSLKLLKLADKVARTDANVMVLGPSGSGKEVMSRYIHNNSQRSEGPFIAINCAAIPDNMLEATLFGYEKGAFTGAVQACPGKFEQAQGGTILLDEISEMDLNLQVKLLRVLQEREVERLGGRKSIKLDVRILATSNRDLKKYVEEGNFREDLYYRLNVFPIAWPPLKERKGDIIPLAQHLVERHCQKQGLPVPTLTSEAIAKLEIYPWPGNVRELDNVVQRALILAEENYITADDILLEGVDWADASSLQKIVSGEVPTIKPEQQIPSINEPSVESTDSVNMDASSSSTGLGGELREQEYIIILETIKACDGKRKEVAEKLGISPRTLRYKLAKMRDAGIDIPS

SEQ ID NO: 16830 - protein, 633 aa, Vibrio salmonicida LFI1238
MGKIIGIDLGTTNSCVAVLDGDTPRILENAEGERTTASVVAYTDGETLVGQPAKRQAITNPQNTLFAIKRLIGRRFEDEEVQRDIEIMPYKIIKADNGDAWVEARGQKMAAPQVSAEILKKMKKTAEDFLGEEVTGAVVTVPAYFNDAQRQATKDAGRIAGLDVKRIINEPTAAALAYGLDKKGGDRTIAVYDLGGGTFDISIIEIDNVDGEQTFEVLATNGDTHLGGEDFDNRMINFLVDEFKKEQGINLKTDPLAMQRVKEAAEKAKIELSSAQQTDVNLPYVTADATGPKHMNVKVTRAKLESLVEDLVVRTLEPLKVALADADLSVNEITDVILVGGQTRMPMVQAKVAEFFGKEARRDVNPDEAVAMGAAVQGGVLSGDVKDVLLLDVTPLSFGIETMGGVMTKLIEKNTTIPTKADQTFSTAEDNQSAVTIHVLQGERKQATYNKSLGQFNLEGIQAAPRGMPQIEVTFDLDADGILNVSAKDKSTGKEQKITIQASGGLTPEEIEAMVQEAEANKDADKKFEELVVARNQADQMIHGTKKQIEEAGDALPADEKEKIEAAIKALEDVKSGDDKEVIDAKTQELMQAAQKLMEIAQQKAQAQGADAGEQPKQEDDVVDAEFEEVKDK

SEQ ID NO: 16831 - protein, 321 aa, Vibrio salmonicida LFI1238
MSDDKEFDLDAYFSSEAKTESSDNQHCGFIAIVGRPNVGKSTLLNQILGQKISITSRKPQTTRHRIMGVDTEGDYQAIYIDTPGLHIEEKRAINRLMNRAASSSLSDVNLVLFLVDGTHWTPDDEMVLNKLRKAGFPTVLLVNKVDNVKDKNDVMAHLQTMTEKMDFVDVVPISAKSGSNVDVVQKLVRDHLPKAVHHFPEEYVTDRSQRFMASEIIREKLMRFTGEELPYSVTVEIERFDYNPKMDGFHINGLILVERLGQKKMVVGKNGEKIKVIGREARLDMEGLFDRKVYLELWVKVKSGWADDERALRSLGYIDDL

SEQ ID NO: 16832 - protein, 819 aa, Vibrio salmonicida LFI1238
MRVLKFGGSSLADSDRFLRAADIIANNAQQQDVSVVLSAPGKVTNKLVSVVDNVLTNGEAELQISELEAVFIQLFDGISTALPQVDLKTLENKLKDSLSQLRQYVHGISLLGMCPDNVYAKIISKGERISVVTMKAVLEAKGQQASLIDPVKYLYARGSFLEGAVDVDISTLNFKNEPLPKGHVNIMPGFTAGNEKGELLTLGRNGSDYSAAVLAACLRAECCEIWTDVDGVYNCDPRLVDDARLLKSLSYQEAMELSYFGASVLHPKTIAPIAQFHIPCLIKNSFNPQGPGTLIGQDTGEDNLAIKGITTLSNLTMVNVSGPGMKGMVGMASRVFGAMSTAGISIVLITQSSSEYSISFCIEAEDKVQAEQVLREAFELELKDGLLEPVEFINDVAIVTLVGDGMRTSKGVASQFFTSLTEVNVNIIAIAQGSSERAISAVIPEDKVSESIKACHENLFNSKHFLDVFVVGVGGVGGELVEQIKRQQPKLSQKGIEIRVCGLANSRGLLLDSKGISLDGWRDRMGNATEEFSLARLISLVQRNHIINPVIIDCTSDHGIAAQYVDFLSAGFHVITPNKKSNTDSMAYYHQLRNAARATRRKFMYETTVGAGLPVIENLQNLIAAGDELVKFNGILSGSMSYIFGKLDEGMSLSDATNVAKKNGFTEPDPRDDLSGMDVARKLLILARESGLEIELDDVEVEQALPPGFDDSGTIDEFMARLPEADAYFVQESAKAAEEGKVLRYVGEISEGKCKVRIAAVDGDDPMFKIKDGENALAFYSRYYQPIPLVLRGYGAGTEVTAAGVFSDLMRTLGWKLGV

SEQ ID NO: 16833 - protein, 409 aa, Vibrio salmonicida LFI1238
MELSITVSELRYALDTFFFLMSGALVMWMAAGFAMLEAGLVRSKNTTEILTKNLCLYAIACTTYLIVGYNIMYVDNVSGGFLPSFGTLIGTQVEGADHSLESDFFFQVVFVATAMSVVSGAVAERMKLWSFLVFSVILTAFIYPMEGYWTWGGGFLSEAGFSDFAGSGIVHMAGASAALAGVLLLGARKGKYGKKGQIYPIPGSNMPLATLGTFILWFGWFGFNGGSQLMISDFENATAVGQIFLNTNAAAAAGAIAALFVCKITWGKADLTMVLNGALAGLVAITADPLSPSPLAAVIVGAVAGALVIFSIVAFDKIKIDDPVGAISVHGVCGFFGLMVVPLSNADASFGAQLLGAVVIFAWVFIASLVVWAIIKATIGIRVTEEEELEGMDVHDCGIDAYPEFVSVK

SEQ ID NO: 16834 - protein, 276 aa, Vibrio salmonicida LFI1238
MKKHRAFLKWAGGKYSLVEEIQRHLPDARKLIEPFVGAGSVFLNTDYDHYLLADINPDLINLYNHLKENPERFVEDVRELFQPEYNQKEVYLDLRIEFNQCTDTYRRSLLFLYMNRHGFNGLCRYNKKGGFNVPFGSYKKPYFPEKEMYFFAEKAKKATFVCEGYLETFKRARKGCVIYCDPPYAPLSTTANFTSYAGNGFSLDDQAALADIAEKAAFGRDIPVLISNHDTILTRRLYHGATLNKIKVKRTISRNGAGRNKVDELMALFYAPKCTE

SEQ ID NO: 16835 - protein, 806 aa, Vibrio salmonicida LFI1238
MTTSLVQRQLHKFGGSSLSDPECYRRVATILKEYSNEHDLVVVSAAGNTTNRILEWIDNLSKDGRLAHDTLESLRHYQQQLISELLEPDQAEVLQALLHKELIAIGQLHAPLNEVQQADVLGHGEIWSSRLLSAYLNQIELKSAPLDSRHFLRAERGAQPEVDRVLSWPLFKEQIAQHPHGRLVITGFMARDQKGETVLLGRNGSDYSATMIGALAEVSRVTIWSDVAGVFSADPRKVEDACLLPLLRLDEASELARLAAPVLHSRTLQPVAQSALDLSLRCSYQPESGSTRIERVLASGRGAKIVTSLDDVYLIQLGFGRGQDFERAQTEVLSLLTRAQLQPLALEAQADKFTLLLAYTSEIVSDALDMLQNTAVHAEIKLKEGYSMVAAVGAGVTANAIHSHGFYHQLKNRPLEFVCESESGLSLVAILRKLDTDELINEIHTSLFQAQKRVGLVLCGHGNIGAQWLTLFTQQKRILEKRRGMIFSLVGVVDSHRYWFDFDGIDSASVVSHFDDEAVSYEEFEWIEKIGSVQGYDDVVILDVTASSELASQYTKIAEQGMHLISANKVAGSAPSHEYQAVVDAFAKTGRHWLYNATVGAGLPINHTVQDLRESGDSIVALSGIFSGTLSWLFQQYTGETPFTELVDLAWQQGLTEPDPRHDLDGSDVMRKLVILARESGLQIEPNQIEVESLVPAELQQVSLDDFLAKGDALNEALSERLEQAQREQKVLRYVARLNKNGSATVGIEALSEHHALANLLPCDNIFAIESQWYKDNPLVIRGPGAGREVTAGAIQSDLNKISALF

SEQ ID NO: 16836 - protein, 403 aa, Vibrio salmonicida LFI1238
MNKKVNVNKVVVAYSGGLDTSVIIPWLKENYDCEVIAFVADVGQGAEELEGIEAKAIASGASECYVADLKEEMVSEYIFPTLKTGALYEGKYLLGTSMARPIIAKAQVEVARNVGADALCHGCTGKGNDQIRFEGAFAALAPDLHVIAPWREWDLVSREECLDYLAERNIPCTASLTKIYSRDANAWHISTEGGVLEDTWNEPNEDCWAWTVDPEQAPNESETVSIKVEKGAVVAVDGKAMTPYEVVVYLNEKGIKHGVGRIDIVENRLVGMKSRGCYETPGGTIINEALRAVEQLVLDKASFEFREELGIKASHLVYDGRWFTPLCKSILAATEELAQDVNGDVVIKLYKGQATVTQKRSDNSLYSEEFATFGADEVYDQSHAEGFIRLYSLSSRIRALNSK

SEQ ID NO: 16837 - protein, 394 aa, Vibrio salmonicida LFI1238
MLNKNTIDIIKSTIPLLAQTGPALTAHFYDRMFDHNPELKDIFNMSNQRNGDQREALFNAICAYAGNIENLAVLLPAVEKIAHKHTSFLITAEQYNIVGGHLIATLDEMFSPGQEVLDAWTEAYGILANVFIQREEQIYQENDVLEGGWRGLREFELVAKEKESEYITSFTFMPTDDLTVSSYKPGQYIGIYLNPEEFENQEVRQYSLSSAPQEKTYRISVKREEGGKASTYLHASLNIGDKVNLTAPAGDFFLDVEKSTPVTLISAGVGLTPTLSMLETLTKHEEKVTWLHATENGSQHAFKQHISALAEKHDHISAYTWYNQAQEMDKIGQDFQFSGLINLTEVKEDIISDDGHYYFCGPVGFMQHVAKQLVALGVSEDRIHYECFGPHKVL

SEQ ID NO: 16838 - protein, 387 aa, Vibrio salmonicida LFI1238
MKNVVIVDCIRTPMGRSKNGVFRHTRAEDLSAHLMKGLLERNPNVDPNQIEDIYWGCVQQTLEQGFNIARNASLLAGLPKSIAATTVNRLCGSSMQALHDASRAIMVGDADICIIGGVEHMGHVPMNHGVDFHSGLSKNVAKASGMMGLTAEMLGKMHGISREQQDAFAFASHQKAHRATIEGHFDSEILPMEGHDENGALTLVKHDEVIRPETTLEGLAALRPAFDPANGTVTAGSSSALSDGASAMLIMSEEKANELGLTIRAKIRSMAVSGCDPAIMGYGPVPATKKALKRAGLSIDDIDLFELNEAFAAQSLPCIKDLGLFDVMEEKINLNGGAIALGHPLGCSGSRIATTLINNMERTGAKLGVATMCIGLGQGIATVFERP

SEQ ID NO: 16839 - protein, 457 aa, Escherichia coli
MMEGQQHGEQLKRGLKNRHIQLIALGGAIGTGLFLGSASVIQSAGPGIILGYAIAGFIAFLIMRQLGEMVVEEPVAGSFSHFAYKYWGSFAGFASGWNYWVLYVLVAMAELTAVGKYIQFWYPEIPTWVSAAVFFVVINAINLTNVKVFGEMEFWFAIIKVIAVVAMIIFGGWLLFSGNGGPQASVSNLWDQGGFLPHGFTGLVMMMAIIMFSFGGLELVGITAAEADNPEQSIPKATNQVIYRILIFYIGSLAVLLSLMPWTRVTADTSPFVLIFHELGDTFVANALNIVVLTAALSVYNSCVYCNSRMLFGLAQQGNAPKALASVDKRGVPVNTILVSALVTALCVLINYLAPESAFGLLMALVVSALVINWAMISLAHMKFRRAKQEQGVVTRFPALLYPLGNWICLLFMAVVLVIMLMTPGMAISVYLIPVWLVVLGIGYLFKEKTAKAVKAH

SEQ ID NO: 16840 - protein, 481 aa, Escherichia coli
MVLLAMGLVIYLATSKYGNIRLGEGKPEYSTLSWLFMFICAGLGSSTLYWGGAEWAYYYQTPGLNIAPRSQQALEFSVPYSFFHWGISAWATYTLASLIMAYHFHVRKNKGLSLSGIIAAITGVRPQGPWGKLVDLMFLIATVGALTISLVVTAATFTRGLSALTGLPDNFTVQAFVILLSGGIFCLSSWIGINNGLQRLSKMVGWGAFLLPLLVLIVGPTEFITNSIINAIGLTTQNFLQMSLFTDPLGDGSFTRNWTVFYWLWWISYTPGVAMFVTRVSRGRKIKEVIWGLILGSTVGCWFFFGVMESYAIHQFINGVINVPQVLETLGGETAVQQVLMSLPAGKLFLAAYLGVMIIFLASHMDAVAYTMAATSTRNLQEGDDPDRGLRLFWCVVITLIPLSILFTGASLETMKTTVVLTALPFLVILLVKVGGFIRWLKQDYADIPAHQVEHYLPQTPVEALEKTPVLPAGTVFKGDN

SEQ ID NO: 16841 - protein, 470 aa, Escherichia coli
MVDQVKVVADDQAPAEQSLRRNLTNRHIQLIAIGGAIGTGLFMGSGKTISLAGPSIIFVYMIIGFMLFFVMRAMGELLLSNLEYKSFSDFASDLLGPWAGYFTGWTYWFCWVVTGMADVVAITAYAQFWFPDLSDWVASLAVIVLLLTLNLATVKMFGEMEFWFAMIKIVAIVSLIVVGLVMVAMHFQSPTGVEASFAHLWNDGGWFPKGLSGFFAGFQIAVFAFVGIELVGTTAAETKDPEKSLPRAINSIPIRIIMFYVFALIVIMSVTPWSSVVPEKSPFVELFVLVGLPAAASVINFVVLTSAASSANSGVFSTSRMLFGLAQEGVAPKAFAKLSKRAVPAKGLTFSCICLLGGVVMLYVNPSVIGAFTMITTVSAILFMFVWTIILCSYLVYRKQRPHLHEKSIYKMPLGKLMCWVCMAFFVFVLVLLTLEDDTRQALLVTPLWFIALGLGWLFIGKKRAAELRK

SEQ ID NO: 16842 - protein, 441 aa, Escherichia coli
MTHDNIDILVVDDDISHCTILQALLRGWGYNVALANSGRQALEQVRERVFDLVLCDVRMAEMDGIATLKEIKALNPAIPVLIMTAYSSVETAVEALKTGALDYLIKPLDFDNLQATLEKALAHTHIIDAETPAVTASQFGMVGKSPAMQHLLSEIALVAPSEATVLIHGDSGTGKELVARAIHASSARSEKPLVTLNCAALNESLLESELFGHEKGAFTGADKRREGRFVEADGGTLFLDEIGDISPMMQVRLLRAIQEREVQRVGSNQTISVDVRLIAATHRDLAAEVNAGRFRQDLYYRLNVVAIEVPSLRQRREDIPLLAGHFLQRFAERNRKAVKGFTPQAMDLLIHYDWPGNIRELENAVERAVVLLTGEYISERELPLAIASTPIPLAQSLDIQPLVEVEKEVILAALEKTGGNKTEAARQLGITRKTLLAKLSR

SEQ ID NO: 16843 - protein, 548 aa, Escherichia coli
MNGAQWVVHALRAQGVNTVFGYPGGAIMPVYDALYDGGVEHLLCRHEQGAAMAAIGYARATGKTGVCIATSGPGATNLITGLADALLDSIPVVAITGQVSAPFIGTDAFQEVDVLGLSLACTKHSFLVQSLEELPRIMAEAFDVASSGRPGPVLVDIPKDIQLASGDLEPWFTTVENEVTFPHAEVEQARQMLAKEQKPMLYVGGGVGMAQAVPALREFLATTKMPATCTLKGLGAVEADYPYYLGMLGMHGTKAANFAVQECDLLIAVGARFDDRVTGKLNTFAPHASVIHMDIDPAEMNKLRQAHVALQGDLNALLPALQQPLNINDWQQYCAQLRDEHAWRYDHPGDAIYAPLLLKQLSDRKPADCVVTTDVGQHQMWAAQHIAHTRPENFITSSGLGTMGFGLPAAVGAQVARPNDTVVCISGDGSFMMNVQELGTVKRKQLPLKIVLLDNQRLGMVRQWQQLFFQERYSETTLTDNPDFLKLASAFGIPGQHITRKDQVEAALDTMLNSDGPYLLHVSIDELENVWPLVPPGASNSEMLEKLS

SEQ ID NO: 16844 - protein, 328 aa, Escherichia coli
MERSMKPSVILYKALPDDLLQRLQEHFTVHQVANLSPQTVEQNAAIFAEAEGLLGSNENVDAALLEKMPKLRATSTISAGYDNFDVDALTARKILLMHTPTVLTETVADTLMALVLSTARRVVEVAERVKAGEWTASIGPDWYGTDVHHKTLGIVGMGRIGMALAQRAHFGFNMPILYNARRHHKEAEERFNARYCDLDTLLQESDFVCLILPLTDETHHLFGAEQFAKMKSSAIFINAGRGPVVDENALIAALQKGEIHAAGLDVFEQEPLSVDSPLLSMANVVAVPHIGSATHETRYGMAACAVDNLIDALQGKVEKNCVNPHVAD

SEQ ID NO: 16845 - protein, 1517 aa, Escherichia coli
MTRKPRRHALSVPVRSGSEVGFPQSLGEVHDMLYDKSLERDNCGFGLIAHIEGEPSHKVVRTAIHALARMQHRGAILADGKTGDGCGLLLQKPDRFFRIVAQERGWRLAKNYAVGMLFLNKDPELAAAARRIVEEELQRETLSIVGWRDVPTNEGVLGEIALSSLPRIEQIFVNAPAGWRPRDMERRLFIARRRIEKRLEADKDFYVCSLSNLVNIYKGLCMPADLPRFYLDLADLRLESAICLFHQRFSTNTVPRWPLAQPFRYLAHNGEINTITGNRQWARARTYKFQTPLIPDLHDAAPFVNETGSDSSSMDNMLELLLAGGMDIIRAMRLLVPPAWQNNPDMDPELRAFFDFNSMHMEPWDGPAGIVMSDGRFAACNLDRNGLRPARYVITKDKLITCASEVGIWDYQPDEVVEKGRVGPGELMVIDTRSGRILHSAETDDDLKSRHPYKEWMEKNVRRLVPFEDLPDEEVGSRELDDDTLASYQKQFNYSAEELDSVIRVLGENGQEAVGSMGDDTPFAVLSSQPRIIYDYFRQQFAQVTNPPIDPLREAHVMSLATSIGREMNVFCEAEGQAHRLSFKSPILLYSDFKQLTTMKEEHYRADTLDITFDVTKTTLEATVKELCDKAEKMVRSGTVLLVLSDRNIAKDRLPVPAPMAVGAIQTRLVDQSLRCDANIIVETASARDPHHFAVLLGFGATAIYPYLAYETLGRLVDTHAIAKDYRTVMLNYRNGINKGLYKIMSKMGISTIASYRCSKLFEAVGLHNDVVGLCFQGAVSRIGGASFEDFQQDLLNLSKRAWLARKPISQGGLLKYVHGGEYHAYNPDVVRTLQQAVQSGEYSDYQEYAKLVNERPATTLRDLLAITPGENAVNIADVEPASELFKRFDTAAMSIGALSPEAHEALAEAMNSIGGNSNSGEGGEDPARYGTNKVSRIKQVASGRFGVTPAYLVNADVIQIKVAQGAKPGEGGQLPGDKVTPYIAKLRYSVPGVTLISPPPHHDIYSIEDLAQLIFDLKQVNPKAMISVKLVSEPGVGTIATGVAKAYADLITIAGYDGGTGASPLSSVKYAGCPWELGLVETQQALVANGLRHKIRLQVDGGLKTGVDIIKAAILGAESFGFGTGPMVALGCKYLRICHLNNCATGVATQDDKLRKNHYHGLPFKVTNYFEFIARETRELMAQLGVTRLVDLIGRTDLLKELDGFTAKQQKLALSKLLETAEPHPGKALYCTETNPPFDNGLLNAQLLQQAKPFVDERQSKTFWFDIRNTDRSVGASLSGYIAQTHGDQGLAADPIKAYFNGTAGQSFGVWNAGGVELYLTGDANDYVGKGMAGGLIAIRPPVGSAFRSHEASIIGNTCLYGATGGRLYAAGRAGERFGVRNSGAITVVEGIGDNGCEYMTGGIVCILGKTGVNFGAGMTGGFAYVLDESGDFRKRVNPELVEVLSVDDLAIHEEHLRGLITEHVQHTGSQRGEEILANWSTFATKFALVKPKSSDVKALLGHRSRSAAELRVQAQ

SEQ ID NO: 16846 - protein, 406 aa, Escherichia coli
MRKEMNEFPVVLVINCGSSSIKFSVLDASDCEVLMSGIADGINSENAFLSVNGGEPAPLAHHSYEGALKAIAFELEKRNLNDSVALIGHRIAHGGSIFTESAIITDEVIDNIRRVSPLAPLHNYANLSGIESAQQLFPGVTQVAVFDTSFHQTMAPEAYLYGLPWKYYEELGVRRYGFHGTSHRYVSQRAHSLLNLAEDDSGLVVAHLGNGASICAVRNGQSVDTSMGMTPLEGLMMGTRSGDVDFGAMSWVASQTNQSLGDLERVVNKESGLLGISGLSSDLRVLEKAWHEGHERAQLAIKTFVHRIARHIAGHAASLRRLDGIIFTGGIGENSSLIRRLVMEHLAVLGVEIDTEMNNRSNSFGERIVSSENARVICAVIPTNEEKMIALDAIHLGKVNAPAEFA

SEQ ID NO: 16847 - protein, 714 aa, Escherichia coli
MSRIIMLIPTGTSVGLTSVSLGVIRAMERKGVRLSVFKPIAQPRTGGDAPDQTTTIVRANSSTTTAAEPLKMSYVEGLLSSNQKDVLMEEIVANYHANTKDAEVVLVEGLVPTRKHQFAQSLNYEIAKTLNAEIVFVMSQGTDTPEQLKERIELTRNSFGGAKNTNITGVIVNKLNAPVDEQGRTRPDLSEIFDDSSKAKVNNVDPAKLQESSPLPVLGAVPWSFDLIATRAIDMARHLNATIINEGDINTRRVKSVTFCARSIPHMLEHFRAGSLLVTSADRPDVLVAACLAAMNGVEIGALLLTGGYEMDARISKLCERAFATGLPVFMVNTNTWQTSLSLQSFNLEVPVDDHERIEKVQEYVANYINADWIDSLTATSERSRRLSPPAFRYQLTELARKAGKRIILPEGDEPRTVKAAAICAERGIATCVLLGNPAEINRVAASQGVELGAGIEIVDPEVVRESYVGRLVELRKNKGMTETVAREQLEDNVVLGTLMLEQDEVDGLVSGAVHTTANTIRPPLQLIKTAPGSSLVSSVFFMLLPEQVYVYGDCAINPDPTAEQLAEIAIQSADSAAAFGIEPRVAMLSYSTGTSGAGSDVEKVREATRLAQEKRPDLMIDGPLQYDAAVMADVAKSKAPNSPVAGRATVFIFPDLNTGNTTYKAVQRSADLISIGPMLQGMRKPVNDLSRGALVDDIVYTIALTAIQSAQQQ

SEQ ID NO: 16848 - protein, 405 aa, Escherichia coli
MSPIEKSSKLENVCYDIRGPVLKEAKRLEEEGNKVLKLNIGNPAPFGFDAPDEILVDVIRNLPTAQGYCDSKGLYSARKAIMQHYQARGMRDVTVEDIYIGNGVSELIVQAMQALLNSGDEMLVPAPDYPLWTAAVSLSSGKAVHYLCDESSDWFPDLDDIRAKITPRTRGIVIINPNNPTGAVYSKELLMEIVEIARQHNLIIFADEIYDKILYDDAEHHSIAPLAPDLLTITFNGLSKTYRIAGFRQGWMVLNGPKKHAKGYIEGLEMLASMRLCANVPAQHAIQTALGGYQSISEFITPGGRLYEQRNRAWELINDIPGVSCVKPRGALYMFPKIDAKRFNIHDDQKMVLDFLLQEKVLLVQGTAFNWPWPDHFRIVTLPRVDDIELSLSKFARFLSGYHQL

SEQ ID NO: 16849 - protein, 474 aa, Escherichia coli
MSRLVVVSNRIAPPDEHAASAGGLAVGILGALKAAGGLWFGWSGETGNEDQPLKKVKKGNITWASFNISEQDLDEYYNQFSNAVLWPAFHYRLDLVQFQRPAWDGYLRVNALLADKLLPLLQDDDIIWIHDYHLLPFAHELRKRGVNNRIGFFLHIPFPTPEIFNALPTYDTLLEQLCDYDLLGFQTENDRLAFLDCLSNLTRVTTRSAKSHTAWGKAFRTEVYPIGIEPKEIAKQAAGPLPPKLAQLKAELKNVQNIFSVERLDYSKGLPERFLAYEALLEKYPQHHGKIRYTQIAPTSRGDVQAYQDIRHQLENEAGRINGKYGQLGWTPLYYLNQHFDRKLLMKIFRYSDVGLVTPLRDGMNLVAKEYVAAQDPANPGVLVLSQFAGAANELTSALIVNPYDRDEVAAALDRALTMSLAERISRHAEMLDVIVKNDINHWQECFISDLKQIVPRSAESQQRDKVATFPKLA

SEQ ID NO: 16850 - protein, 321 aa, Escherichia coli
MSDYQMFEVQVSQVEPLTEQVKRFTLVATDGKPLPAFTGGSHIIVQMSDGDNQYSNAYSLLSSPHNTSSYQIAVRLEENSRGGSRFLHQQVKVGDRLTISTPNNLFALIPSARKHLFIAGGIGITPFLSHMAELQHSDVDWQLHYCSRNPESCAFRDELVQHPQAEKVHLHHSSTGTRLELARLLADIEPGTHVYTCGPEALIEAVRSEAARLDIAADTLHFEQFAIEDKTGDAFTLVLARSGKEFVVPEEMTILQVIENNKAAKVECLCREGVCGTCETAILEGEADHRDQYFSDEERASQQSMLICCSRAKGKRLVLDL

SEQ ID NO: 16851 - protein, 510 aa, Escherichia coli
MRIGIPRERLTNETRVAATPKTVEQLLKLGFTVAVESGAGQLASFDDKAFVQAGAEIVEGNSVWQSEIILKVNAPLDDEIALLNPGTTLVSFIWPAQNPELMQKLAERNVTVMAMDSVPRISRAQSLDALSSMANIAGYRAIVEAAHEFGCFFTGQITAAGKVPPAKVMVIGAGVAGLAAIGAANSLGAIVRAFDTRPEVKEQVQSMGAEFLELDFKEEAGSGDGYAKVMSDAFIKAEMELFAAQAKEVDIIVTTALIPGKPAPKLITREMVDSMKAGSVIVDLAAQNGGNCEYTVPGEIFTTENGVKVIGYTDLPGRLPTQSSQLYGTNLVNLLKLLCKEKNGNITVDFDDVVIRGVTVIRAGEITWPAPPIQVSAQPQVAQKAAPEVKTEEKCACSPWRKYALMALAIILFGWLASVAPKEFLGHFTVFALACVVGYYVVWNVSHALHTPLMSVTNAISGIIVVGALLQIGQGGWVSFLSFIAVLIASINIFGGFTVTQRMLKMFRKN

SEQ ID NO: 16852 - protein, 196 aa, Escherichia coli
MNEAVSPGALSTLFTDARTHNGWRETPVSDETLRELYALMKWGPTSANCSPARIVFIRTAEGKERLRPALSSGNLQKTLTAPVTAIVAWDSEFYERLPQLFPHGDARSWFTSSPQLAEEAAFRNSSMQAAYLIIACRALGLDTGPMSGFDRQHVDDAFFAGSTLKSNLLINIGYGDSSKLFARLPRLSFEEACGLL

SEQ ID NO: 16853 - protein, 458 aa, Escherichia coli
MKNASNVSEDTASNQEPTLHRGLHNRHIQLIALGGAIGTGLFLGIGPAIQMAGPAVLLGYGVAGIIAFLIMRQLGEMVVEEPVSGSFAHFAYKYRGPFAGFLSGWNYWVMFVLVGMAELTAAGIYMQYWFPDVPTWIWAAAFFIIINAVNLVNVRLYGETEFWFALIKVLAIIGMIGFGLWLLFSGHGGEKASIDNLWRYGGFFATGWNGLILSLAVIMFSFGGLELIGITAAEARDPEKSIPKAVNQVVYRILLFYIGSLVVLLALYPWVEVKSNSSPFVMIFHNLDSNVVASALNFVILVASLSVYNSGVYSNSRMLFGLSVQGNAPKFLTRVSRRGVPINSLMLSGAITSLVVLINYLLPQKAFGLLMALVVATLLLNWIMICLAHLRFRAAMRRQGRETQFKALLYPFGNYLCIAFLAMILLLMCTMDDMRLSAILLPVWIVFLFVAFKTLRRK

SEQ ID NO: 16854 - protein, 292 aa, Escherichia coli
MKLGFIGLGIMGTPMAINLARAGHQLHVTTIGPVADELLSLGAVYVDTARQVTEAADIIFIMVPDTPQVEEVLFGENGCTKASLKGKTIVDMSSISPIETKRFARQVNELGGDYLDAPVSGGEIGAREGTLSIMVGGDEAVFERVKPLFELLGKNITLVGGNGDGQTCKVANQIIVALNIEAVSEALLFASKAGADPVRVRQALMGGFASSRILEVHGERMIKRTFNPGFKIALHQKDLNLALQSAKALALNLPNTATCQELFNTCAANGGSQLDHSALVQALELMANHKLA

SEQ ID NO: 16855 - protein, 638 aa, Prevotella loescheii
MGKIIGIDLGTTNSCVAVFEGNEPVVIANSEGKRTTPSVVGFVKDGERKVGDPAKRQAITNPKNTVYSIKRFMGETYEQSRKEAEAMPYTVINENGLPRVDIEGRKYTPQEISAMILQKMKKTAEDYLGQEVTDAVITVPAYFSDSQRQATKEAGQIAGLNVQRIVNEPTAAALAYGVDKGNKDMKIAVFDLGGGTFDISILEFGGGVFEVLSTNGDTHLGGDDFDQVIIKWLADGFKADEGIDLTKDPMAMQRLKEAAEKAKIELSSTTSTEINLPYISAEGGVPKHLVKTLTRAQFEQLAHDLIQACLVPCQNAIKDAKLSTSDIDEVILVGGSSRIPAVQTLVKNYFGKEPSKGVNPDEVVAVGAAIQGAILNKESGVGDIVLLDVTPLTLGIETMGGVMTKLIDANTTIPHKKSETFSTAVDNQTAVTIHVLQGERPMASQNKSIGQFNLEGIAPARRGVPQIEVTFDIDANGILNVSAKDKATGKEQKIRIEASSGLSKEEIERMKAEAEQNAAADKAEREKVDKLNQADSMIFTTENFLKDNGDKIPADQKPGIESALQQLKDAHKAADVAAIDAAINNLNSVMQAASAQMYQGAGGAQPDPNAGFQGAGGEQAQGGSTGDNVQDADFEEVK

SEQ ID NO: 16856 - protein, 292 aa, Vibrio salmonicida LFI1238
MEQINVSFIGLGVMGYPMARHLKNAGFSTTVYNRTEAKAKQWAEDYQGQSAATPREASQGSDIVFVCVGNDGDVRSVIYGEDGVLAGLKLGAILVDNTTTSATLAVELAKACEAQGNTFIDAPVSGGQAGAENGALTVMCGGDEHTFATAKPVIQSFAKSVTLLGKNGQGQRCKMANQICIAGVLKGLSEALILAEKANLDIDLVVDTLKHGAAGSWQMENRASTMAQDKFDFGFAIDWMRKDLGICLDEAKTHGISLPLTEEVDKEYQGLQEQGLGRMDTSVLIKAIKERV

SEQ ID NO: 16857 - protein, 531 aa, Vibrio salmonicida LFI1238
MSTTDKYSIDSTDYEVGQDNIQKWGFDIHNQVFGISAGAIILFLTVLLVMDPTEAKSILDGVKLSIINNFDGLFMWSSNIFLVFSLLLIISPFGKIRLGGDNAKPEHSTISWMAMLFAAGMGIGLMFYGVAEPVAYFTDWYGTPLAVEPLTEEARKLALGATMYHWGIHPWAIYGIVALSLAFFTFNKGLPLSMRSVFYPILGDRTWGWFGHIIDILTVLATLFGLATSLGLGAQQAAGGINHVFGTNGGVNMQIGVIIFVTMLAMISVIRGIDGGVKLLSNVNMLVALALLIFIIIIGFSDVMAAIPLTVMGYIENIIPLSNPHGRPDEGWMHGWTVFYWAWWISWSPFVGMFIARVSKGRTVRQFLISVMLIPTAATALWMSAFGGIAMEQVTNKVGELGENGLQDITMALFNMYDALPMSTALSVISIILIMVFFVTSSDSGSLVIDSITAGGKVDAPVPQRIFWAIVQGSIAAVLLWVGGTEAMQALQAGTVSTALPFTFILLLMCVSLVKGFSTEKYGTVPKTSKA

SEQ ID NO: 16858 - protein, 641 aa, Vibrio salmonicida LFI1238
MSETITEFRQLALEETLLSALDEMGFVAPTPIQAESIPLLLAGRDALGKAQTGTGKTAAFSLPLLNKINLKQHNPQAIIMAPTRELAIQVAAEVKNLGRNIKGLKVLEIYGGASIVDQMRALSRGAHIVVGTPGRVKDLLNRDRLNLGEVHTFILDEADEMLKMGFVDDVTWILEKAPETAQRILFSATMPPMVKTIVDRYLRDPARVDVAGTNNTVEQVTQNFWIVKGVEKDEAMSRLLETEEIDASIVFVRTRQDTERLADWLSARGFKAAALHGDIPQSLRERTVDHIKRGVIDILVATDVVARGLDVPRITHVFNYDIPFDVESYIHRIGRTGRAGRKGKAILLVRTNQIRMLRTIERVTKSSMVEIELPHRDQVAEARLAVLGAELAADKEFVALEAFSDLITKLQETLEVDASTIAAMLLKRQQGKRPLFYKGPDPMIAAVERSKNRRPERGDRGDRPERGDRPERGDRPDRGERRQYNNDDFDTYQLEVGRDQGVQVKDIVGALANELGFTKGAIGAIKLAPGHTYVQLPKKMSSDVASKLKQLRIRQNEVKAVVVEGVDLTIDRRPRTGGGAGDSAGAGAGRGGYRGNREGGAGAARGGERRFDRNKGGDHRGSHRGERAPGASRAPRTPRED

SEQ ID NO: 16859 - protein, 266 aa, Vibrio salmonicida LFI1238
MKRILLSFVSLCLLFSSSAFSESMTPNVDKIKERGTLKVGLSTFVPWAMRDTQGNLIGFEVDVAKRLAKDSGLDIVFIPTAWDGIIPSLISGKFDVIIGGLTITDERAKSVLFTTPYSHSGVQVAANKKLTEGFTREQFNSRRVKIAVRRGAVTVAAVRESFPKAKVLQFDDDAQAFQEVLNGNAHAVAASTPKPEFDAIKYSDVLYLPFKERLSEGNEAFAVRLGEDDKKAFFDQWIKDRTEDGWLKERYDYWFTSLDWQSQIAN

SEQ ID NO: 16860 - protein, 69 aa, Vibrio salmonicida LFI1238
MSKATGTVKWFNEDKGFGFITQENGGPDVFAHFSAIQSEGFKTLKEGQAVTFEVEQGPKGPQAAKIEAA

SEQ ID NO: 16861 - protein, 518 aa, Vibrio salmonicida LFI1238
MQIGVPREVFAGETRVAATPKTVEQLLKLGFTVAVESNAGILASFDDAAFEKAGATIVSAEDAWKSEIILKVNAPQINDATGVDEFELLQDGASLISFIWPAQNEALLAKLATKNINVLAIDSVPRISRAQALDALSSMANIAGYRAVVEAAHEFGRFFTGQITAAGKVPPAKVLVAGAGVAGLAAIGAAGSLGAIVRAFDVRPEVKEQVQSMGAEFLEVDFKENSGSGDGYAKEMSDEFNKKAEELYAAQAKDVDIIITTALIPGRPAPKLITKAMVDSMQAGSVIVDLAAANGGNCEYTVKDQVITTDNGVKIVGYTDMVGRLPTQSSQLYGTNLVNLLKLLCKEKDGNINIDFEDVVLRGVTVVKEGEVTWPAPPIQVSAQPQAKVAPKAKVEPKVEVPMSPVKKYGMIGAGIAAFGWVGSVAPAEFLAHFTVFILACVVGYYVVWNVSHSLHTPLMSVTNAISGIIIVGALLQVGQGNGVVSVLAFIAVLIASINIFGGFAVTKRMLEMFRKDK

SEQ ID NO: 16862 - protein, 407 aa, Vibrio salmonicida LFI1238
MTNTLSIGALESFLIAIAVLFLGHLINSKVVFFKKYNIPEPIVGGLIVAFAITALHFQGINLEFSLPLQSTFMLMFFSTVGLAANYTQLIKGGTKVFLFLAVASFYIIIQNAVGVSLASAMGLNPLMGLIAGSITLSGGHGTGAAWSQTFAETYHLNTLELAMASATFGLVMGGLIGSPIAQKLIHKHKLESEYGTGVDTHTRFPELVTYNEREEEKVTAKKVTETLFILLICVVGAGHLSDFVGSFDIAWLKIPDFVYALFIGVFITNITEVTKIHKIDTETVDILGTVSLALFLAMALMSLKLWNIFDLAIPLLIILSVQTVVLAFFSYFVTFRVMGSNYDAAVMAGGHCGFGLGATPTAVMNMGSLVSRFGPSPQAFMVVPIVGAFFIDIVNLIILQTYISFIG

SEQ ID NO: 16863 - protein, 407 aa, Vibrio salmonicida LFI1238
MTNTLSIGALESFLIAIAVLFLGHFINSKINLFKKYNIPEPIVGGLIVAFAITLLHFQGISLEFSLPLQNIFMLMFFSTVGLAANYTQLLKGGSKVFLFLAVASFYILIQNAVGVSLATAMGLDPLMGLIAGSITLSGGHGTGAAWSQTFADTYNLNTLELAMASATFGLIMGGLIGSPIAQKLIHKHKLESEYAVGTDTHARFPELVTYNEREEDKVTSKKVIETLFILLLCVVGSEHLSNFVDSFGISWLKIPDFVYALFIGVFITNLTEVTKIHKIDTITVDILGTVCLSLFLAMALMSLKLWNIFDLAIPFLIILSVQTVVLALFSYFVTFRVMGSNYDAAVMVGGHCGFGLGATPTAVMNMGSLVSRFGPSPQAFMVVPIVGAFFIDITNLIILQAYISFIG

SEQ ID NO: 16864 - protein, 582 aa, Vibrio salmonicida LFI1238
MTIEKDESTWATFKRLWPHISLYKAGLGVAVFALVINALSDTYMISLLKPLLDEGFGNADSDFLKKMPFIILAMMFIRGFSGFVSGYCMSWVASNVVMRIRRDIFNHFMHMPVSYFDQESTGRLLSRITYDSEQVASATSKALVNIVRESASILGLLGLMFWNSWQLSLVLVVVAPVVAFAIGNVSKRFRKISKNMQTAMGSLTATSEQMLKGHKVVLSYGGQKVESERFDTISNHMRQQNMKMVVAQGLANPIIQMIASFALVTVLYLASVDSIKETLTPGTFTVVFSAMFGLLRPLKGLTSVTSDFQRGMAACQTLFELMDMDKEKDDGVIVKDKVNGDIKVEDVTFTYPTSEGPALRSVSFDLPAGKTVALVGRSGSGKSTIANLFTRFYDVDSGTISLDGDGLEDYKLTNLRKHFALVSQNVHLFNDSVANNIAYASEGRFTRAEIEKAAELAYASDFINKMEDGFDTMIGENGASLSGGQRQRIAIARALLQNASVLILDEATSALDTESEKAIQSALDELQKDKTVLVIAHRLSTIESADQILVIDEGEVVERGTHAELIAHDGAYAQLHRIQFGD

SEQ ID NO: 16865 - protein, 421 aa, Vibrio salmonicida LFI1238
MNNGTSYKRARIYVQPTIYKKRIMMNNEYVLVINSGSSSLKFAIIDSVSGDAVLSGLGECFGLEDARMSWKYQGEKTEIAIEGEENHHKIAVGKLVGLTEKFGFTDGIVAIGHRIVHGGEKFTETVRINEEVTKEIESLSDLAPLHNPAGAIGIRAAIEAFPSLPQFAVFDTAFHQTMPKRAYTGAIAKELYTDFGVRRYGFHGTSHYYVSREAAKMLNKPVEELSVISVHLGNGASVCAIKDGNSVDTSMGFTPLSGLMMGTRCGDLDPGIIEYLLKKGWSQDQVFNSLNKNSGFLGVSGLTSDARGILEAMEEGHEGATLAFQVFTYRVAKYVASYLAALDSLDGIIFTGGIGENALPIRREILNNLKILGFVEDQKGNEAARFGSAGIIAKSEMLNAVAMVIPTNEEFVIAQQSVELL

SEQ ID NO: 16866 - protein, 69 aa, Vibrio salmonicida LFI1238
MSKTTGIVKWFNEEKGFGFITQDNGGADVFVHFRAIASEGFKTLAEGQKVSFEVEQGQKGPQAANVVAA

SEQ ID NO: 16867 - protein, 869 aa, Listonella anguillarum
MIRIELPTLISKLNEQSKLALEQAASLCIERQHPEVTLEHFLHVLLENPLSDVRVIAKHANLDVETVKQAISASYAREQVLDTYPAFSPLLGELLQEAWLLSTTELNQNQLRSGVVFLAALMRADRYLPLKLIRLFEHINKESLNKGFDTLLQDSSESAVAKKDKNAGSQLHAASSSPLHKYCTNVTAQARNGELDPVLCRENELNLMIDILCRRRKNNPIVVGDAGVGKSAMIEGLALRVVAGNVPTQLQNVELCSLDLGLLQAGASVKGEFEKRLKGVIDAIKTSPKPIILFIDEAHTLIGSGNQEGGSDAANLLKPALARGELSTVAATTWKEYKKYFEKDPALTRRFQLVKLEEPSISQAVDILRGLNRVYEKAHNVLITDDALKAAAELSARYISGRQLPDKAIDVLDTACARIAINITTPPKRLAQLETACHQRQLEIDMLERAQYLGQVVDSHRLDELCSQEVADEAEKATLTQSWQEQKAIIERIITLRDQLMALRHGEQQVRDELLVVNTALQEQYRALEEIPHNDRLMHPQVDAQQIAEVIADWTGVPVDQMNSDELHKITHLTAILGEAIKGQDTAIERVHRNLLTARADLRRPGRPKGSFLLVGPSGVGKTETVAQLAQQLYGGKQFLNTINMSEYQEKHTVSRVIGSPPGYVGYGEGGILTEAIRKMPYSVVLLDEVEKAHPEVLNIFYQAFDKGELADGEGRVIDCQNIVFFLTSNLGYQTIVDYAQQPQLLDEQLYPELAAFFKPALLARMEIIPYLPLSKEVLEQIVRGKLTRLEQLFKQRYAADVVIEDSLIEEILSRATRSENGARMLEAIIEGQLLPPISLALLNKLADKQPVQRIYLAAEEGEFIGEVE

SEQ ID NO: 16868 - protein, 805 aa, Dimocarpus longan
MTNKAESSDSKGTKRDFSTAILERKKAANRLIVDEAINDDNSVVSLHPDTMEKLQLFRGDTILIKGKKRRDTICIALAEDTCDEPKIRMNKVVRSNLRVRLGDVVSVHQCPDVKYGKRVHILPVDDTIEGVTGNLFDAFLKPYFLEAYRPVRKGDLFLVRGGMRSVEFKVIETDPAEYCVVAPDTEIFCEGEPVRREDEDRLDEVGYDDVGGVRKQMAQIRELVELPLRHPQLFKSIGVKPPKGILLYGPPGSGKTLIARAVANETGAFFFCINGPEIMSKLAGESESNLRKAFEEAEKNAPSIIFIDEIDSIAPKREKTHGEVERRIVSQLLTLMDGLKSRAHVIVIGATNRPNTIDPALRRFGRFDREIDIGVPDEVGRLEVLRIHTKNMKLSDDVDLERIAKDTHGYVGADLAALCTEAALQCIREKMDVIDLEDETIDAEILNSMAVSNEHFQTALGTSNPSALRETVVEVPNVSWEDIGGLENVKRELQETVQYPVEHPERFEKFGMAPSKGVLFYGPPGCGKTLLAKAIANECQANFISVKGPELLTMWFGESEANVREIFDKARQSAPCVLFFDELDSIATQRGSSVGDAGGAADRVLNQLLTEMDGMSAKKTVFIIGATNRPDIIDPALLRPGRLDQLIYIPLPDEDSRHQIFKACLRKSPVSKDVDLRALAKYTQGFSGADITEICQRAVKYAIRENIEKDIERERRRRDNPEAMDEDVEDDVAEIKAAHFEESMKFARRSVSDADIRKYQAFAQTLQQSRGFGTEFRFSETSAGATGSDPFATSAGGADEDDLYS

SEQ ID NO: 16869 - protein, 343 aa, Methylocystis sp. M
MYQIVIETEDGETCSFECGPSEDVISAGLRQSVILLASCRAGACATCKADCTDGDYELIDVKVQALPPDEEEDGKVLLCRTFPRSDLHVVVPYTYDRISFQAIQTNWLAEITECDRVSSNVVRLVLQPLTADGAAPISLNFLPGQFVDIEIPGTHTRRSYSMASVAEDGRLEFFIRLLPDGAFSNYLRTQARVGQRVALRGPAGSFSLHKSERPRFFVAGGTGLSPVLSMIRQLHKESDPQPATLFFGVTNYEELFYVDELKALQHAMPSLDVQIAVVNVSEGNGVAKGTVIDLLQDELGRRAEKPDIYLCGPPGMIDAAFAAASSAGVPKEQVYLEKFLASG

SEQ ID NO: 16870 - protein, 369 aa, Geobacillus stearothermophilus
MEPQLRCIGCGAAIQFENPKNAGYAPKSVLEKDAEEVICQRCFRLKHYNEVQDVPLDDDDFLSMLHRIGESKALVVNIVDIFDFNGSFIPGLPRFAADNPILLVGNKADLLPRSVKYPKLLRWMRRMAEELGLCPVDVCLVSAAKGIGMAKVMEAINRYREGGDVYVVGCTNVGKSTFINRIIEEATGKGNVITTSYFPGTTLDMIEIPLESGATLYDTPGIINHHQMAHFVDARDLKIITPKREIHPRVYQLNEGQTLFFGGLARLDYIKGGRRSFVCYMANELTVHRTKLEKADSLYANQLGELLSPPSKRYAAEFPPLVPRSLSVKERKTDIVFSGLGWVTCNDPGAQLVVHAPKGVDVFIRQSLI

SEQ ID NO: 16871 - protein, 220 aa, Bacteroides fragilis NCTC 9343
  misc_feature (1)..(1): Xaa can be any naturally occurring amino acid
  misc_feature (20)..(20): Xaa can be any naturally occurring amino acid
  misc_feature (67)..(67): Xaa can be any naturally occurring amino acid
  misc_feature (75)..(75): Xaa can be any naturally occurring amino acid
  misc_feature (170)..(170): Xaa can be any naturally occurring amino acid
  misc_feature (179)..(179): Xaa can be any naturally occurring amino acid
  misc_feature (191)..(191): Xaa can be any naturally occurring amino acid
  unsure (1)..(220): unsure at all Xaa locations
XGSDKIHHHHHHENLYFQGXIESIQELLQKEAQAVLNIPVTDAYEKAVELIVEQIHRKKGKLVTSGXGKAGQIAXNIATTFCSTGIPSVFLHPSEAQHGDLGILQENDLLLLISNSGKTREIVELTQLAHNLNPGLKFIVITGNPDSPLASESDVCLSTGHPAEVCTLGXTPTTSTTVXTVIGDILVVQTXKRTEFTIEEYSKRHHGGYLGEKSRKLCVK

SEQ ID NO: 16872 - protein, 584 aa, Citrus sinensis
MTHIKEFFTKLSESSSNQNISNIPKKKKKLFLALFATLLVVAAVIGIVAGVNSRKNSGDNGNEPHHAILKSSCSSTRYPDLCFSAIAAVPEASKKVTSQKDVIEMSLNITTTAVEHNYFGIQKLLKRTNLTKREKVALHDCLETIDETLDELHKAVEDLEEYPNKKSLSQHADDLKTLMSAAMTNQGTCLDGFSHDDANKHVRDALSDGQVHVEKMCSNALAMIKNMTDTDMMIMRTSNNRKLTEETSTVDGWPAWLSPGDRRLLQSSSVTPNAVVAADGSGNFKTVAAAVAAAPQGGTKRYIIRIKAGVYRENVEVTKKHKNIMFIGDGRTRTIITGSRNVVDGSTTFKSATVAVVGEGFLARDITFQNTAGPSKHQAVALRVGADLSAFYNCDMLAYQDTLYVHSNRQFFVNCLIAGTVDFIFGNAAAVLQNCDIHARKPNSGQKNMVTAQGRTDPNQNTGIVIQKSRIGATSDLKPVQGSFPTYLGRPWKEYSRTVIMQSSITDLIHPAGWHEWDGNFALNTLFYGEHQNSGAGAGTSGRVKWKGFRVITSATEAQAFTPGSFIAGSSWLGSTGFPFSLGL

SEQ ID NO: 16873 - protein, 274 aa, Solanum habrochaites
MNSTSMSSLGVSKGSWTEEEDFLLRKCIDKYGEGKWHLVPIGAGLNRCRKSCRLRWLNYLRPHIKRGDFEQDEVDLILRLHKLLGNRWSLIAGRLPGRTANDVKNYWNTNLLRKLNTTKIVPREKINNKCGEISTKIEIIKPQPRKYFSSTMKNVTNNIVILDEEEHCKEIISEKQTPDASMANVDQWWINLLENCNDDVEEDEEVVINYEKTLTSLLHEEISPPLNIGEGNSMQQGQISHENWGVFSLNLPPMQQGVQNDDFSAEIDLWNLLD

SEQ ID NO: 16874 - protein, 1050 aa, Helianthus annuus
MAMSLEDLLAEEGFKSGSAKRMTRASSGASTRIPPHPLRDERKFGIPSRLRKTERAYSDTRRYDMRAESPGTDKVMCRRSVEVLKRGKMNRYSAESSQQFSSDEIVEVREGIRKVKDEMVDNRRYKDIYLNGVFSPPISKNKQYNKVGEDLQIDNDYATDYQKGGNRPGSSSSRSNRSTQNKESVRDNRARRPVEIDSVTEVALDEVAIKAMISILSGYVKKYLKDQDFRTSMYHNCFAALNFSKLEEEIVTESKVISNLEQAIETVEKAAENLADAKQLKKASLQLSVITGLNANDLKDGFTSGFPNSVLSACGHLYLSVIYQLQKKERIVAKHLLQMFCDSPFSARTTLVPELWENVFHPHLSHLESWYNQEVNSLADDPHNTRKLKQLKKVYYDILDSGTYQFALYYKDWITDGVEAPSIPSIHVPMISVQKVLSVGVNGNALDFGSPSFSSHAIVSKKLYDDVFGQMHKSVTAEVEDYQYSQRSEDDTYSFDGSVVEDKRTLTYPLEEDGYKDLDVKRGWETFQLSCNLYMLSNFQMQQGEIIAQEELELQRANTFEGLEGTNMLQSLPVAKVNELTLKRLAKFVFGLQQTENQLHLDVTKHPDSSPIKSNADGEHFFLNIPEDYMCPLTGHIFEDPVTLETGQTYERVAIMEWFSKGNKTCPVTGKTLEYQTVPFTNSILKRLIDSWKSKHSREMLSSASRPMGSPREHEYKAEAAVFILEQLLTVFGREENTANAKHLLALGGLQFLIQRFQYGNLDEKTRVAALLSMCIEADSSCRNHVARYVDKEGVLELLHCKEVKSRSNAVFLLFDLICLNRRKDVRFFLSGLQKEVISCSLEQKPLVAVLLLHLDLLVDQQKYSIYREEAVDTITSALDTSLFDEKVRETCCRALLIMGARISLSGTVITQDYNLQKAGFYNRPELDVIIQPELDVLEYNATNILTDWGLVFLVHGITVFFALFIFNETRKERNGQCNEFLWTPFLKHLHTSLFSSPKHQPLPPPLLLLLRHPSSPPATSLFSSGDLPPPATYLFSDLPPPPATSFLLR

SEQ ID NO: 16875 - protein, 393 aa, Streptomyces clavuligerus
MTLGTARNTVGTRAGLLGPLALAGLAARARASGALDIAIGTPPGQPPRAAVTAAADAMLAGRNQYADPAGVPELRAAVAGRLLASSGVGVDPETEITITAGATEGLLVALLTVTDPGDEVVVVEPAFELYRGAVELAGCTRVPAPLDPSGWRLDPERIASVLTPRTAALIVNTPHNPTGRVFTAEELGGLLDLCERRGVTCVVDEVYADFVFDGGPHVSALGFPRHRPRVVVVGSLSKADEMSGWRLGYCVADPALTTALRHVHERTTFGAAVPLQHGAAVLARAGSGPEQFRNGRDEMVRRLAAMGFEVTTPEGGWFLLAGTRRLGLRSDALAEGLLVRAGVLVAPATPFFADTGEGQRWIRTTFVKDLATLTKALDAMESFLAEPDGGVWA

SEQ ID NO: 16876 - protein, 67 aa, Bacillus thuringiensis serovar finitimus
MAVTGQVKWFNSEKGFGFIEVPGENDVFVHFSAIETEGFKSLEEGQKVSFEIEEGNRGPQAKNVIKL

SEQ ID NO: 16877 - protein, 67 aa, Bacillus weihenstephanensis
MTVTGQVKWFNNEKGFGFIEVPGENDVFVHFSAIENDGFKSLEEGQKVSFEIEDGNRGPQAKNVIKL

SEQ ID NO: 16878 - protein, 67 aa, Bacillus thuringiensis serovar poloniensis
MAVTGQVKWFNNEKGFGFIEVPGENDVFVHFSAIETEGFKSLEEGQKVSLEIEEGNRGPQAKNVIKL

SEQ ID NO: 16879 - protein, 392 aa, Zoogloea ramigera
STPSIVIASAARTAVGSFNGAFANTPAHELGATVISAVLERAGVAAGEVNEVILGQVLPAGEGQNPARQAAMKAGVPQEATAWGMNQLCGSGLRAVALGMQQIATGDASIIVAGGMESMSMAPHCAHLRGGVKMGDFKMIDTMIKDGLTDAFYGYHMGTTAENVAKQWQLSRDEQDAFAVASQNKAEAAQKDGRFKDEIVPFIVKGRKGDITVDADEYIRHGATLDSMAKLRPAFDKEGTVTAGNASGLNDGAAAALLMSEAEASRRGIQPLGRIVSWATVGVDPKVMGTGPIPASRKALERAGWKIGDLDLVEANEAFAAQACAVNKDLGWDPSIVNVNGGAIAIGHPIGASGARILNTLLFEMKRRGARKGLATLCIGGGMGVAMCIESL

SEQ ID NO: 16880 - protein, 109 aa, Saccharomyces cerevisiae
MVSQETVAHVKDLIGQKEVFVAAKTYCPYCKATLSTLFQELNVPKSKALVLELDEMSNGSEIQDALEEISGQKTVPNVYINGKHIGGNSDLETLKKNGKLAEILKPVFQ

SEQ ID NO: 16881 - protein, 112 aa, Saccharomyces cerevisiae
SHMMVSQETVAHVKDLIGQKEVFVAAKTYCPYSKATLSTLFQELNVPKSKALVLELDEMSNGSEIQDALEEISGQKTVPNVYINGKHIGGNSDLETLKKNGKLAEILKPVFQ

SEQ ID NO: 16882 - protein, 427 aa, Tolypothrix sp. PCC 7601
MYNQVAVEGAANTESGSRVFVYEVVGLHQNEETDNTNYPIRNSGSVFIRVPYNRMNQEMRRITRLGGKIVSIQPASALQQLNGKASLGVANSEGNGQATPANAKPPAETQLQNKDQKGNTMTQAKAKKDSHADVPVNIYRPNAPFIGKCISNEPLVKEGGIGIVQHLKFDLSGSNLKYIEGQSIGIIPPGVDKNGKPEKLRLYSIASTRHGDDVDDKTVSLCVRQLEYKHPESGETVYGVCSTHLCFLEPGAEVKITGPVGKEMLLPSDPDAKVIMMATGTGIAPMRAYLWRMFKDAERAANPEYQFNGFAWLIFGVPTSPNILYKEELEEMQQKYPDNFRLTYAISREQKNPQGGRMYIQDRVAEHADELWQLIKDEKTHTYICGLRGMEDGIDAALTAAAAKEGVTWSTYQKEIKKAGRWHVETY

SEQ ID NO: 16883 - protein, 657 aa, Saccharina japonica
MTAVEGESVGIDLGTTYSCVGVWQNDRVEIIANDQGNRTTPSYVAFTDTERLIGDAAKNQVAMNATNTVFDAKRLIGRRFGDPAVTADRKHWPFEIVEGVGGKPSIEVEFKGEKKQFAPEEISSMVLVKMKETAQAYLGKEVKNAVITVPAYFNDSQRQATKDAGAISGLNVMRIINEPTAAAIAYGLDREGEERNVLIFDLGGGTFDVSVLAIEEGIFEVKATAGDTHLGGEDFDNRMVDYFLQEFKRKFRKDIKSNQRSLRRLRTACERAKRTLSSSTQAHIEIDSLFEGIDFNSTITRARFEDMNQDYFQKCLAPVEKVVKDARLSKGQIHEVVLVGGSTRIPKVQQMLSEFFNGKEPCKSINPDEAVAYGATVQAAILSGKDKSEKLNSLLLLDVTPLGQGLETAGGVMTTLIKRNTTVPAKKSQVFSTYSDNQPGVLIQVFEGERAMTRDCNLLGKFNLDGIPPMPRGQPQIEVTFDIDANGILNVHAVEKSTGKENKITITNDKGRLSADDIERMVEEAERYKAEDDVQKQRVEGKNALENYAYSMRNTINEEKVASKLDAADKTSIEEKISEAIAWLDANQTAEKEEFEEKQKELEAVCNPIIQKMAGEGGMPGGMPGGMPDMSGAGFPGGSAPEPEAEADAGPKIEEID

SEQ ID NO: 16884 - protein, 657 aa, Undaria pinnatifida
MTAVEGESVGIDLGTTYSCVGVWQNDRVEVIANDQGNRTTPSYVAFTDTERLIGDAAKNQVAMNATNTVFDAKRLIGRRFGDPAVTADRKHWPFEIVEGVGGKPSIEVEFKGEKKQFAPEEISSMVLVKMKETAQAYLGKEVKNAVITVPAYFNDSQRQATKDAGAISGLNVMRIINEPTAAAIAYGLDREGEERNVLIFDLGGGTFDVSVLAIEEGIFEVKATAGDTHLGGEDFDNRMVDYFLQEFKRKFRKDIKSNQRSLRRLRTACERAKRTLSSSTQAHIEIDSLFDGIDFNSTITRARFEDMNQDYFQKCLAPVEKVVKDAKMSKGQIHEVVLVGGSTRIPKVQQMLSEFFNGKEPCKSINPDEAVAFGATVQAAILSGKDKSEKLNSLLLLDVTPLGQGLETAGGVMTTLIKRNTTVPAKKSQVFSTYADNQPGVLIQVYEGERAMTRDCNLLGKFNLDGIPPMPRGQPQIEVTFDIDANGILNVHAVEKSTGKENKITITNDKGRLSADDIERMVEEAERYKAEDDVQKQRVEGKNALENYAYSMRNTINEEKVASKLDAADKTSIEEKISETIAWLDANQTAEKEEFEEKQKELEAVCNPIIQKMASEGGMPGGMPGGMPDMSGAGFPGGSAPEPEAEADAGPKIEEID

SEQ ID NO: 16885 - protein, 256 aa, Photorhabdus luminescens
MDKLLPHLPAGQRLVEPFAGSCSVMMNTQYDAYLIADANSDLIDMYQSVKENCDGFINSAQDWFSYFNSEHEFYCLRALFNSDDEKYKSQIWHASVFLFLNRHCFNGLCRYNSKGEFNVPFGNGKKPYFPEVEILAFAAKSKIASIHCADWREILKMVDFGDVVYCDPPYFTNGVNFTQYCKTGFLHHDHQDLAISLKQLNELLGVPVIVSNSIEAKELYADLGFTIHEIEAPRTIAANGNRQPVIEIIATLEASA

SEQ ID NO: 16886 - protein, 384 aa, Fragaria x ananassa
MLKEESNGAAAANSWARVCDTCRSAPCTVYCRADSAYLCSGCDATIHAANRVASRHERVSVCEACERAPAAFLCKADAASLCTACDADIHSANPLARRHQRVPILPISGCQIMVGSTPADTTEDGFLSQEGDEEVMDEEDEDEAASWLLLNPVKNSNNHNSNNNNPNNNNNGFLFGVEVDEYLDLVEYNSSDQNQFSGTTATNDQHNYGVPHKISYGGDSVVPVQYGEGKVTQMQMQQKHNFHQLGMEYESSKAAYGYDGSISHTVSVSSMDVGVVPDSTMSEMSVCHPRTPKGTIDLFNGPTIQMPTQLSPMDREARVLRYREKKKTRKFEKTIRYASRKAYAETRPRIKGRFAKRTDIEVEVDQMFSTSLMGETGYGIVPSY

SEQ ID NO: 16887 - protein, 804 aa, Yarrowia lipolytica CLIB122
MSSESIQEHEKSDDKFRSEKEIHEIEFEATEVSDGSFIDYVGEKLNFVPDENGIHTKNIRLMANFVAELSDSEAEEILLKFIPVHEDDYNLRLEYKEYLKALVSGEKDAPNPDTYSLDLRIEAAAIKYWSPYIEVRAVTDCYDDMDEPCETIRAYAIGLVWLLVGCFVNQFFIFRYPSISIGSDVLQLLTYPCGELLARILPDWGFTWRGTRISLNPGPWSRKEQMFATFFLSGGDGATYVSAYNLPTQLLPMYYNQKWATFGYQIMLTLSSQYIGFGFAGILRRFAIYPTKAMWPLNMPTIALNRALLDPERKQKINGWTISKYWWFLATFVVSFIYYWIPDYLFQAISNFNWMTWIAPNNVNLALITGQSGMGINPIPTFDLNQIGVGSVVTPWWSIVNSLIGLVIGTFAVIGVYYSNVRWTAYLPMNMPGIYNNKGGSYKVTKILTNGVFDLEKYHEYGPPLWSAGNLVAYGAFFSVYTLGFVYTMLAYWQDMKQASIDFYNGIAFWNGTKRTEVDSPFAKQLKKYADVPDWWFFLILLISIGFCIGTVKGWETTTPVWGIFFVLGINLVFLIPICLLQAYTGNGFALNVLVEIICGYALNGRPTALNILKAYGVNVDSTSQGFVSVWKTGMYTYVPSRAIFRSQVLSTLISAFVTVGILQYQLTLQDICTPAQRATTKFTCPGQNTFYAASVLFGAIGTKRFFGTGGNTGLYPFLKWCFLLGAVVGLVFFVVQYTIPHYIGKRFPERKQAMIRLSERLGKYNPVVINMGLIGFAPGNLSYSIGGVYLAAAWTLYIKKPVP

SEQ ID NO: 16888 - protein, 157 aa, Yarrowia lipolytica CLIB122
MADEEHTFDTVNAGASQTYPIQCSALRKNGHVVIKGRPCKIIDMSTSKTGKHGHAKVHLVATDIFTNKKLEDLSPSTHNMEVPNVKREEFQLIDIDDGFLSLFTADGSTKDDVPLPEGEIGDKIQTEFDEGKDLIVTVISAMGEEAVISYKEAPKGN

SEQ ID NO: 16889 - protein, 90 aa, Yarrowia lipolytica CLIB122
MSEETQPKVDSSEHVNIKVTDSSSEIFFKIKKSTQLKKLIDAFCQRQGKQKSSLRFLYDGQRVTDTDTPETLQIEDGDTIEAHQEQLGGC

SEQ ID NO: 16890 - protein, 112 aa, Cupressus sempervirens
DYDNSYVCIVDMPGLKSNDIKVQVEDENDISGERKRNENEEAQVKYIRMERRVAEFMRKFSLPADCNLEAISAACQDGVLTVTVRKLPAPEPKIPKTIAVKIGYILRCVCSD

SEQ ID NO: 16891 - protein, 625 aa, Streptomyces sp. JP95
MSAIAGWVDFERDLSPQAATVETMAAALAHRGPDGRGVWAEGHAALAHRRLALLDLTETGAQPAVHTTEGGAAVAVLTLDGALTNHTELRARLAAKGHRFTGRGDGETALHAYLEWGADFLTRLEGLFAIAVWDVRRQELLLARDRLGVKPLSYHPTPTGVLFGSEPKAILAHPDVDAVVDADGLRELFAHSRKPGTGVFRGMREVVPGHALIVRRPGSREQRYWSLPAREHTDSLDTTVATVRGLLADAVASHTRADAPVGAMLSGGIDSSALSALAHRDLTAAGSGPLRTFSVNFTGYTENFEPHPTMRSTPDAPFAALASRHIGSRHTEFLLDTAALTDPGVHTAALRSQDAPSPLGDMDVSLLRFFARLREEGFAAVLSGETADEVFNGYFWAYDPKHSNSQTFPWVSFERGHDAAAGGLGTSMIDRELRKRLDFLGYADQHYRDALTEVPHVDGDTAAERRAREVTYLALTRWAPTHLDRADRMSMAHGVQLRPPFCDRALVEYVYNVPAAMKRVDGVEKSLLRSAVADLLPDEVLHRRKSAYPTTQEAAYGDFVRQRFAELAADRDAAVAELLDTTATAEAVAADGSPQGAFAWVERAGMEMALQLDTWLTDYRVDLRL

SEQ ID NO: 16892 - protein, 322 aa, Vicia faba var. minor
  misc_feature (259)..(259): Xaa can be any naturally occurring amino acid
  unsure (1)..(322): unsure at all Xaa locations
MEGLATGSNERNELVRVRHGSDSGSKPVTNLNGQFCQICGDTIGLTAAGGVFVACHECAFPLCHPCYEYEIKNVSQLCPQCKTRYKTHKDGPQVKGDDDEDDVDGLRNEVKYGPGNNSKTGWQWDEDADLSSSSGHDSQLQNPHLTNGQLMSGEIACATSDTQSAQTTSGPLGQSGNVHSRPYADPKQPGLESDEEMRRVPDMGGESAGTSASHKGTGSTAGPERAQGTGEGQKKRGRSPADKESKRLKRLLRNRVSAXQARERKKAYLSDLETRVNDLEKKNSELKEKLSTLQNENQMLRQILKNTTASRRGGNSGTNNAE

SEQ ID NO: 16893 - protein, 151 aa, Picea abies
MAMDPLLSTVQQLLGVPDDLERILHAPTRSYMRDTEATASTPVDVKEYPNSYVFIVDMPGLKSNDIKVQVEDENVLNISGERKRNEKEEGAVKYIRMERRVAKFMRKFTLPADCNLEAISAACQDGVLTVTVPKLPPPEPKKPKTIAVKIG

SEQ ID NO: 16894 - protein, 446 aa, Avicennia marina
MDVRGGEDVTGGSGAGRKVHSEDMAVEVPETAHQISNDSWLQAGFVLTTGVNSAYVLGYSGAVMVPLGWIGGVVGLILATLVSLHANALVAQLHEYGGKRHIRYRDLAGRIYGRRAYSVTWGMQYVNLFMINVGFVILAGNSLKAVYTLFRHDHVMKLPHFIAIAAIACGLFAISIPHLSAMRIWLAFSMFFSLVYIIVGFALSLKDGIEAPPRDYTLPEKGADKVFTIIGAAAELVFSFNTGMLPEIQATVRPPVIGNMMKALYFQFTVGVVPMYSIIFVGYWAYGSKTTSYLLNNVHGPIWLMTVANIAAFLQSVISLHIFASPMYEIWIPDLESKEVLWPIRNLSFRVVVRGGYVATTAFVSALLPFLGDFMSLTGAISTFPLTFILANHMYLVAKGNKLSPLHKTGLWLNIGFFGCLAVAAAVAALREIVVDSKTYHLFADI

SEQ ID NO: 16895 - protein, 447 aa, Avicennia marina
MESQGREDVVGCSGAGGRVHSDGHIDIEIPETAHQISNDSWFQAGFVLTTGINSAYVLGYPGAVMVPLGWIGGVIGLILATVVSLHANALVAKLHDFGGKRRIRYRDLAGSIYGGKAYSITWGMQYVNLVMINVGYIILAGNSLKAVYLLFRDDHVMKLPHFIAIAGLACGLFAISVPHLSALRNWLAFSTLFSMIYIVGGIALAIKDGFKAPPRDYSIPGTKTSRIFTTIGASANLVFSFNTGMLPEIQATVRPPVVENMMKGLYFQFTVGVVPMYAIIFAGYWAYGSTTSSYLLNNVHGPIWLKTTTNISAFLQSVIALHIFASPMYEFLDTKYGIKGSALAVRNLSFRILVRGGYVAMTSLVSALLPFLGDFMSLTGALSTFPLTFILANHMYLVANRNKMSLLQKNWHWLNVVLFSCMAVAAAVAALRLIAVDSRTYHVFADI

SEQ ID NO: 16896 - protein, 440 aa, Avicennia marina
SAPAHSGCDRGLCSDDHVAVEIPDTAHQISQDSWFQVGLVLTNGVNSAYVLGYSGAIMVPLGWLGGVVGLILATAISLYANALVAELHEFGGRRHIRYRDLAGFIYGRAAYNLTWGLQYVNLFMINVGYIILAGNALKAMYVLLLDDHLIKLPHFIGIAGLACGLFAMAVPHLSAMRVWLVFSTLFSLVYIVIAFALSLKDGVEAPPRDYSIMATTASRIFTAIGASANLVFAFNTGMVPEIQATVRPPVIGNMMKGLYFQFTAGVLPMYALTFIGYWAYGFEASTYLLSNVHGPVWLKAVANVSAFLQSIIALHIFASPMYEYLDTRYGIKGSALAFSNLCFRVVVRGSYLGMTTFVSALLPFLDDFMSLTGALSTFPLTFILANHMYLVAKKHELTSLQKSWHWFIVCFFGCMSVAAAAAGLRLIVVDSSHYHVFADL

SEQ ID NO: 16897 - protein, 392 aa, Barnebya dispar
DLEPVNPADVPVTAAGALKSYKFAAKAISRLQSLPSGNIFLLCDVLVKEVRDLTGYDRVMVYKFHEDEHGEVVSECRRSDLESYLGLHYPATDIPQASRFLFMKNKLRMICDCLAPPVKVIQDENLPQPLSLCGSTLRSPHGCHAQYMTNMGTIASLVMSVTINEDDDMKDCEQPQMPRKLWGLVVCHHTSPRFIPFPLRYACEFLIQVFGVQINKEVELAAQVREKHILRIQTLLCDMLLRDAPVAIITQSPNVMDLVRCDGAALYYKNKFWLLGVTPTEAQIRDIAEWLLECHSGNTGLSTDSLMEAGYPGASVLGDAVCGMAAISITSRDFLFWFRSHTAKEIKWGGAKHDPDDKDDGRKMHPRSSFKAFLEVVKWRSLPWEDVEMDAI

SEQ ID NO: 16898 - protein, 392 aa, Blepharandra heteropetala
DLEPVNPADVPVTAAGALKSYKLAARAISRLQSLPSGNISLLCDVLVKEVRDLTGYDRVMVYKFHEDEHGEVISECRRPDLEAYLGLHYPATDIPQASRFLFMKNKVRMICDCLAPAVKVIQDERLPQALSLCGSTLRSPHGCHAQYMANMGTIASLVMSVIINEDNDMMDGDQQHIARKLWGLVVCHHTSPRFVPFPLRYACEFLIQVFGVQINKEVELAAQVREKHILRTQTLLCDMLLRDAPVAIITQSPNVMDLVKCDGAALYYRKKFWLLGVTPTEVQIRDIAEWLLEYHGGNAGLSTDSLMEAGYPGASDLGNAVCGMAAVRITSRDFLFWFRSHTAKEIKWGGAKHHPNDKDDVRKMHPRSSFKAFLEVVKWRSLPWEDIEMDAI

SEQ ID NO: 16899 - protein, 392 aa, Blepharandra heteropetala
DLEPVNPADVPVTAAGALKSYKLAARAISRLQSLPSGNISLLCDVLVKEVRDLTGYDRVMVYKFHEDEHGEVISECCRPDLEAYLGLHYPATDIPQASRFLFMKNKVRMICDCLAPAVKVIQDERLPQALSLCGSTLRSPHGCHAQYMANMGTIASLVMSVIINEDNDMMDGDQQHIARKLWGLVVCHHTSPRFVPFPLRYACEFLIQVFGVQINKEVELAAQVREKHILRTQTLLCDMLLRDAPVAIITQSPNVMDLVKCDGAALYYRKKFWLLGVTPTEVQIRDIAEWLLEYHGGNAGLSTDSLMEAGYPGASDLGNAVCGMAAVRITSRDFLFWFRSHTAKEIKWGGAKHHPNDKDDVRKMHPRSSFKAFLEEVKWRSLPWEDIEMDAI

SEQ ID NO: 16900 - protein, 392 aa, Blepharandra heteropetala
DLEPVNPADVPVTAAGALKSYKLAARAISRLQSLPSGNISLLCDVLVKEVRDLTGYDRVMVYKFHEDEHGEVISECCRPDLEAYLGLHYPATDIPQASRFLFMKNKVRMICDCLAPAVKVIQDERLPQALSLCGPTLRSPHGCHAQYMANMGTIASLVMSVIINEDNDMMDGDQQHIARKLWGLVVCHHTSPRFVPFPLRYACEFLIQVFGVQINKEVELAAQVREKHILRTQTLLCDMLLSDAPVAIITQSPNVMDLVKCDGAALYYRKKFWLLGVTPTEVQIRDIAEWLLEYHGGNAGLSTDSLMEAGYPGASDLGNAVCGMAAVRITSRDFLFWFRSHTAKEIKWGGAKHHPNDKDDVRKMHPRSSFKAFLEVVKWRSLPWKDVEMDAI

SEQ ID NO: 16901 - protein, 392 aa, Caucanthus auriculatus
DLEPVNPADVPVTAAGALKSYKLAAKAISRLQSLPSGNISLLCDVLVKEVRDLTGYDRVMVYKFHEDEHGEVVSECHRSDLESYLGLHYPATDIPQASRFLFMKNKVRMICDCVAPPVKVIQEERLPQPLSPCGSTLRSPHGCHAQYMTNMGIIASLVMSVTVNEEDDMVDGDQPQMARKLWGLVVCHHTSTRFVPFPLRYACEFLIQVFGVQINKEVELAAQVREKHILQIQTMLCDMLLRDAPVAIITQSPNVMDLVKCDGAALYFKNKTWLLGVTPTEEQIRDIAEWLPEYHSGNTGLSTDSLMEAGYPGASALGDAVCGMAAVSITSRDFLLWFRSHTAKEIKWGGAKHDPDDKDDGRKMHPRSSFKAFLEVVKWRSMPWEDVEMDAI

SEQ ID NO: 16902 - protein, 392 aa, Caucanthus auriculatus
DLEPVNPADVPVTAAGALKSYKLAAKAISRLQSLPSGNISLLCDVLVKEVRDLTGYDRVMVYKFHEDEHGEVVSECHRSDLESYLGLHYPATDIPQASRFLFMKNKVRMICDCVAPPVKVIQEERLPQPLSLCGSTLRSPHGCHAQYMTNMGIIASLVMSVTVNEEDDMVDGDQPQMARKLWGLVVCHHTSTRFVPFPLRYACEFLIQVFGVQINKEVELAAQVREKHILQIQTMLCDMLLRDAPVAIITQSPNVMDLVKCDGAALYFKNKTWLLGVTPTEEQIRDITEWLLEYHSGNTGLSTDSLMEAGYPGASALGDAVCGMAAVSITSRDFLLWFRSHTAKEIKWGGAKHDPDDKDDGRKMHPRSSFKAFLEVVKWRSMPWEDMEMDAI

SEQ ID NO: 16903 - protein, 392 aa, Caucanthus auriculatus
DLEPVNPADVPVTAAGALKSYKLAAKAISRLQSLPSGNISLLCDVLVKEVRDLTGYDRVMVYKFHEDEHGEVVSECHRSDLESYLGLHYPATDIPQASRFLFMKNKVRMICDCVAPPVKVIQEERLPQPLSLCGSTLRSPHGCHAQYMTNMGIIASLVMSVTVNEEDDMVDGDQPQMARKLWGLVVCHHTSTRFVPFPLRYACEFLIQVFGVQINKEVELAAQVREKHILQIQTMLCDMLLRDAPVAIITQSPNVMDLVKCDGAALYFKNKTWLLGVTPTEEQIRDIAEWLLEYHSGNTGLSTDSLMEAGYPGASALGDAVCGMAAVSITSRDFLLWFRSHTAKEIKWGGAKHDPDDKDDGRKMHPRSSFKAFLEVVKWRSMPWEDVEMDAI

SEQ ID NO: 16904 - protein, 392 aa, Diacidia ferruginea
DLEPVNPADVPVTAAGALKSYKLAARAISRLQSLPSGNISLLCDVLVKEVRDLTDYDRVMVYKFHEDEHGEVISECCRPDMEAYLGLHYPATDIPQASRFLFMKNKVRMICDCLATPVKVIQDERLPQPLSLCGSTLRSPHGCHAQYMANMGAIASLVMSVTINEDDDMMDGDRQHRARKLWGLVVCHHTSPRFLPFPLRYACEFLIQVFGVQINKEVELAAQVREKHILRTQTLLCDMLLRDAPVAIITQSPNVMDLVKCNGAALYYKKKFWLVGLTPTEAQIRDIAEWLLEYHNGNTGLSTDSLMEAGYPGASELGDTVCGMAVVKITSRDFLFWFRSHTAKEIKWGGAKHDPDDKDDGRKMHPRSSFKAFLEVVKWRSLPWEDIEMDAI

SEQ ID NO: 16905 - protein, 392 aa, Dinemandra ericoides
DLEPVNPADVPVTAAGALKSYKLAAKAISRLQSLPSGNIPLLCDVLVKEVRDLTGYDRVMVYKFHEDEHGEVVSECRRSDMESYLGLHYPATDIPQASRFLFMKNKVRMICDCLSPPVEVIQDERLPQPLSLCGSTLRSPHGCHAQYMANMGTIASLVMSVTVNEDDDMMDGDQQRMARKLWGLVVCHHTSPRFVPFPLRYACEFLIQVFGVQINKEVDLAAQVREKHILRIQTMLCDMLLRDAPVAIITQSPNVMDLVKCDGAALYYKNKFWLLGVTPTEAQIRDIAEWLLEYHRGNTGLSTDSLMEAGYPGASVLGDAVCGMAAVSITSRDFLFWFRSHTAKEIKWGGAKHDPGDKDDGRKMHPRSSFKAFLEVVKWRSLPWKDVEMDAI

SEQ ID NO: 16906 - protein, 392 aa, Dinemandra ericoides
DLEPVNPADVPVTAAGALKSYKLAAKAISRLQSLPSGNIPLPCDVLVKEVRDLTGYDRVMVYKFHEDEHGEVVSECRRSDMESYLGLHYPATDIPQASRFLFMKNKVRMICDCLSPPVEVIQDERLPQPLSLCGSTLRSPHGLHAQYMANMGTIASLVMSVTVNEDDDMMDGDQQRMARKLWGLVVCHHTSPRFVPFPLRYACEFLIQVFGVQIHKEVDLAAQVREKHILRIQTMLCDMLLRDAPVAIITQSPNVMDLVKCDGAALYYKNKFWLLGVTPTEAQIRDIAEWLLEYHRGNTGLSTDSLMEAGYPGASVLGDAVCGMAAVSITSRDFLFWFRSHTAKEIKWGGAKHDPGDKDDGRKMHPRSSFKAFLEVVKWRSLPWEDVEMDAI

SEQ ID NO: 16907 - protein, 392 aa, Dinemandra ericoides
DLEPVNPADVPVTAAGALKSYKLAAKAISRLQSLPSGNIPLLCDVLVKEVRDLTGYDRVMVYKFHEDEHGEVVSECRRSDMESYLGLHYPATDIPQASRFLFMKNKVRMICDCLSPPVEVIQDERLPQPLSLCGSTLRSPHGCHAQYMANMGTIASLVMSVTVNEDDDMMDGDQQRMARKLWGLVVCHHTSPRFVPFPLRYACEFLIQVFGVQINKEVDLAAQVREKHILRIQTMLCDMLLRDAPVAIITQSPNVMDLVKCDGAALYYKNKFWLLGVTPTEAQIRDIAEWLLEYHRGNTGLSTDSLMEAGYPGASVLGDAVCGMAAVSITSRDFLFWFRSHTAKEIKWGGAKHDPGDKDDGRKMHPRSSFKAFLEVVKWRSLPWKDMEMDAI

SEQ ID NO: 16908 - protein, 392 aa, Dinemandra ericoides
DLEPVNPADVPVTAAGALKSYKLAAKAISRLQSLPSGNIPLLCDVLVKEVRDLTGYDRVMVYKFHEDEHGEVVSECRRSDMESYLGLHYPATDIPQASRFLFMKNKVRMICDCLSPPVEVIQDERLPQPLSLCGSTLRSPHGCHAQYMANMGTIASLVMSVTVNEDDDMMDGDQQRMARKLWGLVVCHHTSPRFVPFPLRNACEFLIQVFGVQINKEVDLAAQVREKHILRIQTMLCDMLLRDAPVAIITQSPNVMDLVKCDGAALYYKNKFWLLGVTPTEAQIRDIAEWLPEYHRGNTGLSTDSLMEAGYPGASVLGDAVCGMAAVSITSRDFLFWFRSHTAKEIKWGGAKHDPGDKDDGRKMHPRSSFKAFLEVVKWRSLPWEDIEMDAI

SEQ ID NO: 16909 - protein, 392 aa, Hiraea fagifolia
DLEPVNPADVPVTAAGALKSYKLAAKAISRLQSLPSGNISLLCDVLVKEVRDLTGYDRVMVYKFHEDEHGEVVSECRRPDLESYLGLHYPATDIPQASRFLFMKNKVRMICDCLAPPVKVIQDKRLPQPLSLCGSTLRSPHGCHAQYMTNMRTIASLVMSVTINEDDDTMDGDQQQMTRKLWGLVVCHHTSPRFVPFPLRYACEFLIQVFGVQINKEVELAAQVREKHILQIQTMLCDMLLRDAPVAIITQSPNVMDLVKCDGAALYFKNKIWLLGVTPKEEQIRDIAEWLLEYHSGNTGLSTDSLMEAGYPGASVLGDAICGMAAASITSRDFLFWFRSHTAKEIKWGGAKHEPGDKDDGRKMHPRSSFKAFLEVVKWGSMPWEDIEMDAI

SEQ ID NO: 16910 - protein, 392 aa, Hiraea fagifolia
DLEPVNPADVPVTAAGALKSYKLAAKAISRLQSLPSGNISLLCDVLVKEVRDLTGYDRVMVYKFHEDEHGEVVSECRRPDLEPYLGLHYPATDIPQASRFLFMKNKVRMICDCLAPPVKVIQDKRLPQPLSLCGSTLRSPHGCHAQYMTNMRTIASLVMSVTINEDDDTMDGDQQQMTRKLWGLGCCHHTSPRFVPFPLRYACEFLIQVFGVQINKEVELAAQVREKHILQIQTMLCDMLLRDAPVAIITQSPNVMDLVKCDGAALYFKNKIWLLGVTPKEEQIRDIAEWLLEYHSGNTGLSTDSLMEAGYPGASVLGDAVCGMAAASITSGDFLFWFRSHTAKEIKWGGAKHEPGDKDDGRKMHPRSSFKAFLEVVKWRSMPWEDVEMDAI

SEQ ID NO: 16911 - protein, 392 aa, Hiraea fagifolia
DLEPVNPADVPVTAVGALKSYKLAAKAISRLQSLPSGNISLLCDVLVKEVRDLTGYDRVMVYKFHEDEHGEVVSECRRPDLESYLGLHYPATDIPQASRFLFMKNKVRMICDCLAPPVKVIQDKRLPQPLSLCGSTLRSPHGCHAQYMTNMRTIASLVMSVTINEDDDTMDGDRQQMTRKLWGLVVCHHASPRFVPFPLRYACEFLIQVFGVQINKEVELAAQVREKHILQIQTMLCDMLLRDAPVAIITQSPNVMDLVKCDGAALYFKNKIWLLGVTPKEEQIRDIAEWLLEYHSGNTGLSTDSLMEAGYPGASVLGDAVCGMAAVSITSRDFLFWFRSHTAKEIKWGGAKHDPGDKDDGRKMHPRSSFKAFLEVVKWRSMPWEDIEMDAI

SEQ ID NO: 16912 - protein, 392 aa, Hiraea fagifolia
DLEPVNPADVPVTAAGALKSYKLAVKAISRLQSLPSGNISLLCDVLVKEVRDLTGYDRVMVYKFHEDEHGEVVSECRRPDLESYLGLHYPATDIPQASRFLFMKNKVRMICDCLAPPVKVIQDKRLPQPLSLCGSTLRSPHGCHAQYMTNMRTIASLVMSVAINEDDDTMDGDQQQMTRKLWGLVVCHHASPRFVPFPLRYACEFLIQVFGVQINKEVELAAQVREKHILQIQTMLCDMLLRDAPVAIITQSPNVMDLVKCDGAALYFKNKIWLLGVTPKEEQIRDIAEWLLEYHSGNTGLSTDSLMEAGYPGASVLGDAVCGMAAVSITSRDFLFWFRSHTAKEIKWGGAKHDPGDKDDGRKMHPRSSFKAFLEVVKWRSMPWEDVEMDAI

SEQ ID NO: 16913 - protein, 392 aa, Janusia californica
DLEPVNPADVPVTAAGALKSYKLASKAISRLQSLPSGNISLLCDVLVKEVRDLTGYDRVMVYKFHEDEHGEVVSECRRSDLESYLGLHYPATDIPQASRFLFMKNKVRMICDCLAPPVKVIQDERLPQPLSLCGSTLRSPHGCHAQYMTNMGTIASLVMSVTVNEGDDTMDGDQQRMTRKLWGLVVCHHTSPQFVPFPLRYACEFLIQVFGVQINKEVELAAQVREKHILQIQTMLCDMLLRDAPVAIITQSPNVMDLVKCDGAALYFKNKTWLLGVTPTEEQIRGIAEWLLKYHSGNTGLSTDSLMEAGYPGASGLGDAVCGMAAVSITSRDFLFWFRSHTAKEIKWGGAKHDPDDKDDLRKMHPRSSFKAFLEVVKWRSMPWEDVEMDAI

SEQ ID NO: 16914 - protein, 392 aa, Janusia californica
DLEPVNPADVPVTAAGALKSYKLASKAISRLQSLPSGNISLLCDVLVKEVRDLTGYDRVMVYKFHEDEHGEVVSECRRSDLESYLGLHYPATDIPQASRFLFMKNKVRMICDCLAPPVKVIQDERLPQPLSLCGSTLRSPHGCHAQYMTNMGTIASLVMSVTVNEDDDTMDGDQQQMTRKLWGLVVCHHTSPQFVPFPLRYACEFLIQVFGVQINKEVELAAQVREKHILQIQTMLCDMLLRDAPVAIITQSPNVMDLVKCDGAALYFKNKTWLLGVTPTEEQIRGIAEWLLKYHSGNTGLSTDSLMEAGYPGASGLGDAVCGMAAVSITSRDFLFWFRSHTAKEIKWGGAKHDPDDKDDLRKMHPRSSFKAFLEVVKWRSMPWEDVEMDAI

SEQ ID NO: 16915 - protein, 392 aa, Janusia californica
DLEPVNLADVPVTAAGALKSYKLASKAISRLQSLPSGNISLLCDVLVKEVRDLTGYDRVMVYKFHEDEHGEVVFECRRSDLESYLGLHYPATDIPQASRFLFMKNKVRMICDCLAPPVKVIQDERLPQPLSLCGSTLRSPHGCHAQYMTNMGTIASLVMSVTVNEDDDTMDGDQQQMTRKLWGLVVCHHTSPQFVPFPLRYACEFLIQVFGVQINKEVELAAQVREKHILQIQTMLCDMLLRDAPVAIITQSPNVMDLVKCDGAALYFKNKTWLLGVTPTEEQIRGIAEWLLKYHSGNTGLSTDSLMEAGYPGASGLGDAVCGMAAVSITSRDFLFWFRSHTAKEIKWGGAKHDPDDKDDLRKMHPRSSFKAFLEVVKWRKMPWEDIEMDAI

SEQ ID NO: 16916 - protein, 392 aa, Mascagnia chasei
DLEPVNPADVPVTAAGALKSYKLASKAISRLQSLPSGNISLLCDVLVKEVRDLTGYDRVMVYKFHEDEHGEVVSECRRSDLESYLGLHYPATDIPQASRFLFMKNKVRMICDCLAPPVEVIQDERLAQPLSLCGSTLRSPHGCHAQYMTNMGTIASLVMAVTINEDDDMMDGDQQQMTRKLWGLVVCHHTSPRFVPFPLRYACEFLIQVFGVQINKEVELAAQVREKHILQIQTMLCDMLLRDAPVAIIMQSPNVMDLVKCDGAALYFKNKTWLLGVTPTEEQIRDIAEWLLEYHSGNTGLSTDSLMEAGYPGASALGDAVCGMAAVSITSRDFLFWFRSHTAKEIKWGGAKHDPDVKDDGRKMHPRSSFKAFLEVVKWRKMPWENIEMDAI

SEQ ID NO: 16917 - protein, 392 aa, Peixotoa glabra
DLEPVNPSDVPVTAAGALKSYKLAAKAISRLQSLPSGNISLLCDVLVKEVRDLTGYDRVMVYKFHEDEHGEVVSECRRSDLESYLGLHYPATDIPQASRFLFMKNKVRMICDCLAPPVQVIQDERLPQPLSLCGSTLRSPHGCHAQYMTNMGTIASLVKSVTVNEDDDTMDGDQQQMTRKLWGLVVCHHTSPRFVPFPLRYACEFLIQVFGVQINKEVELAAQVREKHILQIQTMLCDMLLRDAPVAIITQSPNVMDLVKCDGAALYFKNKTWLLGVTPTEEQIRDIAEWLLKYHSGNTGLSTDSLMEAGYPGASTLGDAVCGMAAVSITSRDFLFWFRSHTAKEIKWGGAKHDPDDKDDLRKMHPRSSFKAFLEVVKWRSMPWEDVEMDAI

SEQ ID NO: 16918 - protein, 392 aa, Tetrapterys discolor
DLEPVNPADVPVTAAGALKSYKLAAKAISRLQSLPSGNISLLCDVLVKEVRDLTGYDRVMVYKFHEDEHGEVVSECRRSDLESYLGLHYPATDIPQASRFLFMKNKVRMICDCLAPPVKVIQDERLPQPLSLCGSTLRSPHGCHAQYMTNMGTIASLVMSVTVNDDDDMMDGDQQQMTRKLWGLVVCHHTSPRFVPFPLRYACEFLIQVFGVQINKEVELTAQVREKHILQIQTMLCDMLLRDAPVAIITQSPNVMDLVKCDGAALYFKKKTWLLGVTPMEEQVRDIAEWLLEYHSGSTGLSTDSLMEAGYPGASDLGDAVCGMAAVSITSRDFLFWFRSHTAKEIKWGGAKHDPDDKDDGRKMHPRSSFKAFLEVVKWRSVPWEDIEMDAI

SEQ ID NO: 16919 - protein, 392 aa, Tristellateia madagascariensis
DLEPVNPADVPVTAAGALKSYKLAAKAISRLQSLPSGNISLLCDVLVKEVRDLTGYDRVMVYKFHEDEHGEVVSECRRSDLESYLGLHYPATDIPQASRFLFMKNKVRMICDCLAPPVKVIQDERLPQPLSLCGSTLRSPHGCHAQYMANMGTIASLVMSVTINEDDDTMDGDQQQMARKLWGLVVCHHTSPRFVPFPLRYACEFLIQVFGVQINKELELAAQVREKHILRIQTMLCDMLLRDAPVGIITQSPNVMDLVKCDGAALFYKNKFWLLGITPTEAQIRDIAEWLLEYHSGNTGLSTDSLMEAGYPGASVLGDAVCGMASVSITSRDFLFWFRSHTAKEIKWGGAKHDPDDKDDGRKMHPRSSFKAFLEVVKWRSLPWKDMEMDAI

SEQ ID NO: 16920 - protein, 392 aa, Tristellateia madagascariensis
DLEPVNPADVPLTAAGALKSYKLAAKAISRLQSLPSGNISLLCDVLVKEVRDLTGYDRVMVYKFHEDEHGEVVSECRRSDLESYLGLHYPATDIPQASRFLFMKNKVRMICDCLAPPVKVIQDERLPQPLSLCGSTLRSPHGCHAQYMANMGTIASLVMSVTINEDDDTMDGDQQQMARKLWGLIVCHHTSPRFVPFPLRYACEFLIQVFGVQINKELELAAQVREKHILRIQTMLCDMLLRDAPVGIITQSPNVMDLVKCDGAALFYKNKFWLLGITPTEAQIRDIAEWLLEYHSGNTGLSTDSLMEAGYPGASVLGDAVCGMASVSITSRDFLFWFRSHTAKEIKWGGAKHDPDDKDDGRKMHPRSSFKAFLEVVKWRSLPWEDVEMDAI

SEQ ID NO: 16921 - protein, 392 aa, Tristellateia madagascariensis
DLEPVNPADVPLTAAGALKSYKLAAKAISRLQSLPSGNISLLCDVLVKEVRDLTGYDRVMVYKFHEDEHGEVVSECRRSDLESYLGLHYPATDIPQASRFLFMKNKVRMICDCLAPPVKVIQDERLPQPLSLCGSTLRSPHGCHAQYMANMGTIASLVMSVTINEDDDTMDGDQQQMARKLWGLVVCHHTSPRFVPFPLRYACEFLIQVFGVQITKELELAAQVREKHILRIQTMLCDMLLRDAPVGIITQSPNVMDLVKCDGAALFYKNKFWLLGITPTEAQIRDIAEWLLEYHSGNTGLSTDSLMEAGYPGASVLGDAVCGMASVSITSRDFLFWFRSHTAKEIKWGGAKRDPDDKDDGRKMHPRSSFKAFLEVVKWRSLPWEDVEMDAI

SEQ ID NO: 16922 - protein, 391 aa, Androstachys johnsonii
DLEPVNPADVPVTAAGALKSYKLAAKAISRLQSLPSGNISLLCDVLVKEVSDLTGYDRVMVYKFHEDEHGEVVAECRRPDLEPYLGLHYPATDIPQASRFLFMKNKVRMICDCLAPPVEVVQDGKLSQPLGLCGSTLRSPHGCHSQYMRNMGTIASLVMSVTINENDDEMEGDQQKGRKLWGLVVCHHTSPRFVPFPLRYACEFLIQVFGVQINKEVELAAQMREKHILRTQTLLCDMLLRNAPVAIITQSPNVMDLVKCDGAALYYRKKFWLLGITPTEAQIRDIAEWLLEYHSGTTGLSTDSLMEAGYPGASILGDAVCGMAAVRITSKDFLFWFRSHTAKEIKWGGAKHDPNDKEDGRKMHPRSSFKAFLEVVKRRSLPWEDMEMDAI

SEQ ID NO: 16923 - protein, 392 aa, Blepharandra heteropetala
DLEPVNPADVPVTAAGALKSYKLAARAISRLQSLPSGNISLLCDVLVKEVRDLTGYDRVMVYKFHEDEHGEVISECCRPDLEAYLGLHYPATDIPQASRFLFMKNKVRMICDCLAPAVKVIQDERLPQALSLCGSTLRSPHGCHAQYMANMGTIASLVMSVIINEDNDMMDGDQQHIARKLWGLVVCHHTSPRFVPFPLRYACEFLIQVFGVQINKEVELAAQVREKHILRTQTLLCDMLLRDAPVAIITQSPNVMDLVKCDGAALYYRKKFWLLGVTPTEVQIRDTAEWLLEYHGGNAGLSTDSLMEAGYPGASDLGNAVCGMAAVRITSRDFLFWFRSHTAKEIKWGGAKHHPNDKDDVRKMHPRSSFKAFLEVVKWRSLPWEDIEMDAI

SEQ ID NO: 16924 - protein, 392 aa, Lophanthera lactescens
DLEPVNPADVPVTAAGALKSYKLAARAISRLQSLPSGNISLPSDVLVKEVRDLTGYDRVMVYKFHEDEHGEVVSECCRPDLEAYLGLHYPATDIPQASRFLFMKNKVRMICDCLAPPVKVIQDERLPQPLSLCGSTLRSPHGCHAQYMANMGSIASLVMSVTVNEDDDMVDGDQQQMARKLWGLVVCHHTSPRFVPFPLRYACEFLIQVFGVQINKKVELAAQVREKHILRTQTLLCDMLLRDAPVAIVIQSPNVMDLVKCDGAALYYRKKFWLLGVTPTEAQIRDIAEWLLEYHSGNTGLSTDSLMEAGYPGTSVLGNAVCGMAAVKITSRDFLFWFRSHTAKEIKWGGAKHDPGDKDDIRKMHPRSSFKAFLEVVKWRSLPWEDIEMDAI

SEQ ID NO: 16925 - protein, 380 aa, Diacidia ferruginea
ETPAGALKSYKLAARAISRLQSLPSGIISLLCDVLVKEVRDLTDYDRVMVYKFHEDEHGEVISECCRPDMEAYLGLHYPATDIPQASRFLFMKNKVRMICDCLATPVKVIQDERLPQPLSLCGSTLRSPHGCHAQYMANMGAIASLVMSVTINEDDDVMDGDRQHRARKLWGLVVCHHTSPRFLPFPLRYACEFLIQVFGVQINKEVELAAQVREKHILRTQTLLCDMLLRDAPVAIITQSPNVMDLVKCNGAALYYKKKFWLVGLTPTEAQIRDIAEWLLEYHNGNTGLSTDSLMEAGYPGASELGDTVCGMAVVKITSRDFLFWFRSHTAKEIKWGGAKHDPDDKDDGRKMHPRSSFKAFLEVVKWRSLPWEDVEMDA

SEQ ID NO: 16926 - protein, 392 aa, Byrsonima crassifolia
DLEPVNPADVPVTAAGALKSYKLAARAISRLQSLPSGNISLLCDVLVKEVRDLTGYDRVMVYKFHEDEHGEVISECRRPDLEAYLGLHYPATDIPQASRFLFMKNKVRMICDCLAPPVKVIQDERLLQPLSLCGSTLRSPHGCHAQYMANMGTIASLVMSVTINEDDDMMDMDQQHMAGKLWGLVVCHHTSPRFVPFPLRYACEFLIQVFGVQINKEVELAAQVREKHILRTQTLLCDMLLRDAPVAIITQSPNVMDLVKCNGAALYYRKKFWLLGVTPTEAQIRDIAEWLLEYHSGNTGLSTDSLMEAGYPGASDLGHAVCGMAAVKITSRDFLFWFRSHTAKEIKWGGAKHDPDDKDDGRKMHPRSSFKAFLEVVKWRSLPWEDMEMDAI

SEQ ID NO: 16927 - protein, 392 aa, Coleostachys genipifolia
DLEPVNPADVPVTAAGALKSYKLAARAISRLQSLPSGNISLLCDVLVKEVRDLTGYDRVMVYKFHEDEHGEVVSECRRPDLEAYLGLHYPATDIPQASRFLFMKNKVRMICDCLAPPVKVIQDKRLVQPLSLCGSTLRSPHGCHAQYMANMGAIASLVMSVTINEGDDTMDGDQQQMARKLWGLVVCHHTSPRFVPFPLRYACEFLIQVFGVQINKEVELAAQVREKHILRTQTLLCDMLLRDAPVAIITQSPNVMDLVKCDGAALYYRKKFWLLGVTPTEAQIKEIAQWLIEYHSGDTGLSTDSLMEAGYPSASVLGDAVCGMAAVKITSRDFLFWFRSHTAKEIKWGGAKHDPDDKDDGRKMHPRSSFKAFLEVVKWRSLPWEDVEMDAI

SEQ ID NO: 16928 - protein, 392 aa, Acmanthera latifolia
DLEPVNPADVPVTAAGALKSYKLAARAISRLQSLPSGNISLLCDVLVKEVRDLTGYDRVMVYKFHEDEHGEVVSECRRPDLEAYLGLHYPATDIPQASRFLFMKNKVRMICDCLAPPVKVFQDKRLAQPLGLCGSTLRSPHGCHAQYMANMGAIASLVMSVTINEGDDMIDGDQQQMARKLWGLVVCHHTSPRFVPFPLRYACEFLIQVFGVQINKEVELAAQVREKHILRTQTLLCDMLLRDAPVAIVTQSPNVMDLVKCDGAALYYRKKFWLLGVTPTEVQIKEIAEWLIEYHSGNTGLSTDSLMEAGYPGASVLGDAVCGMAAVKITSKDFLFWFRSHTAKEIKWGGAKHDPDDKDDGRKMHPRSSFKAFLEVVKWRSLPWEDMEMDAI

SEQ ID NO: 16929 - protein, 392 aa, Pterandra arborea
DLEPVNPADVPVTAAGALKSYKLAARAISRLQSLPSGDISLLCDVLVKEVRDLTGYDRVMVYKFHEDEHGEVVSECRRPDLEAYFGLHYPATDIPQASRFLFMKNKVRMICDCLAPPVQVIQDKRLAQPLSLCGSTLRSPHGCHAQYMANMGAIASLVISVTINEGDDMMDGDQQQMARKLWGLVVCHHTSPRFVPFPLRYACEFLIQVFGVQITKEVELAAQVREKHILRTQTLLCDMLLRDAPVAIITQSPNVMDLVKCDGAALYYRKKFWLLGVTPTEAQIKEIAEWLLEYHSGNMGLSTDSLMEAGYPGASVLGNAVCGMAAVKITSRDLLFWFRSHTAKEIKWGGAKHDPDDKDDGRKMHPRSSFKAFLEVVKWRSLPWEDVEMDAI

SEQ ID NO: 16930 - protein, 392 aa, Galphimia gracilis
DLEPVNPADVPVTAAGALKSYKLAARAISRLQSLPSGNISLLCDVLVKEVRDLTGYDRVMVYRFHDDEHGEVVSECCGPDLEAYLGLHYPATDIPQASRFLFMKNKVRMICDCLAPPVKVLQDERLPQPLSLCGSTLRSPHGCHAQYMANMGTMASLVMSVTINEDDNMLDGDQQHMARKLWGLVVCHHTSPRFVPFPLRYACEFLIQVFGVQINKEVELAAQMTEEHILRTQTLLCDMLLRDAPVAIITQSPNVMDLVKCDGAALYYRKKFWLLGVTPTEAQIRGIAEWLLEYHGGNTGLSTDSLMEAGYPGASVLGDAVCGMAAVKITSRDFLFWFRSNTAKEIKWSGAKHDPGDKDDIKKMHPRSSFKAFLEVVKWRSLPWEDVEMDAI

SEQ ID NO: 16931 - protein, 392 aa, Acridocarpus natalitius
DLEPVNPADVPVTAAGALKSYKLAAKAISRLQSLPSGNISLLCDVLVKEVRDLTGYDRVMVYKFHEDEHGEVVSECRRSDLEAYLGLHYPATDIPQASRFLFMKNKVRMICDCLAPPIKVIQDERLPQPLSLGGSTLRSPHGCHAQYMANMGTIASLVMSVTINEDDDMMDGDQQQMARKLWGLVVCHHTSPRFVPFPLRYACEFLIQVFGVQINKEVELAAQVREKHILQIQTLLCDMLLRDAPVAIITQSPNVMDLVKCDGAALYYKKKFWLLGITPTEAQIRDIVEWLLEFHSGNTGLSTDSLMEAGYPGASVLGDAVCGMAAVSITSKDFLFWFRSHTAKEIKWGGAKHDPDVKDDGRKMHPRSSFKAFLEVVKWRSLPWEDVEMDAI

SEQ ID NO: 16932 - protein, 392 aa, Acridocarpus macrocalyx
DLEPVNPADVPVTAAGALKSYKLAAKAISRLQSLPSGNISLLCDVLVKEVRDLTGYDRVMVYKFHEDEHGEVVSECRRSDLEAYLGLHYPATDIPQASRFLFMKNKVRMICDCLAPPVKVIQDERLPQPLSLCGSTLRSPHGCHAQYMANMGTIASLVMSVTVNEDDDMMDGDQQQMARKLWGLVVCHHTSPRFVPFPLRYACEFLIQVFGVQINKEVELAAQVREKHILQIQTLLCDMLLRDAPVAIITQSPNVMDLVKCDGAALYYKKKFWLLGITPTEAQIRDIVEWLLEYHSGNTGLSTDSLMEAGYPGVSVLGDAVCGMAAVSITSKDFLFWFRSHTAKEIKWGGAKHDPDDKDDGRKMHPRSSFKAFLEVVKWRSLPWEDMEMDAI

SEQ ID NO: 16933 - protein, 392 aa, Triaspis hypericoides
DLEPVNPADVPVTAAGALKSYKLAAKAISRLQSLPSGNISLLCDVLVKEVRDLTGYDRVMVYKFHEDEHGEVVSECRRSDLESYLGLHYPATDIPQASRFLFMKNKVRMICDCVAPPVKVIQDKRLPQPLSLCGSTLRSPHGCHAQYMTNMGIIASLVMSVTVNEEDDMVDGDQLQMARKLWGLVVCHHTSTRFVPFPLRYACEFLIQVFGVQINKEVELAAQVREKHILQIQTMLCDMLLRDAPVAIITQSPNVMDLVKCDGAALYFKNKTWLLGVTPTEEQIRDIAEWLLEYHSGNTGLSTDSLMEAGYPGASALGDAVCGMAAVSITSTDFLLWFRSHTAKEIKWGGAKHDPDDKDDGRKMHPRSSFKAFLEVVKWRSMPWEDVEMDAI

SEQ ID NO: 16934 - protein, 392 aa, Triopterys rigida
DLEPVNPADVPVTAAGALKSYKLAAKAISRLQSLPSGNISLLCDVLVKEVRDLTGYDRVMVYKFHEDEHGEVVSESRRSDLESYLGLHYPATDIPQASRFLFMKNKVRMICDCLAPPVKVIQDERLSQPLSLCGSTLRSPHGCHAQHMTNMGTIASLVMSVTVNEDDDMVDGDQPQMTRKLWGLVVCHHTSPRFVPFPLRYACEFLIQVFGLQINKEVELAAQVREKHILQIQTMLCDMLLRDAPVAIITQSPNVMDLVKCDGAALYFKNKTWLLGVTPTEEQIRDIAEWLLEYHSGNTGLSTDSLMEAGYPGASAVGDAVCGMAAVSITSRDFLFWFRSHTAKEIKWGGAKHDPDDKDDGRKMHPRSSFKAFLEVVKWRSMPWEDVEMDAI

SEQ ID NO: 16935 - protein, 392 aa, Janusia linearifolia
DLEPVNPADVPVTAAGALKSYKLAAKAISRLQSLPSGNISLLCDVLVREVRDLTGYDRVMVYKFHEDEHGEVVSECRRSDLESYLGLHYPATDIPQASRFLFMKNKVRMICDCLAPPVKVIQHERLPQPLSLCGSTLRSPHGCHAQYMTNMATIASLVMSVTVNEDDETMDGDQQQMTRKLWGLVVCHHTSPRFVPFPLRYACEFLIQVFGVQINKEVELAAQVREKHILQIQTMLCDMLLRDAPVAIITQSPNVMDLVKCDGAALYFKNKTWLLGVTPTEEQIRGIAEWLLEYHSGNTGLSTDSLMEAGYPGASGLGDAVCGMAAVSITSRDFLFWFRSHTAKEIKWGGAKHDPDDKDDLRKMHPRSSFKAFLEVVKWRSMPWEDMEMDAI

SEQ ID NO: 16936 - protein, 392 aa, Janusia anisandra
DLEPVNPADVPVTAAGALKSYKLAAKAISRLQSLPSGNISLLCDVLVKEVRDLTGYDRVMVYKFHEDEHGEVVSECRRSDLESYLGLHYPATDIPQASRFLFMKNKVRMICDCLAPPVKVIQDERLPQPLSLCGSTLRSPHGCHAQYMTNMGTIASLVMSVTVNEDDDTMDGDQQQMARKLWGLVVCHHSSPQFVPFPLRYACEFLIQVFGVQINKEVELAAQVREKHILQIQTMLCDMLLRDAPVAIITQSPNVMDLVKCDGAALYFKNKTWFLGVTPTEEQIRGIAEWLLKYHSGNTGLSTDSLMEAGYPGASGLGDAVCGMAAVSITSRDFLFWFRSHTAKEIKWGGAKHDPDDKDDLRKMHPRSSFKAFLEVVKWRSVPWEDVEMDAI

SEQ ID NO: 16937 - protein, 392 aa, Janusia mediterranea
DLEPVNPADVPVTAAGALKSYKLAAKAISRLQSLPSGNISLLCDVLVKEVRDLTGYDRVMVYKFHEDEHGEVVSECRRSDLESYLGLHYPATDIPQASRFLFMKNKVRMICDCLAPSVKVIQDERLPQPLSLCGSTLRSPHGCHAQYMTNMGTIASLVMSVTVNEDDDTMDGDQQQMARKLWGLVVCHHTSPQFVPFPLRYACEFLIQVFGVQITKKVELAAQVREKHILQIQTMLCDMLLRDAPVAIITQSPNVMDLVKCDGAALYFKSKTWFLGVTPTEEQIRDIAEWLLKYHSGNTGLSTDSLMEAGYPGASGLGDAVCGMAAVSITSRDFLFWFRSHTAKEIKWGGAKHDPDDKDDLRKMHPRSSFKAFLEVVKWRSMPWEDMEMDAI

SEQ ID NO: 16938 - protein, 392 aa, Janusia linearis
DLEPVNPADVPVTAAGALKSYKLAAKAISRLQSLPSGNISLLCDVLVKEVRDLTGYDRVMVYKFHEDEHGEVVSECRRSDLESHLGLHYPATDIPQASRFLFMKNKVRMICDCLAPPVKVIQDERLPQPLSLCGSTLRSPHGCHAQYMTNMGTIASLVMSVTVNEDDDTMDGDQQQMTRKLWGLVVCHHTSPQFVPFPLRYACEFLIQVFGVQINKEVELAAQVREKHILQIQTMLCDMLLRDAPVAIITQSPNVMDLVKCDGAALYFKNKTWLLGVTPTEEQIRGIAEWLLKYHSGNTGLSTDSLMEAGYPGASGLGDAVCGMAAVSITSRDFLFWFRSHTAKEIKWGGAKHDPDDKDDLRKMHPRSSFKAFLEVVKWRSMPWEDMEMDAI

SEQ ID NO: 16939 - protein, 392 aa, Janusia californica
DLEPVNPADVPVTAAGALKSYKLASKAISRLQSLPSGNISLLCDVLVKEVRDLTGYDRVMVYKFHEDEHGEVVSECRRSDLESYLGLHYPATDIPQASRFLFMKNKVRMICDCLAPPVKVIQDERLPQPLSLCGSTLRSPHGCHAQYMTNMGTIASLVMSVTVNEDDDTMDGDQQQMTRKLWGLVVCHHTSPQSVPFPLRYACEFLIQVFGVQINKEVELAAQVREKHILQIQTMLCDMLLRDAPVAIITQSPNVMDLVKCDGAALYFKNKTWLLGVTPTEEQIRGIAEWLLKYHSGNTGLSTDSLMEAGYPGASGLGDAVCGMAAVSITSRDFLFWFRSHTAKEIKWGGAKHDPDDKDDLRKMHPRSSFKAFLEVVKWRSMPWEDIEMDAI

SEQ ID NO: 16940 - protein, 392 aa, Gaudichaudia mcvaughii
DLEPVNPADVPVTAAGALKSYKLAAKAISRLQSLPSGNISLLCDVLVKEVRDLTGYDRVMMYKFHEDEHGEVVSECCRSDLESYLGLNYPATDIPQASRFLFMKNKVRITCDCLAPSVEVIQDERLTQPLSLCGSTLRSPHGCHAQYMTNMGAIASLVMSVTVNEDDDTMDGDQQHMTRKLWGLVVCHHTSPRFVPFPLRYACEFLIQVFGVQVNKEVELAAQVRERHSLQIQTMLCDMLLREAPVAIITQSPNVMDLVKCDGAALYFKNKTWFLGVTPTEEQIRGIAEWPLKYHSGNTGLSTDGLMEAGYPGASGLGDAVCGMAAVSITSRDFLFWFRSHTAKEIKWGGAKHDPDDKDDLRKMHPRSSFKAFLEVVKWRSTPWEDIEMDAI

SEQ ID NO: 16941 - protein, 392 aa, Aspicarpa hirtella
DLEPVNPADVPVTAAGALKSYKLAAKAISRLQSLPSGNISLLCDVLVKEVRDLTGYDRVMVYKFHEDEHGEVVLECRRSDLESYLGLHYPATDIPQASRFLFMKNKVRMICDCLAPPVKVIQDKRLPHPLSLCGSTLRSPHGCHAQYMTNMGTIASLVMTVTVNEDDDMMDGDQQHMTKKLWGLVVCHHTSLRFVPFPLRYACEFFIQVFGVQINKEVELAAQVREKHILQIQTMLCDLLLRDAPVTIITQSPNVMDLVKCDGAALYFKNTTWLLGVTPTEEQIRGIAEWLLKYHSGNTGLSTDSLMEAGYPGASGLGDAVCGMAAVSITSRDFLFWFRSHTAKEIKWGGAKHNPDDKDDLRKMHPRSSFKAFLEVVKWRSMPWEDIEMDAI

SEQ ID NO: 16942 - protein, 392 aa, Gaudichaudia albida
DLEPVNPADVPVTAAGALKSYKLAAKAISRLQSLPSGNISLLCDVLVKEVRDLTGYDRVMVYKFHEDEHGEVVSECRRSDLESYLGLHYPATDIPQASRFLFMKNKVRMIYDCLAPPVKVIQDKRLPQPLSLCGSTLRSPHGCHAQYMTNMGTIASLVMSVTVNEDDDTMDGDQQHMTKKLWGLVVCHHTSPRFVPFPLRYACEFLIQVFGVQINKEVELAAQVREKHILQIQTMLCDMLLRDAPVTIITQSPNVMDLVNCDGAALYFKNKTWLLGVTPTEEQIRGIAEWLLKYHSGNTGLSTDSLMEAGYPGASGLGDAVCGMAAVSITSRDFLFWFRSHTAKEIKWGGAKHDPDDKDDLRKMHPRSSFKAFLEVVKWRSMPWEDIEMDAI

SEQ ID NO: 16943 - protein, 392 aa, Gallardoa fischeri
DLEPVNPADVPVTAAGALKSYKLAAKAISRLQSLPSGNISLLCDVLVKEVRDLTGYDRVMVYKFHEDEHGEVVSECRRSDLESYLGLHYPATDIPQASRFLFMKNKVRMICDCLAPPVKVIQDEQLPQPLSLCGSTLRSPHGCHAQYMTNMGTIASLGMSVTVNEDDDMMDGDQHQMTRKLWGLVVCHHTSPRFVPFPLRYACEFLIQVCGVQINKEVELAAQVRKKHILQIQTMLCDMLLRDAPVAIITQSPNVMDLVKCDGAALYFKNKIWLLGVTPTEEQIRDIAEWLLKYHSGNTGLSTDSLMEAGYPGASALGDAVCGMAAVSITSRDLLFWFRSHTAKEIKWGGAKHDPDDKDDLRKMHPRSSFKAFLEVVKWRSKPWKDVEMDAI

SEQ ID NO: 16944 - protein, 392 aa, Peixotoa glabra
DLEPVNPADVPVTAAGALKSYKLAAKAISRLQSLPSGNISLLCDVLVKEVRDLTGYDRVMVYKFHEDEHGEVVSECRRSDLESYLGLHYPATDIPQASRFLFMKNKVRMICDCLAPPVQVIQDERLPQPLSLCGSTLRSPHGCHAQYMTNMGTIASLVMSVTVNEDDDTMDGDQQQMTRKLWGLVVCHHTSPRFVPFPLRYACEFLIQVFGVQITKEVELAAQVRKNHTLQIQTMLCDMLLRDAPVAIITQSPNVMDLVKCDGAALYFKNKTWLLGVTPTEEQIRDIAEWLLKYHSGNTGLSTDSLMEAGYPGASTLGDAVCGMAAVSITSRDFLFWFRSHTAKEIKWGGAKHDPDDKDDLRKMHPRSSFKAFLEVVKWRSMPWEDVEMDAI

SEQ ID NO: 16945 - protein, 392 aa, Ryssopterys timorensis
DLEPVNPADVPVTAAGALKSYKLAAKAISRLQSLPSGNISLLCDVLVKEVRDLTGYDRVMVYKFHEDEHGEVVSECRRSDLESYLGLHYPATDIPQASRFLFMKNKVRMICDCLAPPVKVLQDERLPQPLSLCGSTLRSPHGCHAQYMTNMGTIASLVMSVTINEDDDMMDGDQQQMTRKLWGLVVCHHNSPQFVPFPLRYACEFLIQVFGVQINKEVELAAQVREKHILQIQTMLCDMLLRDAPVAIITQSPNVMDLVKCDGAALYFKNKTWLLGVTPTEEQIRDIAQWLLEYHSGNTGLSTGSLMEAGYSGASALGDAVCGMAAVSITLRDFLFWFRSHTAKEVKWGGAKHDPDDKDDLRKMHPRSSFKAFLEVVKWRSMPWEDIEMDAI

SEQ ID NO: 16946 - protein, 392 aa, Sphedamnocarpus sp. Davis 03-01
DLEPVNPADVPVTAAGALKSYKLAAKAISRLQSLPSGNISVLCDVLVKEVRDLTGYDRVMVYKFHEDEHGEVVSECRRSDLESYLGLHYPATDIPQASRFLFIKNKVRMICDCLAPPVKVIQDERLPQPLSLCGSTLRSPHGCHSQYMTNMGTIASLVMPVTINEDDDTMDGDQQQMTRKLWGLVVCHHTSPRFVPFPLRYACEFLIQVFGVQINKEVELAAQVREKHILQIQTMLCDMLLRDAPVAIITQSPNEMDLAKSDGTDLYYKNKTWLLGVTPTEEQIRDIAEWLLQYHSGNTGLSTDSLMEAGYPGASALGDSVCGMAAVSITSRDFLFWFRSHTAKEIKWGGAKHDPDDKDDLRKMHPRSSFKAFLEVVKWRSMPWEDVEMDAI

SEQ ID NO: 16947 - protein, 392 aa, Tristellateia madagascariensis
DLEPVNPADVPVTAAGALKSYKLAAKAISRLQSLPSGNISLLCDVLVKEVRDLTGYDRVMVYKFHEDEHGEVVSECRRSDLESYLGLHYPATDIPQASRFLFMKNKVRMICDCLAPPVKVIQDERLPQPLSLCGSTLRSPHGCHAQYMANMGTIASLVMSVTINEDDDTMDGDQQQMARKLWGLVVCHHTSPRFVPFPLRYACEFLIQVFGVQINKELELAAQVREKHILRIQTMLCDMLLRDAPVGIITQSPNVMDLVKCDGAALFYKNKFWLLGITPTEAQIRDIAEWLLEYHSGNTGLSTDSLMEAGYPGASVLGDAVCGMASVSITSRDFLFWFRSHTAKEIKWGGAKHDPDDKDDGRKMHPRSSFKAFLEVVKWRSLPWEDVEMDAI

SEQ ID NO: 16948 - protein, 392 aa, Tristellateia africana
DLEPVNPADVPVTAAGALKSYKLAAKAISRLQSLPSGNISLLCDVLVKEVRDLTGYDRVMVYKFHEDEHGEVVSECRRSDLESYLGLHYPATDIPQASRFLFMKNKVRMICDCLAPQVKVIQDERLPQPLSLCGSTLRSPHGCHAQYMANMGTIASLVMSVTINEDDDTMDGDQQQMARKLWGLVVCHHTSPQFVPFPLRYACEFLIQVFGVQINKEIELAAQVREKHILRIQTMLCDMLLRDAPVGIITQSPNVMDLVKCDGAALFYKNKFWLLGITPTEAQIRDIAEWLLEYHSGNTGLSTDSLMEAGYPGASVLGDTVCGMASVSITSRDFLFWFRSHTAKEIKWGGAKHDPDDKDDGRKMHPRSSFKVFLEVVKWRSLPWEDMEMDAI

SEQ ID NO: 16949 - protein, 392 aa, Heladena multiflora
DLEPVNPFDVPVTAAGALKSYKLAAKAISRLQSLPSGNISLLCDVLVKEVRDLTGYDRVMVYKFHEDEHGEVVSECRRSDLESYLGLHYPATDIPQASRFLFMKNKVRMICDCLAPPVKVIQDERLPQPLSLCGSTLRSPHGCHAQYMANMGTIASLVMSVTINEDDDTMDGDQQQMARKLWGLVVCHHTSTQFVPFPLRYACEFLIQVFGVQINKEVELAAQAREKHILQIQTTLCDMLLRDAPVAIITQSPNVMDLVKCDGAALYYKNKFRLLGVTPTEAQIRDIAEWLLEYHSGNTGLSTDSLMEAGYPGASVLGDAVCGMAAVSITSRDFLFWFRSHTAKEIKWGGAKHDPDDKDDGRKMHPRSSFKAFLEVVKWRSLPWEDMEMDAI

SEQ ID NO: 16950 - protein, 384 aa, Bunchosia armeniaca
DVPVTAAGALKSYKLAAKAISRLQSLPSGNISLQCDVLVKEVRDLIGYDRVMVYKFHDDEHGEVVSECCRSDLESYLGLHYPATDIPQASRFLFMKNKVRMICDCLAPPVKVIQDERLPQPLSLCGSTLRSPHGCHAQYMENMGTIASLVMSVTINEDDDMMDGDQQQMARTLWGLVVCHHTSPRFVPFPLRYACEFLIQVFGVQINKEVELAAQVREKQILRIQTMLCDMLLRDAPVAIITQSPNVMDLVKCDGAALYYKNKFWLLGVTPTEAQIRDIAEWLLEYHSGNTGLSTDSLMEAGYPGASVLGDAVCGMAAVSITSRDFLFWFRSHTAKEIKWGGAKHDPDDKDDGRKMHPRSSFKAFLEVVKWRSLPWEDIEMDAI

SEQ ID NO: 16951 - protein, 392 aa, Thryallis longifolia
DLEPVNPADVPVTAAGALKSYKLAAKAISRLQSLPSGNISLLCDVIVKEVRDLTGYDRVMVYKFHEDEHGEVVSECRRSDLESYLGLHYPATDIPQASRFLFMKNKVRMICDCLAPPVKVIQDERLPQPLSLCGSTLRSPHGCHAQYMANMGTIASLVMSVTINEDDDMMDGDQQQMARKLWGLVVCHHTSPRFVPFPLRYACEFLIQVFGVQINKEVEFAAQVSEKHILRIQTMLCDMLLRDAPVAIITQSPSVMDLVKCDGAALYYKNRFWLLGVTPTEAQIRDIAEWLLEYHSGNTGLSTDSLLEAGYPGASVLGDAVCGMAAVSITSRDFLFWFRSHTAKEIKWGGAKHDPDDKDDGRKMHPRSSFKAFLEVVKWRSLPWEDVEMDAI

SEQ ID NO: 16952 - protein, 390 aa, Echinopterys eglandulosa
DLEPVNPADVPVTAAGSLKSYKLAAKAISRLQSLPSGNISLLCDVLVKEVRELTGYDRVMVYKFLEDEHGDVVSECRRSDLESYLGLHYPATDIPQASRFLFMKNKVRMICDCLAPPVKVIQDERLPQPLSLCGSALRSPHGCHAQYMMGTIASLVMSVTINEDDDTMDGDQQQMARKLWGLVVCHHTSPRFVPFPLRYACEFLIQVFGVQINKEVGLAGQVREKHILRIQTMLCDMLLRDAPVAIITQSPNVMDLVMCDGAALYYKNKFWLLGVTPTEAQIRDIAEWLLKYHSQNTGLSTDSLMEAGYPGASVLGDAVCGMAAVSLTSKDFLFWFRSHTAEGIKWGGATHDPDDKDDGRKMHPRLSFKAFLEVVKWRSLPWEDVEMDAI

SEQ ID NO: 16953 - protein, 392 aa, Dicella nucifera
DLEPVNPADVPVTAAGALKSYNLASKAISRLQSLPSGNISLLCDVLVKEVRDLTGYDRVMVYKFHEDEHGDVVSECRRSDLESYLGLHYPATDIPQASRFLFMKNKVRMICDCLAPPVKVIQDERLPQPLSLCGSTLRSPHGCHAQYMTNMGTIASLVMSVTINEEDETMDGDQQQMTRKLWGLVVCHHTSPRFVPFPLRYACEFLIQVFGVQINKEVELAAQVRENHILQIQTMLCDMLLRDAPVAIITQSPNVMDLVKCDGAALYFKNKTWLLGVTPTEKQIRDIAEWLLEYHSGNTGLSTDSLMEAGYPGASVLGDAVCGMAAVSITSRDFLFWFRSHTAKEIKWGGAKHDPDDKDDGRKMHPRSSFKAFLEVVKWRSIPWEDIEMDAI

SEQ ID NO: 16954 - protein, 392 aa, Heteropterys thyrsoidea
DLEPVNPADVPVTAAGALKSYKLASKAISRLQSLPSGNISLLCDVLVKEVRDLTGYDRVMVYKFHEDEHGEVVSECRRSDLESYLGLHYPATDIPQASRFLFMKNKVRMICDCLAPPVKVIQDERLPQPLSLCGSTLRSPHGCHAQYMTNMGTIASLVMSVTINEDDDMMDGDQQQMTRKLWGLVVCHHTSPRFVPFPLRYACEFLIQVFGVQINKEVELAAQVREKHILQIQTMLCDMLLRDAPVAIITQSPNVMDLVECDGAALYFKNKTWLLGVTPTEEQIRDIAEWLLEYHSGNTGLSTDSLMEAGYPGASVLGDAVCGMAAVSITSRDFLFWFRSHTAKEIKWGGAKHDPDDKDDLRKMHPRSSFKAFLEVVKWRSMPWEDVEMDAI

SEQ ID NO: 16955 - protein, 381 aa, Heteropterys leona
ETPAGALKSYKLASKAISRLQSLPSGNISLLCDVLVKEVRDLTGYDRVMVYKFHEDEHGEVVSECRRSDLESYLGLHYPATDIPQASRFLFMKNKVRMICDCLAPPVKVIQDETLPQPLSLCGSTLRSPHGCHAQYMTNMGTIASLVMSVTINEDDDMMDGDQQQMTRKLWGLVVCHHASPRFVPFPLRYACEFLIQVFGVQITKEVELAAQVREKHILQIQTMLCDMLLRDAPVAIITQSPNVMDLVKCDGAALYFKNKTWLLGVTPTEEQIRDIAEWLLEYHGGNTGVSTDSLMEAGYPGASILGDAVCGMAAVSITSRDFLFWFRCHTAKEIKWGGAKHDPDDKDDLRKMHPRSSFKAFLEVVKWRSMPWEDIEMDAI

SEQ ID NO: 16956 - protein, 392 aa, Tetrapterys microphylla
DLEPVNPADVPVTAAGALKSYKLAAKAISRLQSLPSGNISLLCDVLVKEVRDLTGYDRVMVYKFHEDEHGEVVSECRRSDLESYLGLHYPATDIPQASRFLFMKNKVRMICDCLAPPVKVIQGERLPQPLSLCGSTLRSPHGCHAQYMTNMGTIASLVMSVTINEDDDMMDGDQQQMTRKLWGLVVCHHTSPRFVPFPLRYACEFLIQVFGVQINKEVELAAQVREKHILQIQTMLCDMLLRDAPVAIITQSPNVMDLVKCDGAALYFKNKTWLLGVTPTEEQIRDIAEWLLEYHSGNTGLSTDSLMEAGYPGASVLGDVVCGMAAVSITSRDFLFWFRSHTANEIKWGGAKHDPDDKDDGRKMHPRSSFKAFLEVVKWRSMPWEDVEMDAI

SEQ ID NO: 16957 - protein, 392 aa, Mascagnia anisopetala
DLEPVNPADVPVTAAGALKSYKLAAKAISRLQSLPSGNISLLCDVLVKEVRDLTGYDRVMVYKFHEDEHGEVVSECRRSDLESYLGLHYPATDIPQASRFLFMKNKVRMICDCLAPPVKVIQDERLPQPLSLCGSTLRSPHGCHAQYMTNMGTIASLVMSVTINEDDDMMDGDQQQMTRKLWGLVVCHHTSPRFVPFPLRYACEFLIQVFGVQINKEVELAAQVREKHILQIQTMLCDMLLRDAPVAIITQSPNVMDLVKCDGAALYFKNKTWLLGVTPTEEQIRDIAEWLLDYHSGNTGLSTDSLMEAGYPGASVLGDAVCGMAAVSISSRDFLFWFRSHTAKEIKWGGAKHDPDVKDDGRKMHPRSSFKAFLEVVKWRSMPWEDIEMDAI

SEQ ID NO: 16958 - protein, 392 aa, Mascagnia chasei
DLEPVNPADVPVTAAGALKSYKLASKAISRLQSLPSGNISLLCDVLVKEVRDLTGYDRVMVYKFHEDEHGEVVSECRRSDLESYLGLHYPATDIPQASRFLFMKNKVRMICDCLAPPVEVIQDERLAQPLSLCGSTLRSPHGCHAHYMTNMGTIASLVMAVTINEDDDMMDGDQQQMTRKLWGLVVCHHTSPRFVPFPLRYACEFLIQVFGVQIHKEVELAAQVREKHILQIQTMLCDMLLRDAPVAIIMQSPNVMDLVKCDGAALYFKKKTWLLGVTPTEEQIRDIAEWLLEYHSGNTGLSTDSLMEAGYPGSSALGDAVCGMAAVSITSRDFLFWFRSHTAKEIKWGGAKHDPDVKDDGRKMHPRSSFKAFLEVVKWRSMPWEDIEMDAI

SEQ ID NO: 16959 - protein, 392 aa, Mascagnia bracteosa
DLEPVNPADVPVTAAGALKSYKLAAKAISRLQSLPSGNISLLCDVLVKEVRDLTRYDRVMVYKFHEDEHGEVVSECRRSDLESYHGLHYPATDIPQASRFLFMKNKVRMICDCLAPPVKVIQDKRLPQPLSLCGSTLRSPHGCHAQYMTNMGTIASLVMSVTVNEEDDMMDGDQQQMTRKLWGLVVCHHTSPRFVPFPLRYACEFLIQVFGVQINKEVELAAQVREKHILQIQTMLCDMLLRDAPVAIITQSPNVMDLVKCDGAALYFKNKTWLLGVTPTEEQIRDIAEWLLEYHSGNTGLSTDSLMEAGYPGASVLGDAVCGMAAVSITSRDFLFWFRSHTAKEIKWGGAKHDPDDKDDGRKMHPRSSFKAFLEVVKWRSMPWDDVEMDAI

SEQ ID NO: 16960 - protein, 393 aa, Mascagnia stannea
VIEPVNPADVPVTAAGALKSYKLAAKAISRLQSLPSGNISLLCDVLVKEVRDLTGYDRVMVYKFHEDEHGEVVSECRRSDLESYLGLHYPATDIPQASRFLFMKNKVRMICDCLAPPVEVIQDERLPQPLSLCGSTLRSPHGCHAQYMTNMGTIASLVMSVTINEDDDMMDGDQQQQMTRKLWGLVVCHHTSPRFVPFPLRYACEFLIQVFGVQINKEVELAAQVREKHILQIQTMLCDMLLRDAPVAIITQSPNVMDLVKCDGAALYFKNKTWLLGVTPTEEQIRDIAEWLLEYHSGNTGLSTDSLMEAGYPGASVLGDGVCGMAAVSITSRDFLFWFRSHTAKEIKWGGAKHDPGDKDDGRKMHPRSSFKAFLEVVKWRSMPWEDVEMDAI

SEQ ID NO: 16961 - protein, 392 aa, Hiptage benghalensis
DLEPVNPADVPVTAAGALKSYKLASKAISRLQSLPSGNISLLCDVLVKEVRDLTGYDRVMVYKFHEDEHGEVVSECRRSDLGSYLGLHYPATDIPQASRFLFMKNKVRMICDCLAPPVKVIQDERLPQPLSLCGSTLRSPHGCHAQYMTDMGTIASLVMSVTINEDDDMMDGDQQQMARKLWGLVVCHHTSPRFVPFPLRYACEFLIQVFGVQINKEVELAAQVREKHILQIQTMLCDMLLRDAPVAIITQSPNVMDLVKRDGAALYFKNKTWLLGVTPTEEQIRDIAEWLLEYHSGNTGLSTDSLMEAGYPGASVLGDAVCGMAAVSITSRDFLFWFRSHTAKEIKWGGAKHDPDDKDDGRKMHPRSSFKAFLEVVKWRSMPWEDVEMDAI

SEQ ID NO: 16962 - protein, 392 aa, Callaeum septentrionale
DLEPVNPADVPVTAAGALKSYKLAAKAISRLQSLPSGNISLLCDVLVKEVRDLTGYDRVMVYKFHEDEHGEVVSECRRSDLESYLGLHYPATDIPQASRFLFMKNKVRMICDCLAPPVKVIQDERLPQPLSLCGSTLRSPHGCHAQYMTNMGTIASLVMSVTINEDDDMMDGDQQQMTRKLWGLVVCHHTSPRFVPFPLRYACEFLIQVFGVQINKEVELAAQVREKHILQIQTMLCDMLLRDAPVAIITQSPNVMDLVKCDGTALYFKNKTWLLGVTPTEEQIRDIAEWLLEYHSGNTGLSTDSLMEAGYPGASVLGDAVCGMAAVSITSRDFLFWFRSHTAKEIKWGGAKHDPDEKDDGRKMHPRSSFKAFLEVVKWRSMPWEDIEMDAI

SEQ ID NO: 16963 - protein, 392 aa, Mascagnia hippocrateoides
DLEPVNPADVPVTAAGALKSYKLAAKAISRLQSLPSGNISLLCDVLVKEVRDLTGYDRVMVYKFHEDEHGEVVSECRRSDLESYLGLHYPATDIPQASRFLFMKNKVRMICDCLAPPVKVIQDERLPQPLSLCGSTLRSPHGCHAQYMTNMGTIASLVMSVTINEDDDMMDGDQQQMTRKLWGLVVCHHASPRFVPFPLRYACEFLIQVFGVQINKEVELAAQVREKHILQIQTMLCDMLLRDAPVAIITQSPNVMDLVKCDGAALYFKNKIWLLGVTPTEEQIRDIAEWLLEYHSGNTGLSTDSLMEAGYPGASVLGDAVCGMAAVSITSRDFLFWFRSHTAKEVKWGGAKHDPHDKDDGRKMHPRSSFKAFLEVVKWRSMPWEDIEMDAI

SEQ ID NO: 16964 - protein, 392 aa, Hiraea fagifolia
DLEPVDPADVPVTAAGALKSYKLAAKAISRLQSLPSGNISLLCDVLVKEVRDLTGYDRVMVYKFHEDEHGEVVSECRRPDLESYLGLHYPATDIPQASRFLFMKNKVRMICDCLAPPVKVIQDKRLPQPLSLCGSTLRSPHGCHAQYMTNMRTIASLVMSVTINEDDDTMDGDQQQMTGKLWGLVVCHHTSPRFVPFPLRYACEFLIQVFGVQINKEVELAAQVREKHILQIQTMLCDMLLRDAPVAIITQSPNVMDLVKCDGAALYFKNKIWLLGVTPKEEQIRDIAEWLLEYHSGNTGLSTDSLMEAGYPGASVLGDAVCGMAAVSITSRDFLFWFRSHTAKEIKWGGAKHDPGDKDDGRKMHPRSSFKAFLEVVKWRSMPWEDVEMDAI

SEQ ID NO: 16965 - protein, 392 aa, Ectopopterys soejartoi
DLEPVNPADVPVTAAGALKSYKLAAKAISRLQSLPSGNISLLCDVLVKEVRDLTGYDRVMVYKFHEDEHGEVVSECRRSDLESYLGLHYPATDIPQASRFLFMKNKVRMICDCMAPPVEVIQDERLPQPLSLCGSTLRSPHGCHAQYMTNMGTTASLVMSVTINEDDHMMDGDQQQMTKKLWGLVVCHHTNPRFVPFPLRDACEFLIQVFGVQINKEVELAAQVREKHILQIQTMLCDMLLRDAPVAIITQSPNVMDLVKCDGAALYFKNKTWLLGVTPTEEQIRDIAEWLLEYHSGNTGLSTDSLMEAGYPGASALGDAVCGMAAVSITSRDFLFWFRSHTAKEIKWGGAKHDPDDKDDGRKMHPRSSFKAFLEVVKWRSMPWEDVEMDAI

SEQ ID NO: 16966 - protein, 392 aa, Stigmaphyllon paralias
DLEPVNPADVPVTAAGALKSYKLAAKAISRLQSLPSGNISLLCDVLVKEVRDLTGYDRVMVYKFHEDEHGEVVSECRRSDLESYLGLHYPATDIPQASRFLFMKNKVRMICDCLAPPVKVIQDERLPQPLSLCGSTLRSPHGCHAQYMTNMGTIASLVMSVTINEDDDTMDGDQQQMTRKLWGLVVCHHTSPRFVPFPLRYACEFLIQVFGVQINKEVELAAQIREKHILQIQTMLCDMLLRDAPVAIITQSPNVMDLVKCDGAALYFKNKTWLLGVTPTEEQIRDIAQWLLEYHSGNTGLSTDSLMEAGYPGASALRDAVCGMAAVSITSRDFLFWFRSHTAKEVKWGGAKHEPDDKDDLRKMHPRSSFKAFLEVVKWRSMPWEDVEMDAI

SEQ ID NO: 16967 - protein, 392 aa, Lasiocarpus sp. Anderson 13834
DLEPVNPADVPVTAAGALKSYKLAAKAISRLQSLPGGNISLLCDVLVKEVRDLTGYDRVMVYKFHEDEHGEVVSECRRSDLESYLGLHYPAIDIPQASRFLFMKNKVRMICDCLAPPVKVIQDKRLSQPLSLCGSTLRSPHGCHAQYMANMGTIASLVMSVTVNEDDDMIDGDQQQMARKLRGLVVCHHTSPRFVPFPLRYACEFLIQVFGVQINKEVELAAQVREKHILRIQTMLCDMLLRDAPVAIITQSPNVMDLVKCDGAALYYKNKFWLLGVTPTEAQIRDIAEWLLEYHSGNTGLSTDSLMEAGYPGASVLGDAVCGMAAVSITSRDFLFWFRSHTAKEIKWGGAKHDPEDKDDGRKMHPRSSFKAFLEVVKWRSLPWEDVEMDAI

SEQ ID NO: 16968 - protein, 392 aa, Ptilochaeta nudipes
DLEPVNPVDVPVTAAGALKSYKLAAKAISRLQSLPGGNISLLCDVLVKEVRDLTGYDRVMVYKFHEDEHGEVVSECRRSDLESYLGLHYPATDIPQASRFLFMKNKVRMICDCLAPPVKVIQDERLSQPLSLCGSTLRSPHGCHAQYMANMGTIASLVMSVTVNEDDDMMDGDQQQMARKLWGLVVCHHTRPRFVPFPLRYACEFLIQVFGVQINKEVELAAQVREKHILRIQTMLCDMLLRDAPVAIITQSPNVMDLVKCDGAALYYKNKFWLLGVTPTEAQIREVAEWLLEYHSGNTGLSTDSLMEAGYPGASVLGDAVCGMAAASITSRDFLLWFRSHTAKEIKWGGAKHDPEDKDDGRKMHPRSSFKAFLEVVKWRSLPWEDVEMDAI

SEQ ID NO: 16969 - protein, 392 aa, Ptilochaeta bahiensis
DLEPVNPADVPVTAAGALKSYKLAAKAISRLQSLPGGNISLLCDVLVKEVRDLTGYDRVMVYKFHEDEHGEVVSECRGSDLESYLGLHYPATDIPQASRFLFMKNKVRMICDCLAPPVKVIQDKRLSQPLSLCGSTLRSPHGCHAQYMANMGTIASLVMSVTVNEDDDMMDGDQQQMARKLWGLVVCHHTSPRFVPFPLRYACEFLIQVFGVQINKKVDLAAQVREKHILRIQTMLCDMLFRNAPVAIITQSPNVMDLVKCDGAALYYKNKFWLLGVTPTEAQIREIAEWLLEYHSGNTGLSTDSLMEAGYPGASVLGDAVCGMAAVSITSRDFLFWFRSHTAKEIKWGGAKHDPEDKDDGRKMHPRSSFKAFLEVVKWRSLPWEDVEMDAI

SEQ ID NO: 16970 - protein, 392 aa, Dinemandra ericoides
DLEPVNPADVPVTAAGALKSYKLAAKAISRLQSLPSGNIPLLCDVLVKEVRDLTGYDRVMVYKFHEDEHGEVVSECRRSDMESYLGLHYPATDIPQASRFLFMKNKVRMICDCLSPPVEVIQDERLPQPLSLCGSTLRSPHGCHAQYMANMGTIASLVMSVTVNEDDDMMDGDQQRMARKLWGLVVCHHTSPRFVPFPLRYACEFLIQVFGVQINKEVDLAAQVREKHILRIQTMLCDMLLRDAPVAIITQSPNVMDLVKCDGAALYYKNKFWLLGVTPTEAQIRDIAEWLLEYHRGNTGLSTDSLMEAGYPGASVLGDAVCRMAAVSITSRDFLFWFRSHTAKEIKWGGAKHDPGDKDDGRKMHPRSSFKAFLEVVKWRSLPWEDMEMDAI

SEQ ID NO: 16971 - protein, 392 aa, Mcvaughia bahiana
DLEPVNPADVPVTAAGALKPYKLAAKAISRLQSLPSGNISLLCDVLVKEVRDLTGYDRVMVYKFHEDEHGEVVTECRRSDLESYLDLHYPATDIPQASRFLFMKNKVRMICDCLAPPVKVIQDKRLSQPLSLCGSTLRSPHGCHAQYMANMGAVASLVMSVTINEDDDTVDGDQQQMARKLWGLVVCHHTSPRFVPFPLRYACEFLIQVFGVQITKEVELAAQVREKHILRIQTLLCDMLLRDAPVAIITQSPNVMDLVKCDGAALYYRKKFWLLGVTPTEAQIRDIAEWLLEYHSGNTGLSTDSLLEVGYPGASALGEVVCGMAAVSITSRDFLFWFRSHTAKEIKWGGAKHDPDDKDDSRKMHPRSSFKAFLEVVEWRSLPWEDVEMDAI

SEQ ID NO: 16972 - protein, 392 aa, Burdachia sphaerocarpa
DLEPVNPADVPVTAAGALKSYKLAAKAISRLQSLPSGNISLLCDVLVKEVRDLTGYDRVMVYKFHDDEHGEVVSECRRSDMESYLGLHYPATDIPQASRFLFMKNKVRMICDCLAPPVKVIQDERLPQPLSLCGSTLRSPHGCHAQYMVNMGAIASLIMSVTINEDDDTIDGDEQQMARKLWGLVVCHHTSPRFVPFPLRYACEFLIQVFGVQITKEVELAAQVREKHILRIQTLLCDMLLRDAPVAIITQSPNVMDLVKCDGAALYYKKKFWLLGVTPTEAQIRDIAEWPVEYHSGNTGLSTDSLMEAGYSGASSLGDAVCGMAAVSITSRDFLFWFRSHTAKEIKWGGAKHDPADKDDGRKLHPRSSFKAFLEVVKWRSLPWEDMEMDAI

SEQ ID NO: 16973 - protein, 392 aa, Glandonia macrocarpa
DLEPVNPADVPVTAAGALKSYKLAAKAISRLQSLPSGNISLLCDVLVKEVRDLTGYDRVMVYKFHEDEHGEVVSECHRSDLESYLGLHYPATDIPQASRFLFMKNKVRMICDCLAPPVKVIQDERLPQPLSLCGSTLRSPHGCHAQYMANMGAIASLVMSVTINEDDDMIDGDEQQMARKLWGLVVCHHTSPRFVPFPLRYACEFLIQVFGVQITKEVELAAQVREKHIFRIQTLLCDMLLRDAPVAIITQSPNVLDLVKCDGAALYYKKKFWLLGITPTEAQIRDIAEWLLEYHSGNTGLSTDSLMEAGYPGASSLGDAVCGMAAVSITSRDFLFWFRSHTAKEIRWGGAKHDPDDKDDGRKMHPRSSFKAFLEVVKWRSLPWEDVEMDAI

SEQ ID NO: 16974 - protein, 392 aa, Barnebya dispar
DLEPVNPADVPVTAAGALKSYKFAAKAISRLQSLPSGNIFLLCDVLVKEVRDLTGYDRVMVYKFHEDEHGEVVSECRRSDLESYLGLHYPATDIPQVSRFLFMKNKLRMICDCLAPPVKVIQDENLPQPLSLCGSTLRSPHGCHAQYMTNMGTIASLVMSVTINEDDDMKDCEQPQMPRKLWGLVVCHHTSPRFIPFPLRYACEFLIQVFGVQINKEVELAAQVREKHILRIQTLLCDMLLRDAPVAIITQSPNVMDLVRCDGAALYYKNEFWLLGVTPTEAQIRDIAEWLLECHSGNTGLSTDSLMEAGYPGASVLGDAVCGMAAISITSRDFLFWFRSHTAKEIKWGGAKHDPDDKDDGRKMHPRSSFKAFLEVVKWRSLPWEDIEMDAI

SEQ ID NO: 16975 - protein, 392 aa, Spachea correae
DLEPVNPADVPVSAAGALKSYKLAARAISRLQSLPSGNISLLCDVLVKEVRDLTGYDRVMVYKFHEDEHGEVVSECRRPDLEAYLGLHYPATDIPQASRFLFMKNKVRMICDCLAPPVKVIQDEKLPQSLSLCGSTLRSPHGCHAQYMANMGSIASLVMSVTVNEDDDMVDGDQQRMARKLWGLVVCHHTSPRFVPFPLRYACEFLIQVFGVQINKEVELAAQGREKHIMQTQTLLCDMLLRDAPVAIVTQSPNVMDLVKCDGAALYYRKKFWLLGVTPTEAQIRDIAEWLLEYHSGNTGLSTDSLMEAGYPGTSVLGNAVCGMAAVKITSRDFLFWFRSHTAKEIKWGGAKHDPDDKDDIRKMHPRSSFKAFLEVVKWRSLPWEDMEMDAI

SEQ ID NO: 16976 - protein, 392 aa, Tricomaria usillo
DLEPVNPADVPVTAAGALKSYKLASKAISRLQSLPSGNMSLLCDVLVKEVRDLTGYDRVMVYKFHEDEHGEVVSECRRSDLESYLGLHYPATDVPQASRFLFMKNKVRMICDCLAPPVKVIQDERLPQPLSLGGSTLRSPHGCHSQYMTNMGTIASLVMSVTINEEDERMDGDQQQMTTKLWGLVVCHHTSPRFVPFPLRYACEFLIQVFGVQIDKEVELVAQVREKHILQIQTMLCGMLLRDAPVAIVTQSPNVMDLVKCDGAALYFKSKTWLRGVTPTEEQIKDIAEWLLKYHSGNTGLSTDSLMEAGYPGASVLGDAVCGMAAVGITSRDFLFWFRSHTAKEINWGGAKHDPDDKDDGRKMHPRSSFKAFLEVVKWRSMPWEDMEMDAI

SEQ ID NO: 16977 - protein, 392 aa, Tetrapterys discolor
DLEPVNPADVPVTAAGALKSYKLAAKAISRLQSLPSGNISLLCDVLVKEVRDLTGYDRVMVYKFHEDEHGEVVSECRRSDLESYLGLHYPATDIPQASRFLFMKNKVRMICDCLAPPVKVIQDERLPQPLSLCGSTLRSPHGCHAQYMTNMGTIASLVMSVTVNDDDDMMDGDQQQMTRKLWGLVVCHHTSPRFVPFPLRYACEFLIQVFGVQINKEVELTAQVREKHILQIQTMLCDMLLRDAPVAIITQSPNVMDLVKCDGAALYFKKKTWLLGVTPMEEQVRDIAEWLLEYHSGNTGLSTDSLMEAGYPGASDLGDAVCGMAAVSITSRDFLFWFRSHTAKEIKWGGAKHDPDDKDDGRKMHPRSSFKAFLEVVKWRSVPWEDVEMDAI

SEQ ID NO: 16978 - protein, 392 aa, Stigmaphyllon sagraeanum
DLEPVNPADVPVTAAGALKSYKLAAKAISRLQSLPSGNISLLCDVLVKEVRDLTGYDRVMVYKFHEDEHGEVVSECRRSDLESYLDLHYPATDIPQASRFLFMKNKIRMICDCMAPPVKVIQDETLPQPLSLCGSTLRSPHGCHAQYMTNMGTIASLVMSVTINEDDDTMDGDQQQMTRKLWGLVVCHHTSPRFVPFPLRYACEFLIQVFGVQINKEVELAAQVREKHILQIQTMLCDMLLRDAPVAIITQSPNVMDLVKCDGAALYFKNKTWLLGVTPTEEQIRDMAQWLLEHHSGNTGLSTDSLMEAGYPGASALGDAVCGMAAVSITSRDFLFWFRSHTAKEVKWGGAKHDPDDKDDLRKMHPRSSFKAFLEVVKWRSMPWEDIEMDAI

SEQ ID NO: 16979 - protein, 392 aa, Lophopterys floribunda
DLEPVNPADVPVTAAGALKSYKLAAKAISRLQSLPSGNISLLCDVLVKEVRDLTGYDRVMVYKFHEDEHGEVVSECRKSDLESYLGLHYPATDIPQASRFLFIKNKVRMICDCLAPPVKVIQDERLPQPLSLCGSTLRSPHGCHAQYMTNMGTIASLVMSVTINEDDDTMDGDQQQTTRKLWGLVVCHHTNPRFVPFPLRYACEFLIQVFGVQINKEVELAAQVREKHILQIQTMLCDMLLRDAPVAIITQSPNVMDLVKCDGAALYFKNKIWLLGVTPTEEQIRDIAEWLLEYHSGNTGLSTDSLMEAGYPGASVLGDAVCGMAAVSITSRDFLFWFRSHTAKEIKWGGAKHDPDDKDDGRKMHPRSSFKAFLEVVKWRSMPWEDVEMDAI

SEQ ID NO: 16980 - protein, 392 aa, Mionandra camareoides
DLEPVNPADVPVTAAGALKSYKLAAKAISRLQSLPSGNISLLCDVLVKEVRDLTGYDRVMAYKFHEDEHGEVVSECRRSDLESYLGLHYPATDIPQASRFLFMKNKVRMICDCLAPPVKVIQDERLPQPLSLCGSTLRSPHGCHAQYMTNMGTIASLGMSVTVNEDDDTMDGDQQQMTRKLWGLVVCHHTSPRFVPFPLRYACEFLIQVFGVQINKEVELAAQVREKHILQIQTMLCDMLLRDAPVAIITQSPNVMDLVKCDGAALYFKNKTWLLGVTPTEEQIRDIAEWLLKYHCGNTGLSTDSLMEAGYPGASALGDAVCGMAAVSITSRDFLFWFRSHTAKEIKWGGAKHDPDDKDDLRKMHPGSSFKAFLEVVKWRSMPWKDVEMDAI

SEQ ID NO: 16981 - protein, 392 aa, Aspicarpa brevipes
DLEPVNPADVHVTAAGALKSYKLAAKAISRLQSLPSGNVSLLCDVLVKEVRDLTGYDRVMMYKFHEDEHGEVVSECRRSDLESYLGLHYPATDIPQASKFLFIKNKVRMICDCLAPSVKVIQDERLTQPLSLCGSTLRSPHGCHAQYMTNMGAIASLVMAVTVNEDEDTMDGDQQHMTRKLWGLVVCHHTSPRFVPFPLRYACEFLIQVFGVQVTKEVELAAQVREKHSLQIQTMLCDMLLRDALVAIITQSPNVMDLVKCDGAALYFKNKTWFLGVTPTEEQIRGIAEWLLKYHSGNTGLSTDSLMEAGYPGASGLGDAVCGMAAVSITSRDFLFWFRSHTAKEIKWGGAKHDPDDKDDLRKMHPRSSFKAFLEVVKWRSTPWEDIEMDAI

SEQ ID NO: 16982 - protein, 392 aa, Diplopterys cabrerana
DLEPVNPADVPVTAAGALKSYKLAAKAISRLQSLPSGNISLLCDVLVKEVRDLTGYDRVMVYKFHEDEHGEVVSECRRSDLEPYLGLHYPATDIPQASRFLFMKNKVRMICDCLAPPVKVIQDDRLPQPLSLCGSTLRSPHGCHAQYMTNMGTIASLVMSVTINEDDDTMDGDQQQMTRKLWGLVVCHHTSPRFVPFPLRYACEFLIQVFGVQINKEVDLAVQMREKHILQIQTMLCDMLLRDAPVAIITQSPNVMDLVKCDGAALYFRNKTWLLGVTPTEEQIRDIAEWLLKYHSGNTGLSTDSLMEAGYPGASALGDAVCGMAAVSITSGDFLFWFRSHTAKEIKWGGAKHDPDDKDDLRKMHPRSPFKAFLEVVKWRSMPWEDVEMDAI

SEQ ID NO: 16983 - protein, 96 aa, Ginkgo biloba
LDMPGLKSNDIKVQVENENVLNITGERRRDEKADADAKYIRMERRVGKFMRQFTLPSDANLEGISATCYDGVLTVTVPKIPPPEPKKPKTIEVIAS

SEQ ID NO: 16984 - protein, 512 aa, Arabidopsis thaliana
MDNSRTRQNMNGSANWSQQSGRTSTSSLEDLEIPKFRSFAPSSISISPSLVSPSTCFSPSLFLDSPAFVSSSANVLASPTTGALITNVTNQKGINEGDKSNNNNFNLFDFSFHTQSSGVSAPTTTTTTTTTTTTTNSSIFQSQEQQKKNQSEQWSQTETRPNNQAVSYNGREQRKGEDGYNWRKYGQKQVKGSENPRSYYKCTFPNCPTKKKVERSLEGQITEIVYKGSHNHPKPQSTRRSSSSSSTFHSAVYNASLDHNRQASSDQPNSNNSFHQSDSFGMQQEDNTTSDSVGDDEFEQGSSIVSRDEEDCGSEPEAKRWKGDNETNGGNGGGSKTVREPRIVVQTTSDIDILDDGYRWRKYGQKVVKGNPNPRSYYKCTTIGCPVRKHVERASHDMRAVITTYEGKHNHDVPAARGSGYATNRAPQDSSSVPIRPAAIAGHSNYTTSSQAPYTLQMLHNNNTNTGPFGYAMNNNNNNSNLQTQQNFVGGGFSRAKEEPNEETSFFDSFMP

SEQ ID NO: 16985 - protein, 460 aa, Xanthomonas axonopodis pv. citri str. 306
MPMSDPSAPDHLQRSLSNRHLQLIAIGGAIGTGLFMGSGKTISLAGPSILFVYLIIGAMLFFVMRAMGELLLSNLEYKSFIDFSTDLLGPWAGFFCGWTYWFCWIITAIADVIAIAAYAQFWFPGLAPWIPAILCVLLLLGLNLVTVKLFGEMEFWFALIKIIAIAALIVTGAGLVVWGFRSPSGNVASLSNLWNDGGMFPMGIGGFFAGFQIAVFAFVGIELVGTTAAETADPRRNLPKAINSIPVRILIFYVLALIAIMAVTPWRQVVADKSPFVELFVLAGVPAAASLINFVVLTSATSSANSGIFSTSRMLYGLAEEQHAPKGFAKLSRAAIPARGLLFSCLCLLLGAMLVYLIPNLVTAFTLVTTLSAVLFMFVWSLILCAYIAYRRKRPEQHAASAFKMPGGVLMCYVCLAFFAFVIVLLTLQDDTRQALLASPVWFLLLAIGYAVKRRGNRQR

SEQ ID NO: 16986 - protein, 788 aa, Xanthomonas axonopodis pv. citri str. 306
MFRQEGRIQPPAPSRTTPPMSTDDFKQAALDYHRQQPAGKIKVTATKPMLTQRDLSLAYSPGVAFACEAIVEDATQASELTARGNLVAVITNGTAVLGLGNIGPLASKPVMEGKGVLFQKFAGIDVFDIEINENDPDKLVDIIASLEPTFGGINLEDIKAPECFIVERKLRERMNIPVFHDDQHGTAIIVGAAVLNALVVTGKKIEEVKLATTGMGAAGISCVNMLVSLGLKPENILALDRDGVIHTGRTDLDPDKQRYARDTDKRTLAEIVEGADIFLGLSAAGILKPEMVASMARQPVIFALANPNPEITPEAAKAVRPDCIIGTGRSDYPNQINNVLCFPYLFRGALDVGATGINEEMKIACVKAIAAMARREASDLGAAYGGETPSFGPEYLIPRPLDPRLLVELSSAVAQAAMDSGVATRPITDMEAYRDKLGQFVYRTSLMMKPVYDRARADKQRVVYAEGEEEVVLRAVQNVVDEGLAFPILIGRPDVIEARIERMGLRLTAGVDFEITNILDDPRFNDYWQYYHALTERRGVTVTAAKELMRSRPTLIAAVMVARGEADAMLSGVVGRFHKKLGYARSVIPLEPRVSSTSAMTGVINQLGVFFFLDTHVQEDPTVEQVVEATLQAAYRLKLFGIEPNIALLSHSNFGSHDSRDALKMRQVREALLKRKPELNIDGEMQGDTAWDEALRKQIMPNSTLKGRANLFVLPNLEAANIAYNLVRVFTDGVAIGPILMGISKPVHILTTSATSRRVMNMTAIAAVDAQIRRQRDAEKAAADKGND

SEQ ID NO: 16987 - protein, 279 aa, Xanthomonas axonopodis pv. citri str. 306
MPQCGFSAKAVGVLDGLGIDYAHVNVLADQEIREGIKAYGDWPTIPQLYVDGELIGGSDIIVQMADSGELSSMLGLQAPDRSPPKITITPAAVEMLKGALADAPDASLTLAIDANFQPNFQLAPTNPNAIAAESNGLRVQFDLASARRADGITIDWVDDIRGRGLAIDNPNAPKPVQELSVRDADDRLKAGSLTLVDVRPADERALATVAAPFRTLDAHERAAIEQLPKDTPLAFLCHRGGRSLQAAEHFRGLGFTNVYNVTGGIDAWSDEVDNGVAKY

SEQ ID NO: 16988 - protein, 478 aa, Xanthomonas campestris pv. campestris str. ATCC 33913
MRGRMGRHRSGPRMSEPSSTDAPQFQRSMQVRHLVMLSLGGVIGTGLFFNTGYIIASTGALGTVLAYLIGALVVYLVMQCLGELAVAMPQTGAFHVYAARYLGPATGYVVAWLYWLTWTVALGSSLTAAAFCMQYWFPHSPAWPWCLLFCVLIFSLNMVSARWFAEGEFWFSLINVVTIVVFIVLGGAAVVGWLPLADGSPAPGVRHLRADGWFAHGTVPILMTMVAVNFAFSGTELIGIAAGETAQPARAIPLAIRTTLIRLVVLFVGTVLVLAALLPAHAAAVETSPFVRAFELLGIPYAAGLLNAVILTAILSAANSGLYAAARMLWSLANEGTLPARFARLTRRGIPLPALVLSMLGGLLALLTGVYAADTVFVAISAVSGFAVVVVWLSICASHYCFRRQLLRDGIALDSLAYRAPWYPWTPLIGGALCVLACAGLAFDPQQRIALWCGIPFVALCYGAHAVTQRLAARRVRP

SEQ ID NO: 16989 - protein, 785 aa, Xanthomonas campestris pv. campestris str. ATCC 33913
MTDQTRLPNTSSLTHPRPDPAVILATDLDGTFLAGSAEHRHQLYRLVDQHPEIRLIFITGRGLEAVMPLLTDPTIPRPDYVVCDVGATVVDGHTLQPLQPLQSMIDAHWPGEQVVAQAMRAFPQLQRQDMPQERRCSYFCDPHTLAPLRAQIEQTARALGCDVLYSADRYLDILPPDTDKGRTLGALARQLELPRERILVAGDTLNDLSMYLAGFRGVCVGDSEAALTQATAQLDATYHASAPGCGGILEAIAHFGLLADDDPHVPAVQAPRKGGAELVMVYHRLPYDEVVEHGELVRRAPRSPNGIIPSLLSFFEGGQRGSWVAWSVDDPKRGPFQTHTEVDAQRYPTLTAARVPLSKSEVDIFYKRFSKEAFWPMLHVFWERARFREDDWQVFLAVNRKFAQATSAEAAHGATVWIHDYNLWMVPAYLRELRPDLKIAFFHHTYFPSADVFNVVPWRREIIGSLMCCDYVGFHIPRQVENFVDVVRGVMPVERLAQESCAPRFLTYGCAVGLDTMTTCLRVADRDVALGAHPVGTDLRRIRAALSKPDVRNDIFKLRREIGARKLVLSVERLDYTKGTLAKLEAFERLLDSQRQLLGKVTLLMVCVPAAREMTIYRTLQTQIEQAVGRINGRFSRLDWTPVRFFAQALPFEQVVAHYAAAQVMWITPLRDGLNLVAKEFVAVQGIEGGSGVLVLSEFAGAAAELKGAVLTNPHDPADLAAGLLQALAMPDDEAAGRLRQLYDSVEYYNIDHWGRDFLDAVARSRGAHARVPLAAASTVAEPVA

SEQ ID NO: 16990 - protein, 775 aa, Xanthomonas campestris pv. campestris str. ATCC 33913
MRPTQPMSNDDFKQAALDYHRQQPAGKIKVTATKPMLTQRDLSLAYSPGVAFACEAIVEDATQASELTARGNLVAVITNGTAVLGLGNIGPLASKPVMEGKGVLFQKFAGIDVFDIEINENDPDKLVDIIASLEPTFGGINLEDIKAPECFIVERKLRERMNIPVFHDDQHGTAIIVGAAVLNALVVTGKKIEDVKLATTGMGAAGISCVNMLVSLGLKSENILALDRDGVIHTGRTDLDPDKQRYARDTDKRTLAEIVEGADIFLGLSAAGILKPEMVATMARQPVIFALANPNPEITPEAAKAVRPDCIIGTGRSDYPNQINNVLCFPYLFRGALDVGATGINEDMKIACVKAIAAMARREASDLGAAYGGETPSFGPEYLIPRPLDPRLLVELSSAVAQAAMDSGVATRPIADMAAYRDRLSQFVYRTSLMMKPVYDRARADKQRVVYAEGEEEVVLRAVQNVIDEGLALPILIGRPDVIEARIQRMGLRIRAGEDFEITNIHDDPRFNDYWQYYYALTERRGVTVTAAKELMRSRPTLIAAVMVARGEADAMLSGVVGRFHKKLGYARSVIPLEPRVSSTSAMTGVINQQGMFFFLDTHVQEDPTVEQVVEATLQAAYRLKLFGIEPNIALLSHSNFGSHDSRDALKMREVREALLKRKPELNIDGEMQGDTAWDEALRKQIMPNSTLKGRANLFVLPNLEAANIAYNLVRVFTDGVAIGPILMGISKPVHILTTSATSRRVMNMTAIAAVDAQIRKQRDAEKHNAEKNGG

SEQ ID NO: 16991 - protein, 279 aa, Xanthomonas campestris pv. campestris str. ATCC 33913
MPQCGFSAKAIGVLDGLGIDYAHVNVLADQEIREGIKAYGDWPTIPQLYVDGELIGGSDIIVQMADSGELSSMLGLQAPDRSPPKITITPAAVEMLKGALADAPDASLTLAIDANFQPNFQLAPTNPNAIAAESNGLRVQFDLASARRADGITIDWVDDIRGRGLAIDNPNAPKPVQELAVRDADDRLKAGTLTVVDVRPADERALATVAAPFRTLDAHERLEIEQLPKDTPLAFLCHRGGRSLQAAEHFRGLGFTNVYNVTGGIDAWSDAVDNGVPKY

SEQ ID NO: 16992 - protein, 462 aa, Bacillus subtilis
MMSSLFRKKPLETLSAQSKSKSLARTLSAFDLTLLGIGCVIGTGIFVITGTVAATGAGPALIISFILAGLACALAAFCYAEFSSSIPISGSVYSYSYVTLGELLAFLIGWDLMLEYVIALSAVATGWSSYFQSLLAGFNLHIPAALTGAPGSMAGAVFNLPAAVIILLITAIVSRGVKESTRFNNVIVLMKIAIILLFIIVGIGYVKPDNWSPFMPFGMKGVILSAATVFFAYLGFDAVSNASEEVKNPQKNMPVGIISALAVCTVLYIAVSLVLTGMMPYAKLNVGDPVSFALKFVGQDAVAGIISVGAIIGITTVMLALLYAQVRLTFAMSRDGLLPGLFAKVHPSFKTPFRNTWLTGIVAAGIAGFINLGTLAHLVNMGTLAAFTVISIAVIVLRKKHPEIKASFRVPFVPVVPIISAGICLWFMYSLPGVTWLSFVIWIAVGTLVYFLYSRKHSLLNK

SEQ ID NO: 16993 - protein, 447 aa, Hordeum vulgare subsp. vulgare
MLPGASPSFPQRPTDRLYGQKLLSAWSRARRTLKARPQTLKAGNEGHNGLLRWHNLAQCNAGELSMAYVQANNLMEDHCRVESSPTLGTFVGVFDGHGGNEAARFTSEHLFPNLQSEATSNWQGVTDETIRKAFLDTDESYIAHVEKQWSVKPQLAAVGSCCLVGIVCQRTLFIANLGNSRAVLGKADLSGQISSVQLSTEHNASDESVRQELWAQHPDDPHIVVFKDNVWRVKGIIQVVLILMFGSVLLYVYSCSVLTRWMMQVSRTIGDAYLKHQRFNREPLHSMFKLREPFSRPILSASPSIMSHSLQPSDRFIIFASDGLWEHLSNETAVKIVHKHGRTVSLHTCIFSLIRLVYVIMLLGFQLLPKIAKRLVKAALQEAARKRDMRFSDLKKIDRGVRRHFHDDITVVVLFIDHGGLSLKDHSQESLALSISAPSCIGDLAWS

SEQ ID NO: 16994 - protein, 285 aa, Solanum lycopersicum
MGSGHIFFDPSSCHGNMLFLGSGDPVFRGPRSTMMKMEDSSKRRPFFSSPEDLYDEEYYDEQSPEKKRRLTPEQVHLLEKSFETENKLEPERKTQLAKKLGLQPRQVAVWFQNRRARWKTKQLERDYDQLKSSYDSLLSDFDSVRKDNDKLKSEVVSLMEKLQGKVVGGAGGNEKSDILEVDAMTILQVKVKAEDRLSSGSGGSAVVDEHSPQLVDSGDSYFHTDHEEYPGPGGCNVPPPMDGLQSEEDDGSDDHGSCHGYFSNVFVAEEQHHEQGEEPIGWFWS

SEQ ID NO: 16995 - protein, 485 aa, Rhodococcus sp. T104
MEERILSRDNTKETHLVGGIDIHAESQTYLQKRQLRSGTAGWVLLAGLGVSYVVSGDYSGWNFGLAEGGFGGLTIAVVIIAAMYLCLVLGMAELSSALPAAGGGYTFARRALGPWGGFATGTAILIEYSIAPAAIATFIGAYVDSLNILGITDGWWLYLAVYAIFIGIHLCGVGEALKGLFTIAAIALIGLVIFVIAAIGRFDSANLVDIAPGSAAGASDLLPFGYLGIWSAIPFAIWFFLAIEGVPLAAEETADPQRNVPRGIIAAISILMITCAAVLILATGAGGAASISESGNPLVEALGDTTIAKVVNYIGLAGLVASFFSVIYAYSRQLFALSRAGYLPTVLSVTNSRKVPTLALVVPGVVGFLLSLTGKGALLLNMAVCAAAVSYVLIMLSHIILRRREPEMHRPYRTPGGSMTTGFALCVAVIAVAGTFLVDVVAALCCLGVFVIFLLYFALFSRHRLVANSPDEEFAALAQAQADLR

SEQ ID NO: 16996 - protein, 346 aa, Vibrio parahaemolyticus
KFITKGGPDGGDGGDGGDVYIQADENLNTLIDYRFQRFYEAERGENGRGGNCTGKRGKDIVLRVPVGTRAVDIHTNEIVAEVAEHGKKVMVAKGGWHGLGNTRFKSSVNRAPRQRTLGTKGEIREIRLELLLLADVGMLGLPNAGKSTFIRAVSAAKPKVADYPFTTLIPSLGVVSVVPEKSFVVADIPGLIEGAADGAGLGIRFLKHLERCRVLLHMIDIMPIDQSDPVQNALTIIDELEQYSEKLASKPRWLVFNKVDLMPEEEANEKIQEILDALGWEDEYFKISAINRSGTKELCYKLADFMENLPREEEEVAEEDKVNFMWDDYHKDAMAGKDVVTEDDDD

SEQ ID NO: 16997 - protein, 343 aa, Vibrio vulnificus
VTKGGPDGGDGGDGGDVYIQADENLNTLIDYRFQRFYEAERGQNGSGGNCTGKRGKDITLRVPVGTRAVDIHTNETVAEVAEHGKKVMVAKGGWHGLGNTRFKSSVNRAPRQKTMGTKGEIRELRLELLLLADVGMLGLPNAGKSTFIRAVSAAKPKVADYPFTTLIPSLGVVSVVPEKSFVVADIPGLIEGAADGAGLGIRFLKHLERCRVLLHMIDIFPIDQSDPVQNALTIIDELEQYSEKLANKPRWLVFNKVDLVSEEQADEIIQEVIDALGWEEQYFKISAVNRQGTKELCYKLADFMEQLPREEQEVSEEEKVNFMWDYHPDANQGEVITEDDDDD

SEQ ID NO: 16998 - protein, 345 aa, Vibrio alginolyticus
ITKGGPDGGDGGDGGDVYIQADENLNTLIDYRFQRFYEAERGENGRGGNCTGKRGKDIVLRVPVGTRAVDIHTNEIVAEVAEHGKKVMIAKGGWHGLGNTRFKSSVNRAPRQRTLGTKGEVREIRLELLLLADVGMLGLPNAGKSTFIRAVSAAKPKVADYPFTTLIPSLGVVSVVPEKSFVVADIPGLIEGAADGAGLGIRFLKHLERCRVLLHMIDIMPIDQSDPVQNALTIIDELEQYSEKLASKPRWLVFNKVDLMPEEEANEKIQEILDALGWEDEYFKISAINRNGTKELCYKLADFMDNLPREEEEVAEEDKVNFMWDDYHKDAMAGKDVITEDDDDD

SEQ ID NO: 16999 - protein, 344 aa, Vibrio cholerae
VTNGGPDGGDGGDGGDVYMVADENLNTLIDYRFQRFYEAERGKNGGGGNCTGKSGKDKELRVPVGTRAVDIHTNEIIGEVAEHGKKVMIAKGGWHGLGNARFKSSVNRSPRQKTLGTKGELRDIRLELLLLADVGMLGMPNAGKSTFIRAVSAAKPKVADYPFTTLVPSLGVVSVLPEKSFVVADIPGLIEGAAEGAGLGIRFLKHLERCRVLLHMIDIMPADQSDPAHNALTIIDELEQYSEKLAKKPRWLVFNKVDLMSEEEADEIIQNIIDALAWEGDYFKISAANRQGTKELCMKLAEFMDTLPREAEEKTEAEKVDFTWDYNHKDGLAGREVITEDDDD

SEQ ID NO: 17000 - protein, 344 aa, Vibrio harveyi
ITKGGPDGGDGGDGGDVYIQADENLNTLIDYRFQRFYEAERGENGRGGNCTGKRGKDITLRVPVGTRAVDIHTNEIVAEVAEHGKKVMVAKGGWHGLGNTRFKSSVNRAPRQRTLGTKGEIREIRLELLLLADVGMLGLPNAGKSTFIRAVSAAKPKVADYPFTTLIPSLGVVSVVPEKSFVVADIPGLIEGAADGAGLGIRFLKHLERCRVLLHMIDIMPIDQSDPIQNALTIIDELEQYSEKLAGKPRWLVFNKTDLMPEEEANEKIQEILDALGWEDEYFKISAINRNGTKELCYKLADFMENLPREEEEVAEEDKVNFMWDDYHKDAIAGKDVVTEDDDD

SEQ ID NO: 17001 - protein, 157 aa, Brassica rapa subsp. chinensis
MSLIPSFFGGRRTNVFDPFSLDLYDPFEGFLTPSGMTNATSKDVAAFTNAKVDWRETPEAHVFKADLPGLKKEEVKVEVEDGNILQISGERSSENEEKSDKWHRVERSSGKFMRRFKLPENAKVDEVKACMENGVLSVTVPKMPERKPEVKSIDISG

SEQ ID NO: 17002 - protein, 782 aa, uncultured bacterium
MPKRHRIPALYWIACVTLAIAFTSLLAPISLRAIDGAPYLSPASVGVDPLTDIATFSAGEQHTCAVTSDGRVQCWGRNSSGQLGNGSTADSALPITVPGLSDVVAVSASGFHTCARTEAGAVLCWGNNFYGQLGDGTNDDSPSPVAVVGLESGVAAISAGGSHTCALTDGGAVKCWGDNSAGAVGDGTGDDRNSPVDVDGLTSGVAAISSGGGHTCALTDAGGLKCWGWNFRGQLGDNSEISRSSPVDVAGLSTGVTAVSSGAQHTCALLEEGGVQCWGRNAENQLGDGTENGSLVPVDADGTEDAAGIHAGGFHTCITNADGGIQCWGWNEDGQLGDDSTTDAGAPVDVVGLASGVDEVSLGEEHSCARIEDGIQCWGNNNRGQLGDNTDDSRLTPVDVLQGGDVLAGISALGAGSTHSCAVTNSGGILCWGGNDFGQLGDGSTVTSTVAVEHSTLTSGIAAVGAGEDHTCALTDGGGVKCWGRNSQGQLGNGKLVNSSEPVDALLLSQGVSSLTTGGNHSCVLLDTGGIRCWGANGTGQLGNGSRSASTVAQSVTGLTSGVINVSAGSSHTCAVTSSGAVKCWGWNFYGQVGDGSTDFRTEPVDVVGLGAGAAAVVAGRWHTCAIMDDGRVKCWGYNVYGQLGDGTEDDSPTPVDVVNLPSAVTQVTVGDSHTCALTESDGILCWGLSSSGRLGGDPDPDFAAVVGLGTGVTQIAGGDDHTCALIGGNVRCWGDNEFSQIGDGNVADRDEPAPVLRAAVQQSPAPSSDSLYLPTLLRSAD

SEQ ID NO: 17003 - protein, 339 aa, Helianthus annuus
ISEDVTEPNASSTLNENPTTTPSAENESATAKASKSEEEQSEQEKTLKKPDKILPCPRCNSMDTKFCYYNNYNVNQPRHFCKNCQRYWTAGGTMRNVPVGAGRRKNKTSQSQYRQITVTEPVPGDLNNTLLKPNGTVLTFGSDAPLCESMASVLKIADKTMRQDSFRKPEDIIIPGPSSNDDNTNRPSATGPAFCPPGFPGAPWPYPWPPQMGPAFCPPGFPMPFYPAAPYWGCAIPVPGPSSGPGLSPGPWSMQWVPHPSSYHPAPPVTYAVSPSSPISPTLGKHSRAENGEDEIIKENEAEKSLWVPKTLRIDDPEEAAKSSIWATLGIKNDRTTSG

SEQ ID NO: 17004 - protein, 339 aa, Helianthus annuus
ISEDVTEPNASSTLNENPTTTLSAENESATAKVSKSEEEQSEQEKTLKKPDKILPCPRCNSMDTKFCYYNNYNVNQPRHFCKNCQRYWTAGGTMRNVPVGAGRRKNKTSQSQYRQITVTEPVPGDLNNTLLKPNGTVLTFGSDAPLCESMASVLKIADKTMRQDSFRKPEDIIIPGPSSNDDNTNRPSATGPAFCPPGFPSAPWPYPWPPQMGPAFCTPGFPMPFYPAAPYWGCAIPVPGPSSGPGLSSGSWSMQWVPHPSSYHPAPPVTYAASPSSPISPTLGKHSRAENGEDEIIKENEAEKSLWVPKTLRIDDPEEAAKSSIWATLGIKNDRTTSG

SEQ ID NO: 17005 - protein, 339 aa, Helianthus annuus
ISEDVTEPNASSTLNENPTTTLSAENESATAKVSKSEEEQSEQEKTLKKPDKILPCPRCNSMDTKFCYYNNYNVNQPRHFCKNCQRYWTAGGTMRNVPVGAGRRKNKTSQSQYRQITVTEPVPGDLNNTLLKPNGTVLTFGSDAPLCESMASVLKIADKTMRQDSFRKPEDIIIPGPSSNDDNTNRPSATGPAFCPPGFPGAPWPYPWPPQMGPAFCPPGFPMPFYPAAPYWGCAIPVPGPSSGPGLSPGPWSMQWVPHPSSYHPAPPVTYAVSPSSPISPTLGKHSRAENGEDEIIKENEEEKSLWVPKTLRIDDPEEAAKSSIWATLGIKNDRTTSG

SEQ ID NO: 17006 - protein, 339 aa, Helianthus annuus
ISEDVTEPNASSTLNENPTTTLSAENESATAKVSKSEEEQSEQEKTLKKPDKILPCPRCNSMDTKFCYYNNYNVNQPRHFCKNCQRYWTAGGTMRNVPVGAGRRKNKTSQSQYRQITVTEPVPGDLNNTLLKPNGTVLTFGSDAPLCESMASVLKIADKTMRQDSFRKPEDIIIPGPSSNDDNTNRPSATGPAFCPPGFPGAPWPYPWPPQMGPAFCPPGFPMPFYPAAPYWGCAIPVPGPSSGPGLSPGPWSMQWVPHPSSYHPAPPVTYAVSPSSPISPTLGKHSRAENGEDEIIKENEAEKSLWVPKTLRIDDPEEAAKSSIWATLGIKNDRTTSG

SEQ ID NO: 17007 - protein, 339 aa, Helianthus annuus
ISEDVTEPNASSTLNENPTTTLSAENESATVKVSKSEEEQSEQEKTLKKPDKILPCPRCNSMDTKFCYYNNYNVNQPRHFCKNCQRYWTAGGTMRNVPVGAGRRKNKTSQSQYRQITVTEPVPGDLNNTLLKPNGTVLTFGSDAPLCESMASVLKIADKTMRQDSFRKPEDIIIPGPSSNDDNTNRPSATGPAFCPPGFPGAPWPYPWPPQMGPAFCPPGFPMPFYPAAPYWGCAIPVPGPSSGPGLSPGPWSMQWVPHPSSYHPAPPVTYAVSPSSPISPTLGKHSRAENGEDEIIKENEEEKSLWVPKTLRIDDPEEAAKSSIWATLGIKNDRTTSG

SEQ ID NO: 17008 - protein, 339 aa, Helianthus annuus
ISEDVTEPNASSTLNENPTTTLSAENESATAKVSKSEEEQSEQEKTLKKPDKILPCPRCNSMDTKFCYYNNYNVNQPRHFCKNCQRYWTAGGTMRNVPVGAGRRKNKTSQSQYRQITVTEPVPGDLNNTLLKPNGTVLTFGSDAPLCESMASVLKIADKTMRQDSFRKPEDVIIPGPSSNDDNTNRPSATGPAFCPPGFPGAPWPYPWPPQMGPAFCTPGFPMPFYPAAPYWGCAIPVPGPSSGPGLSPGSWSMQWVPHPSSYHPAPPVTYAASPSSPISPTLGKHSRAENGEDEIIKENEAEKSLWVPKTLRIDDPEEAAKSSIWATLGIKNDRTTSG

SEQ ID NO: 17009 - protein, 339 aa, Helianthus annuus
ISEDVTEPNASSTLNENPTTTLSAENESATAKASKSEEEQSEQEKTLKKPDKILPCPRCNSMDTKFCYYNNYNVNQPRHFCKNCQRYWTAGGTMRNVPVGAGRRKNKTSQSQYRQITVTEPVPGDLNNTLLKPNGTVLTFGSDAPLCESMASVLKIADKTMRQDSFRKPEDIIIPGPSSNDDNTNRPSATGPAFCPPGFPGAPWPYPWPPQMGPAFCPPGFPMPFYPAAPYWGCAIPVPGPSSGPGLSPGPWSMQWVPHPSSYHPAPPVTYAVSPSSPISPTLGKHSRAENGEDEITKENEAEKSLWVPKTLRIDDPEEAAKSSIWATLGIKNDRTTSG

SEQ ID NO: 17010 - protein, 339 aa, Helianthus annuus
ISEDVTEPNASSTLNENPTTTLSAENESATAKAAKSEEEQSEQEKTLKKPDKILPCPRCNSMDTKFCYYNNYNVNQPRHFCKNCQRYWTAGGTMRNVPVGAGRRKNKTSQSQYRQITVTEPVPGDLNNTLLKPNGTVLTFGSDAPLCESMASVLKIADKTMRQDSFRKPEDIIIPGPSSNDDNTNRPSATGPAFCPPGFPGAPWPYPWPPQMGPAFCPPGFPMPFYPAAPYWGCAIPVPGPSSGPGLSPGPWSMQWVPHPSSYHPAPPVTYAVSPSSPISPTLGKHSRAENGEDEIIKENEEEKSLWVPKTLRIDDPEEAAKSSIWATLGIKNDRTTSG

SEQ ID NO: 17011 - protein, 339 aa, Helianthus annuus
ISEDVTEPNASSTLNENPTTTLSAENESATAKVSKSEEEQSEQEKTLKKPDKILPCPRCNSMDTKFCYYNNYNVNQPRHFCKNCQRYWTAGGTMRNVPVGAGRRKNKTSQSQYRQITVTEPVPGDLNNTLLKPNGTVLTFGSDAPLCESMASVLKIADKTMRQDSFRKPEDIIIPGPSSNDDNTNRPSATGPAFCPPGFPGAPWPYPWPPQMGHAFCPPGFPMPFYPAAPYWGCAIPVPGPSSGPGLSPGPWSMQWVPHPSSYHPAPPVTYAASPSSPISPTLGKHSRAENGEDEIIKENEAEKSLWVPKTLRIDDPEEAAKSSIWATLGIKNDRTTSG

SEQ ID NO: 17012 - protein, 339 aa, Helianthus annuus
ISEDVTEPNASSTLNENPTTTLSAENESATAKASKSEEEQSEQEKTLKKPDKILPCPRCNSMDTKFCYYNNYNVNQPRHFCKNCQRYWTAGGTMRNVPVGAGRRKNKTSQSQYRQITVTEPVPGDLNNTLLKPNGTVLTFGSDAPLCESMASVLKIADKTMRQDSFRKPEDIIIPGPSSNDDNTNRPSATGPAFCPPGFPGAPWPYPWPPQMGPAFCPPGFPMPFYPAAPYWGCAIPVPGPSSGPGLSPGPWSMQWVPHPSSYHPAPPVTYAVSPSSPISPTLGKHSRAENGEDEIIKENEAEKSLWVPKTLRIDDPEEAAKSSIWATLGIKNDRTTSG

SEQ ID NO: 17013 - protein, 339 aa, Helianthus annuus
ISEDVTEPNASSTLNENPTTTPSAENESATAKVSKSEEEQSEQEKTLKKPDKILPCPRCNSMDTKFCYYNNYNVNQPRHFCKNCQRYWTAGGTMRNVPVGAGRRKNKTSQSQYRQITVTEPVPGDLNNTLLKPNGTVLTFGSDAPLCESMASVLKIADKTMRQDSFRKPEDIIIPGPSSNDDNTNRPSATGPAFCPPGFPGAPWPYPWPPQMGPAFCPPGFPMPFYPAAPYWGCAIPVPGPSSGPGLSPGPWSMQWVPHPSSYHPAPPVTYAVSPSSPISPTLGKHSRAENGEDEIIKENEAEKSLWVPKTLRIDDPEEAAKSSIWATLGIKNDRTTSG

SEQ ID NO: 17014 - protein, 339 aa, Helianthus annuus
ISEDVTEPNASSTLNENPTTTLSAENESATAKVSKSEEEQSEQEKTLKKPDKILPCPRCNSMDTKFCYYNNYNVNQPRHFCKNCQRYWTAGGTMRNVPVGAGRRKNKTSQSQYRQITVTEPVPGDLNNTLLKPNGTVLTFGSDAPLCESMASVLKIADKTMRQDSFRKPEDIIIPGPSSNDDNTNRPSATGPAFCPPGFPGAPWPYPWPPQMGPAFCPPGFPMPFYPAAPYWGCAIPVPGPSSGPGLSPGPWSMQWVPHPSTYHPAPPVTYAVSPSSPISPTLGKHSRAENGEDEIIKENEAEKSLWVPKTLRIDDPEEAAKSSIWATLGIKNDRTTSG

SEQ ID NO: 17015 - protein, 339 aa, Helianthus annuus
ISEDVTEPNASSTLNENPTTTPSAENESATAKASKSEEEQSEQEKTLKKPDKILPCPRCNSMDTKFCYYNNYNVNQPRHFCKNCQRYWTAGGTMRNVPVGAGRRKNKTSQSQYRQITVTEPVPGDLNNTLLKPNGTVLTFGSDAPLCESMASVLKIADKTMRQDSFRKPEDIIIPGPSSNDDNTNRPSATGPAFCPPGFPGAPWPYPWPPQMGPAFCPPGFPMPFYPAAPYWGCAIPVPGPSSGPGLSPGPWSMQWVPHPSSYHPAPPVTYAASPSSPISPTLGKHSRAENGEDEIIKENEEEKSLWVPKTLRIDDPEEAAKSSIWATLGIKNDRTTSG

SEQ ID NO: 17016 - protein, 339 aa, Helianthus petiolaris
ISEDVTEPNASSTLNENPTTTLSAENESATAKVSKSEEEQSEQEKTLKKPDKILPCPRCNSMDTKFCYYNNYNVNQPRHFCKNCQRYWTAGGTMRNVPVGAGRRKNKTSQSQYRQITVTEPVPGDLNNTLLKPNGTVLTFGSDAPLCESMASVLKIADKTMRQDSFRKPEDIIIPGPSSNDDNTNRPSATGPAFCPPGFPGAPWPYPWPPQMGPAFCPPGFPMPFYPAAPYWGCAIPVPGPSSGPGLSPGPWSMQWVPHPSSYHPVPPVTYAASPSSPISPTLGKHSRAENGEDEIIKENESEKSLWVPKTLRIDDPEEAAKSSIWATLGIKNDRTTSG

SEQ ID NO: 17017 - protein, 386 aa, Lotus japonicus
MAMKRAASSAVRSLLTAPTPNPSSSIFSRNLHASGGKKKIVGVFYKANEYAALNPNFVGCVEGALGIREWLEAQGHEYIVTDDKEGLDSELEKHIPDLHVLISTPFHPAYVTAERIKKAKNLELLLTAGIGSDHIDLNAAAAAGLTVAEVTGSNTVSVAEDELMRILILVRNFLPGYHQAITGEWNVAGIAHRAYDLEGKTIGTVGAGRIGKLLLQRLKPFNCNLLYHDRLKMEPELEKEIGAKFEEDLDAMLPKCDVIVINTPLTDKTRGLFDKNRIAKLKKGVLIVNNARGAIMDTQAVADACSSGHIAGYSGDVWFPQPAPKDHPWRYMPNHAMTPHISGTTIDAQLRYAAGVKDMLERHFKGEDFPEQNYIVKEGQLASQYR

SEQ ID NO: 17018 - protein, 305 aa, Candida maltosa
MYKTVLKNSGRIQRNFIFRNVSSTLQRSLATSASTSSSTTTSNAETGELHVSTPLDSPSVHPPDGSSISLKSATRDASLFGTRPIYLDVQATTPVDPRVLDKMLEFYTGLYGNPHSSTHAYGWETDKEVEKARGYIADVINADPKEIIFTSGATATNNMAIKGVPRFYKKTKKHIITTQTEHKCVLDSARHMQDEGFDITYLPVNSEGLINLDDLKAIRKDTVLVSVMAVNNEIGVIQPLKEIGQICRENKIFFHTDAAQAYGKIPIDVNEMNIDLLSISSHKIYGPKGIGACYVRRRPRVRLDP

SEQ ID NO: 17019 - protein, 579 aa, Chlamydomonas reinhardtii
MASPAPSGSPPLVIYSCTDEQMLEVTELVGDSATAAIVCSQYDCSFTAVSCVLKYLAAQQADLSEQMDGTAKAEVALSLDVAFLLFSAYLVFGPMQLGFALLCAGAIRSKNSMNVLMKNILDACTGAIGFYLFGYAFAFGHHANQTSNAFIGDHNFALSYTTQVSSLDSNVSYDGFATQGWHVFFFQWSFCAAATTIVSGAVAERCTFQAYLAYAFFISSFVYPVVVHWVWSASGWLSAFNTSRDGYALLLQTGAIDFAGGGVVHLTGGMAALMGAWIIGPRIGRFDASGKVNEMKGHSATLVVMGTFLLWFGFYGFNPGSNLTIATTASAIVVSRVAVTTTLSAGAAGLTGLFWRYMRTSTWDTVLVCNCCLAGLVGITCSCSVVEPWAALICGFVAAFVFIGFEYVVLYKMKIDDPVSAVALHLFCGVWGLLFPGLLAQPTYVADVYGAYGFGPDVKGSKKFGILYGGHGQVLLCQVIEALSICAWVGVMMGAFFGLLKVAKRLRVPVDQELAGLDVSKHTNEAYNGAIMPTAGGGAGGGGGYGSNGGERGSGFYTGAGPAGDTSTGGGHAANGGYD

SEQ ID NO: 17020 - protein, 579 aa, Chlamydomonas reinhardtii
MASPAPSGSPPLVIYSCTDEQMLEVTELVGDSATAAIVCSQYDCSFTAVSCVLKYLAAQQADLSEQMDGTAKAEVALSLDVAFLLFSAYLVFGPMQLGFALLCAGAIRSKNSMNVLMKNILDACTGAIGFYLFGYAFAFGHHANQTSNAFIGDHNFALSYTTQVSSLDSNVSYDGFATQGWHVFFFQWSFCAAATTIVSGAVAERCTFQAYLAYAFFISSFVYPVVVHWVWSASGWLSAFNTSRDGYALLLQTGAIDFAGGGVVHLTGGMAALMGAWIIGPRIGRFDASGKVNEMKGHSATLVVMGTFLLWFGFYGFNPGSNLTIATTASAIVVSRVAVTTTLSAGAAGLTGLFWRYMRTSTWDTVLVCNCCLAGLVGITCSCSVVEPWAALICGFVAAFVFIGFEYVVLYKMKIDDPVSAVALHLFCGVWGLLFPGLLAQPTYVADVYGAYGFGPDVKGSKKFGILYGGHGQVLLCQVIEALSICAWVGVMMGAFFGLLKVAKRLRVPVDQELAGLDVSKHTKEAYNGAIMPTAGGGAGGGGGYGSNGGERGSGFYTGAGPAGDTSTGGGHAANGGYD

SEQ ID NO: 17021 - protein, 333 aa, Craterostigma plantagineum
MNQQQVKVSKNNKQVNNCEDDDDSSDLRRGPWTVDEDFTLINYIAHHGEGRWNSLARFAGLKRTGKSCRLRWLNYLRPDVRRGNITLEEQLLILELHSRWGNRWSKIAQHLPGRTDNEIKNYWRTRVQKHAKQLKCDVNSKQFKDTMRYLWMPRLVERIQASATTDDGAPPAVASSPSSAMNTACYSAAMAAGDHRRQFMLMPQYYATTTTTHNNSMIAQENSSTVASSESFGSLSSELTAEANYANYHRVINGADHQQIDSSTTSYDWQNCAVGNNGNSDQLGMGFADDRRSNEQWMMMTDDVVDNGGSSDQDNNLWNVDDVWFLQQFSSCF

SEQ ID NO: 17022 - protein, 393 aa, Pseudomonas putida
MTDVVIVSAARTAVGKFGGSLAKIAAPELGATVIRAVLERANLKPEQVSEVILGQVLAAGSGQNPARQSLIKAGLPSAVPGMTINKVCGSGLKAVMLAANAIIAGDADIVIAGGQENMSAAPHVLMGSRDGFRMGDAKLIDSMIVDGLWDVFNQYHMGTTAENVAKEYGISREDQDKFAALSQNKAEAAQKSGRFNEEIVSVDIPQRKGDPVKFATDEFVRHGVTAEALASLKPAFSKEGTVTAANASGLNDGAAAVIVMSAKKAEALGLTPLARIKAYANAGVDPKVMGMGPVPASKRCLERAGWSVGDLDLMEINEAFAAQALAVHKQMGWDTSKINVNGGAIAIGHPIGASGCRILVTLLHEMQKRDAKKGLASLCIGGGMGVALAVERP

SEQ ID NO: 17023 - protein, 435 aa, Streptomyces coelicolor A3(2)
MTGRFEFMHQSSHPDRPTTPADDWSGANAAHLAAPARIAAAPASVTDEDVALVRASLTVVTPHVSELAAHFYSILFSRYPQVRDLFPAELDVQRERLVRALLRIVELVDDPDNLVAFCSRLGRGHRKFGTQSGHYPAVGECLLQALSHFAGPAWHPALATAWQRAYTAAADVMVRAAEEDARSRPAVWDAHIVGHVHRGHGIAEITVRPHQPYPFVAGQYVSIETPWAPRQWRQYSPANAPRPNSELTFHVRAVREGKVSNALVHHARPGDPVRLGPPEGDMVLRPTRQRDLLFVAGGTGLAPIRALIEEVAQGSISDAREVSLFIGARTANELYGLDDMLRMSQRYHWLRVRAAVSDERIPGLEGTLPEVLAEFGPWYRHEAYLCGPPQMLSGAVHALRRHGVPPRHIHYDPWDTPVLTAPLGPPPPDEEDDQL

SEQ ID NO: 17024 - protein, 644 aa, Streptomyces coelicolor A3(2)
MCGIAGTYHWPDGKAVTDRLTDVLAHRGPDGAGRYSHPAGEGEVHLGHRRLAVVDLSTTGAQPMVSEGLALSYNGELYNAPELRTELESAGVRFRGTSDTEVVLEAWRRWGTDCLPQLRGMFAFAVFDERTGELVLARDQLGIKPLFLLRRGAGLVFASELKALATATGGKLEVDHAALVASLLYYWVPDSRCALREAEKLPPGSWLRCRPDGRVERGRFWNLRDVAAEGRERARSGERPDLAAVVEESTRRHLLSDVPVATFLSGGLDSSYLTALAARDRPGISAYTIGFRAEDARFEAMPDDLRYARQVAERFGVDLHEIEIAPNVLDLLPRMTYHLDEPIGDPAAINTFLICSAAREAGVKVMLSGMGADELFAGYRKHLANVLALRYQRVPRPLRRGVSAAVGRLPVASSRRGYRSVRFAKRFLSFADLPQETAFRRSYTMYDRQELLDLIDPDLAGTVEDVLTEHADVYEDNDLDDFVNRMCLADARMFLPGLNLAYTDRSSMAASTEVRVPYVDVEVVKAAFAVPGDRKIVGRQGKAVLKEAATSVLPREIVYRPKGLFSAPLRAWMSRDLAPLVREVVNDGELVRSGFLRRDALRRLVAEDAAGQRDFSKHLWHVLTLEYWYRGATSGSGDHSSSTA

SEQ ID NO: 17025 - protein, 67 aa, Streptomyces coelicolor A3(2)
MASGTVKWFNSEKGFGFIAQDGGGPDVFAHYSNINAQGYRELQEGQAVTFDITQGQKGPQAENITPA

SEQ ID NO: 17026 - protein, 317 aa, Streptomyces coelicolor A3(2)
MRDIAVFSGSAHPDLAEEVCAQLGVPLSPTRVSRFANDCLEVQLMANCRERDVFLVQPLVTPVQEHLVELLMMCDAARGASAGRITVVMPHYSYARSDKKDAPRISLGGRLVADLLVAAGASRVLAMTLHSPQVHGFFSVPVDHLHALRELAAHFRQYDLSRATVVSPDLGNAKEAAAFARMLGAQVAAGAKQRYADDRVSISSVIGDVAGRDVIVLDDEIAKGSTVLELLDRLRESGPRTIRLACTHGLFAAGALGRLSEQPDVLEIVCTNTVPVPADDHTDKLRILSIAPALAEAVRRIHNGESVSALFDARPAG

SEQ ID NO: 17027 - protein, 296 aa, Streptomyces coelicolor A3(2)
MTDQLTVSVLGTGIMGAAMARNLARAGHAVRVWNRSRAKAEPLAADGAHVAGSPEEAVRGADVVLTMLYDGPAALDVMRRAEPGLRPGTVWAQSTTAGVDAVADLAAYAHERGLVFFDAPVLGTRQPAEAGQLLVLAAGPGEARDTVAPVFDAVGSRTVWTGEDGAAGSATRLKLVANSWVLAVTNAGGETLSLAKALGVDPDTFFDAIAGGPLDMGYLRAKAGLIRDGALRPAQFAVATAEKDARLIVEAGEANGVRLDLAAAGAERFARAAAQGHGDEDMAAAYFASFEEKASD

SEQ ID NO: 17028 - protein, 468 aa, Streptomyces coelicolor A3(2)
MARFRMGEGVLRRKPIEHIEETESGGGLVRSLGLWQLTAIGVGGIIGAGIFTLAGTVANGTAGPAVLISFLIAGVASAAAALSYAEFAGLIPKAGSAYTYGYAVLGELVGWFIGWDLLLEYTAIVAVVAIGISGYFSFLVGEMGADLPNWMLGAPGTGDGHKVDLFAAALCLLIAYLLTLGIRNAARFEMVVVVLKVLVVLLVIGVGVFHINSSNYHPFFPFGVGGAFTGAATVFFAVFGYDAMSTAAEESKDAQRHMPKAIIYSLIISMVLYVAACLVLTGMQNYKDIDPESGFSTAFKSVGLSSLADIIAVGAIIGILTVMFTFMLGVTRVWFSMSRDGLLPKWFAKTHPTRHVPTRVTWIVGVASAVIAGFLPIGEAAELTNIGILLAFVVVCAAVIVLRYRQPDLPRTFRTPWMPFVPALGIVFSIWLITFLQWQTWVRFAVWFVIGLVIYFAYSYRKSELARR

SEQ ID NO: 17029 - protein, 139 aa, Streptomyces coelicolor A3(2)
MLRTLIKSKIHRATVTQADLHYVGSVTIDADLLDAADLLPGELVHIVDVTNGARLETYVIEGERGSGVIGINGAAAHLVHPGDLVILISYAQVTDAEARSLRPRVVHVDGDNRIVGLGADASEPVPGSDQERSPQAVSA

SEQ ID NO: 17030 - protein, 600 aa, Streptomyces coelicolor A3(2)
MHPDRESAWTAPADAVEQPRQVRRILKLFRPYRGRLAVVGLLVGAASLVSVATPFLLKEILDVAIPEGRTGLLSLLALGMIFGAVLTSVFGVLQTLISTTVGQRVMHDLRTAVYGRLQQMSLAFFTRTRTGEVQSRIANDIGGMQATVTSTATSLVSNLTSVVATIVAMVVLDWRLTVVSLLLLPVFVWISRRVGRERRKITTRRQKQMAAMAATVTESLSVSGILLGRTMGRSDSLTRAFADESESLVDLEVRSNMAGRWRMAVITIVMAAMPAVIYWTAGIALQLGGPDVSLGTIVAFVSLQQGLFRPTVSLLSTGVQIQSSLALFQRIFEYLDLPIDITERKDAVHLDHIKGEVRFEGVGFGYGGKGGPVLDGIDVTVPAGSSLAVVGPTGAGKSTLGHLVPRLYDVTDGRVTLDGVDVRDLDFDTLARAVGVVSQETYLFHASVAENLRFAKPDATDAELEAAARAAQIHDHIAALPDGYDTVVGERGHRFSGGEKQRLAIARTILRDPPVLVLDEATSALDTRTEAAVQGAIDALSANRTTITIAHRLSTVRDADRIVVLDSGRLAEQGTHEALLAQDGRYAALVRRDARLEPTR

SEQ ID NO: 17031 - protein, 389 aa, Streptomyces coelicolor A3(2)
MRDAVVVEAVRTPIGKGKPNGALAHVHPVELLAHTLRTLVERSGVDPALIDDVIGGTVDQVGEQAMNTTRYALLSAGFPESVPATTVDRQCGSSQQAVHFAAQGVMAGAYDLVVACGVESMSRVPMWSNVPPGADPFGPGVAARYPQGLVPQGISAELIAAKWSLSRERMDAFAVSSHQKAATAHAAGRFDAEIAPLDGVSHDECVRPDSSVEVLAGLRPAYHDPAFAERFPQIGWNVTAGNASPVNDGASAVLITSGDTAARLGLRPLARLHSFAVTGSDPLLMLTGVVPATEKVLRRASLSLGDIDLFEVNEAFASVVLAWQRETGADLAKVNVHGGAIALGHPLGASGTRLTTTLVHALHERGARYGLQTMCEAGGLANAMILEAV

SEQ ID NO: 17032 - protein, 396 aa, Streptomyces coelicolor A3(2)
MTRTRSAVVIGGGIGGLTAAAALHRSGLRVTVLERAPSLRPIGAAISLSPNALRALDVIGLGDEIRDLAAWQGDGGLRTPGGRWLSRSSAEAAAARFGGPLVLLHRSTLVERLAALLPPNAVRTAADATVADPGDRDRLARVRTPEGELEADLVVAADGIHSVVRRALFPDHPDPVYSGFTTWRLVIPVPGVAFASHETWGRGRIWGTHPLKDGRVYAYAAAVAPAAGHAADERAELLHRYGDWHDPIPAVLAAARPEDVLRHDVHHIAEPLPAYHRGRVALLGDAAHAMPPNLGQGGNQAVEDAIVLAHHNQDLAAYTAARLPRTTAIARKAVKVARLNLMRNRAGTAVRDATILALSKAGPALLLRGFDGIADWRPPQPPYASRRTQVGEHNER

SEQ ID NO: 17033 - protein, 565 aa, Streptomyces coelicolor A3(2)
MTSTVPNAIEHADEQQPPITMFGPDFPYAYDDFLAHPAGLGQIPATEHGTEVAVIGGGLSGIVAAYELMKMGLRPVVYEADRIGGRLRTVGFDGCDPSLTAEMGAMRFPPSSTALQHYIDLVGLRTRAFPNPLAEATPSTVVDLKGESHYAETLDDLPQVYRDVADAWAKCLEEGADFTDMNRALRERDVPRIREIWAKLVEKLDNQTFYGFLCDSEAFKSFRHREIFGQVGFGTGGWDTDFPNSILEILRVVYTEADDHHRGIVGGSQQLPLRLWEREPEKIVHWPYGTSLRSLHVDGEPRPAVTRLNRTAGNRITVTDADGDIRTYRAAIFTAQSWMLLSKIACDDSLFPIDHWTAIERTHYMESSKLFVPVDRPFWLDKDEDTGRDVMSMTLTDRMTRGTYLLDDGPNKPAVICLSYTWCDDSLKWLPLSANERMEVMLKSLGEIYPKVDIRKHVIGNPVTVSWENEPYFMGAFKANLPGHYRYQRRLFTHFMQEDLPEDKRGIFLAGDDISWTAGWAEGAVQTALNAVWGVMHHLGGETDATNPGPGDLYEEIAPVELPED

SEQ ID NO: 17034 - protein, 496 aa, Streptomyces coelicolor A3(2)
MLDQGAPPPHDASAVPPSPGLAARLMRRKPVERLVAEGGQGEGGSLRRSLGLWQLTMISIGATLGTGIFVVLGEAVPKAGPAVTLSFVIAGLTALFSALSYAELAGTIPVAGSSYSYAYATMGELVAWICGWCLVLEYGVSVAAVAVGWGEYLNELLDGTIGVTLPAALSAPPGDGGIFNLPALIVVLLAMTFLLGGARESACANTIMVVVKIAALVLFCAIGVQGFRSGNYEHFMPLGMAGVSAAGATLFFSYIGFDAASTAGEEAKNAQRDLPRAIMLSLVIVTVLYVLVAAVAVGAKPWRTFTDSEASLAQIMTDVTGQSFWGTLLAFCAVVAIASVVLTVLYGQTRVLFAMSRDGLVPKVFSKVHPKTGAPRANTLIVSLFCGVLAAAVPLGQLADATSIGTLFAFALVNVAVVVLRRTRPEMRRTFRVPLSPVLPALGFGLCVWMMGSLSTVTWVVFGVWMAVGLVFYFVYGHRRSRLATPVPSEARTHQK

SEQ ID NO: 17035 - protein, 445 aa, Streptomyces coelicolor A3(2)
MRRIRPRRSPAVPLLLAVWAGAAGVLWLWWRNTPAISDDTGKILGAGRITGLLAGYLMALVVLQMARVPALERRVGSDRVARWHAMTGRYTLCLVLAHVFLIMWGYAAQAGRGLGDIVAQTVDSVNQLPDMGKAAIGTGLLVVVGLLSVGPVRRRIPYDTWYHVHLLTYAAVFLTFWHQLTTGNDFAVEPVASTVWYALYGSVTALLLWYRVLTPLRLNLRHRMRVEAVIEETPGIVSVLIGGRRLHRMGAEAGQFFRWRFLAPGMRFSSHPYSLSAAPRPDMLRITVKAIGDHSARLRELAPGTRVWAEGPYGALTAQRRSRGKVLLVAGGVGITPMRALFETLPGASGDITLLYRANSTQDLALWDELAGIADERGARLMYAVNSPDGERPDISAETLARKIPDVERHDVFLCGPPGFAQSVYEALRGAGVPARRIHHESFEM

SEQ ID NO: 17036 - protein, 371 aa, Streptomyces coelicolor A3(2)
MKVGIPREVKNNEFRVAITPAGVHELVRHGHQVVVERNAGVGSSIPDEEYVTAGARILDTADEVWATADLLLKVKEPIAEEYHRLRKDQTLFTYLHLAASKECTDALIESRTTAIAYETVELPSRALPLLAPMSEVAGRLAPQVGAYHLMAANGGRGVLPGGVPGVLAGRAVVIGGGVSGWNAAQIAIGLGFHVTLLDKDITKLREADKIFGTKIQTVVSNAFELEKACLEADLVIGAVLIPGAKAPKLVTNELVSRMKPGSVLVDIAIDQGGCFEDSHPTTHAEPTFPVHNSVFYCVANMPGAVPNTSTYALTNATLPYIVELADRGWAEALRRDPALAKGLNTHDGKVVYREVAEAHGLEHVELASLLA

SEQ ID NO: 17037 - protein, 254 aa, Streptomyces coelicolor A3(2)
MATLEIRDLHVTVEADNATKEILKGVDLTVKQGETHAIMGPNGSGKSTLAYSLAGHPKYTITGGTVTLDGEDVLEMSVDERARAGLFLAMQYPVEVPGVSVSNFLRTSATAVRGEAPKLRHWVKEVKEAMERLNMDPAFAERNVNEGFSGGEKKRHEILQLELLKPKVAILDETDSGLDVDALRVVSEGVNRVRETGEVGTLLITHYTRILRYIKPDYVHVFANGRIAESGGAELADKLEAEGYEAYTKGGASE

SEQ ID NO: 17038 - protein, 608 aa, Streptomyces coelicolor A3(2)
MTTQTTAPKKTGAPAPGDASGLIGIPAGLGRALATGGGVLTVVSTFLAWTWTAEFPGDLTVYGYPGGLQVLVLIAGALTALFGLASYGVKGLGWLAPAGADAALKFAALAAFATTWYTIIAISTKLGGVVNLEPGGYIAAAVTLVAFLGALALPFERPEPDPFDPDDTGWDQFKHTSSQNWQTVRAAFASKEPPPLRALPSYVEILVIVATLAVALLVFTYGIGTEYDELFIGFLIVAGFGFTALHRSGLIVHVTEITARHQNITVCGGFIAAACFPFTQSDDQYATLGVYILIFATVALGLNIVVGLAGLLDLGYVAFLGVGAYAASMVSGSPSSPFDLHLPFWAAVLVGAAASLVFGVLIGAPTLRLRGDYLAIVTLGFGEIFRITANNLDGTSGPDVTNGSNGISSIPDLKILGFDLGVSHDMGGFTLGRFANYFLLMLIITAVVVLVFRRSGDSRIGRAWVAIREDETAALAMGINGFRVKLIAFAVGASLAGLAGTVQAHVTYTVTPEQYLFAGTTPPNSAFLLAAVVLGGMGTIAGPLIGAALLFLIPNKLQFLDDYQLLAFGLALVLLMRFRPEGLIANRRRKLEFHEEDEAPAVLSKTGA

SEQ ID NO: 17039 - protein, 460 aa, Streptomyces coelicolor A3(2)
MAYFDAASAAPLHPVARQALLASLDEGWADPARLYREGRRARLLLDAAREATAECVGCRPDELVFTPSGTRAVHSGVAGALAGRRRVGRHLIVSAVEHSSVLHAAEAHEAGGGSLTQVGVDRAGAVDPAAYAAALGEDTALACLQSANHEVGTEQPVARVAEACRAAGVPLLVDAAQSLGWGRVEGDWSLLTGSAHKWGGPSGVGLLAVRKGVRFAPQGPEDERESGRAPGFENLPAIVAAAASLRAVRAEATAEAARLRELTERIRSRVPELVPDVEVVGDPSRRLPGIVTFSCLYVDGETLLHELDRAGFSVSSGSSCTSSTLTPSHVLRAMGVLSEGNVRVSLPPGTAAEDVERFLEVLPGTVAAVREKLGAPAATENVRAAGPGLVVDALSRRCPIPVIELAKVIGDVPVGATVRVLSDDEAARLDIPAWCEMRGQEYVGEEPVEGGTAYLVRRTR

SEQ ID NO: 17040 - protein, 343 aa, Streptomyces coelicolor A3(2)
MTFKAEYIWIDGTEPTAKLRSKTKIITAAPAGLDALPVWGFDGSSTNQAEGSSSDCVLKPVFSCPDPIRGGEDILVLCEVLDTDMTPHPSNTRAALAELSERFAAQEPVFGIEQEYTFFKGTRPLGFPEGGFPAAQGGYYCGVGSDEIFGRDVVEAHLENCLKAGLGISGINAEVMPGQWEFQVGPLAPLEVSDQLWVARWLLYRTAEDFEVSATLDPKPVKGDWNGAGAHTNFSTKAMREGYDAIITAAESLGEGSKPMDHVKNYGAGIDDRLTGLHETAPWNEYSYGVSDRGASVRIPWQVEKDGKGYIEDRRPNANVDPYVVTRLLVDTCCTALEKAGQV

SEQ ID NO: 17041 - protein, 642 aa, Streptomyces coelicolor A3(2)
MAGPAGRMMAGGGPDQRSMDFKGSSKRLVSQFRPERATLFTLLACVVVSVGLNVVGPKILGRATDLVFAGIVGRDMPSGATKEQVLATMREHGDGNVADMLRSTDFVPGQGIDFGAVGEVLLLALATFAVAGLLMAVATRLVNRAVNRTMFRLREDVQTKLSRLPLSYFDKRQRGEVLSRATNDIDNIGQTLQQSMGQLINSLLTIIGVLAMMFYVSWILALVALVTVPLSFVVATRVGKRSQPQFVQQWRSTGQLNAHIEEMYTGHALVKVFGRQEESAKQFAEQNDALYEAGFKAQFNSGIMQPLMMCVSNLNYVLVAVVGGLRVASGQLSIGDVQAFIQYSRQFSMPLTQVASMANLVQSGVASAERVFELLDAEEQSADPIPGARPEDLRGRVELEHVSFRYDPEKPLIEDLSLKVEPGHTVAIVGPTGAGKTTLVNLLMRFYEVSGGRITLDGVDIAKMSRDELRAGIGMVLQDTWLFGGTIAENIAYGASREVTRGEIEEAARAAHADRFVRTLPDGYDTVIDDEGTGVSAGEKQLITIARAFLSDPVILVLDEATSSVDTRTEVLIQKAMAKLAHGRTSFVIAHRLSTIRDADTILVMEDGAIVEQGAHTELLTADGAYARLYKAQFAEAVAEVG

SEQ ID NO: 17042 - protein, 320 aa, Streptomyces coelicolor A3(2)
MGAMSVRTQSSEEPAETVHRAGFACFVGRPNAGKSTLTNALVGQKVAITSNRPQTTRHTVRGIVHREDAQLILVDTPGLHKPRTLLGERLNDVVRTTWAEVDVIGFCLPANEKLGPGDRFIAKELAGIRKTPKVAIVTKTDLVDSKTLAEQLIAIDQLGKELGIAWAEIVPVSATANQQVDLLADLLTPLLPEGPALYPEGDLTDEPEQVMVAELIREAALEGVRDELPHSIAVVVEEMLPREDRPADKPLLDIHANVYIERPSQKGIIIGPKGKRLKDVGIKSRTQIEALLGTPVFLDLHVKVAKDWQRDPKQLRRLGF

SEQ ID NO: 17043 - protein, 478 aa, Streptomyces coelicolor A3(2)
MTTFVDRVELHVAAGNGGHGCASVHREKFKPLGGPDGGNGGRGGDVILTVDQSVTTLLDYHHSPHRKATNGKPGEGGNRSGKDGQDLVLPVPDGTVVLDGAGNVLADLVGHGTSYVAAQGGRGGLGNAALASARRKAPGFALLGEPGDLQDIHLELKTVADVALVGYPSAGKSSLISVLSAAKPKIADYPFTTLVPNLGVVTAGETVYTVADVPGLIPGASQGKGLGLEFLRHVERCSVLVHVLDTATLESERDPLSDLDVIETELREYGGLDNRPRIVVLNKIDVPDGKDLAEMVRPDLEARGYRVFEVSAVAHMGLRELSFALAELVATARAARPKEEATRIVIRPKAVDDAGFTVTREEDGLFRVRGEKPERWVRQTDFNNDEAVGYLSDRLNRLGVEDKLMKAGARNGDGVAIGPEDNAVVFDWEPSVTAGAEMLGRRGEDHRFEAPRPAAQRRRDRDAERDEAQQEFDGFEPF

SEQ ID NO: 17044 - protein, 352 aa, Streptomyces coelicolor A3(2)
MRAGRLRTGLKGWGGVGAMAFACVLAVLAALLLPAVPWHGGGGGSGHDGAADDGHGATHGSQARAAQECTDPEKQTLAPSGDDGPTIDRIRAREGEKRKLIVGVDQNSFRWGYRDPNSGGDAELEGFDIDLAHRIAKDVLGDEDAVQFKAIPTDQRVPAIQDGRVDMVVRTMTINCDRLEDVAFSAPYFRTGQQVLAPKSSKITGYDGTLAGKEICTAAGSTALSTLEQDQKDGRLAEGVDLRTTVPNQLDCLVRLQLGEVDAVVTDGALAASQAAQDPTVELKGDAFTTEYYGVAMKKDADDLVRRVNRVLEQWRADRADGWQHSYEEWLSETMDDPAKSLPPTPQYLRGS

SEQ ID NO: 17045 - protein, 475 aa, Streptomyces coelicolor A3(2)
MTSAQVDTDKAPEEGYERGLNSRQVQMIAIGGAIGVGLFLGAGANIAKAGPSIILMYALAGVIIFFIMRALGELLLYRPVSGSFAEYSREFLGPFFGYFTGWTYWLMWVVTGMAELTAAAIYIHYWFPDIPQWVSALVFLVLLFVANLISVKLFGEIEFWFSMVKVTAIIGMIVIGVGVLTLGFSQAGDTAAVSNLWEFDGFFPKGIGSSLMTLQGVMFAYLAVELVGVTAGESENPEKTLPKAINTLPWRIALFYVGALTVILAVVKWTEFAEGVSPFVEAFAVIGIPAGAGIVNFVVLTAALSSCNSGMYSTGRMLRTLADNGEAPRIFNKLSSTKTPAIGIAVSVVFMAIGVVLNYLVPEKAFGYVTSVATAAGIWTWLMILISHVRYRRKVVAGRLPASSFPAPGGSVCSYIAIAFLLFVTCLIAYDADARVCLYVMAGWAAALGIGWAVLKSRNPQITERPGEPEFEKIG

SEQ ID NO: 17046 - protein, 229 aa, Streptomyces coelicolor A3(2)
MMSFMKGRVLVVDDDTALAEMLGIVLRGEGFEPSFVADGDKALAAFRETKPDLVLLDLMLPGRDGIEVCRLIRAESGVPIVMLTAKSDTVDVVVGLESGADDYIVKPFKPKELVARIRARLRRSEEPAPEQLAIGDLVIDVAGHSVKRDGQSIALTPLEFDLLVALARKPWQVFTREVLLEQVWGYRHAADTRLVNVHVQRLRSKVEKDPEKPEIVVTVRGVGYKAGPS

SEQ ID NO: 17047 - protein, 324 aa, Streptomyces coelicolor A3(2)
MTGIKTTGEKKMMFFSGRAHPELAEEVAQQLGVGVVPTKAFDFANGEIYVRYQESARGADCFLIQSHTAPINKWVMEQLIMIDALKRASARSITVIVPFYGYARQDKKHRGREPISARLIADLMKTAGADRILAVDLHTDQIQGFFDGPVDHLFALPLLADYVGAKVDRSKLTVVSPDAGRVRVADRWCDRLGAPLAIVHKRRDKDVANQVTVHEVVGDVKGRICVLVDDMIDTGGTICAAADALFAHGAEDVIVTATHGVLSGPAADRLKNSKVSEFVFTNTLPSASELELDKITVLSIAPTIARAVREVFEDGSVTSLFDEQ

SEQ ID NO: 17048 - protein, 344 aa, Streptomyces coelicolor A3(2)
MIRLMTAMRTAGGGPLVAITECDHDSFDIERDVVTSAGGQLLVTQSRDADTMVVNCAGADAIVVQYAAITEQVMDRLPRLKVIGRYGVGVDSVDVEAATRRGILVCNVPDYGTEAVSDHAIGLALSVARGIPRLDRGVRAGSFDLPAVRPLYQVGQRVFGVVGMGLIGAATARKAAGLGYDVIAYDSAADPDAQTFRGFRSVGLHELLERAQVVSVHTPLTEQTRGLLGADAFARMRPDAIVVNTSRGGVIDTGALVDALKRGAVAGAGIDVHEIEPLPRDHPLTSFDNVVLTPHLAWYSEESYAELKRRTVENVVDACAGRTPRNVVNPEALPAAAQRSEGRR

SEQ ID NO: 17049 - protein, 247 aa, Streptomyces coelicolor A3(2)
MTRASDTQGPARDRTRGAMLSKEGLPGWLDPVVRAVETIRPTQLSRFLPPADGAGRQSAVLILFGDGTRAGEGGEEAGRGPELLLMERAGSLRSHPGQPAFPGGALDPEDGDPRGDGPLRAALREAEEETGLDPAGVQLFGVLPKLYIPVSGFVVSPVLAWWREPTPVGVVDPAETARVFTVPVADLTDPANRVTTIHPSGHRGPAFLVESALVWGFTAGIIDRLLHFAGWERPWDREKQVPLDWRA

SEQ ID NO: 17050 - protein, 224 aa, Streptomyces coelicolor A3(2)
MDDVLRRNPLFAALDDEQSAELRASMSEVTLARGDTLFHEGDPGDRLYVVTEGKVKLHRTSPDGRENMLAVVGPSELIGELSLFDPGPRTATGTALTEVKLLALGHGDLQPWLNVRPEVATALLRAVARRLRKTNDAMSDLVFSDVPGRVARALLDLSRRFGVQSEEGIHVVHDLTQEELAQLVGASRETVNKALADFAQRGWLRLEARAVILLDVERLAKRSR

SEQ ID NO: 17051 - protein, 425 aa, Streptomyces coelicolor A3(2)
MGLVVQKYGGSSVADAEGIKRVAKRIVEAKKNGNQVVAVVSAMGDTTDELIDLAEQVSPIPAGRELDMLLTAGERISMALLAMAIKNLGHEAQSFTGSQAGVITDSVHNKARIIDVTPGRIRTSVDEGNVAIVAGFQGVSQDSKDITTLGRGGSDTTAVALAAALDADVCEIYTDVDGVFTADPRVVPKAKKIDWISFEDMLELAASGSKVLLHRCVEYARRYNIPIHVRSSFSGLQGTWVSSEPIKQGEKHVEQALISGVAHDTSEAKVTVVGVPDKPGEAAAIFRAIADAQVNIDMVVQNVSAASTGLTDISFTLPKSEGRKAIDALEKNRPGIGFDSLRYDDQIGKISLVGAGMKSNPGVTADFFTALSDAGVNIELISTSEIRISVVTRKDDVNEAVRAVHTAFGLDSDSDEAVVYGGTGR

SEQ ID NO: 17052 - protein, 396 aa, Streptomyces coelicolor A3(2)
MTSMSSSARPLLNRRLAEFGTTIFAEMSALAVRTGAINLGQGFPDTDGPEEVREAAVRALRDGRGNQYPPGPGVPELRAAVAGHQQRRYGLSYDPDTEVLVTAGATEAIAAALLALLEPGDEVVALEPYYDSYAACIAMAGGTRVPVTLRPHEGTFRLDLDELRDAVTDRTRLLLLNTPHNPTGTVLTRDELAAIAELAVERDLLVVTDEVYEHLVFGTAEHIPLASFPGMRERTVTIGSAGKTFSFTGWKVGWVTAAPALLTAVRSAKQYLTYVASGPFQYAVAEALALPESYFAAYRQDMEAKRDLLAAGLAEAGFGVYRPAGTYFVTTDIRPLGERDGFAFCRSLPERAGVVAVPNAVFYNHREEGAPFVRFAFCKRLPVLEEAVGRLKTLSA

SEQ ID NO: 17053 - protein, 67 aa, Streptomyces coelicolor A3(2)
MASGTVKWFNAEKGFGFIEQDGGGPDVFAHYSNINAQGFRELLEGQKVTFDIAQGQKGPTAENITPA

SEQ ID NO: 17054 - protein, 528 aa, Streptomyces coelicolor A3(2)
MNRARTNDRRRAGDGPRRSRSAGRPQNSGRRPAAAPQGGEFALPKTITPALPAVETFAELDLPARMLAALGDQGVTEPFPIQAATLPNSLAGRDVLGRGRTGSGKTLAFGLALLARTAGKRAEPRRPLALVLVPTRELAQQVTDALTPYARAVGLRSATVVGGMSIGRQAGALRSGAEVVVATPGRLKDLIDRGDCALGDVTITVLDEADQMTDMGFMPQVTALLDQVAADGQRMLFSATLDRNVDKLVRRYLTDPVVHSVDPSAGAVTTMEHHVLHVQDEDKQRATIEIAARDGRVIMFLDTKHRVDRLVKHLLKSGVRAAGLHGGKSQPQRTRTLAQFKDGQVTALVATNVAARGIHVDNLDLVVNVDPPGDHKDYLHRGGRTARAGESGSVVTLVTPDQRREMTRLMSLAGITPQVTPVRSGEAELARITGAQTPSGVPVVITAPVVERPRRAAAGAGSPSRGRRGRSAQGRSGGQGTGTQARTGAAQSRTAGQSRTAAQGRPTGESPRRRPRRQSTGGSTGSAA

SEQ ID NO: 17055 - protein, 67 aa, Streptomyces coelicolor A3(2)
MASGTVKWFNAEKGFGFIAQDGGGADVFAHYSNIATQGFRELQEGQRVNFDVTQGQKGPQAENIVPA

SEQ ID NO: 17056 - protein, 1676 aa, Streptomyces coelicolor A3(2)
MEALSFDSGARTAFAERLALLYREAGNPPLKRVSEAVVRLQRVDERGRPVRVSAQRISDWRRAKNVPAQFPALAAVLHVLIPQARRARPVPVSAGLYDLVQWQRLWERALADPSGERPGAAAVEEQTPAEAPAALGGVCPYRGLAAYRRQDADWFFGRERSTRALLAQLDATRDTGGLVMLVGASGAGKSSLLNAGLVPALRAGSRDAGCGPPRRVLQLVPGADPLGELTRLVPQLAPVVVAIRETAGRDPGSPGTWNPGDPETEDAVRAAFAAWAASTEAPSGQEGQEEQEEREGRESRSGRKGFAGQNGPESQDGPGRRHGLDRQSEPDRHRPGPADPADPGRRTNQAAGADRARQDDQTERADEAGKTGRTDRDGSTSPSGPDISACRNGETGRTARVSQAVGPDPGDRTDPVAPAGQADGGDRADADDQPGNTGQVDQTEQTGREGQGQENRGGQGGQGGQTDQSGRSGQTGREIRHAPIAPARRPDGDGRADPYGEAGQDGQTGQDAQVGQDAQDRQDAQDRQAGLSDRARQADLGAQDGPASPARQLGRTPSDGETRPDGPPGQANPTARAIRTRPPGTAPPDGREDHAGGPDDPAAARPVVIVDQFEELFTLCADEADRRVFIQLLQAACLPGAHGDPPPVLVTLGVRADFYDRCLRYPELADALQHRHMVLGPLTTAELREAVTAPARAVGMELEPGLAELIIREVSTDGPRGGCDSHAFRAVGEHDAGVLPLLSHALLATWQRRKAGRLTLAGYRAAGGIQGAVAATAERAWSGLDPAARTAARLLLLRLIRLSEDTQATRRRSTRRRLAEEARDPDKTEESLEALVRARLVTLDADTVEITHEALLHAWPRLRDWIDEDRAGNLLRQRLEEDGLAWEESDRDSALLYRGSRLAQADGWAKSADDTFLTRSAVEFLAAAVRLRRRTVMISRAAVSALVVLALLAVGSAVLAWQQRNDAVFEQVVAEADRVQDTDPSLSAQLDLAAHRLRPDDEDVRNRLISIVNAPLATPLLGHTGAVYLTSFSPDGRILATASYDRTVRLWDVSDPGRPQQLGKPLTGHTSWVSTAVFSPDGRTLASASDDGTIRLWDVTDPGRPRPLGAPLDGHGGTVYLLAFSPDGRTLASAHDDHAVRLWNVADRRAPEALDTLTGSTGAVRSVAFSPDGDTLASGGDDDKVRLWDVSDPRRPEPAGAPLAGHSGLVHSVAFSPDGHTLASGSADDTVQLWDVTDPAGAKPVGAPLTGHSGPVWAVAFSPDGAMLAVSSADSTASLWNVSDPAYPSQVGVPLAGGSGEMYALGFSPDGHTLATGSGDSKVRLWSLPTSEMIGRIGAFRPDGHVLATAARDGRVRLWDVTDPGRPVSLSAPFEPGDGDIRSLVFSPDGGTLAVLVGGRALQLWDVTDPAGPTAHGPPVALSTRYAGPDTLAFSPDGRTLATAHDDRTIQLWNADDPSRPRRLGKPLAGHSGYVNTLAFSPDGRTLASGGADDAVRLWDVTDPAHATRLGAARTGHLGPVNVLAYSPDGHTLASGSDDGTVRLWDVTEPGEGSGGGTTLAGHTDSVVSLTFSQDGDTLASGANDNTVRLWSVTDPAEAAPIGRAMSPNAKTGNFLSFSPVSHMLGVSSGTDTVRLWSLGVDDAIDRICSATRGVLTEEKWHEYLPRLDYEPPCHQ

SEQ ID NO: 17057 - protein, 431 aa, Streptomyces coelicolor A3(2)
MDTIASLFSFITWPVSWVIVQFHTVYGAIFGPDTGWAWGLSIVSLVILIRICLIPLFVKQIKATRGMQTLQPEMKKIQERYKNDKQRQSEEMMKLYKETGTNPLSSCLPILAQSPFFFALYHVLNGIASGDTIGKINQPLLESAQKAHIFGAPLAAKFTDGASKVESLGASLTDVRVITAVMIVLMSASQFFTQRQLMTKNVDTSVKTPFMQQQKMLMYVFPVMFAVFGINFPVGVLVYWLTTNVWTMGQQMYVIRNNPTPGSKAQASYLERLHKSVTEHGRTRRRGEKAIVKAIVAKGRDRNEAERKFINGLNKAGLAAQADGNVVKNDAAVAVQSEDGSTVTTTAQPKRQQPKRQSKSQRQAKPAGETEPKTSLTKSDEPQDAEPAGKQDAKPAAGAKKPAQKSGGGGRSKAQSGQRKGPQRPKSPSKK

SEQ ID NO: 17058 - protein, 740 aa, Streptomyces coelicolor A3(2)
MPTRDSGRFRIRMSMTSTDHVVVPGNAEGAEGAPEAVEAVDASATTESPEAAEAPEAAPEPTFADLGLPEGVVRKLAQNGVTTPFPIQAATIPDALAGKDILGRGRTGSGKTLSFGLPTLATLAGGRTEKHKPRAVILTPTRELAMQVADALQPYGDVLGLKMKVVCGGTSMGNQIYALERGVDVLVATPGRLRDIINRGACSLENVQIAVLDEADQMSDLGFLPEVTELLDQVPAGGQRMLFSATMENEIKTLVDRYLKDPALHEVDAAQGAVTTMSHHILVVKPKDKAPVTAAIASRKGRTIIFVRTQLGADRVAEQLRDAGAKADALHGGMTQGARTRTLADFKDGYVNVLVATDVAARGIHVDGIDLVLNVDPAGDHKDYLHRAGRTARAGRTGTVVSLSLPHQRRQIFRLMEDAGVDATRHIIQGGAAFDPEVAEITGARSMTEVQAESAGNAAQQAEREVGQLTKELERAQRRANELREEADRLVARVARERGEDPETVLAEVAATVAEPEVSLPEQSGARDVEKAERGGNDRERSQDRRDYRRDDRGDRGGRSFDRRDDRRDDRGGRSFERRDDRGDRGGRSFERRDDRGGFRRDDRGDRGGRSFERRDDRGDRGGRSFDRRDDRRDDRGGRSFERRDDRGDRGGRSFERRDDRGGFRRDDRGDRGGRSFERRDDRGERGGHRGSDRPFNRDRQGDRPGFRSGGHDRPYGRRDEHRGSSFGRRDDKPRWKRNG

SEQ ID NO: 17059 - protein, 462 aa, Streptomyces coelicolor A3(2)
MASSFGAAQVLVASNRGPVSYEVREDGSLHAKRGGGGLVSGLSAIGPDAGALWVCSALSDGDREAVRRGVGEDGVRMLDVPADVHADAYNGIANSVLWFVHHMLYQTPLEPVFDAEFRRQWASYEAYNRAFAEALAEEAAEGAVAIVQDYHLTLVPGMLRELRPDLRIGHFSHTPWAPLDYFRLLPDDIAEQVLRGMLGADRLGFLTRRWADAFTACCDAVVGGLGGTEIGVHGLGADGDFLRKRSHEADVEERMAELREQIGEGRRTIVRVDRTELSKNIVRGLLAYRELLAGRPEWRERVVHVAFAYPSRQDLAVYREYTAEVERVANAVNEEFGTPGWTPVVLNLKDDFARSLAAYRLADVALVNPVRDGMNLVAKEVPVVSDTGCALVLSREAGAYEELGEDAVVVNPYDVVGTADALHAALGLPAGDRAERSKRLAAAGTALPPARWFLEQLEALRG

SEQ ID NO: 17060 - protein, 67 aa, Streptomyces coelicolor A3(2)
MAQGTVKWFNAEKGYGFIAVDGGADVFVHYSAIQMDGYRTLEEGQRVEFEISQGQKGPQADMVRLSA

SEQ ID NO: 17061 - protein, 127 aa, Streptomyces coelicolor A3(2)
MPTGKVKWFNSEKGFGFLSRDDGGDVFVHSSVLPAGVESLKPGQRVEFGVVAGQRGDQALSLALLDPAPSVAAAQRKKPDELASIVQDLTTLLENITPMLERGRYPEKTAGKKIAGLLRAVADQLDV

SEQ ID NO: 17062 - protein, 67 aa, Streptomyces coelicolor A3(2)
MATGTVKWFNAEKGFGFIAQEGGGPDVFVHYSAINAQGFRSLEENQQVSFDVTQGPKGPQAENVTPV

SEQ ID NO: 17063 - protein, 414 aa, Streptomyces coelicolor A3(2)
MTPAGSELRRTLGLGDAAVVGLGSMIGAGIFAALAPAAGAAGSGLLLALAGAAVVAYCNALSSARLAARYPASGGTYVYGRERLGEFWGYLAGWSFIVGKTASCAAMALTVGAYVWPEQAHTVAVAAVVALTAVNYGGIQKSAWLTRVIVAVVLAVLASVVVVCLGSGRSDAGRLDIGLSGGAGGVLQAAGLLFFAFAGYARIATLGEEVRDPRRTIPRAIPLALGLTLAVYGCVAVAVLSVLGPVGLGQATAPLADAVRTAGLPGLVPVVRAGAAVAALGSLLALILGVSRTTLAMARDRHLPQALAAVHPRFQVPHRAELAVGAVVAVLAATVDVRGAIGFSSFGVLVYYAVANASAWTLDPSRLSRVVPALGLIGCVVLAFSLPAVSVVVGVGVLAVGVVAYGVRGQQVPR

SEQ ID NO: 17064 - protein, 408 aa, Streptomyces coelicolor A3(2)
MSAAIPPTERRVSARVGAISESATLAVDAKAKALKAAGRPVIGFGAGEPDFPTPDYIVEAAVEACKNPKFHRYTPAGGLPELKAAIAAKTLRDSGYEVDPSQILVTNGGKQAIYEAFAAILDPGDEVIVPAPYWTTYPESIRLAGGVPVEVVADETTGYRVTVEQLEAARTEKTKVVLFVSPSNPTGAVYGEAETEAIGRWAVEHGLWVLTDEIYEHLVYGDAVSVSLPALLPELRDKCIVVNGVAKTYAMTGWRVGWVIGPKDVVKAATNLQSHATSNVANVSQAAALAAVSGNLDAVAKMREAFDRRRQTIVRMLNEIDGVLCPEPEGAFYAYPSVKALLGKEIRGKRPQDSVELAALILEEAEVAVVPGEAFGTPGYLRLSYALGDEDLVEGVSRIQKLLAEARD

SEQ ID NO: 17065 - protein, 67 aa, Streptomyces coelicolor A3(2)
MATGTVKWFNAEKGFGFIEQDGGGADVFAHYSNIAAQGFRELLEGQKVNFDIAQGQKGPTAENIVLA

SEQ ID NO: 17066 - protein, 473 aa, Streptomyces coelicolor A3(2)
MNRTGMNDRMNDRPARTGKARTRALAVQGEFAHPETLTPALPAAARFADLDMPAELLAALESQGVTVPFPIQAATLPNSLAGRDVLGRGRTGSGKTLAFGLALLARTAGRRAEPGQPLGLVLVPTRELAQQVTDALRPYARSVKLRLTAVVGGMSIGRQASALRGGVEVVVATPGRLKDLIDRGDCRLNQVSVTVLDEADQMADMGFMPQVTALLDQVRPEGQRMLFSATLDRNVDLLVRRYLSDPVVHSVDPSAGAVTTMEHHVLHVHGADKHAATTEIAARDGRVLMFLDTKHAVDRLTDHLLNSGVRAAALHGGKSQSQRTRTLAQFKTGHVTVLVATNVAARGIHVDNLDLVVNVDPPSDHKDYLHRGGRTARAGESGSVVTLVTPNQRRAMTRLMTTAGIVPQTTPVRSGTEALHRVTGAQAPSGIPVVVTAPVAERAERGATSRGRRRPAPATRRGSVRRSVTDAAA

SEQ ID NO: 17067 - protein, 403 aa, Streptomyces coelicolor A3(2)
MQVIQSTKLANVCYEIRGPVLEEAMRLEAAGHRILKLNTGNPAAFGFECPPEILEDILRNVSTAHGYGDAKGLLAARRAVVMHNQTLGIETDVEHVFIGNGVSELIVMAMQGLLDDGDEVLVPAPDYPLWTAAVSLSGGTAVHYRCDEQSDWMPDLADVERKITDRTKALVIINPNNPTGAVYDDAMLRGLTDIARRHNLLVCSDEIYDKILYDDATHTPTAAIAPDLLTLTFNGMSKAYRVAGYRVGWMSISGPRAHAESYIEGLTILANMRLCANMPGQHGVVAALSGRQTINELVLPGGRLREQRDAAHEALTSIPGVTCVKPKGALYLFPRLDPKVFKIKDDRRMVLDLLRQEKIMVVQGTGFNWPEPDHFRVVTLPTAADLREAVDRIGNFLDGYSQP

SEQ ID NO: 17068 - protein, 196 aa, Streptomyces coelicolor A3(2)
MSLVLDPAAQDLLFREARTANTFTDEPVTDEQVQAIYDLVKYGPTAFNQSPLRITLVRSPEARERLVAHMAEGNRPKTAAAPLVAILSADNEFHEELPELFPHFPAAKDAFFSERPVREGAATLNAALQAAYFIVGVRAAGLAAGPMTGLDFEGVRKEFLDDDHTPLMVVNIGRPGPDAWFPRSPRLAYDQVVTTV

SEQ ID NO: 17069 - protein, 460 aa, Streptomyces coelicolor A3(2)
MAQSGTTAPEAGGEERLRRSLGFRDLVVYGLLFIAPMAPVGVFGTLDAKSHGAVALVYLVATVAMAFTAFSYAQMVRVVPQAGSVFAYARAGLGNGAGFVAGWMAMLDYILIPAVAYLFSGIAMEALVPEVSRWVWTAIAVVVTTLLNLWGVRTAARVGFLVLAMEIVVLLVFVATAIVVLAQDGAERDWLSPLSGDGTQGAFALSAVVGAVSVAVLSYLGFDAIATFAEEVTGGSAKVARALLFCLALAGVLFVAQTYLVALLEPVSSAQLAAEPERQGSAFYDAVDVSVGTWLHDLVAVSKAIGAAFAALAGQAAAGRLLFAMGRDRRLPGVLARTDAGVPRVALLVSAVITMAAAVWAARRDDGLDHLVSVVDVGALTAFTLLHASVVGWFVVRRGGGRVIWWRHLLVPVLGAAITIAVIVEASGTAQVVGAIWLAVGLVVLAAQWRGRRDAETTGA

SEQ ID NO: 17070 - protein, 879 aa, Streptomyces coelicolor A3(2)
MTLPVALSGKDVIGQAKTGTGKTLGFGLPLLERVTVPADVEAGRAAPESLTDAPQALVVVPTRELCQQVTNDLLTAGKVRNVRVLAIYGGRAYEPQVEALKQGVDVIVGTPGRLLDLAGQNKLSLKHIKSLVLDEADEMLDLGFLPDVEKIINMLPARRQTMLFSATMPGAVIGLARRYMSQPTHISATSPDDEGATVANTKQFIYRAHNMDKPEMVARILQADGRGLAMVFCRTKRTAADLADQLKQRGFASGAVHGDLGQGAREQALRAFRNGKVDVLVCTDVAARGIDVEGVTHVINYQSPEEEKTYLHRIGRTGRAGAKGTAITLVDWDDIPRWQLINKALDLGFNDPPETYSTSPHLYTDLGIAEGTKGVLPRSERTRAGLDAEELEDLGEPGGRGGRGRGDRGDRGGRGGRDDSRSGDRERDRSSRTTPRRRRRMRGGAPVDAEASVAPAAETVTVTDGAAGATDAGTDTDKAPRTLRRRRRTRSGEPSRRQETAATLGTDGPAAQAAEDAALAPSEAPVVETVAAEPVAAPEAVEAPAKPRRRTRTRKAAETPAAPLETAPTAAPTATEESIVAPAVVETPTVEAPAEKPRRRTRKATAAEATVETAEGAAEPAPEPAETKPRRRTRKAAEPAAQAPDAEAEAEAKPRRTRKTTATKTAAAKAEAAADTAEAAEAKPKARRTRKAAEPAVQAAPEGEAEAEAKPRRTRKTTATKTAAAKAEAAADTAEAAEAKPKARRTRKAAEPAVQAAPEGEAETEAKPRRTRKTTATKTAAAKAEAAAKAEAAADTAEAAEAKPKARRARKTAAAVEATAEIPAQASQEPEAAPRRRTRKAAVAVEAPAAGADTAEAKPKARRTRKTAAAAQPAEAGES

SEQ ID NO: 17071 - protein, 532 aa, Streptomyces coelicolor A3(2)
MNGVALAVFIFFFVLVTAMGFLAARWRRAENEHSLDEWGLGGRSFGTWVTWFLLGGDLYTAYTFVAVPAAIYAAGASGFFAVPYTILVYPLIFTFLPRLWSVSHKHGYVTTSDFVRGRFGSKGLSLAVAVTGILATMPYIALQLVGIQAVLDVMGVGGGEDTNWFVKDLPLLIAFGVLAAYTYSSGLRAPALIAFVKDTLIYIVIAVAIIYIPIKLGGFDDIFASASDKFTAAGKGGVVPDAGGQWTYATLALGSALALFMYPHSITATLSSRSREVIRRNTTILPLYSLMLGLLALLGFMAIAAGVKVDNGQLAIPQLFENMFPDWFAGVAFAAIGIGALVPAAIMSIAAANLFTRNIYKDFIKPDATPQQETKVSKLVSLLVKVGALIFVLGMDKTVAINFQLLGGIWILQTFPALVGGLFTRWFHRWALLGGWAVGMVYGTVAAYGVASPTQKHFGGSSDEIPGIGEIGYIGLTAFVLNVLVTVVLTFVLRAVKAPDGVDETRPSDYTADAGDPGVQVELPPATAGSSH

SEQ ID NO: 17072 - protein, 401 aa, Streptomyces coelicolor A3(2)
MSSASNGTTSVIVAGARTPMGRLLGSLKSFSGADLGSFAIKAALGRAGIGGDQVQYVIMGQVLQAGAGQIPARQAAVKAGIPMSVPALTINKVCLSGLDAIALADQLIRAGEFDVIVAGGQESMTNAPHLLPKSREGYKYGAVQMIDAMAYDGLTDSFEDIAMGESTEKHNTRLGIERAAQDEIAALSHQRAAAAQKNGVFDAEITPVEIPQRKGDPVLFAKDEGIRGDTTAESLGKLRPAFAKDGTITAGSSSQISDGAAAVVVMSRAKAEELGLEWIAEIGAHGNVAGPDNSLQSQPSNAIRHALKKEGLEVADLDLVEINEAFAAVAVQSMKDLGVSTEKVNVNGGAIALGHPIGMSGARLVLHLALELKRRGGGVGAAALCGGGGQGDALIVRVPGA

SEQ ID NO: 17073 - protein, 407 aa, Streptomyces coelicolor A3(2)
MSSTRVLVLNSGSSSVKYQLIDMRDGERLAAGLVERIGERTSRLRHTLVAAGDTREQEGPIADHEAALKAVAAELGRDGLGLDSPELAAIGHRVVHGGEFFSEPTLIDENVLTEIERLIPVAPLHNPANLTGIRTAQALRPDLPQVAVFDTAFHTTMPESAARYAIDPKIADRYRIRRYGFHGTSHAYVSRETARLLGRAPGDVNVIVLHLGNGASASAVRGGRCVDTSMGLTPLEGLVMGTRSGDMDPAVIFHLMRVGGMSADEIDTLLNKRSGLFGLCGDNDMREIRRRVDEDDEQAGLAFDIYIHRLKKYIGAYYAVLGRVDAVAFTAGVGENSAPVREAAVAGLEGLGLAVDGGLNAVRGDGARLISPAGARVAVAVVPTDEEMEIATQTYALVSESGNPDLT

SEQ ID NO: 17074 - protein, 389 aa, Streptomyces coelicolor A3(2)
MAYLDHAATTPMLPEAVEALTAHLSATGNASSLHASGRRARRTVEEARETLAEALGARPSEVVLTSGGTEADNLAVKGLYWARRDADPARTRVLASPVEHHAVLDAVHWLGEHEGATVEYLPVDAQGRVHPEALREAIARDPGNVALATVMWANNEIGTIMPVRELADVAAEFDVPLHADAVQAFGQLPVGFADSGLAAMTVSGHKIGGPYGIGALLLGRDYTPVPVLHGGGQERHVRSGTLDVPAVASFAVAGRLAAEQREWFAREIGALRDDLVDAVRTAVPDAILGGDPSPGGRLPANAHFTFPGCEGDSLLLLLDAQGIECSTGSACTAGVAQPSHVLLATGTDPDLARGTLRFSLGHTSTEADVEAVAKAIGPAVERARAAGLS

SEQ ID NO: 17075 - protein, 613 aa, Streptomyces coelicolor A3(2)
MTEQATGAHPQPRPRSGGQSAPEHVTGAQSLIRSLEEVGADTVFGIPGGTILPAYDPLMDSTRVRHVLVRHEQGAGHAATGYAQATGKVGVCMATSGPGATNLVTPIADANLDSVPLVAITGQVVSSAIGTDAFQEADIVGITMPITKHSFLVTKAEDIPRVIAQAFHIASTGRPGPVLVDIPKDILQKKTTFSWPPVMDLPGYRPVTKPHAKQIREAAKLISAAKRPVLYVGGGVLKAKATAELKVLAELTGAPVTTTLMALGAFPDSHPLHVGMPGMHGAVTAVTALQKADLIVALGARFDDRVTGKLDSFAPHAKIVHADIDPAEIGKNRAADVPIVGDAREVVADLVQAVQKEHDEGNKGDYSAWWKDLSRWRDTYPLGYDQPEDGSLSPQQVIERIGQLAPEGTIFAAGVGQHQMWAAHFVQYEKPATWLNSGGAGTMGYAVPAAMGAQAGMPGRTVWAIDGDGCFQMTNQELTTCALNNIPIKVAVINNGALGMVRQWQTLFYNQRYSNTVLHSGPDDVNPEARGTRVPDFVKLSEAMGCYAIRCEDPADLDKVIEEANSVNDRPVVVDFIVHEDAMVWPMVAAGTSNDEILAARDVRPDFGDNEDD

SEQ ID NO: 17076 - protein, 529 aa, Streptomyces coelicolor A3(2)
MSSKPVVLIAEELSPATVDALGPDFEIRHCNGADRAELLPAIADVDAILVRSATKVDAEAVAAAKKLKVVARAGVGLDNVDVSAATKAGVMVVNAPTSNIVTAAELACGLIVATARNIPQANAALKNGEWKRSKYTGVELAEKTLGVVGLGRIGALVAQRMSAFGMKVVAYDPYVQPARAAQMGVKVLSLDELLEVSDFITVHLPKTPETLGLIGDEALRKVKPSVRIVNAARGGIVDEEALYSALKEGRVAGAGLDVYAKEPCTDSPLFEFDQVVATPHLGASTDEAQEKAGIAVAKSVRLALAGELVPDAVNVQGGVIAEDVKPGLPLAERLGRIFTALAGEVAVRLDVEVYGEITQHDVKVLELSALKGVFEDVVDETVSYVNAPLFAQERGVEVRLTTSSESPEHRNVVIVRGTLSDGEEVSVSGTLAGPKHLQKIVAIGEYDVDLALADHMVVLRYEDRPGVVGTVGRIIGEAGLNIAGMQVARATVGGEALAVLTVDDTVPSGVLAEVAAEIGATSARSVNLV

SEQ ID NO: 17077 - protein, 445 aa, Streptomyces coelicolor A3(2)
MSSTRTASGRTSGRNGTWRNWGGNVSARPAREVTPASVDELADAVRRAAEDGQRVKAVGTGHSFTSIAATDGVLIRPQLLTGIRSIDRDAMTVTVEAGTPLKRLNMALAREGLSLTNMGDIMEQTVSGATSTGTHGTGRDSASIAAQIRGLELVTADGSVLTCSADENPEVFAAARIGLGALGVVTAITFAVEPVFLLTAREEPMPFDRVLADFDALWSENEHFEFYWFPHTNSTNTKRNNRSAGPERPVGRFQGWLDDEFLSNGLFQAVNWVGRAAPATIPSIARISSRALSARTYTDTPYKVFTSPRRVRFVEMEYAVPREAVVEVLRELRTMVDRSRLRISFPVEVRTAPADDITLSTASARDSAYIAVHMFRGTPYQAYFTAAERIFTAHEGRPHWGKVHTRDAGYFSRVYPRFGEFTALRDRLDPDRLFQNDYLRRVLGP

SEQ ID NO: 17078 - protein, 67 aa, Streptomyces coelicolor A3(2)
MAAGTVKWFNAEKGFGFIEQDGGGADVFAHYSNIAAQGFRELLEGQKVNFDIAQGQKGPTAENIVPA

SEQ ID NO: 17079 - protein, 382 aa, Streptomyces coelicolor A3(2)
MIATPPASRIAELRRRSRRPALAPAPPGAVSLAMGEPDFPTPPTVVQAAVSALREGHTHYADQRGLRELRAALAARLPERPGGAWDADDVLVTHGATAALAAVVLATVGPGDRVVVPEPAYSLYADLVVLAGGTVDFVPLAPDLHWDLDALAAALPGAAMMIFSNPSNPTGIVHRREELEALGKLLDGTDVLVVSDEAYHRLAYPGHEPVSALEIESLRGRTVYVQTFSKTYAMTGWRVGYLTGPREVLDAAAQVHRTWNGSLNTAVQHAALAALDLPDGVVGAMADRYRQRRDLVVGRLSGVPGLHLVPPEGAFYGFLRYDADRPSEMVARELAACQVLVRAGAEYGPSGEGHLRISFAASEDDLWVGLERIVRYFAEARS

SEQ ID NO: 17080 - protein, 479 aa, Streptomyces coelicolor A3(2)
MPASRVKSPHLLVAESGADREGHGLKRTMGLFQLVCFGVGAIVGTGIFVGLSDSVAEAGPAVVVSFVLAAITCVFTAFAFAELGGAIPVSGSSYSFAYAGLGERTAFLVGWCLLLEYGVSVSAVAVGWSQYVNELLDTVLGVQLPHALSAGPGDGGAVNLPAVVVIALASVLLMRGVRESARATAAMAVLKLAVLLAFCAIGFYAFQDGNLTPFSPAGLGGIGAGTTAAFFSYIGFDAITTAGEEAKNPRRDIPVAILVCIGLVTLLYCAVAVAAIGAVGGDQVGNRPAALSYVVDRVTGSAIGGGVVAFGAVVAIASVVLAVMYGQTRILMSMSRDGLIPRVFEKVSPRTATPVAGTLIVGVVFALPAAFAPLDAVVNLCTIGTLATMAAVNVSVITLRRREPGLARTFRVPLYPATPLLGVGFCLYLMYETGGATWLQFAVFLAVGLLVYSAYGRRHSRLARTAVSADDAERVPQEA

SEQ ID NO: 17081 - protein, 503 aa, Streptomyces coelicolor A3(2)
MSNTLFRTKKIEQSIRDTEEPEHALKKSLSALDLTVFGIGVVIGTGIFVLTGTVAKDNAGPATALAFVVAGVVCALAALCYAEFASSVPVAGSAYTFSYASLGELPAWIIGWDLVLEFALGTAVVAVGWSGYIRSLMDNAGWHMPAELGGRDGAEGFGFDILAAALVLVLTAVLVLGMKLSARITSLVVAIKVAVVLIVIIAGAFFVKSANYDPFIPKSQPVEAGGGLHSPLIQLMFGWAPSNFGVMGIFTAASVVFFAFIGFDIVATAAEETRNPQRDMPRGILGSLIICTLLYVGVSIVVTGMQHYTKLSVDAPLADAFKATGHPFFSGVISFGAAVGLTTVCMILLLGQSRVFFAMSRDGLLPRFFSHVHPKFRTPYRPTILLGVIIAIVAGFTSLSELAELVNIGTLFAFVVVAISVIILRRTRPDLPRAFRTPLVPLLPIVSVAASLWLMLNLPAETWVRFAIWMAIGFVVYFLYGRTHSRLARGEEAPADPAEPSGT

SEQ ID NO: 17082 - protein, 565 aa, Streptomyces coelicolor A3(2)
MAATPPKPAAATPRRKVSRHRGEGQWAAGHFTPLNGNEQTKKDDDGLNVRTRIETIYSKRGFDSIDPGDLRGRMRWWGLYTQRRQGIDGGKTAILEPEELDDRYFMLRVRIDGGALTTAQLRVVGEISQEFARGTADITDRQNVQYHWIRIEDVPEIWNRLEGVGLSTVTACGDTPRVMIASPVAGIAEDEIIDGTPALEEMKRRVLNNPAYSNLPRKFKTAISGSPVQDVVHEINDVAFVGVEHPEHGPGFDLWVGGGLSTNPKLGVRLNAWVPIDDVPDVYEGVISIFRDYGYRRLRNRARLKFLVADWGAEKFRQVLEDEYLKRKLTDGPAPAEPSSRWRDHIGVHRQKDGRYYVGFAPRVGRVDGTILTKVADLAEAHGSGRVRTTVEQKMIVLDVEEGRVDSLVESLEALDLSARPSTFRRGTMACTGIEFCKLAIVETKARGASLIDELERRLPDFDEPLTINLNGCPNACARIQTADIGLKGQLMLDEHGEQVEGYQVHLGGALGLEAGFGRKVRGLKVTAQELPDYVERVLKRFQAEREDGERFAAWAARASEEALS

SEQ ID NO: 17083 - protein, 418 aa, Streptomyces coelicolor A3(2)
MSDITVTNWAGNITYTAKELLRPHSLDALRALVADSARVRVLGSGHSFNEIAEPGDGGVLLSLAGLPSVVDVDTAARTVRVGGGVRYAELARVVHARGLALPNMASLPHISVAGSVATGTHGSGVGNGSLASVVREVELVTADGSTVVIARGDERFGGAVTSLGALGVVTSLTLDLEPAYEMEQHVFTELPLAGLDPATFETVMAAAYSVSLFTDWRAPGFRQVWLKRRTDRPLDGFPYAAPAAEKMHPVPGMPAVNCTEQFGVPGPWHERLPHFRAEFTPSSGAELQSEYLMPREHALAALHAMDAIRETLAPVLQTCEIRTVAADAQWLSPAYGRDTVAAHFTWVEDTAAVLPVVRRLEEALVPFAARPHWGKVFTVPAGELRALYPRLADFGALAGALDPAGKFTNAFVRGVLAG

SEQ ID NO: 17084 - protein, 580 aa, Streptomyces coelicolor A3(2)
MAKQNVAEQFVDILTRAGVERLYGVVGDSLNPVVDAVRRHSGIEWVHVRHEETAAFAAGAEAQITGKLTACAGSCGPGNLHLINGLYDAHRSMAPVLALASQIPSSEIGLGFFQETHPDQLFRECSHYSELISSPKQMPRLLQTAIQHAVGQGGVSVVSLPGDIADEPAPQGAAETALVTSRPTVRPGDEEIDRLVRMIDDADKVTLFCGSGTAGAHAEVMEFAGKLKAPVGHALRGKEFIQYDNPYDVGMSGLLGYGAAYEATHECDLLLLIGTDFPYNAFLPDDVKIAQIDVRPEHLGRRSKLDLAVWGDARETLRCLIPRVKEKKNRRFLDRMLKKHADALEGVVKAYTRKVDKHVPIHPEYVAALLDEMADDDAVFTVDTGMCNVWAARYISPNGRRRIIGSFSHGSMANALPMAIGAQFTDRRRQVVSMSGDGGFTMLMGDFLTLVQHDLPVKIVLFNNSSLGMVELEMLVAGLPSHGVANKNPDFAAVAEACGAFGVRVEKPKDLAGALKAAFKHKGPALVDVVTDPNALSIPPKISADMVTGFALSASKIVLDGGVGRMLQMARSNLRNVPRP

SEQ ID NO: 17085 - protein, 285 aa, Streptomyces coelicolor A3(2)
MNPADSPVKAVLFDRDGTLVHDVPYNGDPERVRPVEGAREAVALLRAHGIRVGVVTNQSGVARGLISDGDVRRVNRRIDDLIGPFDVWAVCPHGPDDGCHCRKPRPGLILWAAGRVCAAPADCVVIGDIGADTEAAERAGAHGILVPNDRTRPAETAAAAHVAPDLLTAVRALVTGPPRGRVPADERPVEAAYGTDPASTGPRTAAAQDDDRPGPAGTPFATAPGPGAFRPGDAAHRPPPEPRPGGAGTPAGNGADTAEPARTRAVPDAGAVRGPGVGHRRGRSS

SEQ ID NO: 17086 - protein, 296 aa, Streptomyces coelicolor A3(2)
MSTLPKVAWIGLGIMGSPMSENLIKAGYQVTGFTLEQEKLDRLAAAGGGVAGSIAEAVRDADVVVTMVPASPQVEAIAYGPDGILENAKSGALLVDMSSITPQTSVDLAKAAKDKGIRVLDAPVSGGEAGAIEAVLSIMVGGEQADFDEAKPLLEALGKTIVLCGPHGSGQTVKAANQLIVAVNIQACAEAVVFLEKSGVDLKAALDVLNGGLAGSTVLTRKKDNFLGRDFKPGFRIDLHHKDMGIVTDAARNVGAALPVGAVVAQLVASLRAQGDGGLDHSALLRAVERLSGDQV

SEQ ID NO: 17087 - protein, 402 aa, Streptomyces coelicolor A3(2)
MEFRQSNKLSEVCYEIRGPVIEHANALEEAGHSVLRLNTGNPALFGFEAPEEIVQDMIRMLPRAHGYTDSRGILSARRAVAQRYQALGLEVDVDDVFLGNGVSELISMAVQALLEDGDEVLIPAPDFPLWTAVTTLAGGKAVHYLCDEQAEWYPDLADMEAKITDRTKAVVIINPNNPTGAVYPKEIVEGILDLARRHGLMVLADEIYDQILYDDAVHHSAASLAPDLVVLTFCGLSKTYRVAGFRSGWLVVTGPKQHARDYLEGLTMLASMRLCANAPAQYAIQAALGGRQSIRELTAPGGRLHEQRDVAWEKLNEIPGISCVKPKGALYAFPRIDPAVHKIHDDERFVLDLLLREKIQVVQGTGFNWPSPDHFRILTLPHAEDLEAAIGRIGRFLSGYRQ

SEQ ID NO: 17088 - protein, 313 aa, Streptomyces coelicolor A3(2)
MTRYEAELVVGRRETAADGVLVLTLRHPRDEPLPVWEPGAHVDVVLGPGLERQYSLCGDPGDRAVWRVAVLREKAGRGGSAYVHEELRAGDKVRVRGPRNNFRLERAPRYRFVAGGIGITPVLPMLAAAEEAGAEWSLLYGGRTRAGMAFTKELERYGDRVRIVPEDESGLLDLASVLDDVAPGTLVYCCGPGGLLDAVEARCPAGSLRVERFRPKEAAVQAPAGPEFEVVLARSGRTVAVPPGTSVLDAVRETGVEVLYSCTEGTCGTCETEVVEGEPDHRDSVLTEEERAAGETMLICVSRCRGRRLVLDL

SEQ ID NO: 17089 - protein, 400 aa, Streptomyces coelicolor A3(2)
MKDVYLVDAVRTPFGKYNGGLSGVRPDDLAAHAIRELLGRTPGLDPSRIDDVYFGNANGAGEENRNVARMAALLAGLPTTVPGVTVNRLCASGLEAVIQAARAIAVGDASVALAGGVESMTRAPYVLPKPDRPFPAGHTEMYSTTLGWRMVNPAMDPQWTIPLGESAELIADKHGITREQQDEYALASHRKAARAQADGLFDAELAPVPVPRRKGDPVDFAADECVRPDASLEAMAKLKPSFRKTDGTVTAGNASPLNDGAAALLLVDEEGLKATGREPLARVSATGVSATDPQYFGLAPVEAVNRALARAGRDFADLDVLELNEAFAAQVLGCVAEWPEFDPAVLNPQGGAIALGHPLGASGARLAGTVAHQLARRGSGTGIATLCIGVGQGLALVLDR

SEQ ID NO: 17090 - protein, 489 aa, Streptomyces coelicolor A3(2)
MSKDAVDTAQVAAHPQATGTIPADAGDAGYSKDLKARHVNMIAIGGAIGTGLFLGAGGRLRDAGPALAIAYLVAGVFAFFVVKALGELVLYRPSSGSFVSYAREFLGEKGAYVAGWMYFLNWSTTGIADITAIALYTHYWSMFTSIPQWVLALVALAVVLAVNLISVKIFGEMEFWFAIVKVATLVGFMLIGIFLLATQHEVSGQTPGMGMITDHGGILPHGVMPVVLVMQGVIFSYAALELVGVAAGETAEPHKIVPRAVNSIMWRVALFYVGSVVLLALLLPSSLYSGDESPFVTVLSGIGVPAAGDVMNLVVLTAAMSSLNSGLYSTGRILRSMAMAGSAPRFTGVMSRSQVPYGGILLTCAVCVLGVGLNYLVPSKAFEIVLNVASLGIISTWVIIMICHLVFVRRARAGLVERPGFRLPGSPVTEIVTIAFLLAVVGLMWNDEEVGRKTVLLVPVIAVMLVAGWFGVRRRVAHQAGQERPAPRE

SEQ ID NO: 17091 - protein, 578 aa, Streptomyces coelicolor A3(2)
MTQDRPSDKEEHDRGTLPGSEAGLPGQEHRPRTDRVVFGVTAVLTLAFVIWGAAATDSLEDVSSSMLGGLLHNGGWAFTLAASGFVVFALWLAASRYGRIHLGAEGEEPEFRTVSWVAMMFSAGMGIGLMFYGVSEPLAHYTTPPPGTSPADSGDRMATAMATTLFHWTLHPWAIYAVVGLGIAYSTFRRRRRQTISAVFTPLIGEKHANGAGGRVIDILAIIATIFGSAASLGLGALQIGSGMEKLDWMDKVSTGLLVGIIAVLTVAFVASAISGVEKGIQWLSNTNMVLALVLAVFVFIAGPTILILDLLPTSVFAYLGDLPQMAGRTEISGGKGVADWLGSWTVFYWAWWISWTPFVGMFIARISRGRTIRQFIGGVILVPSTVSLIWFAIFGGSAMRLQEQNRLGDDSTPEGQLFGVLQEYPIATATSLLVMILVGIFFVSGADAASIVMGTLSQKGALEPSRWVVVVWGVVTGAVAAIMLLIGSGEADALTGLQNLTILAAAPFVIVMIFMCVALMRDLRRDPLMVRGEMANEAVELAVIEGHKQYEGDFEIRIGPGPGTDVEGDPIGKHHKD

SEQ ID NO: 17092 - protein, 340 aa, Streptomyces coelicolor A3(2)
MDIRAGALDDLGCVLADERISHSGKLAVAVSGGSGARLRDRVAPSLPGADWFEVGGGTLDDAIKLAGAMKGGHYDAVVGLGGGKIIDCAKFAAARIGLPLVAVPTNLAHDGLCSPVATLDNDAGRGSYGVPNPIAVVIDLDVIRAAPARFVRAGIGDAVSNVSAIADWELANRVKGEKIDGLAAAMARQAGEAVLRHPGGIGDNDFLQVLAEALVLSGIAMSVSGDSRPSSGACHEINHAFDLLFPERAAAHGEQCGLGAAFAMYLRGAHEESANMARVLRRHGLPVLPEEIGFTPEEFFRAVEFAPQTRPGRYTILEHLDLTTDQIKDLYADYVKAIGS

SEQ ID NO: 17093 - protein, 395 aa, Streptomyces coelicolor A3(2)
MRPVHFAAARRTPIGKLRGALSTVRPDDLAAAVLRGLVADVPALDPARVDDVYWGAANQAGEDNRNVARMAALLAGLPETVPGATVNRLCASGLEAVTTAARTIAAGEADIVLAGGSESMSRAPFVLPRPDEALPHRIETADTRLGWRLVNPAMKDLHGLLAMGETAEEVAERYGVPRERQDAFALRSHRLAAEARKNGRFDDEILPVERPDGVVVDTDECVREDTSLEKLGSLKPVFRPGGTVTAGNASPMNDGAAGLLLVSEEALNDLGLESLGRYVAGGSAGVHPDVMGIGPVPATRKVLARAGWGIGDITEAEFNEAFAAQALACVDQLGIDPDLVNPTGGAIALGHPLGCSGARILTTLLHRMRRTGAGRGLATMCVGVGQGSAVLVERH

SEQ ID NO: 17094 - protein, 624 aa, Streptomyces coelicolor A3(2)
METTAWTQLYSVMNAKDERRPFARATMRRIGAFARPHRRRIVRFVLLGVATALLAVATPVLAGKVVDAIVSDGDEGTVVRLALLIALIAVAEAVLGIFSRRLSATLGEGLILDLRTAVFDHVQRMPVAFFTRTRTGALVSRLNNDVIGAQRAFSNTLSGVVSNVVTLLLTLAVMLTLSWQITLLALVLLPVFVLPARRMGRRMARMQREAAALNAAMGTRMTERFSAPGATLIKLFGRPEEESAEFADRARRVADIGVRTATAQAAFITALTLVSALALALVYGLGGFFALRGTLDAGAVVALALLLTRLYAPLTALAGARVEVMSALVSFERVFEVLDLAPLIDEKPDARPVPDGPVAVEFDDVRFGYPSADKVSLASLEEVATLDTRGGEEVLHGLSFRAEPGQTIALVGSSGAGKSTIAQLLPRLYDTDGGTVRVGGVDVRELSARSLRDTVGMVTQDGHLFHDTVRANLLLARPDATEDDLWEALRRARLADLVRSLPDGLDTVVGERGYRLSGGERQRMTIARLLLARQRVVILDEATAHLDNTSEAAVQEALTEALQGRTAVVIAHRLSTVRAADRILVVEAGRIVESGTHEELLAVDGRYAQLHRTQFERPALDKAA

SEQ ID NO: 17095 - protein, 481 aa, Streptomyces coelicolor A3(2)
MSKVLTSLPTGERVGIAFSGGLDTSVAVAWMRDKGAVPCTYTADIGQYDEPDIASVPDRAKTYGAEVARLVDCRAALVEEGLAALTCGAFHIRSGGRAYFNTTPLGRAVTGTLLVRAMLEDDVQIWGDGSTFKGNDIERFYRYGLLANPQLRIYKPWLDADFVTELGGRKEMSEWLVAHDLPYRDSTEKAYSTDANIWGATHEAKTLEHLDTGVETVEPIMGVRFWDPSVEIAPEDVTIGFDQGRPVTINGKEFASAVDLVMEANAVGGRHGMGMSDQIENRIIEAKSRGIYEAPGMALLHAAYERLVNAIHNEDTLAQYHTEGRRLGRLMYEGRWLDPQSLMIRESLQRWVGSAVTGEVTLRLRRGEDYSILDTTGPAFSYHPDKLSMERTEDSAFGPVDRIGQLTMRNLDIADSRAKLEQYAGLGLIGTANPAIGAAQAAATGLIGAMPEGGAQAIASRGEVSADDELLDRAAMESGTD

SEQ ID NO: 17096 - protein, 233 aa, Streptomyces coelicolor A3(2)
MNGRVAGTWQTATLTGIRRETPRASTFRFAVPGWAGHLPGQHLMLRLTAEDGYRAQRHYSLASAPDDSGHIELTLDRVPDGEVSGWFHTVARPGDEIEVRGPLSGFFAWPGDRPALLLGAGSGVVPLMSMVRHHRARGLTVPLRLLVSARGPGELIYADEFGAETTPVFTRTAPAGAPVGRLASAHVAPLLAEPPAGGWEAYVCGSNAFAEHASRLLVAAGQPVDRIRIERFG

SEQ ID NO: 17097 - protein, 403 aa, Streptomyces coelicolor A3(2)
MLSSQSAQIVRDTLPTVGASLGTITDLFYRRMFEERPELLRDLFNRANQASGVQREALAGAVAAFATALVKHPDERPDAVLGRIANKHASLGITSDQYTLVGRHLLAAVAEVLGDAVTPAVAAAWDEVYWLMANALIAMEARLYARSDVEDGSVWQSMEIVERHEETPDTASFVLRPADGSPTRPFVPGQYVSVRAELPDGAHQIRQYSLSSAPGGGTWRFTVKRERSLDGQVPDGEVSTWLHTHARPGDVLRVSLPFGDLLLPEGDGPLLLASAGIGVTPMLAMLEHLATAAPDRPVTVVHADRSPALHAHRLELTALVERLPHASLHLWYEDTADHPDASADHVNEGWADLTGLSPVPGTTAFLCGPLSFMKAVRTDLLAHGLSPRAIHYEVFGPDLWLSK

SEQ ID NO: 17098 - protein, 202 aa, Streptomyces coelicolor A3(2)
MSVSGPLPRIPAEAGAALFTDARTAYSFADTPVDDATLTGIWELARWAPTAANTQPMRVLYVRTAEGKERLLPHLDEGNRPKSASAPVVAVLAVDHRFHEHLPHVLPVRPEMKEYFEGEPAQREAITSFNGPLQAGYFILAVRALGLAAGPMAGFDPAGIDKEFFADSDWHSILVVNIGHPAGPPAFDRMPRLAHEHALDWA

SEQ ID NO: 17099 - protein, 492 aa, Streptomyces coelicolor A3(2)
MTVDHRRAPVLEALVEYRRAGRLSFTPPGHKQARGADPAVREVLGDAVFHGDVLATAGLDDRLTRGRVLQRAQELMADAVHADHTFFTTCGSSLSVKAAMLAVAGPHEKLLIGRDAHKSVVSGLILSGIEPVWVEPRWDAERHLAHPPSAESFEEAFGAHPDAKGALITSPTPYGASADLRAVAEVCHGRSLPLIVDEAWGAHLPFHPDLPSWAMDAGADICVTSIHKMGSGLEQGSVFHLRGDLVPPKLLGMRADLLSTTSPSVLIFAGLDGWRRQMALGGQELMGGALELAAGVRAAVEEIDGMHVNDREDFCGPGLAHGFDPLPVVIDLEGLGVSGFRAADWLREHRGVVAHLTDHRRIGAQITHGDDRGTAGELLTALKDLALAAPGLGSAPGVEVPSPAELRMPQVCLPRDAFFGPTEDVPLDRAAGRVAAEMITPYPPGIPAVLPGERLAEPVLRYLRSGLEAGMYLPDPTDPALETVRVVAEHGA

SEQ ID NO: 17100 - protein, 398 aa, Streptomyces coelicolor A3(2)
MLSEQSVPVVRATLPAVGAAIGDIAALFYRKLFDAHPELLRDLFNRGNQANGEQQRALAGSVAAFAGLLLENPDERADVLLSRISHKHASLGITPDQYTIVHRHLMAAVVDVLGDAVTPEVARAWDEVYWLMANALIALEARLYTEKGVAEGDVWRTMEIVDRVEESADAVSLVLGSADGRPVVPFRPGQYVSVQVELADGARQIRQYSLSAAPGRSDWRITVKRVRGDGQPDGEVSSWLYANARKGDALNVSLPAGDLALAEHDGPLLLVSAGIGVTPMLSMLDHLAAAGATRPVTVVHADRTPDHHAHRQEQLDLIRTLPGARLHLWYEEPGDRAPEASTGRADLTGLDLPADLTVYLCGPVPFMRAVRGDLLRRGVPAEAIHYEVFGPDLWLGQQ

SEQ ID NO: 17101 - protein, 368 aa, Streptomyces coelicolor A3(2)
MAPTAPVPAAPVRTRRRPAFHRLRVAAVERLCADAAAVSFEIPDELAGEFVFAPGQSLTLRREVDGRDERRSYSICAPAGSAPRIGVRVVPGGLFSAWLVDEVRPGDTVEVMAPTGLFTPDLSTPGHHVLVAAGSGITPMVSIAESVLAADDRSTVTLFYGNRRTDTVMFADELADLKDLHPTRFHLAHVLSREPREAEVLSGRLDAGRLAALVGSLVDVERADHWWLCGPQGMVADAQQVLTGLGVPAGRVHRELFYADDEPVREVRHEESGPEGPVSEVTITLDGRSTTSSLSRERSVLDGAQQTRPDLPFACKGGVCGTCRALVTDGSVDMRRNYALETAEVDAGYVLTCQSYPVSEKLTVDYDS

SEQ ID NO: 17102 - protein, 524 aa, Streptomyces coelicolor A3(2)
MTGHQSAHRPPRRVGVVAESLPGETRVAATPSTVRLLLGLGYEVVVESGAGAASGFGDEAYAEAGAGVGEAWAADVVLKVNAPTADETAALREGTTLVALLAPAQRPELLEALSARGVTALALDAVPRISRAQSMDVLSSMANIAGYRAVIEAAHVFGRFFTGQVTAAGKVPPAKVLVAGAGVAGLAAVGAASSLGAIVRATDPRPEVADQVRSLGGEYLAVDVAQEESADGYAKATSADYDRAAARLYHEQARDVDVVITTALIPGRPAPRLLTAADVAAMRPGSVVVDMAAAQGGNVEGTVAGRTVVTGNGVTVIGYTDLAARLPAQASQLFGTNLVNLLRLLTPGKDGRIVIDFDDVVQRTVTVVRAGTVTWPPPPVAVSAAPPATAPPATSPAAPVGGRPRRLTPAGRFGLIGLGMLATFLLVAFAPAQLAQNFTVFALAVVIGYYVIGKVHHSLHTPLMSVTNAISGIVVIGALVQIGHESTLVTVLSFVAILLTSVNIFGGFAVTRRMLSMFSRGESR

SEQ ID NO: 17103 - protein, 398 aa, Streptomyces coelicolor A3(2)
MTAPHAPCTIAVLGLGRMGEAIAARLTAQGRDVVGWTRSGRASGTVEVAPDPGTAVAEADLVLLSLFDGPACLQVLGDIRDSLRTDTVVLNTSTVAPAEAAEFARRLGRSYVHAPLIGSVPAVAGGTLRILAAAEQDTLDGVRPVLESLGTVRRVDDAATAAALKLVANSSLAGALLALRDSLRQGDAIGLPRTQVLNVLELGQLGGLVARKRPFLTGERAPHPADFTIGALAKDMALLADDSATPLRSADALAGPAADPASDVAVAAVPTVEGDVEGAVLDPLRAYVRGHATGDPGHFRDAFLPTAHIEGVRDGAFVSWGLDEYCALFRGRPAADEATRTRSVDAVEVHGSVATATMTLRHGADRFTDVFLLVDAEDGWRIANKAYHRHAGRSSGHR

SEQ ID NO: 17104 - protein, 423 aa, Methanosarcina mazei Go1
MPDKNESFCRAHNKFISGELLFSLGVLMGENRLVYMDHAATTFIKQEVVETMLPFLKDHFGNPSSLYSIGREGKEAVETAREKLAKALGASPEEIYFTSGGTESDNWAVKGTAFARRKKGKHIITIPIEHHAVLYPCKYLETKGFDVTYLPVDEYGLVDPAELEAAIREDTILISVMYANNEIGTIEPILEIGKVAGEHGVPFHTDAVQAIGNFSLDLKGKDRDVNMLSLSAHKFYGPKGIGALYIREGTEIDSYIHGGAQEKRKRAGTENVAGIAGMGKAIELATANIEKHAEKIRKMRDRLRKGIMEIPHCRLNGHPERRLPGNLNFSFEYIEGESLLLMLDQMGICSSTGSACSSGSLDPSHVLSAIGVPPEIAQGSLRLTLGDANTEEDVDYVLEVLPQVVEKLRAISPFYKPSDVCEK

SEQ ID NO: 17105 - protein, 380 aa, Methanosarcina mazei Go1
MTSARLKRVEESATIRISNIATRMIKEGTDVINFSLGEPDFDTPKNICDAAAKAMYEGKTHYAPSAGIPELRSAIAEKLRTENHLDVSEKDVLVTPGAKQGIFEIMMGSLDDGDQALLFDPAWVTYDACIRFAGADTVWVPTVPEKGFLPDNFAEYINDKTKLIVVNSPGNPTGGVFGKKTLQCIADIAIDHDLLVVSDEIYEKIIYDREHISIGSFDGMQERTITVNGFSKAYAMTGWRLGYLTAPPEIFKLLQKIQSHSVSSATTFVQYGGLEALQGPQEGVKAMVDRFKMRRDILIDGLNKMGLECKKPDGAFYAFANVSDYGNGTEVAEKLLKEAHVAVTPGIAFGSSGEDFIRISYATSIDRIREALDRLEKVFA

SEQ ID NO: 17106 - protein, 764 aa, Methanosarcina mazei Go1
MTEGDKSTIKLKVAEADQRDVGKGIVRIDEKFREKLGLKPFDVVEIRGGKSTSALIGRPYPSDSGLDIVRMDGLIRMNAKTSIGEYVDIRKADWKEAKSVTLAPVAKGMQIYAPSETLKAVFMNRTVSKGDFISTTSLRRSRERETFGKGVMFEDFFQDFFGQGFGQSFGLGEIKLQVVSTSPSGIVKITDMTQVELLPEATEITPEQNIPTVMYEDLGGLKDAIGRVREMIELPLKHPELFDRLGIDAPKGVLLHGPPGTGKTMLAKAVANESDAYFISINGPEIMSKYYGESERAIREIFEDAEKNAPAIIFLDEIDSIAPKRAEVTGEVERRVVAQLLSLMDGLKARKNVIVIGSTNRPEAIDIALRRPGRFDREIELRVPDTEGRLEIFQIHTRGMPLADNVNLMDFAQITYGFVGADIAALCREAAMSALRRILPKINLNEPEIPGEILDSLQVTREDFENALKDVQPSAIREILIEVPNIGWDDVGGLGEVKELLKEAVEWPLKSPESYRNIGVEAPKGVLLYGPPGTGKTLLAKAIAHESDANFITAKGSDLLSKWYGESEKRIAEVFTRARQVAPSIIFLDELDSLAPVRGASTGEPQVTARILNQLLSEMDGLEELRAVVVIGATNRPDMIDPALLRPGRFDELILVPVPDEGARREIFRVHTENMALAEDVDIEKLVSLTDQYTGADIAAVCKKAGRYALREDLHAKSVRQKHFLQAIEETGPSVTPDTMKYYQAIRGELRKRKSKEIESPYYI

SEQ ID NO: 17107 - protein, 231 aa, Methanosarcina mazei Go1
MFGREAILLKSTIPEKNAIIQRDGETYVIAPRTPGGIVDPATLRKIADVAEKYGAATLKMTSEQKMAIVGLKEEDIDAAWADLGMDAGIVAGPFVKAVKFCPGTTFCRKGQQDAVSLGMKLEARYRGVKLPYMMKMAVSGCPSSCSEPVIKDVGVMGTATGYTLMVGGSAGLKPRLADVVAKGLSEDEVLAAVDRIVEFFKNYGENRKRLGTIIDKIGLEEFKKEVGLWEK

SEQ ID NO: 17108 - protein, 219 aa, Methanosarcina mazei Go1
MKDNLPEKGAIVQRDRETYTIAPHLPGGIVDPDTLIKIGEVAKKYGAAALKATSAQRIAIVGLKEEDLDNAWADLGIKPGAAIGLCVRSIKFCPGTTFCKQAKQDAVGLGLKLDEKYHGMSMPSKLKIGVSGCPNSCAEPAIKDIGLMGTAKGYNLMVGGSAAAVPRLAQVVAKDLSEDDALEIVDRILNFYKNSGTKKRLGRFIEDMGLDEFKKQVGL

SEQ ID NO: 17109 - protein, 792 aa, Methanosarcina mazei Go1
MEEIQLKVEKAYPIDLGRGIIRLDPTALLKLQLSPGDIVEIRGKKKTTAKVWRADRQDWEQGIVRIDNFIRQNAGVSIGEKVTIKKVEAPEAKKLILALPESMTQGGPELQFGEHANEIIKRHILKRPVFKGDIIPIINSMSQPMTESLTTSQVIPLVAVETDPANTIVLITETTNIELRKKPVQGYEKATRGVTTYEDIGGLGDEIMRVREMIEMPMKHPELFAHLNIEPPKGVILYGPPGTGKTLIAKAVANESGASFHYIAGPEIVGKFYGESEERLRKIFEEATQEAPSVIFIDEIDSIAPKRENVTGEVERRVVAQLLTLLDGMEERGQVVVIGATNRVDAIDPALRRPGRFDREIHIGVPDTKDRYEILQIHTRGMPIEKDEESVTGEPAPEVEIGALDEFEVETGTEIEVDEAAMEREKKEKTNLYLMSLAERTQGFVGADLLALVQEAAMRCLRENLPDLDLEIDTIPPERLEKIVVTKKNFEDALMEAEPSALREIFVEMPSVSWGDVGGLDEAKHSIIEAVEWPIKNPEKFVKMGIKAPKGILLYGPPGTGKTLIAQAVAKESNANFISVKGPEMFSKWLGESEKAIRETFKKARQVSPCVVFFDEIDSIAGMQGMESTDSRTSERVLNQLLTEMDGLETLKDVVIIAATNRPNLLDPAILRPGRFDRLVYVGAPDRKGRLRIFKIHTQNTPLAEDVNLENLADTTEGYVGADIEAVCREAVMFALRENFDIEAIEMRHFREALKKVKPTINENIAQFYEKIEEQFKGGQRPVETAGLVGYR

SEQ ID NO: 17110 - protein, 414 aa, Methanosarcina mazei Go1
MNWGSQMKVLVINAGSSSLKYQLIDMTNESALAIGLCERIGIDNSIITQKRFDGKKLEKQTDLPNHKIALEEVVKALTDSEFGVIKSMDEINAVGHRVVHGGEKFNSSALINEGVEQAIKDCFELAPLHNPPNMMGISSCQEIMPGVPMVAVFDTAFHHTIPPYAYMYALPYELYEKYGIRKYGFHGTSHFYVAKRAAAMLGKPEQDVKVITCHLGNGSSITAVKGGKSIETTMGFTPLEGVAMGTRCGSIDPAVVPFIMEKEGLSTREIDTLMNKKSGVLGVSSLSNDFRDLDEAASKGNQKAELALEIFAYKIKKVIGEYIAVLNGVDAIVFTAGIGENSASIRKRILADLDGIGIKIDEEKNKIRGQEIDISTPDATVRVLVIPTNEELTIARDTKEICETEVKLRSSVPI

SEQ ID NO: 17111 - protein, 333 aa, Methanosarcina mazei Go1
MVTFLEKISERAKKLNKTIALPETEDIRTLQAAAKILERGIAKVVLVGDEADIKALAGDLDLSKARIVNPKTYERKDEYINAFYELRKHKGVTLEGAAEIMSDYVYFAVMMAKLGEVDGVVSGAAHSSSDTLRPAVQIVKTAPGAALASAFFIIAVPDCEYGSDGTFLFADSGMVEMPSVEDVANIAVISAKTFELLVQDTPYVAMLSYSTKGSAHSKLTEATVAATKLAQELAPDVAIDGELQVDAAIVPKVAASKAPGSPVAGKANVFIFPDLNAGNIAYKIAQRLAKAEAYGPITQGLAKPINDLSRGCSDEDIVGAVAITCVQAAAQDK

SEQ ID NO: 17112 - protein, 745 aa, Methanosarcina mazei Go1
MAPVETTERLGRSLGFFSTFAIGTGTMIGAGIFLLPGIAMANAGSGAIISFLLGGLITIATSISMAELATGMPLAGGSYYYISRTMGAAFGAVIGLGSWLALIFKGTFALIGLAEYAQIFHPMPIYLVAAVTGVLLLIINFRGAKSSGSLQNFIVVILLLILFVFIGKVSFEVRPENLLPVAPHGVVSIFTTAGMIFISYLGLAEAAAVAEEVKNPSKNLPRAFIASAVVVTLFYAGIMAVVAGFSGPEGGASTVTPLADIAGFIAGDSGKFFIAFSALLATLSTANGAILSSSRFPFAMSRDALMPKWFVSIHKKYETPHNAILVTGSVMVLLLFLFDIEQLARLGGAFNILIFILLNMAVIILRKRTLPGYEPTFRDPFFPFTQIFGVVGSMLLLPLLGGLPLLFSVLMIFAGAGWYMFYGKDKAMPAYNLFDLLENNVERVSAEPEPVGRVLVPVSNPGHERDLLKLADLLGNEIICLHVVEVPSQISLTVGQELYHEKQIEIDSRFRDYFEQYPAKFGNKRDYIVAFDHTISNSIIEQAEIENADIIIMGWHDSKRFKYSFGDVTNDVLLSSKSQIALLKGHLPDSIKKVLVAYNGRENSVHGLSLAKKIAENTGASIRIISIVSPDEDPEKKAKIAEELEGLVKKIPSTPASFKLLERYSIEDAILEVSNGYDLTIIGDSSERFKISLLGTLSQRIARHARKPVMIVKKSKPISKESLNYLLKKYARKAYAKFRKEKGRD

SEQ ID NO: 17113 - protein, 356 aa, Methanosarcina mazei Go1
MKLTINKNSAKWMQLPRDVLVGHGVLEEVGDVCRDLKLKGNALIVTGSTTQDVAGKRVSRLLEDAGNSTETVLTCRATMEEVDKLMEKALNTEATFLLGVGSGRSIDLAKLASTRLEIPFISVPTAASHDGIASSRASVIDNGKNASIQAQAPLAVIADTEIISAAPYRFLAAGCGDIISNYTAVLDWELASRLRNEYFGEYAAALSRMAARVVIENADSIKPDHETSARLVVKALVSNGVAMSIAGSSRPASGSEHMFSHALDRIAPKAALHGEQCGVGTIMMMYLHGGNWQEIRDALKKIGAPTNAEELGIEDKYIIEALLQAHSIRPDRYTILGNGLTLSAAEKVARITKVIN

SEQ ID NO: 17114 - protein, 564 aa, Methanosarcina mazei Go1
MTTGSTDKVNGAKALIKCLEKEGVDTLFGYPGGQIIPFYNELYDSDLRHILVRHEQAAAHAADGYARATGKTGVCVSTSGPGATNLVTGIATAYMDSVPIVALTGQVPRSLIGNDAFQEADITGITMPITKHNYLVQDPQEIPRIVKEAFHIASTGRPGPVLIDLPKDVQNIEIDLHYPERVELRGYKPTYKGNTQQIKRAAEEIANSCRPIIYAGGGVISSNASAELVEFAETIKAPVTTTLMGISSIPTEHPLYVGMLGMHGCKYANYAIQESDLIIAVGARFDDRVTGKLESFAPNARVIHIDVDPAEISKNVKVHIPIVGDAKQVLKSLIRYVQCCRSAEWIEKVNLWKKEYPLNYRECRDTIMPQFVIEQISEVCRDAIIVTEVGQHQMWAAQFFKYSKPRTFLTSGGLGTMGYGFPAAMGAKVGRPDKTVINIAGDGSFQMNSQELATVVQNDIPVVSVILNNGYLGMVRQWQELFYDRRYSYTFIKGSVDFVKLAEAYGALGLRAERPSEVRPAIEEAVNSGRPTVVEVIVECEANVYPMVPAGAAINEIIDLEEHR

SEQ ID NO: 17115 - protein, 413 aa, Methanosarcina mazei Go1
MSEDSAIRSSLEDIKSRVEFQLECGEIIPEDVKTLLTEIEILKVQNENMKARLLEASVATGRHLQEINKLKAHLEQLTEPPLFIATILEVNGEIALIRQHGNNQEVLTQIPEECLGKIEPGMRVAVNGAYSIISIVSRAADVRAQVMELINSPGIDYSMIGGLDDVLQEVRESVELPLTEPELFEDLGIEPPSGVLLHGAPGTGKTLIAKAIASQAKATFIRMSGSDLVQKFVGEGSRLVKDIFQLARDKSPSILFIDEIDAVGSMRTYDGTSGSAEVNRTMLQLLAEMDGFDPKGNVKVVAATNRIDLLDPALLRPGRFDRSIEVPLPDDKGRIEILKIHTRKMKLADDVDFEKLAKVMSGRSGAEISVIVKEAGIFVLRRRGKEITMADFMKAYDKVVNVQEPTIPQAMFV

SEQ ID NO: 17116 - protein, 291 aa, Methanosarcina mazei Go1
MFLPNSFIDALADYESARYVIFGVPFDNTSSYRAGSRWAPDAMRQVSANFESYNPVFDIDLVDLPIYDAGNLETSASVDETLRDLYEEVKALLNNGKLPIMLGGEHSLTYSTVKACAEFAGDDFGVLILDAHFDLREEYRGFKHNHACVSRNILENITDNLVSIGIRSGPEEEWIFARENKLKYYTADDVESIGMVEVLKEAIESLDCSQLYLSLDMDAIDPAYAPGLGTPEPFGLSARDVRTAIRTLAPYSMAFDVVEIAPEYDSGQTAMLGAKLMREFIASHAKSCIKK

SEQ ID NO: 17117 - protein, 469 aa, Methanosarcina mazei Go1
MSKNVQKIEKLLIVICMIFIVLPSPALAVTAEENAEAIEGLQTTLTFLWLLIASGLVFFMHAGFSLVETGLTRSKNTANILMKNFMTVVLGILVYWAVGWGVMYGADAAGLIGTDQFFLAGADNATWNSWFFQMVFAATGATIVSGAMAERTNFKAYLVYCVLMVAVIYPIYGHWVWSGADTALLSGADSPIVKAIGVAHHDFAGSGVVHSIGGYSALAGVLLVGARIGKFRDGKAIPIPGHNLTIAFLGTLILALGWLGFNGGSTLNANDPYMNLVVVNTFLAGAVGAVTTMAITWMKTGKPDPSLTANGLLGGLVAVTAPCGSISNWGAIAIGIIAGIIIYAGVMFNENKLKLDDPVGAIAVHGYCGTWGLISVGLFSIGIGNGILADASYAAAVPGLFYGGGVSLLLIQLVAVLITIVWGFGLSFIIFKILDAVIGLRVSEEEEIMGLDICEHGIRAYPEYLMREE

SEQ ID NO: 17118 - protein, 503 aa, Methanosarcina mazei Go1
MTLGSVPPKFKVSIDRDQCMDCGRCIENCSYGVYRREGDKILIESRKCTACLRCVSMCPRDAISITEKPVDYRSHPVWTREAREDIINQARSGKIILSGMGNARDLPIIYDRLLLDACQVTNPSIDPLREPMELRTYIGKKPAKLKFRKTESGDVELDTKLAPNLKLDTPIMIGHMSFGAISLNSQLSMAKAVAETGTFMGTGEGGLHKDLYPYQNHMIVQVASGRFGVNIDYLERGAAIEIKIGQGAKPGIGGHLPGEKVNDEVSRTRMIPLGSDAISPAPHHDIYSIEDLVQLIRSLKEATEWKKPVFVKIAAVHNVAPIAAGIARSSADAVVIDGFRGGTGAAPKVFRDHVGIPIEAAIASVDQKLRDQGVRNEISIIASGGIRSSADLAKSIALGADAVYIGTAALVALGCRVCGNCYRNLCPWGIATQRPDLVSRLDPEAGAAQVSNLIHGWTLELSELMGAAGINSIESLRGNRDRLRGYMLDEGMLKILDVLPAGA

SEQ ID NO: 17119 - protein, 440 aa, Methanosarcina mazei Go1
MNLNNIRSSMTESTKSKDESMRSHLVKPGSVYDGIEPGELGETTESVQDRVRQLESRNSFLEEQCSQIESEKRYLENQKIKYEREIRKLQSELDRMKTSPLIIGTVIDVIKNDRIIVRSSNGPQFLVNVSQYIDEKKLLPGAKVALNQHTLAIAEVIPSTEEPFVAAMEVIESVEVDYDQIGGLDEQIQELQEAVELPLTSPERFARIGIEPPKGVLLYGLPGTGKTLLAKAVAHRTNATFIRVVGSELVQKYIGDGSKLVREIFEMARKKAPSIIFIDELDSIAARRLNETTGADREVQRTLMQLLAEMDGFDKRKNIRIIAATNRPDVLDPAILRPGRFDRLVHVPMPGIEARGKILKIHCEKMTLAEDIDFKKLAKATEGMSGADLKAIATEAGMFAVRRDKELVEMEEFLEAVEKVSMAADTQKMMPSNLPETMFV

SEQ ID NO: 17120 - protein, 247 aa, Methanosarcina mazei Go1
MLKIEDLTVEVNGKILLHDVNLEVEKGYTNVLFGPNGAGKSALMRTIMGFSEYKVLKGRILFNGEDITHLPVDERARRGLGIMMQRPPDMTGIKLGDLVKVTSKGKKDPEALAENLDMKRFLDRDVNVGFSGGEIKRSELLQLAAQNPTLYLLDEPESGVDLVSIEQVGMTIKELLAEGLECPGERCTKGKSALIITHTGQVLDYVQADRGYILCNGTVMCSGNPMKMLEEIKNKGYQECITCRLNR

SEQ ID NO: 17121 - protein, 751 aa, Methanosarcina mazei Go1
MTEEINLRVAEAYHKDVGRGIARIDTRLMQEMGLVSGDIIEISGRSKTYAIVWPNVERGQENRIRIDGNLRSNAKVGIDDRVTIQKVQAKHAQRVTLAPSQPVRLVGGAHYILRIIEGRPLNKGQQIRVETVNNPLTFVVASTRPAGPVVVTKDTEIIIKEKSIEEIKAPEGISYEDIGGLRREIQLVREMIELPMRHPELFQKLGVEPPKGVLLHGPPGTGKTMIAKAVASETDANFITISGPEIVSKYYGESEQKLREIFEEAEKDAPSIIFIDEIDSIAPKRGEVTGEMERRVVAQLLSLMDGLKSRGEVVVIAATNRPNSIDEALRRGGRFDREIEIGIPDRNGRKQILLIHTRGMPLEDEVSLSEIADVTHGFVGADLSSLCKEAAMHALRRITPEIDIEEEIPQEIIDNLVVTKENFREALKNIEPSAMREVYIEVPHVGWDDIGGLEKAKQELIESVEWPLKYPEMFKAVSIKPPRGVLLFGPPGTGKTLLAKAVANESEANFISIKGPELLSKYVGESERAIRETFRKAKQAAPTVIFFDEIDSIAPQRSSVSDTHVSERVVSQILTELDGIEELKDVIIVAATNRPDMVDPALLRPGRFDRLIYIKPPGKEGREKIFEIHAKEKPLAEDVKLSELAEMTEGYVGADIEGICREAAMLALREIVTPGADRKNIQEKAAEVRLSKRHFEKAIRRVKPTTSRETLSAYEKSAELFARYATEFEEESSEEKDQEIKVEEKDQETRV

SEQ ID NO: 17122 - protein, 428 aa, Methanosarcina mazei Go1
MESVWLGIGLAAGTYLNWKFVAKKLRQYTQVAGDSITIPVYFENRFRDKSHSLRIISSILILVFFLLYTSSGLVAGGKLFNTVFEIPYQQALLIGALVIITYTFLGGFMAVCWTDFFQGTLMVCAIALVPLAAMKGIGGYDSTVSIIESIDPQLLNPWTALAGGAIPLISNLAWGLGYFGMPHILVRFMAIESPEKIKQARIIAMVWVIISLIFAVVVGIVGRAYLYPEFLGEAGSETIFMVMINNMFTPIIAGILLAAILAAIMSTADSQLLVAASAFTEDIYRIIMRKNAGEKELVWMGRFAVIIISAIAYLIARDPNNSVMGLVSYAWAGFGAAFGPVILFSLFWRNTTRNGALGGMIVGGLTVIIWKQLSGGIFDLYEIVPGFLLSCITIYAISILDKEGPAEEILREFDHLKQITLGGKNTHK

SEQ ID NO: 17123 - protein, 329 aa, Methanosarcina mazei Go1
MRKSSILILALLLIASIFVSGCADNEDEITELNIGYQPSTHQIAYMTAYEKGWWQEDLAPYGITKINEYQFPTGAPEMQAMMAGNLDVAYVGAAPAITALSQGLDAKIVAPVQINGSSIVLRPEHEYESPEDLKGLSIATFPPGTIQDTLIRDWLKDNGLNPETDVKILGMAPGDAVTAISAKQVDAVFLPHPSPSVIEAEGNGRTVVQSGEMSPNHACCVLLISGKLIRDHPDVVEQIVKTHIKATEYNQENQDEAAQIYSNKTTENVEVIKKSLEEWDGAWITDPELIKNSTVEYANIQYELNYTQKPLTEEEIFDTSFYEKAENEE

SEQ ID NO: 17124 - protein, 313 aa, Zea mays
MPPPPPLVLLAKPLFPNFAAALEGRYRLVLAGDADAATAAEARVLLVPGLVAVTAELVDRLPALELVAATSVGLDHVDLRACRRRGLAVTNAGAAFSVDSADYAVGLVVAVLRRVAAAEAHLRRGGWATDGEYPLTTKVSGKRVGIVGLGSIGSLVARRLAAMGCRVAYHSRAPKPSCSCPYAFFPTARALALASDVLVLSCALTEETRRVVGREVLEALGQGGVLVNVGRGGLVDEPELVRCLREGVIGGAGLDVFEDEPDVPAELLAMDNVVLSPHRAVLTPESMRGLLDVVAGNLDAFFAGRPLLSPVSL

SEQ ID NO: 17125 - protein, 260 aa, Zea mays
  misc_feature (152)..(152): Xaa can be any naturally occurring amino acid
  unsure (1)..(260): unsure at all Xaa locations
MAAASTSLPLGFSSHHRPTPRIRPQPQSQSQPLKAKPLNPLRFSLALTPATAKPRLAAMPDDVAVANFVEKDWSFLESAGANLQRALASGALSPASRVLALTPTASFVRSLLASSPCELLVAAHESMYVLAGVKEAHDEVRCFHLEGGGGGXGGGVVEAVPERFDDFDVVFVCYFPGMGVSAGALLKSLAKRCSKGARVVMFLDQGRQNFEQQRREHPDVVTSDLPSIAFLEKAASGNKYEITEFVDEPSFYLAVLQFQG

SEQ ID NO: 17126 - protein, 290 aa, Zea mays
MLGLEEGRGVKRPFFTSPDELLEEEYYDEQLPEKKRRLTPEQVLLLERSFEEENKLEPERKTELARKLGLQPRQVAVWFQNRRARWKTKQLERDFDRLKASFDALRADHDALLQDNNRLRSQVVSLTEKLQEKEDATEGGATADTAAPAVDVEASLADDVEEPAEPAATFEVLQEVKSEDRLSTGSGGSAVVDADALLYGRFAAAVDSSVESYFPGGEDHYHDCGTMGPVNHGAGGGIQSDDDGAGSDEGCSYYADEAAAAAAAFFAGHATHHHADEDEDAGQISWWMWN

SEQ ID NO: 17127 - protein, 606 aa, Zea mays
MCGILAVLGCADEAKGSSKRSRVLELSRRLKHRGPDWSGLRQVGDCYLSHQRLAIIDPASGDQPLYNEDQSVVVAVNGEIYNHLDLRSRLAGAGHSFRTGSDCEVIAHLYEEHGEEFVDMLDGVFSFVLLDTRHGDRAGSSFFMAARDAIGVTPLYIGWGVDGSVWISSEMKALHDECEHFEIFPPGHLYSSNTGGFSRWYNPPWYDDDDDEEAVVTPSVPYDPLALRKAFEKAVVKRLMTDVPFGVLLSGGLDSSLVATVAVRHLARTEAARRWGTKLHSFCVGLEGSPDLKAAREVAEYLGTLHHEFHFTVQDGIDAIEDVIYHTETYDVTTIRASTPMFLMSRKIKSLGVKMVISGEGSDELFGGYLYFHKAPNKEELHRETCRKVKALHQYDCLRANKATSAWGLEARVPFLDKEFINAAMSIDPEWKMVQPDLGRIEKWVLRKAFDDEEQPFLPKHILYRQKEQFSDGVGYSWIDGLKAHATSNVTDKMLSNAKFIFPHNTPTTKEAYYYRMVFERFFPQKSAILTVPGGPSVACSTAKAIEWDAQWSGNLDPSGRAALGVHLAAYEHQHDPEHVPAAIAAGSGKKPRTIRVAPPGVAIEG

SEQ ID NO: 17128 - protein, 588 aa, Zea mays
MCGILAVLGCSDWSQAKRARILACSRRLKHRGPDWSGLYQHEGNFLAQQRLAVVSPLSGDQPLFNEDRTVVVVANGEIYNHKNVRKQFTGTHNFSTGSDCEVIIPLYEKYGENFVDMLDGVFAFVLYDTRDRTYVAARDAIGVNPLYIGWGSDGSVWIASEMKALNEDCVRFEIFPPGHLYSSAGGGFRRWYTPHWFQEQVPRMPYQPLVLREAFEKAVIKRLMTDVPFGVLLSGGLDSSLVASVTKRHLVETEAAEKFGTELHSFVVGLEGSPDLKAAREVADYLGTIHHEFHFTVQDGIDAIEEVIYHDETYDVTTIRASTPMFLMARKIKSLGVKMVLSGEGSDELLGGYLYFHFAPNKEEFHRETCRKVKALHQYDCLRANKATSAWGLEVRVPFLDKEFINVAMGMDPEWKMYDKNLGRIEKWVMRKAFDDDEHPYLPKHILYRQKEQFSDGVGYNWIDGLKSFTEQQVTDEMMNNAAQMFPYNTPVNKEAYYYRMIFERLFPQDSARETVPWGPSIACSTPAAIEWVEQWKASNDPSGRFISSHDSAATDHTGGKPAVANGGGHGAANGTVNGKDVAVAIAV

SEQ ID NO: 17129 - protein, 479 aa, Methanosarcina mazei Go1
MLKRDPIMKIVMKFGGTSVGDGKKIRHVAHLLKKYNEEGNQIVVVTSALGGVTDRLLENARLASTKGKVSLVKEFKTELTNKHHEAVRDAIEDPNVAKDVLHILDLRIDELEKALIGICYLGELTNRSIDYISSYGERLAAPIISGAVRSLGIPSIEYTGGEAGILTTSDYGNARPLEKTYELVSKRLGCRLDSHILVVTGFIGENEDGIITTLGRSGSDFSASILGAALKADEIWLWKEVNGIMTTDPRIVPEAKTIPQISYAEAMELSYFGANVLHPRTIEPAMREHIPVRVKNTFDPEFPGTLVVSEKFQCKHVVKAVSLIKNVALINISGAEMAGTIGTVARLFTALARAGVNIVMISQGSSESNLSFVVSEAHVEPALKALHAEFNREIIKEITSDKNVCVVAVVGAGMAGTPGVAKRVFGALGNSMINIIMISQGSSQYNISFVVREDDAFAAVKTLHDEFELYNGNGIEKKL

SEQ ID NO: 17130 - protein, 588 aa, Zea mays
MCGILAVLGCSDCSQARRARILACSRRLKHRGPDWSGLYQHEGNFLAQQRLAIVSPLSGDQPLFNEDRTVVVVANGEIYNHKNVRKQFTGAHSFSTGSDCEVIIPLYEKYGENFVDMLDGVFAFVLYDTRDRTYVAARDAIGVNPLYIGWGSDGSVWMSSEMKALNEDCVRFEIFPPGHLYSSAAGGFRRWYTPHWFQEQVPRTPYQPLVLREAFEKAVIKRLMTDVPFGVLLSGGLDSSLVASVTKRHLVKTDAAGKFGTELHSFVVGLEGSPDLKAAREVADYLGTTHHEFHFTVQDGIDAIEEVIYHDETYDVTTIRASTPMFLMARKIKSLGVKMVLSGEGSDELLGGYLYFHFAPNREELHRETCRKVKALHQYDCLRANKATSAWGLEVRVPFLDKEFVDVAMGMDPEWKMYDKNLGRIEKWVLRKAFDDEEHPYLPEHILYRQKEQFSDGVGYNWIDGLKAFTEQQVTDEMMNNAAQMFPYNTPVNKEAYYYRMIFERLFPQDSARETVPWGPSIACSTPAAIEWVEQWKASNDPSGRFISSHDSAATDRTGDKLAVANGGGHGAANGTVNGNDVAVAIAV

SEQ ID NO: 17131 - protein, 507 aa, Zea mays
MALLLHPRLPSHPFRAAAHHHHAISDASCFLTLHGPGRKRRMLLAAVTCRAARVKEPAPSAGASPPPPPQALTKEAHKYFDHAVVTVRAGDGGHGAVLAMPPAPSADAAKPRGRFNRGEKKSKKVSYKRNYDGSVALPTGGHGGDVVVYADEAEETLLRFHEKARYCAKRGGNVGAAGGTLSSRMHSGFAGETLRIPVPVGTVVKRKKGAVLADLAHHCDEVLVARGGQGGISLIDVPEYKRRKAMALSPNIMRDTSDKVLTHGQPGEEVSLELILRVVADVGLVGLPNAGKSTLLSAITLARPDIADYPFTTLMPNLGRLGGDPALGALQFSSEATLADLPGLIEGAHLGKGLGRNFLRHLRRTRVIVHVVDAAADDPVNDYKIVREELRMYNPQYLERPYVVVLNKIDLPKAQDRLSALVLEISSIGCEEGHEQSGSKDNLNGRVSDHQVLSEAKAEGVEKELGDYPRPEAVVAASVLRHIGIDEMLKEIRAALRKCFDHKLPEH

SEQ ID NO: 17132 - protein, 468 aa, Methanosarcina mazei Go1
MSEHNEAANLVKTLRPFHIWALGVGIVLVGEYMGWNFTVAKGGILGSLLAMLVAGTMYVIIALCASELGSATKLAGGPYDWARLFVGPGAAASVGLAVYMEYIALEAADAIVVAFIAQSIFPELQVFPVTLLVIALLTFINYRGVVAALTLNFVLTMIAFIAIVVFFFATAFGGVNIHPEYLFQGALPNGMIGLFAALQFGPWFYLGIEGAAMCAEECKHPSRAVPLGQQAGMITLLVGAAMTLYLCSVLIPTDLLGVSVYPLFEAAQNSGIFIFIALLGLGTFLTCVASANGCVCDSSRSWFALSRDKYVSSWFSAVHPRYNTPYRAVIFTMPVAIGFAFSGFLDQVITFSIVSGLLCYVLIPFSLIRFRNLFPQTTSKVRPFAGPLQPYIAYFAIAIAITILSTLFWGYKYNLIFAFVFYGIAYFYFSHRHKNSNIENNWAEMGWPLPNGSENGRIGKEAVGFGDE

SEQ ID NO: 17133 - protein, 257 aa, Zea mays
MEHYDSYLCSGSMHSYGGVGGATDAALDAGGDDMQRLLNALMDDMAAESDSFSDDMEAASSESSSSACSANSQQEATRRPQQQPDGGHSNGSNKSSKKQHQQQSPAPYIGVRKRPWGKFAAEIRDSTRKGARVWLGTFDSPEAAAMAYDQAAFSVRGAAAVLNFPVERVQESLRALALSSASSAAGSPVLALKCRHSIRKRSPNKNKNKKQERQQQVAVAAAGPQQPPCPTSVVELEDLGADYLDELLRVSSEFHWQ

SEQ ID NO: 17134 - protein, 508 aa, Zea mays
MGWLTKFFRGSTHNISEEQYHSRPAEDTAWNEPSSSPVVTDILSEFNNEDIDRAIALSLSEEEQRKEKAIDKDMHLEEDEQLARAIQESLNVESPPRRNGSANGGTMYHPPRETGNAYQPPRENGSANGGNAYHPLPFMFSSGFRACAGCHREIGHGRFLSCMGAVWHPECFRCHACSQPIYDYEFSMSGNHPYHKTCYKEQFHPKCDVCKQFIPTNMNGLIEYRAHPFWVQKYCPSHEMDGTPRCCSCERMEPRESKYVLLDDGRKLCLECLDSAVMDTNDCQPLYLEIQEFYEGLNMKVEQQVPLLLVERQALNEAMEGEKAGHHHLPETRGLCLSEEQTVSTILRPRMAGNKIMGMITEPYRLTRRCEVTAILILYGLPRLLTGSILAHEMMHAWLRLKGYRTLSPDVEEGICQVLAHMWIESEIMAGSGSSAASSSSGSSSSTSSKKGGRSQFEHRLGDFFKHQIETDTSMAYGDGFRTGNRAVLHYGLKRTLEHIRLTGTFPF

SEQ ID NO: 17135 - protein, 323 aa, Methanosarcina mazei Go1
MEGSNEKFKPQKILIATDGSEASEKAADFGIETLRFEGAKVYAVYVIDTGSYGSVPVDEKKFKKIERLEEIGHKATSYVEKKATAAGMKVESIVLKGNPAEEIVDFAEEQRVDMIVVGSLGKSGIKRFMLGSVSEKVVRRAKIPVLVVREQKEIKPQKQILIAADCSKATEKAVDFGIEIAKLNGAKVYAVHVIDPIFNDLMEEAWAENAYEQFKKIGREAVSYVEEKANAAGVKVESAVLEGNPAEEIVDFAEEQKVDMIVVGSLGKSGYEQFAIGSVSSKVLRNAKVPVLIVHDIYEFVELFRRCQKSEEVLTPVAGEKEQ

SEQ ID NO: 17136 - protein, 320 aa, Zea mays
MASTRAAATLLLLLALAGTSSAQLSTGFYSYSCPGVYGAVKSVMQSAIAREKRMGASILRLFFHDCFVQGCDASLLLDDTPSFQGEKMANPNNGSVRGFEVIDAVKSAVEKLCPGVVSCADILAIAARDSVVILGGPTWDVKVGRRDSTTASFSGANNNIPPPTSGLANLTSLFAAQGLSQKDMVALSGAHTIGQARCTNFRAHIYNDTDIDAAFARTRQSGCPSTSGAGGDNNLAPLDLQTPTVFENNYYRNLLAKKGLLHSDQELFNGGATDALVQSYVGSQSAFFADFVAGMIKMGDITPLTGSNNGQIRKNCRRVN

SEQ ID NO: 17137 - protein, 326 aa, Zea mays
MEPHHANKPRPKLSATKHSKFISCKLYISESRNATAVDAVERASKSDPQVVVVSQFGDHHYNRFRYTLVSYIVVVDGGGSSAAGEATVVHSPIRKVLLAMIEAAFSSIDLESQSGAHPRIGVVDDLSFHPVGQATIEDAASLARQVASDIACIAAVPVFLYAAAHPAGKSVGAVRRELGYYRPNYRGNQWSGSVLPNVLPVKPDVGPAHVVSHKRGATTVGVTPWIENYNVPVLCKDVATVRRITRGVTGRSGGLPTVQALALFHGDDCTEIACLLDPDHASAYQVQTVVEQIAGDQGLEVEQGYYTDITKDEALDKYLKIACADD

SEQ ID NO: 17138 - protein, 639 aa, Methanosarcina mazei Go1
MDGYNIFLALLAVYIIGLVTVGWYFNKKQKSITDFWLAGRKVGPGALGFSAAASWLTAGGILAVIGYFILQGMGSIWAFVAPNIVALLVIAVLVGKIKNLPAITQPELLEQRYGSSVRWPVALIITVVMILFAVADVTGLSLVLQVFYGLDPLYAAAIVAIAVSLYVTLGGLSAVVWTDVIQFSFLSLFTIAMAFAAVGTVADGGLNTPAISSSELFGSLPDVWWNPLSIGLPMVLIFCLAIIPGWITEQDPWQKVWAARDAKSARTGMIIGSLMITIVFSACAVIAIALSSIYPEIPQMGFPAGMAQAEPALLAFVSERFASAPLIVAISAIGLAAASMSCADTFATSGASCISRDIYQRYIKPDATMKEMLIVNRVSVLIIVLAATAGSFIIPNIIDAIHIATFIASASYFFPLMGGLYWKRATKEGAFAGMVIGFIVQVALVVLDLVKTPPLAPSYLETIHPVLMSHGVIVGMSLSAIAFFGVSLMTKPSSRVNLAPFFEEEAEELARYETGEINEADPSYSAFLKNVNEKVAGERTHLQLNLRTSGTLSWHELVEKLKSSSPAWVTPTGLDSVYRLTHGDMLACVAVTRGSGEQDIWLKAEPKIETVGRQRKELFTAYEELKKVLDQKGVKLDFY

SEQ ID NO: 17139 - protein, 571 aa, Methanosarcina mazei Go1
MTLSPEDIKIIEKYALQNAVKYGKAPQPKAVMGKVMGECPQLRADPSGVSAALENIVSEIAKGNPEAWEARLSEIAPELIEALSVKKEPDKGLKPLEGAETGKVVMRFAPNPNGPATLGSSRGMVVNSEYVKVYKGKFILRFDDTDPDIKRPMLEAYDWYMDDFKWLGVVPDQVVRASDRFPIYYDYARKLIEMGKAYVCFCKGEDFKRLKDSKKACPHRDTDPEENLMHWEKMLAGEYEDQQAVLRIKTDIEHKDPALRDWGAFRIRKMSHPRPEIGNKYIVWPLLDFAGAIEDHELGMTHIIRGKDLIDSEKRQTYIYKYFGWTYPKTTHWGRVKIHEFGKFSTSTLRKAIESGEYSGWDDPRLPTIRAIRRRGIRAEALKKFMIEMGVGMTDVSISMESLYAENRKIVDPVANRYFFVWNPVELEIEGMKPVVAKVPRHPTDHARGMREISIENKVLVCAEDIEKLNVGSVLRLKDLCNVEITSLSPLRVKRSETSLEDLKKAKGKIIHWVPVDGIPVKVCGPEGDIEGTGERGIETELDNIVQFERFGFCRIDAVDGENVVAYFAHK

SEQ ID NO: 17140 - protein, 540 aa, Methanosarcina mazei Go1
MLKFSISCLSYLSGEIDMKVLVSDSLSNEGLEILKEHFDIDVCTGLCEDELVEKIKGYDALVIRSGTQVTQRIIEAADNLKIIGRAGVGVDNVDVDAATKKGIIVANAPEGNMISAAEHTIAMMMSMSRNIPQANASLKAREWKRNKFMGVEVKGKTLGVIGLGRIGSEVAKRAAGLEMNLMGYDPFISEKRAMELGVKLATVNEIAKEADYITVHTPLIKETRNILDDEQFALMKKGVRVLNCARGGIINEEALARALESGKVGGAAIDVFVEEPPFSSPLLNFDNVIVTPHLGASTQEAQVNVAIDIAKEVVSVLTGGSAKNAINIPSVKPEAMAVLAPYIRLSELMGKIAGQLVDSNYEKVEIAYNGEISGKDTRPLTVSALKGLLEMAVGSGVNYVNAPILAKSRKIAVVESKSESAEEYSSTVSIRLSSGESTKMVAGTVVGDEPKIVSIDDDKVDIFPAGRMIFAKHINKPNVIGPCCMVLGKNNINISGMQVGRSEVGGVTMMVLNVDTDVSDAILDEVRQVPGILNAKLVTL

SEQ ID NO: 17141 - protein, 394 aa, Methanosarcina mazei Go1
MFSINSECVISKKSEDIPPFYVMEVLESAQALEAQGRHIIHLEVGEPDFPTAPHICEAACAAIGRGLTKYTHSQGLLALREAIVESYYQKFGVDLDPGQVIVTSGTSPALLMVFMALLEKRDEVIMSNPHYSCYPNFVKHLGGTPVFVYTNETNGFALEPETVRQRLSPNTKAILINSPSNPGGHVMSPENLQGLAAIADERGIPIVSDEIYQGLIYSGEEHSILEYTKNAFVLNGFSKLYAMTGWRLGYIICPPGCVRALQKIHQNFFICANSFVQEAGIAALKGPQEHVTEMVQTYNVRRQYMLKRLIGMGLDVRKEPMGAFYVLADARKYCSDSLELSRRILNEAGVAVTPGIDFGNGAEGYLRFSYANSLENITEGMDRLEAFLEKELEG

SEQ ID NO: 17142 - protein, 350 aa, Methanosarcina mazei Go1
MRVTNRSLKGREGEIAVTAETLDDLWHLKYIIEKGDMVFALTRRKADSASDKLRPEKVEKVKVRLGIRVEELEFHKFANRLRIHGPIEHGMDTGSYHTLNVEIGTNISIIKEHWKNDQLQRIQDAEEAGKRPKVVIVAVEEGDADIGFVRHYGIEVYSHIRQSSGKRETGLRNEFFREIVEQLRHAVPEDASIVIAGPGFTKEDFLKYFNETESEMASKALTEDTSMIGMSGFQEVLRRGAVDRIMQESRIARESSLMEDLIREISMDGKAAYGFADVKNALGYGAVETLLIADETLREGREKGEDIDKLLMEVEQAQGKVVVFSTAFEPGEKLHKLGGIAALLRFKVTG

SEQ ID NO: 17143 - protein, 224 aa, Methanosarcina mazei Go1
MTKEYVKGDLPEKAAILQRDGETYAIAPHIPGGIVYPETLRKLADIAEKYGAAALKVTSAQRIAVVGLKEEDLDSAWGELGMKPGAAIGLCVRSVKICPGTTFCKRGKQDSVGLGLKLDEKYHGMQLPSKFKMGVSGCQNSCSETIIKDVGIVGTAKGFNVSVGGNAGPRPRLGEVVAKDLSEEQVLDLVERIINFYKGYGKSKRIGAMIDEIGIEKFKEGVGL

SEQ ID NO: 17144 - protein, 384 aa, Methanosarcina mazei Go1
MIYLDNSACTRLDERVLEAMKPYFFDTYAVATSEFGYSMGIDAKEGLENSREIIASRLGADSEEIIFTSGDTESSNMALKGTAWALKEKKGRHIIVLQIEDFPVLNTAKSLQKQGFDVTFLNVDGEGFADLEGLRKAITKETVLVSIQYANQEIGTVQDLKAISEICKEKDVLLHTDATHSFTRLPLNVKELPVDLVTLSAHTIHGPRGIGALYIRKGTPVSKFMDGGFQEFNLRAGVENIPGAAGFATAVELVTEDETRQLEAMRNRVIERALSEIPDVTLNGSREKRLPQNANLTFHYVEGESITLHMDMRGFAVSTGSACFSRSLEASHVIRGIGGDHERAHGSVRFTFGRYNRMEDADAAVDAMSEVVARLREISPLARK

SEQ ID NO: 17145 - protein, 243 aa, Methanosarcina mazei Go1
MKNREIYAEMRCIPPVVLRADGRNFKNTLSGLGFEKPYDTTFARAMADTAELFIKKSGLSPYFAYTFSDEISFLFTDLPFDGRVEKIDSVVASFLGSALTIKLRLEAPIAFDSRLVALQKEEVSEYFHWRQLEAWRNFVASWGYYSLRNEGMGKDEAGKFLKGKKEWEIHEMLFERGINLAALPAWQRRGIIISKEECEISGFNPVYGKEVKSMRRRITQNWEIPKFKSEEGITFLEKLINRN

SEQ ID NO: 17146 - protein, 393 aa, Methanosarcina mazei Go1
MRPPCDPSKFIAEAVKSIPPSGIRRFFDLVSGLEDIISLGVGEPDFITPWHIREMCIHSLEKGQTSYTSNSGLPELRDELTRTYYRRYGLDYNPESEILITTGVSEALDIAIRAVVNPGDEVIVVQPSYVAYVPSVIMAGGKPVIVSTHRDDDFSLTAEVLEPAITSKTKAIVLNFPNNPTGAIMQKEGMEDIADLVVENDLFLISDEVYECLTYEGTHVPFSSLEGMKDRTVMLNGFSKAYAMTGLRLGFAMGAPDIIHSMMMIHQYCMLCAPITAQVGAIEALRNGKGEMERMVREYDRRRHFIVNGFNRIGLECCNPKGAFYAFPYIGDTGLSSSDFAERLLNEKKIVTIPGDVFGEAGEGFLRCAYAASLDDIKKAIERMGDFVDGLKQ

SEQ ID NO: 17147 - protein, 235 aa, Methanosarcina mazei Go1
MSRDGKKILRGINLEVGDREIHSIIGANGAGKSTLAYTLMGLQGYEHEEGNIIFNGEDVAALSITERARKGITLAWQEPARFEGLKVRDYLAIGAKGNGGITEKEIKEALRKVDLKPEKYLNREVGEALSGGERKRIELASIITMKPKLAILDEPDSGIDVVSLKEIVSLIQTLKENGSSVLVITHREEIAAASDKASLMCEGVILRSGDPLEISEFFKNRCIPCDSRVSPTKVV

SEQ ID NO: 17148 - protein, 295 aa, Methanosarcina mazei Go1
MEYIKTATEVYILKIIGGPASQLLASRTARALGTEPVLCEFNRFPDGELYLRIAEEIENEKVTLIQSTPTDSDFVALLQLIDACEGAAEINVVIPYMGYARQDKKFKSGEPVSARAIARCINADRVFTINIHEKSVLEHFPCPAENLDAAALIGSYVAGFGLERPMLVAPDEGARGLVKNVASGHGFDHDHLQKTRLSGDTVVIKTKNLDVTGRHVVLVDDMIATGGTMAESIRMLKSQGAIDVHLACVHPVLTRNAALRLFHAGVKDIIGTDTLEKAESKLSVAPLIAEALSGY

SEQ ID NO: 17149 - protein, 544 aa, Methanosarcina mazei Go1
MKASDLFVAQLKEEGVEYVFGLPGEENLDLLESLRNSDIKLIITRHEQAAAFMAAAYGRLTGKAGVCFSTLGPGATNLVTGVAQAQLTGAPLISISGQKALIDNWQARFQLVDVVRMMEPLCKKAVTISDPGMIPTVLRNAFKHAEAERPGAVHIELPEDVAGEDTDAVVQKRSETSIPSPDPKAIETAAGMIREAKNPLIIVSSGANRKAVTEELEDFANRTGIYVVHTQMGKGVVPDDCPYSLFATGIHARDYVNCGIDGADLIITVGYDIVEYPPYLWNGKLDKKIVNIDFVESVPDRYFNPAVEVIGDISSSVRQLAAKVPEKREFPVFENTRTFIEEKINSPVKKSYPPIPQEVVKSVREVLGREDIISLDNGIYKLWFSRLYRAYAPNTVLLDNALATMGAGFSAGLVAKLLHPERRILAVCGDGGFIMNCQELETAVRYGIPLVVLILNDNAFGFIKWKQKKMRFEDFALDYGNPDFALLAESFGATGIKVKENDDLKEVLEKAFSLNKLVVIECPIDYSVNYETFSIELGNLVCKF

SEQ ID NO: 17150 - protein, 399 aa, Methanosarcina mazei Go1
MEKAEFRVSRIQSKQNSEDIIYGTLGGHNLKEIKFSENVSRIDTSGIRKIFEAAGSNAINLGLGQPDFDTPDHIKAAAIKAINEGFTGYTAGPGIPELREALSQKFKEENCFSVSPQEIIVTSGASEALTIALTALLNRGDEVLISNPGFVSYNALTEMLYGKVVNVPLGEDLTMKPEDVLERITPKTKAIILNSPSNPTGAVSSRADIKALAEIADDHRITIISDEVYEYFIYEGEHVSPASYSDNVVTVNATSKSYAMTGWRLGYLAARNEYISQMLKVHQYIQACANSIAQKAAYAAVTGPKDSVSAMREEFRKRRDVLVKGLNDLGMECALPKGAFYAFPRVSNSAEVASKMISNGVVVVPGTAFGSEGDGYIRISYAASMKDIEKSLSIMEKVL

SEQ ID NO: 17151 - protein, 619 aa, Methanosarcina mazei Go1
MAKILGIDLGTTNSCVAVMEGGEAVVIPNAEGSRTTPSVVGFSKKGEKLVGQVAKRQAISNPDNTVYSIKRHMGEANYKVTLNGKDYTPQEISAMILQKLKADAEAYLGETIKQAVITVPAYFNDSQRQATKDAGAIAGLEVLRIINEPTAASLAYGLDKGDIDQKILVYDLGGGTFDVSILELGGGVFEVKSTSGDTHLGGDDFDQRVIDYLLAEFKKSEGIDLSKDKAVLQRLKDAAEKAKIELSGVANTNINLPFLTVGTDGEPKHMDIDLTRAQFQKMTEDLLEKTLVSMRRALSDAKLTPNDLDKVILVGGATRMPAVVELVENFTGKKPYKNINPDEAVAIGAAIQAGVLGGEVKDVLLLDVTPLTLGIETLGGIATPLIQRNTTIPTKKSQIFSTAADNQPSVEIHVLQGERGIASENKTLGRFILDGIPPAPRGIPQIEVTFDIDANGILHVSAKDLGTGKQQSISIQKPGGLSDDEIERMVKDAEMHAEEDRKRKEEVEIRNNAEALINAAEKTIKEAGDLATEDQKSKVNAAIEDLKKALEGKDAEDIKAKTEALQESVYPISTAMYQKAQQAQQAAGGEGGAAGTDARGPDETVVDADYEVVDDEKRK

SEQ ID NO: 17152 - protein, 332 aa, Methanosarcina mazei Go1
MKTVRCSILGFGAIGQGVAEVLLMKKEYLESIGLEIIVVAVVDSRGATINPEGVDLADCLARKRTTGTVAIEKITGVEVIKSIDHDLVIETTPTNIVTGGAGLQNMFAAFEIGKDVITSNKGPLTLKYRELMEAAKVAGSSFRFEATVGGSMPIINLANEVLAGNRLKSIKGILNGTCNYILTRMLEERASYKDILAESMELGIAETDPTYDVDGIDTACKLVILANAIFGLNATYKDVEVTGITKITPEALEMAYERGHVIKLIGEVSRERIHVAPRLVPINHPLDVRGTLNVASIDTELAGEITVTGKGAGPVETASAILSDLIAIYGNQ

SEQ ID NO: 17153 - protein, 493 aa, Methanosarcina mazei Go1
MCGIAGMFGTPDSNTKVKKMLAILGHRGPDACGIHTEGKLSIGNTLLKITGDMPQPLTGTGSLVLNGEIYNFRELAAEIGLKTDSDTELLFTLIERKVRKGIKPTNAVFSVLSKVNGDYALAYACGTELVLARDPSGVKPLYYFYEKSMVKPGLAFASEKKALAFTGREVKPFPQGGIMGFSTENGKIAEKFTEKSLKITQPEKRISAEKEAIIYLKAALEKAVELRLTPVSGIAFSGGIDSTFLAALAKRIDPYVSLYAVGLPDSHDIAQAEYAAEAIGMKRNLKTHFLSPEEIEAAVPEVIYATESTDPMKVAIGLPLHIVAKTAREEGKRVLLTGQGADELFGGYSRHEGFFEQGADVLDREIYSDLENISAINLERDDMVAMANSVELRVPFLDKEVIKTGLAISPELKVRKKEGVYIRKYILRKAAEGLLPPKILWKEKKAVQYGTGVQKTLDRLARDSGFSKKQGGHIEKYLSQIASEKGFDFINEM

SEQ ID NO: 17154 - protein, 584 aa, Methanosarcina mazei Go1
MHSVPVLFLSGCFKMKEMNGAEVLIKCLEDLGVKHIFGYTGAAILPVFHALRHSDIEIIVNSNEQSAAFSAAGYSRSSNRVGVAIVTSGPAITNTLTSVADAYGDSIPLLVFAGQVPEHKIGTDSFQHINVRGIFRDAAKKVIQLSNGDDIETIIKDAYYFSKSGKPGPVVIDFPLDKQIKNHEYHGMDVKRFEGSYHDDRHLSEGQCENFFKLLLNSRRPLLYLGGGLNSESGSQAVREFNELFGIPSVNTLMAKGVVDERHDMNLGMLGMFGTPYANMLIQENDLFFAIGVRWDDRVAEKVGFAIGTDIAYIDINPEKMHQIKIERSPKFTFIGDAATALRDLLNYARKHNIRLDIREWQIRARYLKKSWPLNYNRSSEYIQAAKVISMLANHVDESTKITTGVGNHQMLAAQYLSMQCPKSFMTSGSFGTMGFSLPTAIGVHYANPHSGVIAIDGDGSLRMNLGELHTIASLDLPIKILMLNNRSDGMVQNLQDAAYEGVRTGTQRPKDVNFAEIARSFGFSYAERVSNRNDLNVKMEAFIDAEGPCFLEACTDREEVLYPKVPAGGSYKDMILGPYIKST

SEQ ID NO: 17155 - protein, 449 aa, Methanosarcina mazei Go1
MTELKKTVTLGRGVVLAILMVIGSGLLGLPGLVADAGTVQEVVFGWLLIILAAMPLIQICAELGKKFPYSGGLFHYAREAVGEWGGYAVTALVCGSFILGEPAVALIGGEYLQHIFGLSDYGVHLLAFLIITAMTLITVAGVRLVSFFNYAAVVILLFLIAALTFYNFNFFSSGLVFSINALFEGISGITGMVLGISGSDSPVHFPDPYNVWKISALLFWAFLGWENMSFGLGELQNPEKNVKRVFWLSFGLTIFIYLMLAATSIGADADGIPLSGASGLVELVKFTPPGNLLIWLMGVVIIANVTCWNFASSRLVYASGKEEVLPAFLGKISKRGQPMASILSMYIAFVLVLLITCVFDISVSSLLMLVNQNFLFLYGFILLSYWKTETGWRRWMYSGFSFLSISFLVSGFTWKILYSVALTGIGYYGFVRKNAKKKEKEEKAAYTAY

SEQ ID NO: 17156 - protein, 206 aa, Rhizobium leguminosarum
TTAWQTQIKEFDAFPTLEQLPLWGFDGSSTQQAEGRSSDCVLKPVAIYPDPARTNGALVMCEVMMPDGVTPHASNARATILDDEDAWFGFEQEYFFYQNGRPLGFPEQGYPAPQGPYYTGVGYSNVGDVAREIVEEHLDLCLAAGINHEGINAEVAKGQWEFQIFGKGSKKAADQIWMARYLLQRLTEKYGIDIEYHCKPLGDTDW

SEQ ID NO: 17157 - protein, 426 aa, Methanosarcina mazei Go1
MEEKSDLKRDLSLVEITLTGIGNILGAGIYVLMGKAAGLAGNFVWFSFLFAGVTAALSAFSYMELSSMYPRAGAEYEFVKRAFGERTGLFAGLLVVYYVTITSSAVALGFGRYFSSLFGASSLVGVAGLFLFLSLVMVYGVKESARLAVFISLIELTGLLVIVYAGFPYIGTVNYFEAPDLAGLFEASALIFFAFLGFEDIVRLSQETKNAEKTTPRALIIAISVTVFLYVCVAIASVSVLDFRVLGLSEVPLADVAAVAFGNDAFVLLSWIALFSTMNTVLVVMLGGSRIVYGMADAGSFPRALARVHPRFRTPWAAIFGIAFISGFFVLLGDITTVANIANFMIFIVFFMVNVSLIKLRYAEPERHRPFRVPVSIGRLPLFPSLGALSAVFLFSQISLEIMAYGFFLIVIGFIIVLIRTRKIPP

SEQ ID NO: 17158 - protein, 296 aa, Methanosarcina mazei Go1
MTYMAEKKIDLSSIKSKGFLPQRQENMFSMRLKVVSGNLDAEKLRAIADAAEKYGSGYVHITSRQQIEVPFVKLEDIEAARNELEKKGISGGSAGKRVRAVVACQGNRVCRNGLIDCERLACIIDEKYFGEAVPKKLKIAVTGCPAACVRPQDNDFGIMGTVKPEVLEENCVGCKRCEKACKMGAIKVIEDKASIDTEKCILCGACIAACRKDALRAEKTGCTVFAGGKAGLRPKQGTKILELAQEEQLFSVLEKTFDYYRNEGLEGERLGDLIERLGIERYLDAIGHSPCDGDLS

SEQ ID NO: 17159 - protein, 1490 aa, Xanthomonas campestris pv. campestris str. ATCC 33913
MAPRTRQGLDDYGLYNSARDERDACGFGMVAQLDDQPSRSLVDTAIAALSRMTHRGGVAADGLTGDGCGLLIRKPDAFLRGLARDAGITLGTRYAAGVVFLPLDEADAARCRSELETQLQIAGVQFRGWRVVPTDDSVCGQLARDTLPRIEQVFVDAGVEQTEDGFTLALFLARRRAEQALREVDNFYVTTLSPNGISYKGMVLPDKLSTFYPDLQRSDLSSSAIVFHQRFSTNTLPRWPLAHPFRLLAHNGEINTIEGNRRWAQARSKVWQTPRFDIAEFDPVISMHGSDSQSLDNMLELLIAGGMDLLQALRILVPPATQSLEFKDADLAAFYEFYGLNTEPWDGPAGIVACDSRYAACMLDRNGLRPARWMLTSDRHFLVASEAGVWELPAERITRKGKLGPGEMMAIDLKRGDLLDSDAIDRINRARAPYKQWLQQGVTYLQTELIDPSLVEEPFSEQTLRSYHKLFQLSTEEVEQILRPLAETEQEATGSMGDDTPMAVLSRQTRPLYDYFRQAFAQVTNPPIDPLREGIAMSLTTQLGKETNIFHAGAETVNHVILNSPVLSQRKLRQLLKMEQYVARNRLIDLSYSVEEGLKAGLERICQEVEAAARDGAVMLLLSDRYPVPDRPMAHALLATGAVHHHLCKVGLRCDVNLIIETGTARDPHHMACLLGFGATAVYPYLAYQTLFDLGRRGILQLSKGGEQSQIGRRYRKGIYKGLSKIISKMGICTIASYRGAQLFEIVGLDPDVVELCFTETPARIGGVSLSRLDTEARELTARAWNDQLKPEVGGLLKYVHGGEYHMYNPDVVMTLQRATRTGDASDWQKYVDAVHSRPASTLRDLVQLKRADTPTPLDEVAPAADVLRRFDTAAISLGALSPEAHEALAIAMNRLGGRSNSGEGGEDPARYGTEKRSKIKQVASGRFGVTPEYLVNAEVLQIKVAQGAKPGEGGQLPGHKVNELIARLRYAKPGIGLISPPPHHDIYSIEDLAQLIYDLKQVNPTALVSVKLVAHAGVGTIAAGVVKAGADLITVSGHDGGTGASPVSSIRYAGVPWELGVAESHQALVANDLRDRTILQTDGGLKTGLDVVKAALLGADSFGFGTAPMIVLGCKYLRICHLNNCATGVATQDERLRANYFTGLPERVEHFFRLLAEEVRQWLSYLGVRSLDEIVGRTDLLEQLEVSPRPGVKVDLSRLLTHAQYDGSHCAAQRLYESPDSLATQMDGLLADAIANKTGGDHRFLIHNTDRSIGARLSGTIARAHGNHGMSDAPLNLRFRGTAGQSFGAFNAGGLQLELEGEANDYVGKGMAGGRLVVRPPRGARFEARNTPIVGNTCLYGATGGELFAAGRAGERFAVRNSGALAVVEGAGDHCCEYMTDGVVLVLGKVGLNFGAGFTGGLAYVLDIERDFVDRYNHELIDIHRVSAEGFENHRQHLHTLISRHRELTGSIWAQQILDEFRDYIGKFWLVKPKAASIESLTESLRRAA

SEQ ID NO: 17160 - protein, 491 aa, Xanthomonas campestris pv. campestris str. ATCC 33913
MRSDPTHPGVPMKTGLVAGWKARFYSVCMLMLFSALVVGGLGNAQAQSGAQVTPLPTEPVTTEPLPTAQPAAAPVAAAEAAPVVEKGDVAWMLTSTLLVLLMVVPGLALFYGGMVRAKNVLSVLIQVAVVFSLLVVLWVFYGYSLAFSGEGPWIGNLDKALLKGVTIETLSATFTKGVSLPEYVFVAFQATFAGITGALIVGAFAERAKFAAVLLFSVIWFTFGYLPLAHMVWATGGYLFGLGALDFAGGTVVHINAGVAGLVGAYFVGKRAGLGREAIKPHNVTLTFVGASLLWVGWFGFNAGSNLEANAGAALAFLNTLLATAAAVLGWSLTEKIIKGKSSALGVASGMVAGLVGITPACGTVGPFGAIIIGLAAGVLCVWGVTGLKRLLGADDSLDVFGVHGLGGIIGAILTGVFSAASLGGQKGGDYDMLHQVGIQALGVGITVGWIGVVSVVGFVVAKLVFGLRVTEEAEREGLDITSHGEAAYES

SEQ ID NO: 17161 - protein, 575 aa, Xanthomonas campestris pv. campestris str. ATCC 33913
MAKKKTVARFMAETLESAGVERIWGVTGDSLNGLTDALREMHSIEWMHVRHEEVAAFAAGAEAAVTGKLAVCAGSCGPGNLHLINGLFDCHRSRQPVLAIAAHIPSSEIGLSYFQETHPQELFRECSHFVELVTNPAQLPEVLHRAMRTAILQQGVAVVVIPGDIALMEVDKHLSAAWPVLRAPRLLPAAEDVQQLAEILQQSKAVTLLCGSGCAGAHDAVVALADTLGAPIVHALRGKEHVEWSNPFDVGMTGLIGFSSGYHAMLNCDTLIMLGTDFPYRQFYPKDATIVQVDRDPAALGRRTPLQLGIAADVGETIAALLPQLERREERGFLDKSLAHYRKAREGLDELAVPADEGEPLHPQFVTRLISQIADEDAVFTCDVGTPTVWAARYLRMNGQRRLLGSFNHGSMANAMPQALGVQAACPGRQVISLSGDGGFAMLMGDFISLAQLNLPVKVVVFNNASLGFVAMEMKAAGYLDTGTELRNPDFAAMSNAMGILGLRVETSSQLERALRQAFAHSGPALVDVRIATQELVVPPAIKLEQAKGMGLYLLKAVMSGRGDEVLALAKTNLR

SEQ ID NO: 17162 - protein, 291 aa, Xanthomonas campestris pv. campestris str. ATCC 33913
MPIGFLGLGTMGLPMAHNLLRGGFELTVWNRSPARAQPLREAGAHVVEQPQQAAHGPLLFSMLADDAAVRQTVLDGGVLDALPAGSVHVNMATISVALAHELTALHAERGIAYVAAPVLGRVEVAEAGKLNILAAGDDAALARVQPMFDVLGQQTWQIGSAPEQANAVKLAANFCLASAIGAMAEASALARGHGVDATQFLGMLTSTLFAAPAYQGYGRLIMQRQYTPAGFTATLGRKDVDLAIQAGAARQVPMPLGELLRSGLDEAIAHGDGNADWAVLAEVSARRAGQA

SEQ ID NO: 17163 - protein, 327 aa, Xanthomonas campestris pv. campestris str. ATCC 33913
MRKDTHWHHARVVSVADACQGVREIVLDPGANTRSFEVGSHLDFRLQLHGREDVRSYSLVGEPRADGYYQVAVRQMPESRGGSRHMWTLAPGDVVEISPPSNNFALDEAGEEILLIAGGIGVTPIVGMAQRLARRHQAFRMLYVGRARDTMAYVDTLEALLGARLQVHCDDQAGPPDLAAELATLSPNAEVYVCGPLGMLEAVRQQWHAAGRPRARLHFETFGNSGRVPAQAFVVKLPGLGMEVQVAENVSMLDALADAGVELIAECRRGECGLCAVDVLDTAADIDHRDVFFSDAQRSENRKLCACVSRAVGGSISIDTGYRAGSD

SEQ ID NO: 17164 - protein, 402 aa, Xanthomonas campestris pv. campestris str. ATCC 33913
MSEVYLVDGIRTPIGRYGGALSSVRADDLGAVPIAALLARHPQLDPAAIDDVYLGCANQAGEDNRNVARMSVLLAGLPSSVPGSTVNRLCGSGLEAVGIAARGIRAGELELALAGGVESMSRAPWVMGKAESAFARNQHLHDTTMGWRFINPRLEATYGVELMGETAENVAQRYAISRDDQDAFALRSQQRTAAAQAAGFFDDEITAVAVAGRKGGERVQVMRDEHPRADASAEALARLKPVFRQPGTVTAGNAAGLNDGAASLLLASARALHLHGLTPRARVLGFASAGVEPTYMGIGPIPATQRLLARLGLQIAQFDAIEFNEAFAAQALACTRAFGLADDAAHVNANGGAIALGHPLGMSGARLALTLLRQLDACNGRRGLASMCIGVGQGVALAIERV

SEQ ID NO: 17165 - protein, 579 aa, Xanthomonas campestris pv. campestris str. ATCC 33913
MSEIPATDATAPAEKKDFIRQIVREDLASGKHTAIRTRFPPEPNGYLHIGHAKAICLDFGLAAEFGGLCNLRLDDTNPAKEDPEFVVAIQDDVRWLGFEWAQLRHASDYFEVYYLAAEKLIRDGHAFVCDLSAEQVRQYRGTLTEPGRNSPFRERSVDENLDLFRRMRAGEFPDGARTLRAKIDMASGNINLRDPALYRIKHVEHQNTGNAWPIYPMYDFAHSLGDAVEGITHSLCTLEFEDHRPLYDWCVDKVDLSGHPELLAPLLGKGYPKEAAKPRQIEFSRLNINYTVMSKRKLTALVEEQLVDGWDDPRMYTLQGLRRRGYTPAAMRLFVDRVGISKQNSVIDFSVLEGCLREDLDAAAARRMAVIDPLKLVLTNLPEGHTETLQFSNHPKDESFGTREVPFARELWIEREDFAEVPPKGWKRLVPGGEIRLRGAGIARVDEVIKDAAGEIVELRGWLDPESRPGMIGSNRKVKGTIHWVSAVHAVEAEIRLYDRLFSVEKPDDESEGKTYRDYLNPESKRSVRGYVEPSAAQAAPEQAFQFERTGYFVADRRDHSAATPAFNRSVTLRDTWAK

SEQ ID NO: 17166 - protein, 319 aa, Xanthomonas campestris pv. campestris str. ATCC 33913
MQDQRNLLVFSGNANKPLAQSICKELGVRMGKALVTRFSDGEVQVEIEESVRRQEVFVIQPTCAPSAENLMELLVLIDALKRASAASVTAVIPYFGYSRQDRRMRSSRVPITAKVAAKMICAMEADRVLTVDLHADQIQGFFDVPIDNVYASPLLLADIWRAYGTDNLIVVSPDVGGVVRARAVAKRLDDADLAIIDKRRPRANVATVMNIIGDVQGKTCVLVDDLVDTAGTLCAAAAALKQRGALKVVAYITHPVLSGPAVDNINNSQLDELVVTDTIPLSAAARTCPKIRQLSVAELLAETIHRIAFGESVSSLYVD

SEQ ID NO: 17167 - protein, 106 aa, Xanthomonas campestris pv. campestris str. ATCC 33913
MYAVLVTGGKQYRVAQGETLRVEKLEVEAGNEIKFDTILMLGDSDGIKLGDALKGASVTAKVVAHGRADKVRIIKFRRRKHHMKRQGHRQYYTEIEITGIAGGDKK

SEQ ID NO: 17168 - protein, 350 aa, Xanthomonas campestris pv. campestris str. ATCC 33913
MKLVDEAEILVTAGNGGNGCVGFRREKFIPLGGPDGGDGGNGGSVWIVADENVNTLVDFRHERAFKAQRGENGMGRQAYGKGGEDRVIVVPVGTVVMNVQTDEIIGDMTQHGDRLLVAKGGKGGLGNMHFKSSVNRAPRQSTTGEEGEERLLKLELKLLADVGLLGFPNAGKSTLIRAVSAATPKVADYPFTTLYPNLGVVSVEAYRSFVIADVPGLIEGAADGAGLGTQFLRHLQRTRLLLHLVDISPMDGGVDGVSPVDQVRTIERELERHDPALLEKPRWLVLNKADLMFPEEAQAAAEAIVAELGWTAPWYLVSALGRDGTFPIMKDVMAFFDRQREDELEARNAG

SEQ ID NO: 17169 - protein, 295 aa, Xanthomonas campestris pv. campestris str. ATCC 33913
MSKIAFIGLGNMGGPMVANLIKAGHELRVFDLVHSALDTAHAAGAQVASSASDTLHGAEVVISMLPASKHVEGLYLGDAGILAHIPAGALVIDCSTIAPAMARTVATAAHARGLDMLDAPVSGGTAGAAAGTLTFIVGGAAQALERARPVLQAMGKNLFHVGDNGAGQVAKLCNNMALGVIMAATGEAIALGVAQGLDPAVLSQMMAVSTGRSWATEVCNPWPGVLENAPASRGYSGGFGNDLMLKDLGLVAEAAVQAGASIPLGELARNLYAMNSRAGNGALDFSSVVKLVAKV

SEQ ID NO: 17170 - protein, 298 aa, Xanthomonas campestris pv. campestris str. ATCC 33913
MSETSPHRSGSVAVIGRPNVGKSTLTNALVGAKVSIVSNRPQTTRHRLLGIATFPEGQLMLVDTPGLHREQKRAMNRVMNRAARGSLEGVDAAVLVIEAGRWDEEDTLAFRVLSDADVPVVLVVNKVDRLKDKTALFPFLAQVSEGRTFAAVHPVSALKRKGLEALVSDLLKLVPEAEAMYGEDEITDRSQRFLAGELVREQLMRQLGEELPYATTVEIERFAEDGALLRIGAVIWVEREGQKAIVIGKGGTRLKDIGGKARLQMERLFGAKVFLETWVRVREGWSDDEAALKAFGYD

SEQ ID NO: 17171 - protein, 68 aa, Xanthomonas campestris pv. campestris str. ATCC 33913
MPNGTVKWFNDAKGFGFISPEDGSADVFAHFSAINSKGFRSLQEGQRVSYDVTQGPKGAQASNITPVE

SEQ ID NO: 17172 - protein, 391 aa, Xanthomonas campestris pv. campestris str. ATCC 33913
MSDIVIVAAKRTAIGSFLGQFNGVPAPTLAAAAIEGALAQSGVAAADVSEVIVGCVLPANLGQAPARQAAIAAGIPTSTGATTINKVCGSGMKAIMFGHDLIKAGSASIVVAGGMESMSNAPHLLPNSRTGNRYGNFQAVDHMAWDGLTNPYDGQAMGVFGEATAEKFGFSRADQDAYAIASVERAQAAQRNGSFADEIVPVKVATRKGEIVVDSDEQPGKSDMAKIPTLKAAFKKDGTVTAASSSSISDGAAITVLMAADEAQRRGITPLARIVGHVTHSQAPEWFTTAPVAAIQSLVGKIGWTLDDVDLFEINEAFAVVAMTPIKELGIAHEKVNVHGGACALGHPIGASGARLVVTLVNALRSRGGKRGIATLCIGGGEATAIAIELI

SEQ ID NO: 17173 - protein, 564 aa, Xanthomonas campestris pv. campestris str. ATCC 33913
MCSIFGIFGLQPGDDLQALRRQALECSQRQRHRGPDWSGVYVDAGAILVHERLAIVDPAGGSQPLLSEDGSLALAVNGEIYNHRELKAELLQPYAFQTGSDCEVINALYREDAPASYLNRLNGIFAFALWDKAAGRVIIARDPIGVVPLYWGHDREGRLRVASELKSLVDDCADAAQFPPGHWYDSATGALSRYYERSWREYSEVENVQVPLQELREAFERAVHRQLMTDVPYGVLLSGGLDSSLVAAVAARYARHRIEENDTTEAWWPRLHSFAIGLTGSPDLAAAEVAAAALGTVHHGFEYSFEEGLDALPEVIRHIETYDVTTIRASTPMFLLARRIKAMGVKMVLSGEGSDEIFGGYLYFHKAPNAREFHEELVRKLDALNNYDCLRANKSMMAWGVEPRVPFLDREFLDVAMRMDARFKMIDKTSTGATRIEKGILREAFAGYLPESILWRQKEQFSDGVGYGWIDGLKAHAAAHVSDRELAAADRRFPVNPPQTKEAYFYRSLFEQFFPSQAAAETVPGGKSIACSSPTAIAWDASFAAMADPSGRAIAGVHAQALAS

SEQ ID NO: 17174 - protein, 71 aa, Xanthomonas campestris pv. campestris str. ATCC 33913
MSNIERENGVVKWFNDAKGFGFISRENGEDVFVHFRAIQIQGFKSLKEGQKVSFTVVQGQKGLQADAVQVV

SEQ ID NO: 17175 - protein, 647 aa, Xanthomonas campestris pv. campestris str. ATCC 33913
MCGLAGLLLATPRMHGEQLEALVRPMGGALRHRGPDDAGTWCDAQAGVALAHQRLSILDLSPLGHQPMRSADSRYVLAYNGEIYNFAQLRAALAALGHRFRGHSDTEVLLAAVVEWGLDDTLARCNGMFALALWDERDHCLSLARDRVGKKPLYYGWAGDTLVFGSELKALWQHPDFDNGVDRDALTLLLRLGYIPAPACIHERTFKLMPGRVLRLDAQAVAAGAAAHRPDQAQQPFWNAREAMQRALAAPFTGTDAQAEEQLDSLLRDAVALRMVADVPVGVFLSGGTDSSIVTAMMQAQSDQPVHTFSIGFEGSHHDEAPLAREVATHLHTDHTELYVSGADALAVVPTLPDMFDEPFADASQVPTALVARLARGGVTVALSGDGGDELFFGYGRYQRALRNWRMHGLVPAPLRRLMAVAARKSGEASRTGGLAALVAEAGARGIGDIYRNRISRWRDPAAVVLGATEPDSFYSLADPLHGSGTPADAMMLADFAAYLPDDLLCKVDRTTMAVGLEARAPLLDWRVAEFAWSLPLSLKYRDGVSKYLLKRVLCRYLPEPMVYRGKRGFGAPVSAWLRGDLHGWADDLLAHGTLQREGVFAADTVAGLWRDFNGGERKWHTHLWTVLMFQAWQDHWRAQRAAIVRS

SEQ ID NO: 17176 - protein, 642 aa, Xanthomonas campestris pv. campestris str. ATCC 33913
MGKIIGIDLGTTNSCVAIMDGGKARVIENSEGDRTTPSIVAYTKDGEVLVGASAKRQAVTNPKNTFYAVKRLIGRKFTDGEVQKDISHVPYGILAHDNGDAWVQTSDSKRMAPQEISARVLEKMKKTAEDFLGEKVTEAVITVPAYFNDSQRQATKDAGRIAGLDVKRIINEPTAAALAYGLDKNGGDRKIAVYDLGGGTFDVSIIEIAEVDGEKQFEVLATNGDTFLGGEDFDNRVIEYLVDEFNKDQGIDLRKDPLALQRLKDAAERAKIELSTSQQTEVNLPYVTADASGPKHLNIKLTRAKLEALVEDLVKKSIEPCRTALNDAGLRASDINEVILVGGQTRMPKVQQAVADFFGKEPRKDVNPDEAVAVGAAIQGGVLAGDVKDVLLLDVTPLSLGIETMGGVFTKIIEKNTTIPTKASQTFSTAEDNQSAVTVHVLQGEREQARFNKSLAKFDLSGIEPAPRGMPQVEVSFDIDANGILHVSAKDKKTNKEQKVEIKAGSGLSDEEIQRMVADAEANREEDKKFQELVQTRNQADGLIHATRTAITEHGSKVGGDVIGKVEAALADLETAMKGDDKAQIEARSKTLEEAGQSLYAAAAAAEQGGNADAASGNAQASKAADDVVDAEFTEVKDDKKA

SEQ ID NO: 17177 - protein, 588 aa, Xanthomonas campestris pv. campestris str. ATCC 33913
MSQPPAKPAPLRKLGNLRTLWPFVQRQRGLFAAWLVALAVSSAATLSLPAAVKRMIDHGFSGGTQINQAFALLFAVAVVLALATAARFYFVALLGEKVVADLRGRLYAHLIGLDAGFHDRSRSGELVSRLSADSELLRGVVGTTMSVALRSSVTVIGSLVMLFVTSPRLAGFTLIGIPLAVLPIVLGARRLQKISRASQDRVADANTLAAETLGAVRTVQAHAREGYESNRFSQALQAAIGTARVRIRTQATVTAVAIMLIFGAIVAVLWLGAHDVIAGQMTPGTLGQFVLYALIGGGSVGALAEVWNELQRAAGGMGRIGELLDEQSAIVAPATPQPLPVPVRGAIHFDQVVFHYPQRPDMPALDGFDLHVQPGETVALVGPSGAGKSTVLAMLLRFHDPLSGSVRIDDVDLRQTDPVLLREQIALVPQQPTLFAASAADNIRYGRLDASDAQVEAAATAAEADIFLRALPQGYASELGERGTRLSGGQQQRVAIARALLKDAPILLLDEATSALDAQSERAVQQALDRLMQGRTTLVIAHRLATVLKADRIVVMDAGRIVAQGTHAQLVAEGGLYAELAKLQFIDQ

SEQ ID NO: 17178 - protein, 265 aa, Xanthomonas campestris pv. campestris str. ATCC 33913
MQGEDSNSGGLASPCIGVCSLDAQGSCVGCLRSLDEIARWMSMSDGERLEYLQTVLPARALAAQLPECAALQRALYPLHTAPDGPGWNHAELIDLTEGGASAEAAVLCGLVPRTQGTMVLLTRRTDSLRHHAGQVSFPGGRIEPSDADAAAAALRESCEEIALGAQQVHALGYLDPFLTVSGFRVTPVVAVIDPAFVAVPQPDEVADVFEVPLAYLMDPDNLRSVELEYRGRPRRVLEYDWPGHRIWGATAAILLNLRRRLEQSA

SEQ ID NO: 17179 - protein, 648 aa, Xanthomonas campestris pv. campestris str. ATCC 33913
MRMNDLTKNLLLWVVVAVVLMVVFQSFSPRMAGGVGPDSITYTQFLKEVDSGRVKSVDYTDETNLAVNAIRFKRTDGSEATVYGPRDDKLVDVLYSKNIEMTRQKPSTGPGFWSLVLNFLPVILIIGFWLFIMRQMQGGGGGAKGAMSFGKSRAKLQGEDQVKVTFADVAGCDEAKEEVGELVDFLRDPTKFTKLGGKIPRGVLMVGPPGTGKTLLAKAIAGEAKVPFFSISGSDFVEMFVGVGASRVRDMFEQAKKHAPCIIFIDEIDAVGRHRGAGLGGGHDEREQTLNQLLVEMDGFEGGEGVIVIAATNRPDVLDPALLRPGRFDRQVVVGLPDVKGREQILRVHMRKLPLADDVVPLVIARGTPGFSGADLANLANEAALFAARGNEKEVRMDHFDRARDKILMGAERRSMAMSEDEKTLTAYHEAGHAIVGRLVPEHDPVYKVTIIPRGRALGVTMYLPEGDRYSMNRVAIESQLCSLYGGRVAEELIFGGDKVTTGASNDIERATKMARNMVTKWGLSDELGPVAYGEEEDEVFLGRSVTQHKNVSDETARKIDEVVRSILDKAYSKTKTILTENLDKLHAMSQLLLQYETIDVPQIDAIMEGRDPPPPAGWGKSDKDGGNNNDKGSPRPLPPIAGPAEQL

SEQ ID NO: 17180 - protein, 126 aa, Xanthomonas campestris pv. campestris str. ATCC 33913
MHLSLLKAKIHRATVTHSELNYEGSIAIDGLLLEATGIREFEQVHIWDVTNGARFSTYAIRAEQGSGIISLNGGAARHVQVGDLIIVAAFASMSEDQAKTFKPNLVYVDAHNAISHTNHSIPTQAA

SEQ ID NO: 17181 - protein, 476 aa, Xanthomonas campestris pv. campestris str. ATCC 33913
MFKQLWATKHPHASHEAADGLGLQRALGPWGLTALGIGAVIGGGIFVITGQAAADHAGPAIVLSFVLAAICCAFCAMAYAEFAAMVPVSGSAYTYTYATFGELAAWFIGWMLVLEYGVSASAVAVSWTGYFLSLLEHFGIHLPAALVSAPLDGKLQRTGAIANLPAAGIVLLLTWLCYVGIRKSSAMNMAMVILKTGLIILVIAAGWKYVDPANWHPFIPANEAPGKYGMEGVLRGAAMVFFAYIGFEAVSVAAQESHRPQRDLPIGMMLSLVICTVLYIAMAAVMTGLVPFTQLGTDEPVVTAVAAHPQLAWLRVVVEVGALIGLSSVVLVMIIGQPRIFMIIARDGLLPAVFTRIHPKYRTPHINTVITGIGIALLAAVFPLDVLGELTSMGTLIAFAAVCAGVLILRRTHPELPRPFRMPAAWLICSAGVLSCLALLSAMTLHNWMLMGLWTLVGLVVYFGYGYRHSRLREGR

SEQ ID NO: 17182 - protein, 493 aa, Xanthomonas campestris pv. campestris str. ATCC 33913
MYRMLKSLLRVKPIEPAGRVDAGEPVEGSLQGEATLQRTLTAKHLIMLGIGAVIGAGIFVMTGQAAANHAGPAVMLSFVFAGIACTFAGLCYAEFAAMMPVSGSAYSYSYATLGEGIAWFIGWCLVLEYLFAGSSVAVAWSAYLISFITGTLGLPFPTELTNAPLAWINGEFVASGNILNLPAVLIVAAVSGLCYVGITQSAFINAIVVAIKIAVICLFVGFGAAYIDPANWHPFIPENTAPGVFGWSGVFRAASIVFFAYIGFDAVSTSAGETKDPQRNMPIGILGSLAVCTIIYIIVCAVLTGLMPYTQLGTAKPVATALEAHPQLTWLKTAVEIGAIAGLSSVVLVMLMAQPRIFYTMAKDGLMPKLFGKVHPKFHTPYVGTVIVGVVAASLAGLIPLSVLGELVSMGTLLAFATVCAGVMVLRFTKPELERPFRVPLAMIVCPLGTLACLALFFQAFQEHWKVFVGWTVIGLVIYFGYGIHHSRLARKA

SEQ ID NO: 17183 - protein, 413 aa, Xanthomonas campestris pv. campestris str. ATCC 33913
MSPKKTSFPKQDIRVLLLEGISQTAVDVFRAAGYSQIELHAKSLPEDELKARIAEAHIVGIRSRTHLSADVLAHAKRLIAVGCFCIGTNQVDLEAAELAGIPVFNAPYSNTRSVAELVIAEAILLLRGIPQKNAQCHRGGWSKSAAGSHETRGKVLGIVGYGHIGTQVGVLAESLGMQVIFHDIETKLSLGNARAAIDLDDLLARSDVVTLHVPETPSTKDMIGAAEIARMKPGAHLINASRGTVIDIDALDAALTSGQIGGAAVDVFPIEPKGNGDAFESPLIAHDNVILTPHVGGSTLEAQDNIGVEVAAKLVRYSDNGSTLSAVNFPEVTLPEHPDSLRLLHIHRNVPGVLSQINELFSRHNLNIDGQFLRTDPKVGYVVIDVSASEELAGVLKDELGQITGTLRTRVLY

SEQ ID NO: 17184 - protein, 401 aa, Xanthomonas campestris pv. campestris str. ATCC 33913
MSKQIQEAYIVAATRTPVGKAPKGVFRNTRPDDMLAHVLRAVVAQAPGIDLSRIDDAIIGCAMPEGEQGMNVARIGVLLAGLPNTVAGQTINRFCSSGIQAVAMAADQIRLGNADLMLAGGTESMSMVPMMGNKVAMSPSVFADDHVAIAYGMGITAEKVAEEWKVSREDQDAFALASHQKAIAAIAAGEFRDEITPYEIHSHQPDLAGNVIALRKRLVDTDEGPRPDSSLEGLAKLRPVFRNGQFGGSVTAGNSSQMSDGAGAVLLASEQAIKDYGLTPLARFVSFSVAGVRPEVMGIGPIAAIPKALKQAGLTKDQLDWIELNEAFAAQALAVIRDSELDPSKVNPLGGAIALGHPLGATGAIRAATLVHGLRRRQQKYGMVTMCIGTGMGAAGIIEAL

SEQ ID NO: 17185 - protein, 356 aa, Xanthomonas campestris pv. campestris str. ATCC 33913
MSQAELPVLRVAYMPLIDCAPLVAASRLGLDHAYGLQLQLHRQASWAGVRDRLLAGEVDAAHTLASLVYAIDLGVGGPQCPMALLMTLNHNGQAITLAPALAQGVAAGQPLPQVLAEAGRRVVFAQTFPTGTHALWLYYWLAACGVDPMRDVDVVSIPPPQMPEALASGLVDGYCSGEPWAAVAEAQGSGQRVIRSGELWPEHPEKVLACRREFAALQPELSERLTACVLEACRWLDAAPANRAQCAQWLADPDYIGVPAAHLAACLDADAATVSVDPSALAFHRGGAVNMPWLSDGEWFLEQFQRWGWHTLQAADLARLHDIHRLDNYRRAAQRAGVTAPDADRRINRLFDTPAA

SEQ ID NO: 17186 - protein, 382 aa, Xanthomonas campestris pv. campestris str. ATCC 33913
MPVTTKLPKVGTTIFTVMSQLAAEHGAVNLGQGFPDFAVPQRLVDALGQAMAAGHNQYPPMTGVAALRQAIAGKAQRCYGAQVDADTEITVTSGATEAIFNAIHAVVRAGEEVIVLDPAYDCYEPAIDLAGARAVHVALDPQTFAVDWDALRAAITPKTRLLMINSPHNPSGAMLSAADMQTLTELLHGTDIFLLSDEVYEHIVFDGRRHESVLRWPELRARAFVISSFGKTYHCTGWKIGYAIAPPALSAEFRKVHQYNTFTSFGPAQHAFAAMLRDEPEHDEQLGAFYQAKRDRFREQLLTTRLVPLPVPGGYFQLVDYSAISDLPDTEFVKWLTVEKGVAAIPLSPFYETAPAGQRLARLCFAKNDATLDAAIARLQQL

SEQ ID NO: 17187 - protein, 397 aa, Xanthomonas campestris pv. campestris str. ATCC 33913
MSSKDIVLAFSGGLDTSFCIPYLQERGYAVHTVFADTGGVDAEERDFIEKRAAELGAASHVTVDGGPAIWEGFVKPFVWAGEGYQGQYPLLVSDRYLIVDAALKRAEELGTRIIAHGCTGMGNDQVRFDLAVKALGDYQIVAPIREIQKEHTQTRAYEQKYLEERGFGVRAKQKAYTINENLLGVTMSGGEIDRWEAPGEGARGWCAPRSAWPTEALTVTLKFVEGEAVALDGKALPGAQILAKLNTLFAQYGVGRGVYTGDTVIGLKGRIVFEAPGLISLLTAHRALEDAVLTKQQNRFKPDVARKWVELVYEGFYHDPLKTDIEAFLKSSQSKVNGEVTLETRGGRVDAVAVRSPHLLNAKGATYAQSADWGVEEAEGFIKLFGMSSTLYAQVNR

SEQ ID NO: 17188 - protein, 454 aa, Xanthomonas campestris pv. campestris str. ATCC 33913
MCDMRNEQLKPTLGTWQLWGIAVGLVISGEYFGWSYGWGTAGTLGFLVTTVLVAVMYTCFIFSFTELTTAIPNAGGPFAYSLRAFGTYGGMLAGLATLIEFVFAPPAIAMAIGAYLNVQFPTLDPRVAAIGAYVIFMSLNIVGVAIAATFELIVTLLAVIELLVFMGVVAPGFSVARFAANGWAGSNQFGPAAISGIFAAIPFAIWFFLAIEGAAMAAEEAKDPKRTIPRAYIAGILTLVVLALGVMVFAGGVGDWRQLSNINDPLPQAMKAVVGNSSTWLHMLVWIGLFGLVASFHGIILGYSRQFFALARAGFLPHGLAKLSRFRTPHRAILAGGVIGIAAICSDSVVKIQGMSLTAAMITMSVFGAIVMYVMSMLSLFKLRRTEPTLERSFRAPGYPVVPAIALLLALVCLVAMVWFNPLVALVFVGLLLFGAVCCLLSLRGRPNAGSLAG

SEQ ID NO: 17189 - protein, 69 aa, Xanthomonas campestris pv. campestris str. ATCC 33913
MSDRQNGVVKWFNDAKGFGFITPESGPDLFVHFRAIQGTGFKSLQEGQKVSFVAVQGQKGMQADQVQAV

SEQ ID NO: 17190 - protein, 528 aa, Xanthomonas campestris pv. campestris str. ATCC 33913
MTTHGASAQGKFHKRLSLTDLTFIGLGSIFGSGWLFSASHVSSIAGPAGIVSWILGGIAVLLLGLVYCELGAALPRAGGVVRYPEYSHGPLLGSLTGFITLIAFSSLIAIEVEAARQYAAAWFPALSQAGSTHPSLLGWLVQLALLLLFFALNYFSVKTFALANNIVSVFKFLVPILVIVLLMKHFNADNLSVHGFAPSGMAGVEAAISAGGIIFAYLGLTPIVSVASEVRNPQRNIPIALILSVALSTVIYVLLQLAFLGSIPAAQLAQGWSGIDKAFSLPYHDIALALGMAWLAALVICDAMVSPSGTGNIYMNATPRVVYGWARSGGFLPVLTRVDPASGIPRPALWLSLGLSIFWTLPFPSWETLIGVVSAALVLSYAVAPVTVAALRRSAPGLARPFRVRGFAVLGPLSFVVAALIVYWSTWPTLSWLLGLQVLAFAAYVLYRLPSRACRARLLRQVRASLWLIVFFVLVMAVSWAGTFGGHGWIAHPFDTLSVAVIAFGIYHWGARSGLRSDELALEEDDGE

SEQ ID NO: 17191 - protein, 106 aa, Xanthomonas campestris pv. campestris str. ATCC 33913
MPVMERIQAEVEQHPIVLFMKGTPQFPMCGFSSRAVQALVAAGADQLRTVNVLEEPEIRANLPRYSNWPTFPQLFIHGELIGGCDITMELFEAGELKRIVSEAYQP

SEQ ID NO: 17192 - protein, 352 aa, Xanthomonas campestris pv. campestris str. ATCC 33913
MSDTARPKVWVSQPLFDDVVEQLGAHFELVTTAQVTAYSSADLAARLAPLDGALVTLNERIGAAEIAAAPQLRAIANVGVGYNNLDIDALSAAGILASNTPDVLSETTADLGFALLMATARRVTEAERWLRDGQWGQWSFKTMLGADIHGSTLGILGMGRIGQGIARRGAHGFGMRVLYHNRSQLPAETEQAVGAQYVGLDTLLAQSDHLVLVLPYTQASHHIIDAAALAKMRPTATLVNIARGGIVDEIALADALANGRLAGAGLDVYEGEPRVRPELLAQHNVVLTPHIGSASLATRRAMVQLAVDNLIAALGVGANAGHPPSALNADAVAAAKRGGATVGATKTAATKR

SEQ ID NO: 17193 - protein, 869 aa, Xanthomonas campestris pv. campestris str. ATCC 33913
MSASLSTDRWIVLKFGGTSVSRRHRWDTIGKLASKRANETGGRVLVVVSALSGVTNELTAIADGAADSAQRVAALELRHREFLAELELDADAVLGARLAALHALVGDARAASRTLDWQAEVLGQGELLSSTIGAAYLHANGLDMGWLDAREWLSALPPQPNQSEWSKRLSVSCQWQSDAAWRARFDAQPTRLLITQGFISRHADGGTAILGRGGSDTSAAYFGALLGASRVEIWTDVPGMFSANPKEVPDARLLTRLDYYEAQEIATTGAKVLHPRSIKPCRDSGVPMAILDTERPDLPGTSIDGSAEPVLGVKAISRRNGIVLVSMEGIGMWQQVGFLADVFTLFKKHGLSVDLIGSAETNVTVSLDPSENLVNTDVLAALSADLSQICKVKIIVPCAAITLVGRGMRSLLHKLSDVWATFGQERVHMISQSSNDLNLTFVIDESDADGLLPILHAELIDSGAMPVSEGEVFGPRWRDIIGSVRPRPTPWWHAERAHLLTLSKAGTPRYVYHLPTVRARAQALAQIAAVDQRYYAIKANSHPAILMALEQAGFGLECVSHGELRRVFDTLPELSPRRVLFTPSFAPRSEYEAAFALGVTVTVDNVEALKRWPELFRGRNVWLRIDLGHGDGHHEKVNTGGKASKFGLSSTRVDEFVELARTLEVTITGVHAHLGSGVETGEHWRMMYDELAGFARRIGTVETIDIGGGLPIPYSAEDEPFDLELWAKGLAEVKAVHPGFRLAIEPGRYLVAEAGVLLAQATQVIEKDGVHRVGLDAGMNSLIRPALYDAWHDIENLSQLGAPADGSFDVVGPICESSDVFGKRRRLPAATAPGNVMLIADAGAYGYSMASTYNQRELPREEVIDAAAG

SEQ ID NO: 17194 - protein, 139 aa, Xanthomonas campestris pv. campestris str. ATCC 33913
MFAVAALSKGERIIQYKGRLRTHAEVDADDTGDVESGHTFLFTLSDDYVLDANYEGNIARWINHSCNPNCEAVIEEAEGDDRSKDKVFIEAKRAIKPGQELTYNYGITLGERHTPRLKKIWECRCGSKNCTGTMLQPKR

SEQ ID NO: 17195 - protein, 254 aa, Xanthomonas campestris pv. campestris str. ATCC 33913
MLNIQNLHASIAGKDILKGLSLDIQPGQVHAIMGPNGAGKSTLGNVLAGRDGYAVTAGSVQFEGADLLDLQPEERAAAGLFLAFQYPVEIPGVNNTYFLRAALNAQRKARGEEELDSMQFLKLVRQKLAVLHLKDELLHRGVNEGFSGGEKKRNEIFQLAVLEPKLAILDETDSGLDIDALKSVADGVNALRSTERSFLVITHYQRLLDYIKPDVVHVLSDGRIVQSGGPELALELEKHGYHFLKDRVVPEAAA

SEQ ID NO: 17196 - protein, 333 aa, Xanthomonas campestris pv. campestris str. ATCC 33913
MAVSHLPSATVSDASLVASGQRVLEIEQAALAALGARIGAPFAAACRLVLASRGRVVATGMGKSGHIARKIAATLASTGTPAFFVHPGEAGHGDLGMITEADIVLALSYSGESDEVRMLLPVLKRQGNPIIAMTGRPASTLAQAADVHLDVSVSAEACPLHLAPTSSTTASLAMGDALAVALLDARGFTADDFARSHPAGSLGRRLLLHITDVMHGGDELPRVREDASLSEALMEMSRKRLGMTAVVDAQERLIGLFTDGDLRRALDSDIDVRSAGIAEVMTRNPKTIGADQLAAEAARLMEDYKINGLIVVDAQQRAVGALNIHDLLRAKVV

SEQ ID NO: 17197 - protein, 461 aa, Xanthomonas campestris pv. campestris str. ATCC 33913
MPLPTDPVAETASSAAPALRHALKPRQLMMMGLGTAIGAGLFLGSGVGIHAAGPAVLVSYLIAGALVIIVMNALGEMAAAKPASGAFSVYAADAMGPTAGATVGWLWWLQIVVVIAAEAVGAASLLATVWPALPVPMLASVFMATFTVINLLGVRNFGEFEFWFAILKVVAILIFLMIGGALLAGLLPGVASPGLSNFTQHGGFAPKGLAGIGTALLVVVFAFGGTEIVAVAAAETADPGRSLARTIRTVAWRILVFYIGSISVIVAVVPWTSDALSSPFAAVLEVARIPGAATGITLVAVVALLSALNANLYGASRMIFSLAQRGEAPRWLGNTSRQQVPLVAVIASVLFGFAAAVLELLYPGKVLPMLLNIVGATCLLVWTISLLSQLILRARADRAGIALPFRMRGYPVLTLLALAILAVIFVLLALSADTRAQFLSMVGLTAGIALVSELARRMRKR

SEQ ID NO: 17198 - protein, 459 aa, Xanthomonas campestris pv. campestris str. ATCC 33913
MTDTPGRSDAATLERFGYAQELKRQLSLKDLLIYGLVFMVPTAPFSIFGGVFDISAGMVPLTYLVGFVAMLFTALSYQQMSQAFPVAGSVYAYVGRGLSGGMGFLAGWAILLDYLLVPTLIYVVGANAMHNVLPQVPQPAWIAFFVVLNTVVNLRGIETTARANRFFLYAQLIVLALFVVLATLAIQRGVNGAQWTLRPFYNPQAFSPQLIFSALSVAVVSFLGFDAISTLSEEARGGNRVVGRATLLALVLVAGLFVLQTWLAALLQPHLQRYPSAQASNDAFFEIGRLIAGPWMQIVIALTVAISAAIANSLVAQAATSRLLFAMARDRQLPAFLRYIHPRTGVPQRAILLVAALSMVLGEVFVGQIALLSSLCNVGALTAFVLLHVAVLWHFRAHGRKVLHGVVPVIGIVILAYVLINADLHAQLGGSAWMVVGLAVLAFLKFSGRSTEFRATDAL

SEQ ID NO: 17199 - protein, 455 aa, Xanthomonas campestris pv. campestris str. ATCC 33913
MSRLVVVSNRVAVPGESRAGGLAVGLLAALKERGGVWFGWSGKTVRGDSGGMHEQTDGDIKFVTMDLNKRDIDSYYNGFANRTLWPLLHFRLDLVDYDRATREGYLRVNRLFAEKLAPLLKDSDTLWIHDYHMIPLGAMLRELGVGCKMGFFLHVPMPSADLMQAMPDHARLFSTFYAYDLVGFQTQRDAERFKAYVRLFGGGRVLEGDLVEGPGGRRFSAAAFPIGIDTDLIANQAKASVSKQAVRDLRESLRGRQLAIGVDRLDYSKGLPERFQGFERYLERYPDQSGSLTYLQIAPVSRGDVNEYRQLRGQLEQIAGHINGGHAEPDWTPLRYVNQNFSHATLTGFYRAAAVGLVTPLRDGMNLVAKEFVAAQDPENPGVLVLSLLAGAADEMKEALLVNPHDLDGVADAIATAASMPLATRVERWHAMMDHLRKNNINHWRQRYLQALADI

SEQ ID NO: 17200 - protein, 573 aa, Xanthomonas campestris pv. campestris str. ATCC 33913
MNTSAHSKPRNGARWLTQALEAEGVETLFGYPGGTIMPFYDALVDSKLKHILVRHEQGAALAANGFARASGRVGVCVATSGPGASNLVTGIADAMLDSVPMVCLTGQVATPLLGTDAFQELDVFGMTMPIVKHSFLVRSVDELPEMVREAFRIAREGRPGPVLIDLPKDVQIADASHLPDHVPAQVLPPPAPQDAKLAEALAAIASAERPVVYGGGGIALAGAVEAFRRFVEATGMPTALTLRGLGALPHAHPDYLGMLGMHGTRAANMAIQECDLLVVVGARFDDRATGKLSEFAPFARVIHLDADAYEISKLRTADVAVPGDVATSLKALSAARANCQAWRTRCFANREKFGARYDAPGTDIYAPALLKRLSEVAPADTIIACDVGQHQMWVAQHCRFNHPRNHLTSGALGTMGFGLPAAMGAQFACPDRTVVLVSGDGSFMMNVQELVTIARCKLPVKIVLLDNSSLGMVRQWQELFFAERYSEIDLSDNPDFAALAQVFGIPAKRIIARGDVDAALAELLAQPGPGLLHVAIDARANVWPLVPPNNANSTMLDSNPAHAAKETPHALPA

SEQ ID NO: 17201 - protein, 423 aa, Xanthomonas campestris pv. campestris str. ATCC 33913
MSTAPQKPLAIRERLSEVRYEIRGELARRARELEAQGRKLIKLNIGNPGAFGFRAPEHLQRAIADDMGRTDPYTHQQGLPEAREAIAAAYARRQHPDAHPDRIFIGNGVSELIDLSLRALLNPGDEVLVPSPDYPLWSAATILNDGRPVYYRCAPENGFQPDPVEIETLVSSRTRAIVLINPNNPSGASYSRELLERIVAIAVKHNLLLMVDEIYDQVLYDGAAFVPVAPLAGEHPCITFSGLSKVHRACGWRVGWALLSGEQSRINDLRNAMDLLGALRLCANVPGQYAIDAAVNGPDTISALCAPGGRLYETRRAVIEACAASSHLSLVAPAGALYAFPAVVGPAARAFDDHTFALDLMNDEGVLVVPGSSFNVPYRHHFRVTLMPEAAVMRDVFARIDRALTRRAEAVTKVVPLKSRSVA

SEQ ID NO: 17202 - protein, 659 aa, Xanthomonas campestris pv. campestris str. ATCC 33913
MNVSEPQLAPVRTLRPVFVLAATVVCTFALLVALFPLDAGRILLDAQTWASRNVGWYYLLAMTLYLVFVLGVALSSYGNIKLGADHDEPEFSYLSWAGMLFAAGISITLFFFCVSEPLTHYLQPPQGGTGNGEASARQAMQLLFLHWGLHGWGVFALAAMALAYFAFRHNLPLALRSALYPLIGKRINGPIGYTVDALGIVATVFGLGADMGFGVLHLNAGLATLFNVPHTHWVQVALIVAMMGAAILVAVSGVEKGVRWMSDINMLLAIALLLFMLFAGPTHYLLNALMQNLGDYLGSVVGKSFDVYAYGGRPDWLGNWTVFYWAWWIGWAPFVGLFIARISRGRTIREFVLGVLLIPLGFTLAWLSIFGNSALDQLLHHGQAAWAQQAIDAPQTVLYSLLQDYPWSRVVITITVAISFVFFVTSADSGTVVLSTLSSHGGEPHDDGPRWLRVFWGVLTAVVTAGLLLAGSMDALKSAVVLASLPFSAVLLLMAWGLSRALSEESQRKRAQLYNPSPLIGQSRDHRGWRQRLGQAMHFAARDEVYRFMHEQVRPAIEAVAAQLQDEGWQVSSRLDDADMEISVDHGEQQGFRYQVVMRGYLTPSFAAQRLRNQRYYRAEVYLFEGSQDYDLVGYSREQIINDIIDQYERHLQFLHLTR

SEQ ID NO: 17203 - protein, 394 aa, Xanthomonas campestris pv. campestris str. ATCC 33913
MDSLLSPVSGYSRRSQDIAPFHVMALLARANALEQAGHDVIHLEIGEPDFTTAAPVVAAGQAALAAGHTRYTAARGLPALREAIAGFYAQRYGCHIDPERVLVTPGGSGALLLASSLLVDPSKHWLLADPGYPCNRHFLRLVEAGAQLVPVGPDSDYQLTPALVDACWTADSVGALVASPANPTGSVLSRAQLAALSQALQARGGHLVVDEIYHGLTYGLDAHSVLEVDDSAFVLNSFSKYFGMTGWRLGWLIAPPSAVPELEKLAQNLYISASSIAQHAALACFTPESIAIFEARRAEFQQRRDYLLPALRALGFDIAVEPQGAFYLYADISAFSKDAQAFCTHFLETEHVAFTPGIDFGFHRANQHVRIAYTQSLPRLEQAVERIARGLRHI

SEQ ID NO: 17204 - protein, 459 aa, Xanthomonas campestris pv. campestris str. ATCC 33913
MSDPSAPDHLQRSLSNRHLQLIAIGGAIGTGLFMGSGRTISLAGPSILFVYLIIGVMLFFVMRAMGELLLSNLDYKSFIDFSTDLLGPWAGFFCGWTYWFCWIITAIADVIAIAAYAQFWFPELAPWVPAVLCVLLLLALNLVTVKLFGEMEFWFALIKIIAICALIITGAGLVMWGFRSPSGHVASLSNLWNDGGMFPMGIGGFFAGFQIAVFAFVGIELVGTTAAETADPQRNLPKAINSIPVRILIFYVLALIAIMAVTPWRQVVADKSPFVELFVLAGVPAAASLINFVVLTSATSSANSGIFSTSRMLYGLAEERNAPRGFAKLTRAAVPARGLLFSCICLLLGAMLVYLIPDLVTAFTLVTTLSAVLFMFVWSLILCAYIAYRRKRPEQHAASAFKMPGGVLMCYVCLAFFAFIIVLLTLQPDTLHALLVSPLWFLVLAIAYWVRRNQSPTAR

SEQ ID NO: 17205 - protein, 196 aa, Xanthomonas campestris pv. campestris str. ATCC 33913
MSDLLNAAALDQLFRTARTQNAFLDTPVSEDLLRELYDLVKWGPTAANGSPARFVFVTTAEGKEKLKPALSEGNAAKTLAAPVTAIIGFDEDFHEKLPYLFPHADAKSWFDGPRTARTESAFRNSSLQGAYLILAARALGLDAGPMSGFDNAKVDAAFFAGTPIKSNFLVNLGYGDPAGLFPRLPRLSFDEAARIA

SEQ ID NO: 17206 - protein, 433 aa, Xanthomonas campestris pv. campestris str. ATCC 33913
MSSQGNESPALVRAVSRWQIVGLSINDVIGSGIYLLPAATAALLGPMSLWAVMLAGLAVALLVLCYAQAASYFDTPGGSYLYTREAFGPFTGFQIGWMIWLTRISSAAALSNGLADAVARFWPAAGSDGWERLLVVVGSLGLLTAINVIGVKSAARTGVALVIGKLVPLLLFVAIGLFYVDWSWAFAGSTPDLRDLGNLGEAALLLLFAYAGFENIPAAAGEYRNPRRDVPFALITMIVTVTLIYAAVQVVAQGTLPNLAASPTPLADAASRFGGEALALILTVGATISILGTTSNTVMLGPRFLFALAQDGYGPALLARVHPRFHTPAAAVLTQGVLSLALALSGSFTQLALLSMVTRLFAYIGTAAAVIVLARRYRARTDALRLPGGPLIPIAALLLSLGLLASASWQNLAAAGLALLVGCVFYLFPRKPA

SEQ ID NO: 17207 - protein, 364 aa, Xanthomonas campestris pv. campestris str. ATCC 33913
MRIVHPMNSAPARMPKSPLPTRLARRLVSPQLFDFWATRINPLWTLERPMARLVARTPASRDAVTLLFQPNGHWQGLQAGQHVSIGVEIDGRRLLRSYSPTVLADGRLAITVKAITGGLVSTYLAGEAPLGAVVSLDPAFGDMLLPTTPAPLLLLAAGSGITPMRALLQAAAAAGMPMDVDLLYWVRQRDEACFLDEFEALAAAHPRLRAQLLTTREGAAPAPRIDSFPLEQVTALQDRHVMACGPGGFVQAARARLQDRVARFQAEAFSVPVLDDGEAGQVQVQLSRSGRTLTLSRGQSLLEGLEAQGLRPKHGCRMGICNSCACARQSGTTRHLLTGERSSEPTAQVRLCISAASTDLILDL

SEQ ID NO: 17208 - protein, 307 aa, Xanthomonas campestris pv. campestris str. ATCC 33913
MATQYVPVSLIGVPTDIGAGHRGARMGPEALRIAGLQEALVGRGVEVRDLGNLDGPRNPWQAPQAGYRHLDEVVAWNQALMDASYAQLCAGRMPVMLGGDHCLGIGSITAVAKYCREQHRPLRVLWLDAHSDFNTSEVTPSGNVHGMPVACLCGLGPQALTHLGGSAPAVLPEQIRQIGIRSVDPDEKRLIKQHRIDVYDMRYIDEAGMKRTMEAALQGMSADTHLHVSFDVDFLDPSIAPGVGTTVPGGPNYREAQLVMEMIADTGRMGSLDIVELNPVLDNRNATAELAVDLVESLFGKSTLMRD

SEQ ID NO: 17209 - protein, 470 aa, Xanthomonas campestris pv. campestris str. ATCC 33913
MSSWLRRKSIDQVTVHEAGRQLVRSLSWPHLIALGIGAIVGTGIYTLIGVGADKAGPAVLLSFVAAGIVCACAALAYAEMATMMPAAGSAYTYSYTALGESIAWVVGWSLVLEYSLVVSTVAVGWSGYFVGFLQWLGVNLPHALIAGPHAGGIVNLPAVVITFLVAGMLMAGTKESATLNAVLVVLKIIALGVFVAIALPAFNSANLQPFMPYGFSKAMGPDGVERGVMAAAIIFFAFYGFDAISTAAEETKNPGRDLSIGIVGSMIGCTLIYVLVALSAVGAMSFTVFGKSPEPLALILRELGHGKAALVIGAVAIIALPTVLLAFLYGQSRIFFVMSRDGLLPRGLSKVNARTGTPVAITLFTAVLVAALAGVARLDEIAALANAGTLAAFTAVAACLLVLRVREPTRARAFRTPLAWVVGPVAILGCLYLFWSLPSTTQGWFLVWNALGVVVYLAYGRRNSRLGKVG

SEQ ID NO: 17210 - protein, 573 aa, Xanthomonas campestris pv. campestris str. ATCC 33913
MNQTRVFLIFAWLMVAALLWMEWGKDKAAANAPTPIASQAVPAARDPDAAAPAANVPSAQAIPQAGSPAAVPATSTTTATPATTGAAPAITLTSDVLRLKLDGRSVLDAELLQFPQTKDGTEPVKLLTEDAAHPYNATSGWASERSPVPGVGGFRAEQPGTTFELAKGQNTLVVPFVWNGPNGVSIRRIFTLQRGSYAISIKDEVINKSDAAWNGYVFRKLSRVPTILSRGMTNPDSFSFNGATWYSPQEGYERRAFKDYMDDGGLNRQITGGWVALLQHHFFTAWIPQKDQASLYVLAQDGPRDVAELRGPAFTVAPGQSASTEARLWVGPKLVSLLAKEDVKGLDRVVDYSRFSIMAIIGQGLFWVLSHLHSFLHNWGWAIIGLVVLLRLALYPLSAAQYKSGAKMRRFQPRLAQLKERYGDDRQKYQQATMELFKKEKINPMGGCLPLLIQMPIFFALYWVLVESVELRQAPWLGWIQDLTARDPYFILPVLNIAIMWATQKLTPTPGMDPMQAKMMQFMPLVFGVMMAFMPAGLVLYWVVNGGLGLLIQWWMIRQHGEKPSKIIQANAK

SEQ ID NO: 17211 - protein, 273 aa, Proteus vulgaris
MNTVLKWVGGKQGVMAQLKLALPKGTRLIEPFCGSGAVMMNTAYSNYVLADINADVINTYDTIRNAAESVIAALTELYETCRTREHYDAIRKEFNARTADPVRMAAMFIYMNRHGYRGLCRYNKRKGEFNVPWGDYRKPYLPEKEIRYMADRLENADLLCAGFEETLKLAGEGDVVYCDPPYVNPGKFTGYHSSGFSEAQQRALVDILNTLPEKGVHVVASSHDAENIRQMYAGFTVKGFSAPRSVYNGTGEGKKAKEIIAIRQAVFSGKTAA

SEQ ID NO: 17212 - protein, 665 aa, Proteus vulgaris
MSSSPQKSQTWGKINPPVFFVSAFIILCVVAIAAIFPQRSEILLKTLQAQLFENASWFYILAVALILLTVAYLGLSRFGQIKLGPDHAQPQFSYLSWFAMLFSAGMGIGLMFFGVAEPVMHYLAPPVGDPQTVQAAREAMEITFFHWGLHAWAIYAIVALILAFFSYRHGLPLTLRSALYPIIGERIYGPMGHAVDIFAVVGTVFGVATSLGFGVLQVNAGLAHLFGFPVSPTMQVILIVVITGLATLSVVSGLDKGIRILSELNLSLAGLLLLLIGILGPTVLLLKSFVQNTGAYLSDIINKTFNLYAYEPQSSEWLGGWTLLYWGWWLSWSPFVGMFIARISRGRTIREFVTGVLFVPAGFTLLWMTFFGNSAIHLIRDNGAEMLAQVVQKDVALALFEFLNYFPFSSVLSFVAMLMVIVFFVTSADSGAMVVDTLASGGEIHTPVWQRIFWAFLMGAVAITLLLAGGLTALQTMTIATALPFAIILLIAIVGLLKALRIDIYKKDSQQLATLAPNTGRGGLSWERRLRKIAFFPKRNQVKRFMTEVIEPAMQSVVTELEKQGTEAAIHNEKDDRVTLEVQFGENLNFLYEIRLRDYLTPSFALVGMDDDENNESQKYYRAEVYLKEGGQDYDIMGWSEAQIIHDILDQYEKHIHFIHIVDKS

SEQ ID NO: 17213 - protein, 275 aa, Proteus vulgaris
MRSVLKWVGGKSTLMGSINRILPEGNRLIEPFTGSCAVTMNTSYDSYIVADINQDLIGMYRMVRDAPDTLVAIVRDFFSHANSADEYYRLRDIFNQRTSDKPTQAALFLYLNRHGYRGLCRYSKKKGTFNVPYGHYKAPLFPEKEIYHLSEKLQKATLLCASFQETLLLAQPGDVVYCDPPYVEKGRFTDYHSSGFNMSHLRELVGILESMLEKGVSVVASSHNEKAIRDIYARFSQTELTAYRSIGVKGGKGKRADELLLSRIAFPLALPFREA

SEQ ID NO: 17214 - protein, 333 aa, Solenostemon scutellarioides
MGSSHHHHHHSSGLVPRGSHMEAIGVLMMCPMSTYLEQELDKRFKLFRYWTQPAQRDFLALQAESIRAVVGNSNAGADAELIDALPKLEIVSSFSVGLDKVDLIKCEEKGVRVTNTPDVLTDDVADLAIGLILAVLRRICECDKYVRRGAWKFGDFKLTTKFSGKRVGIIGLGRIGLAVAERAEAFDCPISYFSRSKKPNTNYTYYGSVVELASNSDILVVACPLTPETTHIINREVIDALGPKGVLINIGRGPHVDEPELVSALVEGRLGGAGLDVFEREPEVPEKLFGLENVVLLPHVGSGTVETRKVMADLVVGNLEAHFSGKPLLTPVV

SEQ ID NO: 17215 - protein, 129 aa, Saccharomyces cerevisiae
MGSSHHHHHHSSGLVPRGSHMVSQETVAHVKDLIGQKEVFVAAKTYCPYCKATLSTLFQELNVPKSKALVLELDEMSNGSEIQDALEEISGQKTVPNVYINGKHIGGNSDLETLKKNGKLAEILKPVFQ

SEQ ID NO: 17216 - protein, 788 aa, Streptomyces pactum
MTRSWARAETPEGFAFRMSISTDHSAMPAADETVQTSDAAAEATVAPEVTGTPEVTAPGTADADAEQAADAATGPADDADAEQAPTLTFADLGLPEQIVRKLAQNGVTTPFPIQAATIPDAMAGRDILGRGRTGSGKTLSFGLPLLTTLSGGHTEKKRPRGLILTPTRELAMQVSDALQPYGDVLGLKLKVVCGGTSMGNQIYALERGVDILVATPGRLRDIIDRGAASLDRVQVAVLDEADQMADMGFLPEVTEILDLVPQGGQRLLFSATLENEIDTLVKRYLVDPVTHEVDPSAGAVSTMTHHVLVVKPKDKAPVTAAIAARKGRTIIFVRTQLGADRVAEQLRDSGVRADALHGGMTQGARTRTLADFKDGYVNVLVATDVAARGIHVDGIDLVLNVDPAGDHKDYLHRSGRTARAGQSGTVVSLALPHQRRQIFRLMEDAGVDASRHIVGGAGAFDEDVARITGARSLTEVQAESAANSAKQAEREVEQLTRELERVQRRATELREEADRLAARAARERGEDPQAAVAPAEPAADGAEAPAAAPSVPEQTAAPVVENTVADEAPRRTGPERRDERGSYERRDRGGDDRGGFGRDRDRRDDRPFNRDRRDDRGGFGRERRDGDRDRGFGRDRDRERPSFRDRRDGDRDRRDGERGGSGGRSYERRDRDDRGFGRDRDDRGGFNRDRDRRDDRPFNRDRRDDRGGFGRERREDRPGRPFERRDHAPRDHHRGGDRPFNRDRRDDRPFGRDRRDDRPARRDDHRGGTTGSRSFDRRADKPRWKRNG

SEQ ID NO: 17217 - protein, 571 aa, Staphylococcus aureus
MHKSNPLLSILKNLKFPKLLLLSALIISSIGSIAGLLVPWFTGELVNKINGNSLSFNFLVIVISIFLLNAIISGVGLYLLSKIGEKIIFSIRCLVWNHIVRLKTSFFDSNESGELLSRIIDDTKVINTFVSHKLPSTLPNILTIIGSIIMLFILDWKMTLCTFVIVPLFFMIILPLGQMMEKTSNKTQNEIAQFSGMISRILSEIRLVKVSSTENLEVKNGKDRLTNIYNLGIKQAKITSIIEPISSILVLLMIAIVLGFGGWRVSSGNISSGNLVAMIFYVFQLVLPISNISTLITDYKQAKGASFRLSEILSQKTEEIEGKRNEDLDIPFIKFENVTFSYDKEEILKNLSFTIPQNKVTAFVGPSGSGKSTIFNLIEKMYDIDNGKIYIGNSLLSDLDLLSWRKNLGYVMQDNSMMSGTIRDNILYGLEDQEIKDDYLDYYCKLANCYDFVNNLEERYDTFIGERGVKLSGGQRQRIDIARSFIKNPKVLLLDEITANLDSESEHKIQDAMSTLMKDRTTIIIAHRLSTIQKADQIIFLDNGVITGMGDHNSLYNSHKKYKEFVLNQHI

SEQ ID NO: 17218 - protein, 1490 aa, Xanthomonas axonopodis pv. citri str. 306
MAPRTRQGLNDDGLYNSVRDERDACGFGMVAQLDDQPSRALVDTAIAALSRMTHRGGVAADGLTGDGCGLLIRKPDAFLRGLARDAGITLGTRYAAGVVFLPLDEADAARCRAELEAQLHNAGVHFRGWRVVPTDDSVCGQLARDTLPRMEQVFVDAGAEQTEDGFTLALFLARRRAEQALHAVEHFYVTTLSPNGISYKGMVLPDKLSTFYPDLQRSDLSSSAIVFHQRFSTNTLPRWPLAHPFRLLAHNGEINTIEGNRRWAQARSKVWQTPRFDIAQFDPVISMHGSDSQSLDNMLELLIAGGMDLLQALRILVPPATQSLEFKDADLAAFYEFYGLNTEPWDGPAGIVACDSRYAACMLDRNGLRPARWMLTSDRHFLVASEAGVWELPAERITRKGKLGPGEMMAIDLKRGDLLDSDAIDRINRARAPYKQWLQQGVTYLQTELIDPSLVEEPFSEQTLRSYHKLFQLSTEEVEQVLRPLAETEQEATGSMGDDTPMAVLSRQTRPLYDYFRQAFAQVTNPPIDPLREGIAMSLTTQLGRETNIFHAGAETVNHVILNSPVLSQRKLRQLLKMEQYVERNRLIDLSYSLEEGLKAGLERICQEVEAAARAGAVMLLLSDRYPVPDRPMAHALLATGAVHHHLCKVGLRCDVNLIIETGTARDPHHMACLLGVGATAVYPYLAYQTLFDLGRRGILQLSKGGEQSQIGRRYRKGIYKGLSKIISKMGICTIASYRGAQLFEIVGLDPDVVDLCFADTPARIGGVDLARLDTEARELTVRAWNDQLKPEVGGLLKYVHGGEYHMYNPDVVMTLQRATRTGDAGDWQKYVDAVHARPASTLRDLVQLKRADTPTPLDDVAPAEDVLRRFDSAAISLGALSPEAHEALAIAMNRLGGRSNSGEGGEDPARYGTEKRSKIKQVASGRFGVTPEYLVNAEVLQIKVAQGAKPGEGGQLPGHKVNELIARLRYAKPGIGLISPPPHHDIYSIEDLAQLIYDLKQVNPTALVSVKLVAHAGVGTIAAGVVKAGADLITVSGHDGGTGASPVSSIRYAGVPWELGVAESHQALVANDLRERTILQTDGGLKTGLDVVKAALLGADSFGFGTAPMIVLGCKYLRICHLNNCATGVATQDERLRAGYFTGLPERVEHFFRLLAEEVRQWLSYLGVRSLDEIVGRTDLLEQLDISPRPGVKVDLSRLLTHAQYDGSHCAAQRLYESPDSLATQMDGLLADAIANKSGGDHRFLIHNTDRSIGARLSGAIARAHGNHGMSDAPLNLRFRGTAGQSFGAFNAGGLQLELEGEANDYVGKGMAGGRLVVRPPRGARFEARNTPIVGNTCLYGATGGELFAAGRAGERFAVRNSGALAVVEGAGDHCCEYMTDGVVLVLGKVGLNFGAGFTGGLAYVLDIERDFVDRYNHELIDIHRVSAEGFENHRQHLHTLISRHRELTGSIWAQQILDEFRDYIGKFWLVKPKAASIESLTESLRRAA

SEQ ID NO: 17219 - protein, 613 aa, Xanthomonas axonopodis pv. citri str. 306
MCGIVALRSFVAEAPLQALAERALDALSRRGPDAQGLLCLEQPVPTALGHRRLAILDLSAAATQPMRCAETGNVLVFNGEIYNFLELRRELEGLGHQFRTDSDTEVILHGWRAWGEGLFPRCNGMWALVLLEQASGDLIYCRDRLGVKPLYLHHDGRQLVLASEIRAIAASLGGYPPPNPAAVFDFLVTGLSDHTSDTFYAGIRAVPPGWLYRVSPAGHSRRTPYHQWPLPGAVAPLDAQATMELLEDSTRLRLRSDAPTVSLLSGGLDSSILTTLSVQAGALPRTCFAGAFTYGYDDTEQAGFDETEAAASLMQTLGQSERHFVHRARAIPDEEELLALVAAQEEPFCTPSILASFRMYRAIRAAGYKVVLNGEGADELFGGYVRLYLALSARSALHQARLPTAIRLLSTGAVDPRLLLNRLAWDLPAGALGALLRRQRPSVACMSSALWHDQAARLQSLQVDRRVDIEARLRRDVLSTNLPMVLRMTDRNSMSAGIEVRAPFLDYRVVERALSTPALQRMGDYHGKAMLRHAFAERLPARVTTQRKSTGFGHAEQFLVDRMPLQQALATLPEGVNELLNVARLRREFASGRSHSTLWFAVSVALWYRSVYA

SEQ ID NO: 17220 - protein, 491 aa, Xanthomonas axonopodis pv. citri str. 306
MRSDPTSPGVRMKTALFAGWKARFYSVCMLMLFSALMVGGMGSAHAQSTPQVTPLPTEPVTTEPLPSAQPAAPPAAAAEAAPVVEKGDVAWMLTSTLLVLLMVVPGLALFYGGMVRAKNVLSVLIQVAVVFSLLTVLWVFYGYSLAFSGEGAWIGNLDKALLKGVTIETLAATFTKGVSLPEYVFVAFQATFAGITGALIVGAFAERAKFAAVLLFSAIWFTFGYLPLAHMVWATGGYLFGLGALDFAGGTVVHINAGVAGLVGAYFVGKRAGLGREAIKPHNVTLTFVGASLLWVGWFGFNAGSNLEANAGAALAFLNTLLATAAAILGWSLTEKIIKGKSSALGVASGMVAGLVGITPACGTVGPFGAIVIGLAAGVLCVWGVTGLKRLLGADDSLDVFGVHGLGGIIGAILTGVFSAASLGGQKGGDYDIVHQVGIQALGVGITVGWIGVVSVVGFVVAKLVFGLRVSEEAEREGLDITSHGEAAYES

SEQ ID NO: 17221 - protein, 575 aa, Xanthomonas axonopodis pv. citri str. 306
MAKKRTLARFLAETLQSAGVERIWGVTGDSLNGLTDALREMQTIEWMHVRHEEVAAFAAGAEAAVTGQLAVCAGSCGPGNLHLINGLFDCHRSRQPVLAIAAHIPSSEIGLSYFQETHPQELFRECSHFVEMVTNPAQLPEVLHRAMRTAILQQGVTVVVIPGDIALLEVDKHVSSAWPALRQPRVLPAAEDVRQLVELLQQSKAVTLLCGSGCAGAHDAVVALADTLGAPVVHALRGKEYVEWDNPFDVGMTGLIGFSSGYHAMLNCDTLLMLGTDFPYRQFYPKDATIVQVDRDPSALGRRTPLQLGIAADVGETIAALLPQLQRREERGFLEKSLAHYRKAREGLDDLAVPADPGQPLHPQFVTRLISQIADQDAVFTCDVGTPTVWAARYLRMNGKRRLLGSFNHGSMANAMPQALGAQAAFPGRQVISLSGDGGFAMLMGDFISLAQLHLPVKVVVFNNASLGFVAMEMKAAGYLDTGTELRNPDFAAMSNAMGILGIRVDESSQLERALRQAFAHSGPALVDVRVATQELAVPPAIKLEQAKGMGLYLLKAVMSGRGDEVIALVKTNLR

SEQ ID NO: 17222 - protein, 292 aa, Xanthomonas axonopodis pv. citri str. 306
MPIGFLGLGTMGLPMAHNLLRGGFALSVWNRSPERAHSLRDAGATVVEQPRDAAHGPLLFSMLADDNAVRQTLLERGVLDALPAGSVHVNMATISVALAHELTALHAERGVAYVAAPVLGRVEVAEAGNLNILAAGDEAAVARVQPMFDALGQKTWYIGRAPEQANAVKLAANFCLASAIGAMAEASALARGHGVDATQFLGMLTSTLFAAPAYQGYGRLIMQREYLPAGFTATLGRKDVDLAIQAGADKQVPMPLGELLRAGLDEAIAHGDGHADWAVLAEVSARRAGQVA

SEQ ID NO: 17223 - protein, 327 aa, Xanthomonas axonopodis pv. citri str. 306
MRKDTQWHRARVVSIADACPGVREIVLDPGSAARGFEVGSHVDFRVQLHGRDDMRSYSLVGEPRADGYYQIAVRQMPDSRGGSLHMWTLAPGDVVEMSPPSNNFALDESGEEILLIAGGIGITPIIGMAQRLARRHRAFRLLYAGRSRSAMAYVDTLEALLGERLQLQCDDSAGPPDLAAELARLSPNAEVYVCGPLGMLETVRQHWHAAGRPRARLHFETFGNSGRVPAQAFVVKLPGLGLEVPVAENESMLDALADAGVELIAECRRGECGLCAVEVLDSSADIDHRDVFLSDEQRRENRKLCACVSRAVGGSISIDTGYRSELG

SEQ ID NO: 17224 - protein, 402 aa, Xanthomonas axonopodis pv. citri str. 306
MNEVYLIDGIRTPIGRYAGALSSVRADDLGAVPIAALLARQSQLEPAAIDDVCLGCANQAGEDNRNVARMSLLLAGLPPSVPGSTLNRLCGSGLDAIGTVARGIRAGELDLAIAGGVESMSRAPWVMGKADSAFARTQQLEDTTMGWRFINPRLQAVYGTELMGETAENVAQRYAIAREDQDAFALRSQQRVAAAQAAGFFDAEIAPVAVAGRKGGDASTVEHDEAPRPNTTAEMLAKLKPVFRQPGTVTAGNASGLNDGAAALLLASAQAVQTHRLTPRARVLGFASAGVEPAYMGIGPVPAAQRLMARLHLRIAQFDAIELNEAFAAQALACTRAFGLADDAAHVNANGGAIALGHPLGMSGARLALTLLRQLEAGNGRFGLASMCIGVGQGVALAIERL

SEQ ID NO: 17225 - protein, 394 aa, Xanthomonas axonopodis pv. citri str. 306
MDSLLQYAGGYSRRSQDIAPFHVMSLLARANALEQAGHDVIHLEIGEPDFTTAAPIVAAGQAALAAGHTRYTAARGLPALREAIAGFYAQRYACNLDPERILVTPGGSGALLLASSLLVDPGRHWLLADPGYPCNRHFLRLVEGAAQLVPVGPDSDYQLTPALVESAWNADSVGALVASPANPTGSVLSRTQLAALSQALHARGGHLVVDEIYHGLTYGLDAHSVLEVDDGAFVLNSFSKYFGMTGWRLGWLIAPPDAVPELEKLAQNLYISASTIAQHAALACFTPESIALFEARRAEFQQRRDYLLPALRALGFEIAVEPQGAFYLYADISGFSDDAQAFCAHFLETEHVAFTPGIDFGHYRANQHVRIAYTQSLPRLQQAVERIARGLKRL

SEQ ID NO: 17226 - protein, 659 aa, Xanthomonas axonopodis pv. citri str. 306
MSATAPHILPVRTLRPVFVLAATVVCTFALLVSLFPLESGRVLLDAQTWASRNVGWYYLLATTLYLVFVLATALSSYGNIKLGADHDEPEFSYLSWAGMLFAAGISITLFFFCVSEPLTHYLQPPQGGTGSGEASARQAMQLLFLHWGLHGWGVFALAAMALAYFAFRHNLPLALRSALYPLIGKRINGPIGYTVDALGIVATVFGLGADMGFGVLHLNAGLSTLMDVPHTHWVQVALIVAMMGAAIVVAVSGVEKGVRWMSDINMLLAMALLLFMLFAGPTQYLLNALMQNLGDYLGSVVNKSFDVYAYGGRADWLGDWTVFYWAWWIGWAPFVGLFIARISRGRTIREFVLGVLLIPLGFTLAWLSIFGNSALDQLLHHGQTAWAQQAIDAPQTVLYALLQRYPWSRTVITVTVAISFVFFVTSADSGTVVLSTLSSHGGEPHDDGPRWLRVFWGVLTAVVTAGLLLAGSMDALKSAVVLASLPFSAVLLLMAWGLSRALSEESQRKRAQLYSPSPLIGQSRHHGGWRQRLGQAMHFPARDEVYRFMHDQVRPAIEAVTAQLQEEGWKVSSRIDDGDMEISVDHGEQQGFRYQIVMRGYLTPSFAAQRFRNQRYYRAEVYLYEGSQDYDLVGYSREQIINDIIDQYERHLQFLHLTR

SEQ ID NO: 17227 - protein, 579 aa, Xanthomonas axonopodis pv. citri str. 306
MSETLATDATAPAEKKDFIRQIVREDLASGKHTVIRTRFPPEPNGYLHIGHAKAICLDFGLAAEFGGLCNLRLDDTNPAKEDPEFVVAIQDDVRWLGYDWAQLRHASDYFQVYYLAAQKLIRDGHAFVCDLSAEQVRQYRGTLTEPGRNSPFRERSVEENLDLFARMRAGEFPDGARTLRAKIDMASGNINLRDPALYRIKHVEHQNTGNAWPIYPMYDFAHSLGDAVEGITHSLCTLEFEDHRPLYDWCVDKVDLVGHPELLQPLLDKGLPREAAKPRQIEFSRLNINYTVMSKRKLTALVEEQLVDGWDDPRMYTLQGLRRRGYTPAAMRLFVDRVGISKQNSLIDFSVLEGCLREDLDAAAPRRMAVIDPLKLVLTNLPEGHTETLQFSNHPKDDSFGTREVPFARELWIEREDFAEVPPKGWKRLVPGGEIRLRGAGIARVDEVIKNADGEIVELRGWLDPESRPGMEGANRKVKGTIHWVSAAHAVEAEIRLYDRLFSVEKPDDESEGKTYRDYLNPESKRNVRGYVEPSAAMAAPEQAFQFERTGYFVADRRDHSEATPVFNRSVTLRDTWAK

SEQ ID NO: 17228 - protein, 298 aa, Xanthomonas axonopodis pv. citri str. 306
MAVQVLVLKEQAAGERRVAATPETVKKLVALGAGVWIEPGAGRASSMDDDAYLQAGAQPAGADAVAQAEMVLCVQAPSTDTLLRCKPHAVVIGMLAPDADPARAQAFAARQLIAFPLERLPRTTRAQSMDVLSSQAGMAGYKAMLIAAQLAPRFFPMLTTAAGTMRPCKVLVIGAGVAGLQAIATAKRLGAQVEGFDVRPETREQIASLGARFLDLGVSAAGEGGYARQLSDDERAEQQRRLAEHLTGVDVVVCTAAVPGRPAPKIVTTEMARGMRAGSVIVDLAAETGGNCAATRPG

SEQ ID NO: 17229 - protein, 311 aa, Xanthomonas axonopodis pv. citri str. 306
MFSGNANKPLAQSICKELGVRMGKALVTRFSDGEVQVEIEESVRRQEVFVIQPTCAPSAENLMELLVLIDALKRASAQSVTAVIPYFGYSRQDRRMRSSRVPITAKVAAKMICAMEADRVLTVDLHADQIQGFFDVPVDNVYASPLLLADIWRAYGTDNLIVVSPDVGGVVRARAVAKRLDDADLAIIDKRRPRANVATVMNIIGDVQGKTCVLVDDLVDTAGTLCAAAAALKQRGALKVVAYITHPVLSGPAVDNINNSQLDELVVTDTIPLSEAARTCAKIRQLSVAELLAETIRRIAFGESVSSLYVD

SEQ ID NO: 17230 - protein, 106 aa, Xanthomonas axonopodis pv. citri str. 306
MYAVLVTGGKQYRVAQGETLRVEKLEVEAGNEIKFDTILMLGDSDGIKLGDALKGASVTAKVVAHGRADKVRIIKFRRRKHHMKRQGHRQHYTEIEITGIAGGDKK

SEQ ID NO: 17231 - protein, 355 aa, Xanthomonas axonopodis pv. citri str. 306
MKLVDEAEILVTAGNGGNGCVGFRREKFIPLGGPDGGDGGAGGSVWIVADENVNTLVDFRHERTFKAQRGENGMGRQAYGKGGEDRIIVVPVGTVVINVQTDEVIGDLTQHGDRLLVAKGGKGGLGNMHFKSSVNRAPRQATTGEEGEERLLKLELKLLADVGLLGFPNAGKSTLIRAVSAATPKVADYPFTTLYPNLGVVSVEAYRSFVIADVPGLIEGAADGAGLGTQFLRHLQRTRLLLHLVDISPALGVYGEGGVDGVSPADQVRTIERELERHDPELLKKPRWLVLNKADLMFEDEARAAAETIVAELGWTAPWYLVSALGRDGTFPIMKDVMAFFDRQREDELEARNAG

SEQ ID NO: 17232 - protein, 295 aa, Xanthomonas axonopodis pv. citri str. 306
MSKIAFIGLGNMGGPMAANLIKAGHQLRVFDLAPAALDAASAAGAHAASSVQDTLVDVEVVISMLPASRHVEGLYLGESGILAQIPDGALVIDCSTIAPLSARKVADAAKARGLTMLDAPVSGGTAGAAAGTLTFIVGGAADALERARPVLQAMGKNIFHVGDNGAGQVAKLCNNMALGVIMAATGEALALGVAQGLDPAVLSQMMAVSTGRSWATEVCNPWPGVLPNAPASRGYSGGFGNDLMLKDLGLVAESAVQAGVSIPLGELARNLYAMNSQAGNGALDFSSVVKLFAKL

SEQ ID NO: 17233 - protein, 299 aa, Xanthomonas axonopodis pv. citri str. 306
MSEITSPHRSGSVAVIGRPNVGKSTLTNALVGAKVSIVSNRPQTTRHRLLGIATFPEGQLVLVDTPGLHREQKRAMNRVMNRAARGSLEGVDAAVLVIEAGRWDEEDTLAFRVLSDAGVPVVLVVNKVDRLKDKTALFPFLAQVSEGRTFAAVHPVSALKRKGLDALVGDLLKLVPEAEAMFGEDEITDRSQRFLAGELVREQLMRQLGEELPYATTVEIERFAEDGALLRIGAVIWVEREGQKAIVIGKGGTRLKEIGGKARLQMERLFGAKVFLETWVRVREGWSDDEAALKAFGYE

SEQ ID NO: 17234 - protein, 391 aa, Xanthomonas axonopodis pv. citri str. 306
MSDIVIVAAKRTAIGSFLGQFNAVPAPTLAAAAIQGALAQSGIAPADISEVIVGCVLPANLGQAPARQAAIAAGIPTSTGATTINKVCGSGMKAIMLGHDLIKAGSASIVVAGGMESMSNAPHLLPNSRTGNRYGNFQAVDHMAWDGLTNPYDGQAMGVFGEATAEKFGFSRADQDAFAIASVERAHAAQRSGAFADEIVPVTVATRKGDVVVDSDEQPGKSDVAKIPTLKPAFKKDGSVTAASSSSISDGAAITVLMSADDAQRRGVTPLARIVGHVTHAQEPEWFTTAPVAAIQSLVSKLGWRLDDVDLFEINEAFAVVAMAPIRQLGIAHDKVNVHGGACALGHPIGASGARLVVTLVNALRSRGGKRGIATLCIGGGEATAIAIELI

SEQ ID NO: 17235 - protein, 564 aa, Xanthomonas axonopodis pv. citri str. 306
MCSIFGIFGLQPGDDLQALRRQALECSQRQRHRGPDWSGVYVDTGAILVHERLAIVDPAGGSQPLLSEDGQLALAVNGEIYNHRELKAELLQPYAFQTGSDCEVINALYREDTPASYLNRLNGIFAFALWDKTEGRVIIARDPIGVVPLYWGHDREGRLRVASELKSLVDDCADAAQFPPGHWYDSATGALNRYYERAWRQYGAVEGVQVQLQELREAFERAVHRQLMTDVPYGVLLSGGLDSSLVAAVAARYARHRIEENDITEAWWPRLHSFAIGLKGSPDLAAAEVAAAALGTVHHGFEYTFDEGLDALPDVIRHIETYDVTTIRASTPMFLLARRIKAMGVKMVLSGEGSDEIFGGYLYFHKAPNAREFHEELVRKLDALNNYDCLRANKSMMAWGVEPRVPFLDREFLDVAMRMDARFKMIDKTSSGATRMEKGVLREAFAGYLPESILWRQKEQFSDGVGYGWIDGLKAHAQSQVSDRELAAADRRYPVNPPQTKEAYFYRSLFEQFFPGQAAAETVPGGKSIACSSPTAIAWDASFAAMADPSGRAIAGVHAQALAS

SEQ ID NO: 17236 - protein, 646 aa, Xanthomonas axonopodis pv. citri str. 306
MCGLAGMLLASPRLHGEQLDALVRPMGAALRHRGPDDAGTWCDAQAGVALAHQRLSILDLSPLGHQPMRSADGRYVLAYNGEVYNFAQLRAALSALGHRFRGHSDTEVLLAAVVEWGLDETLTRCNGMFAIALWDERDNCLFLARDRVGKKPLYYGWAGDTLVFGSELKALWQHPDFDNGVDRDALTLLLRLGYIPAPACIHEHTFKLMPGRVLRIDAQAVAAGAAAHRPDQAQQPFWNAREAMQRALATPFTGTDAQAEEQLDRVLRDAVALRMVADVPVGVFLSGGTDSSIVTAMMQAQSAQPVHTFSIGFEGSHHDEAPLAREVATHLCTDHTELYVSGADALAVVPNLPDMFDEPFADASQVPTALVARLARGGVTVALSGDGGDELFFGYGRYQRALRNWRMHGLVPGPLRRLMAVAARRNGESSRTGGLAALVAEAGARGIGDIYRNRISRWRDPAAVVLGATEPDSFYSLADPLHGSGTPADAMMLADFAAYLPDDLLCKVDRTTMAVGLEARAPLLDWRVAEFAWSLPLSLKYRDGVSKYLLKRVLCRYLPDAMVYRGKRGFGAPVSAWLRGDLHGWADDLLAHGALQREGVFAADSVARLWRDFNGGERKWHTHLWTVLMFQAWQAHWREQRAAVVR

SEQ ID NO: 17237 - protein, 641 aa, Xanthomonas axonopodis pv. citri str. 306
MGKIIGIDLGTTNSCVSIMDGGKARVIENSEGDRTTPSIVAYTKDGEVLVGASAKRQAVTNPKNTFYAVKRLIGRKFTDGEVQKDISHVPYGILAHDNGDAWVQTSDGKRMAPQEISARVLEKMKKTAEDFLGEKVTEAVITVPAYFNDSQRQATKDAGRIAGLDVKRIINEPTAAALAYGLDKNGGDRKIAVYDLGGGTFDVSIIEIAEVDGEKQFEVLATNGDTFLGGEDFDNRVIEYLVDEFNKDQGIDLRKDPLALQRLKDAAERAKIELSSSQQTEVNLPYVTADASGPKHLNIKLTRAKLEALVEDLVKKSIEPCRTALNDAGLRASDINEVILVGGQTRMPKVQQAVADFFGKEPRKDVNPDEAVAVGAAIQGGVLAGDVKDVLLLDVTPLSLGIETMGGVFTKIIEKNTTIPTKASQTFSTAEDNQSAVTVHVLQGEREQARFNKSLAKFDLSGIEPAPRGMPQVEVSFDIDANGILHVSAKDKKTNKEQKVEIKAGSGLSDEEIQRMVADAEANREEDKKFQELVQARNQADGLIHATRTAITEHGSKVGGDVIGKVEAALSDLETAMKGDDKAQIEARTKTLEEAGQSLYAAAAAAEQGGNADAASGNAQASKAADDVVDAEFTEVKDDKK

SEQ ID NO: 17238 - protein, 569 aa, Xanthomonas axonopodis pv. citri str. 306
MWPFIQRQRGLFVAWMVALTISAAATLSLPAAVKRMIDQGFSGDAQINQAFALLFVVSVVLAVATAARFYFVALLGEKVVADLRGRLYAHLIGLDAGFHDRSRSGELVSRLSADSELLRGLIGSTMSVALRSVATVIGSVVMLFVTSPRLAGFTLIGIPLAVLPIVLGARRLQKISRASQDRVADANTLAAETLGAVRTVQAHARERYESQRFSTALLTAIDTAKVRIRTQATVTAVAIMLIFGAIVAVLWLGAHDVISGRMTPGTLGQFVLYALIGGGSVGALAEVWNELQRAAGGMGRVSELLDEQPLIVAPATPQALPQPLRGAIHFDQVVFHYPHRPDAPALDGFDLHVSPGETVALVGPSGAGKSTVLSMLLRFHDPVSGKVRIDDIDLRDADPVLLREHIALVPQQPTLFAASAADNIRYGRLHASDAEVEAAAAAAEADVFIRALPQGYASELGERGTRLSGGQQQRVAIARALLKDAPILLLDEATSALDAHSERAVQQALERLMEGRTTLVIAHRLATVLKADRIVVMDAGRIVAQGTHAQLIAEGGLYAELARLQFIDQ

SEQ ID NO: 17239 - protein, 211 aa, Xanthomonas axonopodis pv. citri str. 306
MLPARALTARLPEYAQLRRALYPLDTAPAGPGWNHAELIDLTDGDASAEAAVLCGLVPREQGTTVLLTRRTDSLRHHAGQVSFPGGRMEPSDADAAAAALRESCEEIALGAQQVHAIGYLDPFLTVSGFRVTPVVAVIAPGFVAVPQPDEVADVFEVPLGYLMDPNNLRSVELEFRGRPRRVLEYDWPAHRIWGATAAILLNLRRRLEQVA

SEQ ID NO: 17240 - protein, 648 aa, Xanthomonas axonopodis pv. citri str. 306
MRMNDLTKNLLLWVVVAVVLMVVFQSFSPRMAGGVGADSITYTQFLKEVDSGRVKSVDYTDETNLAVNAIRFKRTDGSEATVYGPRDDKLVDVLYSKNIEMTRQKPSTGPGFWSLVLNFLPVILIIGFWLFIMRQMQGGGGGAKGAMSFGKSRAKLQGEDQIKITFADVAGCDEAKEEVGELVDFLRDPTKFTKLGGKIPRGVLMVGPPGTGKTLLAKAIAGEAKVPFFSISGSDFVEMFVGVGASRVRDMFEQAKKHAPCIIFIDEIDAVGRHRGAGLGGGHDEREQTLNQLLVEMDGFEGGEGVIVIAATNRPDVLDPALLRPGRFDRQVVVGLPDVKGREQILRVHMRKLPLADDVVPMVIARGTPGFSGADLANLCNEAALFAARGSEKEVRMDHFDRARDKILMGAERRSMAMSEDEKTLTAYHEAGHAIVGRLVPEHDPVYKVTIIPRGRALGVTMYLPEGDRYSMNRVAIESQLCSLYGGRVAEELIFGGDKVTTGASNDIERATKMARNMVTKWGLSDELGPVAYGEEEDEVFLGRSVTQHKNVSDETARKIDEVVRSILDKAYSKTKTILTENLDKLHAMSQLLLQYETIDVPQIDAIMEGREPPPPAGWGKSDKDGGNNNDKGSPRPLPPIAGPAEQL

SEQ ID NO: 17241 - protein, 126 aa, Xanthomonas axonopodis pv. citri str. 306
MHLSLLKAKIHRATVTHSELNYEGSIAIDGLLLEATGIREFEQVHIWDVTNGARFSTYAIRAEDGSGIMSLNGGAARHVQVGDLIIVAAFASMSEDEAKTFKPNLVYVNAHNAISHTNHSIPTQAA

SEQ ID NO: 17242 - protein, 476 aa, Xanthomonas axonopodis pv. citri str. 306
MFKQLWATKHPHASHEAADGLGLQRALGPWGLTALGIGAVIGGGIFVITGQAAADHAGPAIMLSFVLAAVCCAFCAMAYAEFAAMVPVSGSAYTYTYATFGELAAWFIGWMLVLEYGVSASAVAVSWTGYFLSLLEHFDIHLPAAFVSAPLDGKLQPTGAIANLPAAGIVLLLTWLCYVGIRKSSAMNMAMVILKTGLILLVIAVGWKYVDTSNWHPFIPANEGPGKYGMEGVLRGAAMVFFAYIGFEAVSVAAQESHRPQRDLPIGMILSLVICTVLYIAMAAVMTGLVPYTLLGTDEPVVTAVAAHPQLAWLRVVVEVGALIGLSSVVLVMIIGQPRIFMIIARDGLLPSIFTRIHPKYRTPHVNTVITGVGIALLAAVFPLDVLGELTSMGTLIAFAAVCAGVLILRRTHPELPRPFRMPAAWLICTAGVLSCLALLSAMTLHNWMLMGLWTLVGLVIYFGYGYRHSRLRDGR

SEQ ID NO: 17243 - protein, 493 aa, Xanthomonas axonopodis pv. citri str. 306
MYRMLKSLLRVKPIEPAGHVDAGEPVEGSLQGEATLQRTLTAKHLIMLGIGAVIGAGIFVLTGQAAANHAGPAVMLSFVFAGIACAFAGLCYAEFAAMMPVSGSAYSYSYATLGEGIAWFIGWCLVLEYLFAGSSVAVGWSAYLISFITGTLGLPFPAELAGAPLAWDGHGFVSSGNLVNLPAVLIVAAVSILCYVGVTQSAFANAIVVAIKVVVICLFVGFGIAYIDPANWHPFIPENTGPGQFGWDGVFRAASIVFFSYIGFDAVSTSAGETKDPQKNMPIGILVSLAICTIIYIIVCAVLTGLLPYTQLGTAKPVATALEAHPQLTWLKTAVEIGAIAGLSSVVLVMLMAQPRIFYTMAKDGLMPKLFGKVHPKFRTPYVGTLFVGVVAALLAGVIPLNVLGELVSMGTLLAFATVCAGVLVLRFTKPDLARPFRVPLAMVICPLGALACLFLFFQAFQEHWKVFVGWTVIGLAIYFGYGIHHSRLAKRA

SEQ ID NO: 17244 - protein, 413 aa, Xanthomonas axonopodis pv. citri str. 306
MSPKKTSFPKQDIRVLLLEGISPTAVDVFRAAGYSQIELHAKSLPEDELIARIADAHIVGIRSRTQLSADVLAHAKRLIAVGCFCIGTNQVDLDAAELAGIPVFNAPYSNTRSVAELVIAEAILLLRGIPQKNAQCHRGGWSKSAAGSHETRGKVLGIVGYGHIGTQVGVLAESLGMQVIFHDIETKLSLGNARAAIDLDDLLARADVVTLHVPETPSTKDMIGAPEIARMKPGAHLINASRGTVIDIDALDAALTSGQIGGAAVDVFPIEPKGNGDAFESPLTAHDNVILTPHVGGSTLEAQDNIGIEVAAKLVRYSDNGSTLSAVNFPEVTLPEHAESLRLLHIHRNVPGVLSQINELFSRHNVNIDGQFLRTDPKVGYVVIDVGASEELAGVLKDELGQITGTLRTRILY

SEQ ID NO: 17245 - protein, 401 aa, Xanthomonas axonopodis pv. citri str. 306
MSKQIQEAYIVAATRTPVGKAPKGVFRNTRPDDMLAHVLRAVVAQAPGIDTSRIDDAIIGCAMPEGEQGMNVARIGVLLAGLPNSVAGQTINRFCSSGIQAIAMAADQIRLGNADLMLAGGTESMSMVPMMGNKVAMSPSVFADDHVAIAYGMGITAEKVAEEWKVSREDQDAFALASHQKAIAAIAAGEFRDEISPYEIHSHQPDLAGNVITLRKKLVDTDEGPRPDSSLEGLAKLRPVFRNGQFGGSVTAGNSSQMSDGAGAVLLASEQAIRDYGLTPLARFVSFSVAGVRPEVMGIGPIAAIPKALKQAGLTKDQLDWIELNEAFAAQALAVIRDSELDPSKVNPLGGAIALGHPLGATGAIRAATLVHGLRRRQQKYGMVTMCIGTGMGAAGIIEAL

SEQ ID NO: 17246 - protein, 300 aa, Xanthomonas axonopodis pv. citri str. 306
MDIGLVGMGNIGRHFVARWLAQGHRVIVHDTRAQALQQAKEAGATTAAGMADVLANAEVIALSLPLPSVVLEVARTLAAAAAATEMRDSLLVVDLSTTGAQTTSEVGHLLERADVSFLSAPVSGGTAAAAQGVLTVMAAGPLAAYERARPLLDAVGRHIFYLGGDVRLGQTLKLINNTLYASAMLASCEALVCGAKAGLDARTMLDVINRSSGRCFATMERLHGALDRSFPVRFTTELLRKDVQLGLMAADELGVPMHVGKAALQLLDQAVADGLGEADNIAAIQSIERQAGAVFGAAAH

SEQ ID NO: 17247 - protein, 382 aa, Xanthomonas axonopodis pv. citri str. 306
MPLTTKLPKVGTTIFTVMSQLAAEHGAVNLGQGFPDFAVPQRLVDELSKAMAAGHNQYPPMTGVATLRQAIAGKAQRCYGAQVDADTEITVTSGATEAIFNAIHAVVRAGEEVIVLDPAYDCYEPAIDLAGARAVHVALHPQTFAVDWDALRAAITPKTRLLMINSPHNPSGAMLSAEDMQTLTELLRGTEIFLLSDEVYEHIVFDGRRHESVLRWPALRERAFVISSFGKTYHCTGWKIGYAIAPPALTAEFRKVHQYNTFTSFGPAQHAFAAMIRDEPEHDEQLGAFYQAKRDRFREQLLATRLKPLPVPGGYFQLVDYSAISDLPDTEFVKWLTIENGVAAIPLSPFYENAPAGQRLARLCFAKNDATLDAAIERLRRL

SEQ ID NO: 17248 - protein, 412 aa, Xanthomonas axonopodis pv. citri str. 306
MMSAASTNPEFPIATSGTKDIVLAFSGGLDTSFCIPYLQERGYAVHTVFADTGGVDAEEREFIEKRAAELGAASHVTVDGGPAIWEGFVKPFVWAGEGYQGQYPLLVSDRYLIVDAALKRAEELGTRIIAHGCTGMGNDQVRFDLAVKALGDYQIVAPIREIQKEHTQTRAYEQKYLEARGFGVRAKQQAYTINENLLGLTMSGGEIDRWEAPGEGARGWCAPRSAWPSEALTVTLKFVEGEAVELDGKPLPGAKILAKLNTLFAQYGVGRGVYTGDTVIGLKGRIVFEAPGLISLLTAHRALEDAVLTKQQNRFKPDVARKWVELVYEGFYHDPLKSDIEAFLKSSQAKVNGEVTLETRGGRVDAVAVRSPHLLNTKGATYAQSADWGVEEAEGFIKLFGMSSTLYAQVNR

SEQ ID NO: 17249 - protein, 454 aa, Xanthomonas axonopodis pv. citri str. 306
MCDMRNEHLKPTLGTWQLWGIAVGLVISGEYFGWSYGWGTAGTLGFLATTLLVAVMYTCFIFSFTELTTAIPNAGGPFAYSLRAFGTYGGMLAGLATLIEFVFAPPAIAMAIGAYLNVQYPMLDPRIAAIGAYLVFMSLNIVGVAIAATFELIVTLLAVIELLVFMGVVAPGFSVARFAANGWAGSDVFGPAAISGIFAAIPFAIWFFLAIEGAAMAAEEAKDPTRTIPRAYIAGILTLVILALGVMVFAGGVGDWRQLSNINDPLPQAMKAVVGNSSSWLHMLVWIGLFGLVASFHGIILGYSRQFFALARAGFLPHGLARLSRFRTPHRAILAGGVIGIAAICSDSVVKIQGMSLTAAMITMSVFGAIVMYVMSMLSLFKLRRAEPGLERSFRAPGYPVVPAIALLLALVCLVAMVWFNPIVALIFLGLLLLGAACCVLSLRTQHTPAARAG

SEQ ID NO: 17250 - protein, 69 aa, Xanthomonas axonopodis pv. citri str. 306
MSERQSGTVKWFNDAKGFGFITPESGPDLFVHFRAIQGTGFKSLQEGQKVTFVAVQGQKGMQADQVQAV

SEQ ID NO: 17251 - protein, 528 aa, Xanthomonas axonopodis pv. citri str. 306
MTTHAATTQGKFHKRLSLTDLTFIGLGSIFGSGWLFSASHVSSIAGPAGIVSWILGGIAVLLLGLVYCELGAALPRAGGVVRYPEYSHGALLGSLTGFITLIAFSSLIAIEVEAARQYAAAWFPWLSQPNSTHPSVVGWLVQLALLVLFFVLNYFSVKTFALANNIVSIFKFLVPILVIVLLMQHFDAGNLSVHGFAPSGMAGVEAAISAGGIIFAYLGLTPIVSVASEVRDLQRNIPIALILSVALSTAIYVLLQLAFLGSIPAAQLAQGWAGIDKAFSLPYHDIALALGMAWLAALVICDAMVSPSGTGNIYMNATPRVVYGWARSGGFLPVLTRVDPASGIPRPALWLSLGLSIFWTLPFPSWETLIGVVSAALVLSYAVAPITVAALRRSAPDLPRPFFVRGLPVFGPLSFMVAALIVYWSTWPTLSWLLGLQVLAFVLYVLLRLPSRQGRARLVRQVRASLWLIVFFVLVMLVSWAGTFGGHGWIAHPFDTLGVAVIALCIYHWGARSGLRSDELALEEDDGE

SEQ ID NO: 17252 - protein, 106 aa, Xanthomonas axonopodis pv. citri str. 306
MPVMERIQAEVEQHPIVLFMKGTPQFPMCEFSSRAVQALVAAGADQLRTVNVLEEPEVRANLPRYSNWPTFPQLFIHGELIGGCDITLELFEAGELKRIVSEAYQP

SEQ ID NO: 17253 - protein, 357 aa, Xanthomonas axonopodis pv. citri str. 306
MSDGRRARVWVSQPLFDDVVAQLGEHFELTTTQRVSAYSPAELAAQLAPLDGALITLNERIGAAEIAAAPQLRAIANVGVGYNNLDLDALSAAGILASNTPDVLTETTADLGFALLMATARRITESERWLRDGQWGQWSFKTMLGADIHGSTLGILGMGRIGQGIARRGAHGFGMRVLYHNRSQLPAATEQALGARYVDFDTLLAQSDHLVLVLPYTKDSHHIVDAAALGKMRATATLVNIARGGIVDELALADALANGRLAGAGLDVYEGEPRVRPELLALNNVVLTPHIGSASLATRRAMVQLAVDNLIAALGKGPRAGHPPSALNAAAVAAAKRGGTGADAKKAGVTGTISTKR

SEQ ID NO: 17254 - protein, 869 aa, Xanthomonas axonopodis pv. citri str. 306
MSAPHSTDRWIVLKFGGTSVSRRHRWDTIGKLASKRANETGGRVLVVVSALSGVTNELTAIADGAADSAQRVAALDQRHREFLAELELDADAVLGERLAALHALLGDARAATRTLDWQAEVLGQGELLSSTIGAAYLHASGLDMGWLDARQWLSALPPQPNQSEWSKRLSVSCQWQSDADWRTRFAAQPTRLLITQGFISRHADGGTAILGRGGSDTSAAYFGALLGASRVEIWTDVPGMFSANPKEVPDARLLTRLDYYEAQEIATTGAKVLHPRSIKPCRDSGVPMAILDTERPDLPGTSIDGNAELVLGVKAISRRNGIVLVSMEGIGMWQQVGFLADVFTLFKKHGLSVDLIGSAETNVTVSLDPSENLVNTDVLAALSADLSQICKVKIIVPCAAITLVGRGMRSLLHKLSDVWATFGQERVHMISQSSNDLNLTFVIDEADADGLLPILHAELIDSGAMPVSEGEVFGPRWRQIIGSVRPRPTPWWHAERAHLLSLSRAGTPRYAYHLPTVRERAHALAQIAAVDQRYYAIKANAHPAILMALEQAGFGLECVSHGELRRVFQALPELSPRRVLFTPSFAPKAEYEAAFALGVTVTVDNVEALRNWPEVFRGRNVWLRIDLGHGDGHHEKVNTGGKASKFGLSSTRVDEFVEVARTLEVTITGVHAHLGSGVETGEHWRMMYDELAGFARRIGTVETIDIGGGLPIPYSAEDEPFDLEVWAKGLAEVKAVHPGYRLAIEPGRYLVAEAGVLLASVTQVIEKDGVHRVGLDAGMNTLIRPALYDAGHDIENLSQLDAPADGTFDIVGPICESSDVFGKRRRLPAATAPGDVVLVADAGAYGYSMASTYNQRELPREEVIDAPTG

SEQ ID NO: 17255 - protein, 139 aa, Xanthomonas axonopodis pv. citri str. 306
MFALAPLRKGERIIQYKGRLRTHAEVDADDTGDVESGHTFLFTLSDDYVLDANYEGNVARWINHSCDPNCEAVIEEAEGDDRRKDKIFIEAKRDIKPGEELTYNYGITLAERHTPRLKKIWECRCGSKNCTGTMLQPKR

SEQ ID NO: 17256 - protein, 254 aa, Xanthomonas axonopodis pv. citri str. 306
MLTINNLHASIAGKDILKGLSLDIQPGQVHAIMGPNGAGKSTLGNVLAGRDGYEVSAGSVQFDGKDLLDLPPEERAAAGLFLAFQYPVEIPGVNNTYFLRAALNAQRKARGEDELDSMQFLKLVRQKLAVLHLKDELLHRGVNEGFSGGEKKRNEIFQLAVLEPKLAILDETDSGLDIDALKSVADGVNALRSPERSFLVITHYQRLLDYIKPDVVHVLAEGRIVQSGGPELALELEKHGYHFLKDRVVPEVAA

SEQ ID NO: 17257 - protein, 333 aa, Xanthomonas axonopodis pv. citri str. 306
MAVSHLPSATVSDATLVASGQRVLEIEREALASVGARIGREFAAACRLVLTSRGRVVATGMGKSGHVARKIAATLASTGTPAFFVHPGEAGHGDLGMITEADIVLALSYSGESDEVRMLLPVLKRQGNPIIAMTGRTSSTLAQAADVHLDVSVSAEACPLHLAPTSSTTASLAMGDALAVALLDARGFTADDFARSHPAGSLGRRLLLHITDVMHAGEDLPRVREDASLSEALMEMSRKRLGMTAVVDADGHLIGLFTDGDLRRALDSDIDVRSAGIAQVMTRNPRTIGADQLAAEAARLMEDYKINGLIVVDAQHRAVGALNIHDLLRAKVV

SEQ ID NO: 17258 - protein, 462 aa, Xanthomonas axonopodis pv. citri str. 306
MPLPTDSVAETAAPAAPALRHALKPRQLMMMGLGTAIGAGLFLGSGVGIHAAGPAVLISYLIAGALVIIVMNALGEMAAAKPASGAFSVYAADAMGPTAGATVGWLWWFQIVVVIAAEAVGAAGLLATVWPALPVPLLSLLFMATFTAINLLGVRNFGEFEFWFAILKVLAIVVFLLIGVALLAGWLPGVASPGLSNFTQNGGFAPKGLAGIGSALLVVVFAFGGTEIVAVAAAETADPGRSLARTIRTVAWRILVFYIGSISVIVAVVPWTSAALSSPFAAVLEVARIPGAATAITLVAVVALLSALNANLYGASRMIFSLAQRGEAPRLLARTSGEQVPLVAVIASVLFGFAAAALELLYPNKVLPMLLNIVGATCLLVWTISLVSQLILRARADRAGLALPFRMRGYPFLTVLALVILAVIFVLLASSADTRAQFLSMVALTAVIAAVSEIARRVRARM

SEQ ID NO: 17259 - protein, 460 aa, Xanthomonas axonopodis pv. citri str. 306
MIDTPRRDDAATLERFGYAQELKRQLTLKDLLIYGLVCMVPTAPFSIFGGVFDISAGMVPLTYLVGFVAMLFTALSYQQMSQAFPVAGSVYAYVGRGLSSGMGFLAGWAILLDYLLVPTLLYVVGANAMHTVLPAVPQPAWIAFFVVLNTVVNLRGIETTARANRFFLLAQLLVLAVFVVLATLAIQRGVNGAHWSWRPLYNPQAFSPQLIFSALSVAVVSFLGFDAISTMSEEARGGNRVVGRATLLALLIVAGLFVLQTWLAALLQPTLQRYPSAQASNDAFFEIGRLIAGPWLQIVIALTVAISAAIANSLVAQAATSRLLFAMARDRQLPGFLRYIHPRTGVPQRAILLVAGLSLVLGEVFVGQIALLSSLCNVGALTAFVLLHIAVLWHFRTQGRHVLHGAVPLIGIVILAYVLLNADLHAQLGGAAWMAVGLAVLAFLKLSGRSTEFRASDALE

SEQ ID NO: 17260 - protein, 455 aa, Xanthomonas axonopodis pv. citri str. 306
MLSPSVVPPSSTAAGAPPRTLGFWSALSANLLNMIGIGPFITIPLALSALAGPSVLIGWVAGALLCLCDGLVWAELGAAIPRSGGPYHYLREAYGRERWGRLFGFLYLWQTLLTAPLSVGSAAVGCVQYLAFLLPGLGHARLTAMAMALCAFNTLLLYRKVRSVQVLSLLVSAAVIGACVWIICSGVLHFDLGIAEDFLHARPASPHGFWLGLGAVALIAVYDYGGYNNVCMLGGEIRKPRRTIPRAVLVSIPIVALLYLGLNVTLLGVLPWQQAAQSKAVMADFMQAIYGPAGSTVAVALIVLASWGSALVVLLGYSRVPYAAAAAGQFFGVFARLHPRGGFPTVSLLFVGATSVLACLLSLDDLIATLMIIQILFQFLAQCLAVVLLRRKRRRRAFSMPLYPWPLLISVAGWLYLLAASPGHRVLAAVLALCVGSALYLIQARRERAWPFQLQ

SEQ ID NO: 17261 - protein, 455 aa, Xanthomonas axonopodis pv. citri str. 306
MSRLVVVSNRVAVPGENRAGGLAVGLLAALKERGGVWFGWSGKTVRGDSGGMHEQTEGDITFVTMDLNKRDIDSYYNGFANRTLWPLLHFRLDLVDYDRATREGYMRVNRLFAEKLAPLLKDSDTLWIHDYHMIPLGAMLRELGVGCKMGFFLHVPMPSADLVQAMPDHARLFSTFYAYDLVGFQTQRDAERFKAYVRLFGGGRILEGDLVEGPGGRRFTASSFPIGIDTDLIAHQAKASAGKQAVRDLRESLRGRQLAIGVDRLDYSKGLPERFQGFERYLERYPDQSGSLTYLQIAPVSRGDVTEYRQLRSQLEQIAGHINGGHAEPDWTPLRYVNQNFSHATLTGFYRAASVCLVTPLRDGMNLVAKEFVAAQDPADPGVLVLSLFAGAADEMKEALLVNPHDLDGVADAIATAASMPLASRIERWHAMMDHLRKNNINHWRQRYLQALSEV

SEQ ID NO: 17262 - protein, 423 aa, Xanthomonas axonopodis pv. citri str. 306
MSTAPQKPLAIRERLSEVRYEIRGELARRARELEAQGRKLIKLNIGNPGAFGFRAPEHLQRAIADDMGRTDPYTHQQGLPEAREAIATAYARRQHPDAHPDRIFVGNGVSELIDLSLRALLNPGDEVLVPSPDYPLWSAATILNDGRPVYYRCAPENGFQPDPVEIETLVSSRTRAIVLINPNNPSGASYSRELLERIVAIATKHNLLLMVDEIYDQVLYDDAAFVPVAPLAGAHPCITFSGLSKVHRACGWRVGWALLSGDQARINDLRNAMDLLGALRLCANVPGQYAIDAAVNGPDTISALCAPGGRLYETRRAVIEACAASEHLSLVAPAGALYAFPAVVGAAARNFDDHAFALDLMNEEGVLVVPGSSFNVPYRHHFRVTLMPEAGVMRDVFARIDRALARRAEAVTKVVPLKPRSVA

SEQ ID NO: 17263 - protein, 531 aa, Xanthomonas axonopodis pv. citri str. 306
MSEHSLRRDVGPFALMLTGLGSIIGSGWLFGAWRAAGLAGPGAIWAWVLGAAIITTIALSYAELGAMFPESGGMVRYSHYSHGSLVGFIAGWANWIAIVSVIPVEAEASVQYMASWPWAWAQGLYVQAPGGAGELSVPGLLISAVLVLVYFFLNFWSVKLFARSNTLITMFKLVVPAATGVALIASGFHSENFSVGIHGDAHVLDLAAVLTAVATAGIVFSFNGFQSPVNLAGEARNPGRSIPFAVLGSIALATVVYVILQVAYIGAVPPDLLAKAGWHGIDFRSPFAELAIIVNLHWLAMLLYIDAFVSPSGTGITYTATTARMVYGMEKNGTMPAALGKLHPVWGVPRMAMFFNLAVSFVFLFFFRGWGTLAAVISVATIISYLTGPISAMALRRHAPELHRPLRIAALPVLAGVAFVMATELLYWARWPLTGEIILLMVVALPVYCYYQAKQGWPDLRRNLKGAAWMICYLPTIALVSWAGSTDFGGHGYLSYGTDLAVVAAVGAVFYIWGVRSGWRTPSVEKAVAQA

SEQ ID NO: 17264 - protein, 438 aa, Xanthomonas axonopodis pv. citri str. 306
MSTPQPAPDATGLVRVVSRWQIVGLSINDVIGSGIYLLPAATAALLGPMSLWAVMLAGLAVALLVLCYAQAGSYFDTPGGSYLYTREAFGPFVGFQIGWMIWLTRISSAAALSNGLADAVARFWPTAATDTWARLLVVVGSLGLPTAINVIGVKSAARTGIALVIGKLVPLLLFVAIGLFYVDWSWAFAGTAPDLRDLGNLGEAALLLLFAYAGFENIPAAAGEYRNPRRDVPFALITMIVTVTLIYAAVQVVAQGTLPNLAASPTPLADAASRFGGEALALILTVGATISILGTTSNTVMLGPRFLFALARDGYGPAFLARVHPRFHTPAAAVLTQGALSLALALSGSFTQLALLSMVTRLFAYIGTAAAVIVLARRYRQRTDTLRLPGGPAIPIAALVLSLGLLASASWQNLAAAGVALLVGWVFYLFPRKRVEGG

SEQ ID NO: 17265 - protein, 358 aa, Xanthomonas axonopodis pv. citri str. 306
MNLASPRKSKSPLPARLARRLVSPQLFDFWATRLNPLWTLEQPVARLVQRIPASRDAVTLVLQPNGHWRGLQAGQHVSLGVEIDGRRLLRSYSPTVLADGRLAITVKAIEGGLVSRFLARDAALGTVVSLAPAFGDMLLPTTPTPLLLLAAGSGITPMRALLQAAAQAGMPMDVDLLYWVRQRDEACFVDEFAALAAAHPRLRVQLLTTREGETPAERVDTYSLDQIAALDQRHVMACGPGGFVQAARERLQGRVAAFQAEAFSVPALDEAETGQVQVQLSRSGRTLTLPRGQSLLEGLEAQGLRPKHGCRMGICNTCACPRQSGTTRHLLTGERSNEPTAQVRLCISAPSTDLILDL

SEQ ID NO: 17266 - protein, 307 aa, Xanthomonas axonopodis pv. citri str. 306
MATQYVPVSLIGVPTDIGAGHRGARMGPEALRIAGLQEALVGRGVEVRDLGNLDGPRNPWQAPQAGYRHLDEVVAWNQALMDASYAELRAGRMPIMLGGDHCLGIGSITAVAKYCREQGRPLRVLWLDAHSDFNTSEVTPSGNVHGMPVACLCGLGPEALTHLGGSAPALLPEQVRQIGIRSVDPEEKRLIKQHRIDVYDMRYIDEAGMKRTMEAALQDMSADTHLHVSFDVDFLDPSIAPGVGTTVPGGPNYREAQLVMEMIADTGRMGSLDIVELNPVLDNRNATAELAVDLVESLFGKSTLMRD

SEQ ID NO: 17267 - protein, 471 aa, Xanthomonas axonopodis pv. citri str. 306
MSSWLRRKSIDQVTVHEAGRQLVRSLSWPHLIALGIGAIVGTGIYTLIGVGADKAGPAVLLSFVAAGIVCACAALAYAEMATMMPAAGSAYTYSYTALGESIAWVVGWSLVLEYSLVVSTVAVGWSGYFVGFLQWLGVGLPQALIAGPHAGGIVNLPAVAITFLVAGLLMAGTKESATLNAVLVVLKIIALGVFVAIALPAFNSANLQPFMPYGFSKAMGPDGIERGVMAAAAIIFFAFYGFDAISTAAEETKNPGRDLSIGIVGSMIGCTLIYVLVALAAVGAMSFTVFGKSPEPLALILRELGHGKAALVIGAVAIIALPTVLLAFLYGQSRIFFVMSRDGLLPRGLSKVNARTGTPVAITLFTAVLVAALAGVARLDEIAALANAGTLAAFTAVAACLLVLRVREPGRARAFRTPLAWVVGPVAIGGCLYLFWSLPSKTQGWFLLWNALGVVVYLAYGRRNSRLNQAG

SEQ ID NO: 17268 - protein, 574 aa, Xanthomonas axonopodis pv. citri str. 306
MNQTRVFLIFAWLMVAALLWMEWGKDKAAANAPVVAATQSVPAARDLDAATPSAANVPAAQAIPQAGAPGAVPATSTTAATPAAAGAAPVVTLTSDVLRLKLDGRSVLDAELLQFPQTKDGTAPVSLLTEDPAHPYNATSGWASEHSPVPGVGGFRAEQPGTTFDMAKGQNTLVVPFVWNGPDGVSIRRTFTLERGRYAISIKDEVINKSGAPWNGYVFRKLSRVPTILSRGMTNPDSFSFNGATWYSPQEGYERRAFKDYMDDGGLNRQITGGWVALLQHHFFTAWIPQKDQASLYVLAQDGPRDVAELRGPAFTVAPGQTASTEARLWVGPKLVSLIAKEDVKGLDRVVDYSRFSIMAIIGQGLFWVLSHLHSFLHNWGWAIIGLVVLLRLALYPLSAAQYKSGAKMRRFQPRLAQLKERYGDDRVKYQQATMELFKKEKINPMGGCLPLLIQMPIFFALYWVLVESVELRQAPWLGWIQDLTARDPYFILPLLNISIMWATQKLTPTPGMDPMQAKMMQFMPLVFGVMMAFMPAGLVLYWVVNGGLGLLIQWWMIRQHGEKPSKIIQANAK

SEQ ID NO: 17269 - protein, 349 aa, Liriodendron chinense
IARLQALSSGNMEKLVDTVVQEIFDLTGYDRAMAYKFHEDDHGEVISEITKPGLEPYLGLHYPATDIPQAARFLFMKNKVRMICDCHAKPVKVYQDEKLTFDLTLCGSTLRAPHSCHLQYMENMDSIASLVMAVVINEGVDEDESTEPTQQEQQPQKRKRLWGLVVCHNTTPRFVPFPLRYACEFLMQVFAIHVNKEFELENQIREKNILRTQTLLCDMLLRDAPLGIVTQSPNIMDLVKCDGAALLYNNKIWRLGITPTDSQLRDISVWLSEYHMDSTGLSTDSLYDAGYPGALALGDVVCGMAAVRINPKDMLFWFRSHTAAEVRWGGAKHDPSDKDDGRRMHPRSS

SEQ ID NO: 17270 - protein, 355 aa, Liriodendron tulipifera
KAIARLQALSSGNMEKLVDTVVQEIFELTGYDRAMAYKFHEDDHGEVISEITKPGLEPYLGLHYPATDIPQAARFLFMKNKVRMICDCHAKPVKVYQDEKLTFDLTLCGSTLRAPHSCHLQYMENMDSIASLVMAVVINEGVDEDESTEPTQQEQQPQKRKRLWGLVVCHNTTPRFVPFPLRYACEFLMQVFAIHVNKEFELENQIREKNILRTQTLLCDMLLRDAPLGIVTQSPNIMDLVKCDGAALLYNNKIWRLGITPTDSQLRDISVWLSEYHMDSTGLSTDSLYDAGYPGALALGDVVCGMAAVRINPKDMLFWFRSHTAAEVRWGGAKHDPSDKDDGRRMHPRSSFKAS

SEQ ID NO: 17271 - protein, 316 aa, Liriodendron tulipifera
AYKFHEDDHGEVISEITKPGLEPYLGLHYPATDIPQAARFLFMKNKVRMICDCHAKPVKVYQDEKLTFDLTLCGSTLRAPHSCHLQYMENMDSIASLVMAVVINEGVDEDESTEPTQQEQQPQKRKRLWGLVVCHNTTPRFVPFPLRYACEFLMQVFAIHVNKEFELENQIREKNILRTQTLLCDMLLRDAPLGIVTQSPNIMDLVKCDGAALLYNNKIWRLGITPTDSQLRDISVWLSEYHMDSTGLSTDSLYDAGYPGALALGDVVCGMAAVRINPKDMLFWFRSHTAAEVRWGGAKHDPSDKDDGRRMHPRSS

SEQ ID NO: 17272 - protein, 355 aa, Liriodendron chinense
KAIARLQALSSGNMEKLVDTVVQEIFELTGYDRAMAYKFHEDDHGEVISEITKPGLEPYLGLHYPATDIPQAARFLFMKNKVRMICDCHAKPVKVYQDEKLTFDLTLCGSTLRAPHSCHLQYMENMDSIASLVMAVVINEGVDEDESTEPTQQEQQPQKRKRLWGLVVCHNTTPRFVPFPLRYACEFLMQVFAIHVNKEFELENQIREKNILRTQTLLCDMLLRDAPLGIVTQSPNIMDLVKCDGAALLYNNKIWRLGITPTDSQLRDISVWLSEYHMDSTGLSTDSLYDAGYPGALALGDVVCGMAAVRINPKDMLFWFRSHTAAEVRWGGARHDPSDKDDGRRMHPRSSFKAS

SEQ ID NO: 17273 - protein, 319 aa, Liriodendron tulipifera
LVDTVVQEIFELTGYDRVMAYKFHEDDHGEVISEITKPGLEPYLGLHYPATDIPQAARFLFMKNKVRMICDCHAKPVKVYQDEKLTFDLTLCGSTLRAPHSCHLQYMENMDSIASLVMAVVINEGVDEDESTEPTQQEQQPQKRKRLWGLVVCHNTTPRFVPFPLRYACEFLMQVFAIHVNKEFELENQIREKNILRTQTLLCDMLLRDAPLGIVTQSPNIMDLVKCDGAALLYNNKIWRLGITPTDSQLRDISVWLSEYHMDSTGLSTDSLYDAGYPGALALGDVVCGMAAVRINPKDMLFWFRSHTAAEVRWGGAKH

SEQ ID NO: 17274 - protein, 337 aa, Liriodendron chinense
KAIARLQALSSGNMEKLVDTVVQEIFELTGYDRAMAYKFHEDDHGEVISEITKPGLEPYLGLHYPATDIPQAARFLFMKNKVRMICDCHAKPVKVYQDEKLTFDLTLCGSTLRAPHSCHLQYMENMDSIASLVMAVVINEGVDEDESTEPTQQEQQPQKRKRLWGLVVCHNTTPRFVPFPLRYACEFLMQVFAIHVNKEFELENQIREKNILRTQTLLCDMLLRDAPLGIVTQSPNIMDLVKCDGAALLYNNKIWRLGITPTDSQLRDISVWLSEYHMDSTGLSTDSLYDAGYPGALALGDVVCGMAAVRINPKDMLFWFRSHTAAEVRWGGAKHDP

SEQ ID NO: 17275 - protein, 308 aa, Liriodendron tulipifera
  misc_feature (85)..(85): Xaa can be any naturally occurring amino acid
  unsure (1)..(308): unsure at all Xaa locations
DTVVQEIFELTGYDRAMAYKFHEDDHGEVISEITKPGLEPYLGLHYPATDIPQAARFLFMKNKVRMICDCHAKPVKVYQDEKLTXDLTLCGSTLRAPHSCHLQYMENMDSIASLVMAVVINEGVDEDESTEPTQQEQQPQKRKRLWGLVVCHNTTPRFVPFPLRYACEFLMQVFAIHVNKEFELENQIREKNILRTQTLLCDMLLRDAPLGIVTQSPNIMDLVKCDGAALLYNNKIWRLGITPTDSQLRDISVWLSEYHMDSTGLSTDSLYDAGYPGALALGDVVCGMAAVRINPKDMLFWFRSHTAA

SEQ ID NO: 17276 - protein, 355 aa, Magnolia denudata
KAIARLQALSSGSMEKLVDTVVQEVFELTGYDRVMAYKFHEDDHGEVISEITKPGLEPYLGLHYPATDIPQAARFLFMKNKVRMICDCNAKPVKVYQDEKLTFDLTLCGSTLRAPHSCHSQYMENMSSIASLVMAVVINEGVDEEEGMEPAQQEQQQLKRKRLWGLVVCHNTTPRFVPFPLRYACEFLMQVFAIHVNKEFELENQIQEKNILRTQTLLCDMLLRDAPLGIVTQNPNIMDLVKCDGAALLYNNKIWRLGLTPTDSQMRDISVWLSEYHMDSTGLSTDSLYDAGYPGALALGDVVCGMAAVRINPKDMLFWFRSHTAAEVRWGGAKHDPSDKDDGRRMHPRSSFKAS

SEQ ID NO: 17277 - protein, 355 aa, Magnolia officinalis subsp. biloba
  misc_feature (10)..(10): Xaa can be any naturally occurring amino acid
  misc_feature (102)..(102): Xaa can be any naturally occurring amino acid
  unsure (1)..(355): unsure at all Xaa locations
KAIARLQALXSGSMEKLVDTVVQEVFELTGYDRVMAYKFHEDDHGEVISEITKPGLEPYLGLHYPATDIPQAARFLFMKNKVRMICDCNAKPVKVYQDEKLXFDLTLCGSTLRAPHSCHSQYMDNMSSIASLVMAVVINEGVDEEEGMEPAQQEQQQSKRKRLWGLVVCHNTTPRFVPFPLRYACEFLMQVFAIHVNKEFELENQIQEKNILRTQTLLCDMLLRDAPLGIVTQNPNIMDLVKCDGAALLYNNKTWRLGLTPTDSQMRDISVWLSEYHMDSTGLSTDSLYDAGYPGALALGDVVCGMAAVRINPKDMLFWFRSHTAAEVRWGGAKHDPSDKDDGRRMHPRSSFKAS

SEQ ID NO: 17278 - protein, 355 aa, Magnolia campbellii
  misc_feature (233)..(233): Xaa can be any naturally occurring amino acid
  unsure (1)..(355): unsure at all Xaa locations
KAIARLQALSSGSMEKLVDTVVQEVFELTGYDRVMAYKFHEDDHGEVISEITKPGLEPYLGLHYPATDIPQAARFLFMKNKVRMICDCNAKPVKVYQDEKLTFDLTLCGSTLRAPHSCHSQYMENMSSIASLVMAVVINEGVDEEEGMEPAQQEQQQLKRKRLWGLVVCHNTTPRFVPFPLRYACEFLMQVFAIHVNKEFELENQIQEKNILRTQTLLCDMLLRDAPLGIVTXNPNIMDLVKCDGAALLYNNKIWRLGLTPTDSQMRDISVWLSEYHMDSTGLSTDSLYDAGYPGALALGDVVCGMAAVRINPKDMLFWFRSHTAAEVRWGGAKHDPSDKDDGRRMHPRSSFKAS

SEQ ID NO: 17279 - protein, 355 aa, Michelia odora
KAIARLQALSSGSMEKLVDTVVQEVFELTGYDRVMAYKFHEDDHGEVISEITKPGLEPYLGLHYPATDIPQAARFLFMKNKVRMICDCNAKPVKVYQDEKLTFDLTLCGSTLRAPHSCHSQYMENMSSIASLVMAVVINEGVDEEEGMEPAQQEQQQLKRKRLWGLVVCHNTTPRFVPFPLRYACEFLMQVFAIHVNKEFELENQIQEKNILRTQTLLCDMLLRDAPLGIVTQNPNIMDLVKCEGAALLYNNKIWRLGLTPTDSQMRDISVWLSEYHTDSTGLSTDSLYDAGYPGALALGDVVCGMAAVRINAKDMLFWFRSHTAAEVRWGGAKHDPSDKDDGRKMHPRSSFKAS

SEQ ID NO: 17280 - protein, 355 aa, Michelia hypolampra
KAIARLQALSGGSMEKLVDTVVQEVFELTGYDRVMAYKFHEDDHGEVISEITKPGLEPYLGLHYPATDIPQAARFLFMKNKVRMICDCNAKPVKVYQDEKLTFDLTLCGSTLRAPHSCHSQYMENMSSIASLVMAVVINEGVDEEEGMEPAQQEQQQLKRKRLWGLVVCHNTTPRFVPFPLRYACEFLMQVFAIHVNKEFELENQIQEKNILRTQTLLCDMLLRDAPLGIVTQNPNIMDLVKCDGAALLYNNKIWRLGSTPTDSQMRDISVWLSEYHTDSTGLSTDSLYDAGYPGALALGDVVCGMAAVRINPKDMLFWFRSHTAAEVRWGGAKHDPSDKDDGRRMHPRSSFKAS

SEQ ID NO: 17281 - protein, 355 aa, Manglietia sinica
KAIARLQALSSGSMEKLVDTVVQEVFELTGYDRVMAYKFHEDDHGEVISEITKPGLEPYLGLHYPATDIPQAARFLFMKNKVRMICDCNSKPVKVYQDEKLTFDLTLCGSTLRAPHSCHSQYMENMSSIASLVMAVVINEGVDEEEGMEPAQQEQQQPKRKRLWGLVVCHNTTPRFVPFPLRYACEFLMQVFAIHVNKEFELENQIQEKNILRTQTLLCDMLLRDAPLGIVTQNPNIMDLVKCDGAALLYNNKIWRLGLTPTDSQMRDISVWLSECHTDSTGLSTDSLYDAGYPGALALGDVVCGMAAVRINPKDMLFWFRSHTAAEVRWGGAKHDPSDKDDGRRMHPRSSFKAS

SEQ ID NO: 17282 - protein, 354 aa, Manglietia duclouxii
KAIARLQALSSGSMEKLVDTVVQEVFELTGYDRVMAYKFHEDDHGEVISEITKPGLEPYLGLHYPATDIPQAARFLFMKNKVRMICDCNAKPVKVYQDEKLTFDLTLCGSTLRAPHSCHSQYMDNMSSIASLVMAVVINEGVDEEEGMEPAQQEQQQSKRKRLWGLVVCHNTTPRFVPFPLRYACEFLMQVFAIHVNKEFELENQIQEKNILRTQTLLCDMLLRDAPLGIVTQNPNIMDLVKCDGAALLYNNKIWRLGSTPTDSQMRDISVWLSEYHMDSTGLSTDSLYDAGYPGALALGDVVCGMAAVRINPKDMLFWFRSHTAAEVRWGGAKHDPSDKDDGRRMHPRSSFKA

SEQ ID NO: 17283 - protein, 355 aa, Magnolia grandiflora
KAIARLQALSSGSMEKLVDTVVQEVFELTGYDRVMAYKFHEDDHGEVISEITKPGLEPYLGLHYPATDIPQAARFLFMKNKVRMICDCNAKPVKVYQDEKLTFDLTLCGSTLRAPHSCHSQYMENMSSIASLVMAVVINEGVDEEEGMEPAQQEEQQPKRKRLWGLVVCHNTTPRFVPFPLRYACEFLMQVFAIHVNKEFELENQIQEKNILRTQTLLCDMLLRDAPLGIVTQNPNIMDLVKCDGAALLYNNKIWRLGSTPTDSQMRDISVWLSEYHMDSTGLSTDSLYDAGYPGALALGDVVCGMAAVRINPKDMLFWFRSHTAAEVRWGGAKHDPSDKDDGRRMHPRSSFKAS

SEQ ID NO: 17284 - protein, 355 aa, Michelia yunnanensis
KAIARLQALSSGSMEKLVDTVVQEVFELTGYDRVMAYKFHEDDHGEVISEITKPGLEPYLGLHYPATDIPQAARFLFMKNKVRMICDCNAKPVKVYQDEKLTFDLTLCGSTLRAPHSCHSQYMENMSSIASLVMAVVINEGVDEEEGMEPAQQEQQQLKRKRLWGLVVCHNTTPRFVPFPLRYACEFLMQVFAIHVNKEFELENQIQEKNILRTQTLLCDMLLRDAPLGIVTQNPNIMDLVKCEGAALLYNNKIWRLGLTPTDSQMRDISVWLSEYHTDSTGLSTDSLYDAGYPGALALGDVVCGMAAVRINPKDMLFWFRSHTAAEVRWGGAKHDPSDKDDGRRMHPRSSFKAS

SEQ ID NO: 17285 - protein, 355 aa, Magnolia odoratissima
KAIARLQALSSGSMEKLVDTVVQEVFELTGYDRVMAYKFHEDDHGEVISEITKPGLEPYLGLHYPATDIPQAARFLFMKNKVRMICDCNAKPVKVYQDEKLTFDLTLCGSTLRAPHSCHSQYMDNMSSIASLVMAVVINEGVDEEEGMEPAQQEQQQSKRKRLWGLVVCHNTTPRFVPFPLRYACEFLMQVFAIHVNKEFELENQIQEKNILRTQTLLCDMLLRDAPLGIVTQNPNIMDLVKCDGAALLYNNKIWRLGLTPTDSQMRDISVWLSEYHMDSTGLSTDSLYDAGYPGALALGDVVCGMAAVRINPKDMLFWFRSHTAAEVRWGGAKHDPSDKDDGRRMHPRSSFKAS

SEQ ID NO: 17286 - protein, 338 aa, Magnolia delavayi
KAIARLQALSSGSMEKLVDTVVQEVFELTGYDRVMAYKFHEDDHGEVISEITKPGLEPYLGLHYPATDIPQAARFLFMKNKVRMICDCNAKPVKVYQDEKLTFDLTLCGSTLRAPHSCHSQYMDNMSSIASLVMAVVINEGVDEEEGMEPAQQEEQQQPKRKRLWGLVVCHNTTPRFVPFPLRYACEFLMQVFAIHVNKEFELENQIQEKNILRTQTLLCDMLLRDAPLGIVTQNPNIMDLVKCDGAALLYNNKIWRLGLTPTDSQMRDIFVWLSEYHMDSTGLSTDSLYDAGYPGALALGDVVCGMAAVRINPKDMLFWFRSHTAAEVRWGGAKHDP

SEQ ID NO: 17287 - protein, 336 aa, Manglietia aromatica
KAIARLQALSSGSMEKLVDTVVQEVFELTGYDRVMAYKFHEDDHGEVISEITKPGLEPYLGLHYPATDIPQAARFLFMKNKVRMICDCNAKPVKVYQDEKLTFDLTLCGSTLRAPHSCHSQYMDNMSSIASLVMAVVINEGVDEEEGMEPAQQEQQQSKRKRLWGLVVCHNTTPRFVPFPLRYACEFLMQVFAIHVNKEFELENQIQEKNILRTQTLLCDMLLRDAPLGIVTQNPNIMDLVKCDGAALLYNNKIWRLGFTPTDSQMRDISVWLSEYHMDSTGLSTDSLYDAGYPGALALGDVVCGMAAVRINPKDMLFWFRSHTAAEVRWGGAKHD

SEQ ID NO: 17288 - protein, 350 aa, Manglietia conifera
KAIARLQALSSGSMEKLVDTVVQEVFELTGYDRVMAYKFHEDDHGEVISEITKPGLEPYLGLHYPATDIPQAARFLFMKNKVRMICDCNAKPVKVYQDEKLTFDLTLCGSTLRAPHSCHSQYMDNMSSIASLVMAVVINEGVDEEEGMEPAQQEQQQSKRKRLWGLVVCHNTTPRFVPFPLRYACEFLMQVFAIHVNKEFELENQIQEKNILRTQTLLCDMLLRDAPLGIVTQNPNIMDLVKCDGAALLYNNKIWRLGFTPTDSQMRDISVWLSEYHMDSTGLSTDSLYDAGYPGALALGDVVCGMAAVRINPKDMLFWFRSHTAAEVRWGGAKHDPSDKDDGRRMHPRS

SEQ ID NO: 17289 - protein, 335 aa, Manglietia pachyphylla
TVVQEVFELTGYDRVMAYKFHEDDHGEVISEITKPGLEPYLGLHYPATDIPQAARFLFMKNKVRMICDCNAKPVKVYQDEKLTFDLTLCGSTLRAPHSCHSQYMDNMSSIASLVMAVVINEGVDEEEGMEPAQQEQQQSKRKRLWGLVVCHNTTPRFVPFPLRYACEFLMQVFAIHVNKEFELENQIQEKNILRTQTLLCDMLLRDAPLGIVTQNPNIMDLVKCDGAALLYNNKIWRLGFTPTDSQMRDISVWLSEYHMDSTGLSTDSLYDAGYPGALALGDVVCGMAAVRINPKDMLFWFRSHTAAEVRWGGAKHDPSDKDDGRRMHPRSSFKA

SEQ ID NO: 17290 - protein, 337 aa, Manglietia decidua
KAIARLQALSSGSMEKLVDTVVQEVFELTGYDRVMAYKFHEDDHGEVISEITKPGLEPYLGLHYPATDIPQAARFLFMKNKVRMICDCNAKPVKVYQDEKLTFDLTLCGSTLRAPHSCHSQYMDNMSSIASLVMAVVINEGVDEEEGMEPAQQEQQQSKRKRLWGLVVCHNTTPRFVPFPLRYACEFLMQVFAIHVNKEFELENQIQEKNILRTQTLLCDMLLRDAPLGIVTQNPNIMDLVKCDGAALLYNNKIWRLGLTPTDSQMRDISVWLSEYHMDSTGLSTDSLYDAGYPGALALGDVVCGMAAVRINPKDMLFWFRSHTAAEVRWGGAKHDP

SEQ ID NO: 17291 - protein, 316 aa, Manglietia fordiana
  misc_feature (279)..(279): Xaa can be any naturally occurring amino acid
  unsure (1)..(316): unsure at all Xaa locations
VVQEVFELTGYDRVMAYKFHEDDHGEVISEITKPGLEPYLGLHYPATDIPQAARFLFMKNKVRMICDCNAKPVKVYQDEKLTFDLTLCGSTLRAPHSCHSQYMDNMSSIASLVMAVVINEGVDEEEGMEPAQQEQQQSKRKRLWGLVVCHNTTPRFVPFPLRYACEFLMQVFAIHVNKEFELENQIQEKNILRTQTLLCDMLLRDAPLGIVTQNPNIMDLVKCDGAALLYNNKIWRLGFTPTDSQMRDISVWLSEYHMDSTGLSTDSLYDAGYPGALAXGDVVCGMAAVRINPKDMLFWFRSHTAAEVRWGGAKHD

SEQ ID NO: 17292 - protein, 303 aa, Manglietia grandis
TVVQEVFELTGYDRVMAYKFHEDDHGEVISEITKPGLEPYLGLHYPATDIPQAARFLFMKNKVRMICDCNAKPVKVYQDEKLTFDLTLCGSTLRAPHSCHSQYMDNMSSIASLVMAVVINEGVDEEEGMEPAQQEQQQSKRKRLWGLVVCHNTTPRFVPFPLRYACEFLMQVFAIHVNKEFELENQIQEKNILRTQTLLCDMLLRDAPLGIVTQNPNIMDLVKCDGAALLYNNKIWRLGFTPTDSQMRDISVWLSEYHMDSTGLSTDSLYDAGYPGALALGDVVCGMAAVRINPKDMLFWFRS

SEQ ID NO: 17293 - protein, 305 aa, Manglietia hebecarpa
  misc_feature (131)..(131): Xaa can be any naturally occurring amino acid
  misc_feature (278)..(278): Xaa can be any naturally occurring amino acid
  unsure (1)..(305): unsure at all Xaa locations
VDTVVQEVFELTGYDRVMAYKFHEDDHGEVISEITKPGLEPYLGLHYPATDIPQAARFLFMKNKVRMICDCNAKPVKVYQDEKLTFDLTLCGSTLRAPHSCHSQYMDNMSSIASLVMAVVINEGVDEEEGXEPAQQEQQQSKRKRLWGLVVCHNTTPRFVPFPLRYACEFLMQVFAIHVNKEFELENQIQEKNILRTQTLLCDMLLRDAPLGIVTQNPNIMDLVKCDGAALLYNNKIWRLGFTPTDSQMRDISVWLSEYHMDSTGLSTDSLYDAGYPXALALGDVVCGMAAVRINPKDMLFWFRS

SEQ ID NO: 17294 - protein, 355 aa, Manglietia insignis
KAIARLQALSSGSMEKLVDTVVQEVFELTGYDRVMAYKFHEDDHGEVISEITKPGLEPYLGLHYPATDIPQAARFLFMKNKVRMICDCNAKPVKVYQDEKLTFDLTLCGSTLRAPHSCHSQYMDNMSSIASLVMAVVINEGVDEEEGMEPAQQEQQQSKRKRLWGLVVCHNTTPRFVPFPLRYACEFLMQVFAIHVNKEFELENQIQEKNILRTQTLLCDMLLRDAPLGIVTQNPNIMDLVKCDGAALLYNNKIWRLGSTPTDSQMRDISVWLSEYHMDSTGLSTDSLYDAGYPGALALGDVVCGMAAVRINPKDMLFWFRSHTAAEVRWGGAKHDPSDKDDGRRMHPRSSFKAS

SEQ ID NO: 17295 - protein, 355 aa, Michelia wilsonii
KAIARLQALSGGSMEKLVDTVVQEVFELTGYDRVMAYKFHEDDHGEVISEITKPGLEPYLGLHYPATDIPQAARFLFMKNKVRMICDCNAKPVKVYQDEKLTFDLTLCGSTLRAPHSCHSQYMENMSSIASLVMAVVINEGVDEEEGMEPAQQEQQQLKRKRLWGLVVCHNTTPRFVPFPLRYACEFLMQVFAIHVNKEFELENQIQEKNILRTQTLLCDMLLRDAPLGIVTQNPNIMDLVKCDGAALLYNNKIWRLGSTPTDSQMHDISVWLSEYHTDSTGLSTDSLYDAGYPGALALGDVVCGMAAVRINPKDMLFWFRSHTAAEVRWGGAKHDPSDKDDGRRMHPRSSFKAS

SEQ ID NO: 17296 - protein, 316 aa, Michelia chapensis
  misc_feature (259)..(259): Xaa can be any naturally occurring amino acid
  unsure (1)..(316): unsure at all Xaa locations
TVVQEVFELTGYDRVMAYKFHEDDHGEVISEITKPGLEPYLGLHYPATDIPQAARFLFMKNKVRMICDCNAKPVKVYQDEKLTFDLTLCGSTLRAPHSCHSQYMENMSSIASLVMAVVINEGVDEEEGMEPAQQEQQQLKRKRLWGLVVCHNTTPRFVPFPLRYACEFLMQVFAIHVNKEFELENQIQEKNILRTQTLLCDMLLRDAPLGIVTQNPNIMDLVKCDGAALLYNNKIWRLGSTPTDSQMRDISVWLSEYHXDSTGLSTDSLYDAGYPGALALGDVVCGMAAVRINPKDMLFWFRSHTAAEVRWGGAKH

SEQ ID NO: 17297 - protein, 334 aa, Michelia doltsopa
IARLQALSGGSMEKLVDTVVQEVFELTGYDRVMAYKFHEDDHGEVISEITKPGLEPYLGLHYPATDIPQAARFLFMKNKVRMICDCNAKPVKVYQDEKLTFDLTLCGSTLRAPHSCHSQYMENMSSIASLVMAVVINEGVDEEEGMEPAQQEQQQLKRKRLWGLVVCHNTTPRFVPFPLRYACEFLMQVFAIHVNKEFELENQIQEKNILRTQTLLCDMLLRDAPLGIVTQNPNIMDLVKCDGAALLYNNKIWRLGSTPTDSQMRDISVWLSEYHTDSTGLSTDSLYDAGYPGALALGDVVCGMAAVRINPKDMLFWFRSHTAAEVRWGGAKHD

SEQ ID NO: 17298 - protein, 304 aa, Michelia cavaleriei
  misc_feature (244)..(244): Xaa can be any naturally occurring amino acid
  unsure (1)..(304): unsure at all Xaa locations
DTVVQEVFELTGYDRVMAYKFHEDDHGEVISEITKPGLEPYLGLHYPATDIPQAARFLFMKNKVRMICDCNAKPVKVYQDEKLTFDLTLCGSTLRAPHSCHSQYMENMSSIASLVMAVVINEGVDEEEGMEPAQQEQQQLKRKRLWGLVVCHNTTPRFVPFPLRYACEFLMQVFAIHVNKEFELENQIQEKNILRTQTLLCDMLLRDAPLGIVTQNPNIMDLVKCEGAALLYNNKIWRLGLTPXDSQMRDISVWLSEYHTDSTGLSTDSLYDAGYPGALALGDVVCGMAAVRINAKDMLFWFRS

SEQ ID NO: 17299 - protein, 318 aa, Michelia foveolata
  misc_feature (243)..(243): Xaa can be any naturally occurring amino acid
  unsure (1)..(318): unsure at all Xaa locations
TVVQEVFELTGYDRVMAYKFHEDDHGEVISEITKPGLEPYLGLHYPATDIPQAARFLFMKNKVRMICDCNAKPVKVYQDEKLTFDLTLCGSTLRAPHSCHSQYMENMSSIASLVMAVVINEGVDEEEGMEPAQQEQQQLKRKRLWGLVVCHNTTPRFVPFPLRYACEFLMQVFAIHVNKEFELENQIQEKNILRTQTLLCDMLLRDAPLGIVTQNPNIMDLVKCEGAALLYNNKIWRLGLTPXDSQMRDISVWLSEYHTDSTGLSTDSLYDAGYPGALALGDVVCGMAAVRINAKDMLFWFRSHTAAEVRWGGAKHDP

SEQ ID NO: 17300 - protein, 337 aa, Michelia lacei
KAIARLQALSGGSMEKLVDTVVQEVFELTGYDRVMAYKFHEDDHGEVISEITKPGLEPYLGLHYPATDIPQAARFLFMKNKVRMICDCNAKPVKVYQDEKLTFDLTLCGSTLRAPHSCHSQYMENMSSIASLVMAVVINEGVDEEEGMEPAQQEQQQLKRKRLWGLVVCHNTTPRFVPFPLRYACEFLMQVFAIHVNKEFELENQIQEKNILRTQTLLCDMLLRDAPLGIVTQNPNIMDLVKCDGAALLYNNKIWRLGSTPTDSQMRDISVWLSEYHTDSTGLSTDSLYDAGYPGALALGDVVCGMAAVRINPKDMLFWFRSHTAAEVRWGGAKHDP

SEQ ID NO: 17301 - protein, 306 aa, Michelia cavaleriei
DRVMAYKFHEDDHGEVISEITKPGLEPYLGLHYPATDIPQAARFLFMKNKVRMICDCNAKPVKVYQDEKLTFDLTLCGSTLRAPHSCHSQYMENMSSIASLVMAVVINEGVDEEEGMEPAQQEQQQLKRKRLWGLVVCHNTTPRFVPFPLRYACEFLMQVFAIHVNKEFELENQIQEKNILRTQTLLCDMLLRDAPLGIVTQNPNIMDLVKCEGAALLYNNKIWRLGLTPTDSQMRDISVWLSEYHTDSTGLSTDSLYDAGYPGALALGDVVCGMAAVRINAKDMLFWFRSHTAAEVRWGGAKHDP

SEQ ID NO: 17302 - protein, 337 aa, Michelia masticata
  misc_feature (96)..(96): Xaa can be any naturally occurring amino acid
  unsure (1)..(337): unsure at all Xaa locations
KAIARLQALSGGSMEKLVDTVVQEVFELTGYDRVMAYKFHEDDHGEVISEITKPGLEPYLGLHYPATDIPQAARFLFMKNKVRMICDCNAKPVKVXQDEKLTFDLTLCGSTLRAPHSCHSQYMENMSSIASLVMAVVINEGVDEEEGMEPAQQEQQQLKRKRLWGLVVCHNTTPRFVPFPLRYACEFLMQVFAIHVNKEFELENQIQEKNILRTQTLLCDMLLRDAPLGIVTQNPNIMDLVKCDGAALLYNNKIWRLGSTPTDSQMRDISVWLSEYHTDSTGLSTDSLYDAGYPGALALGDVVCGMAAVRINPKDMLFWFRSHTAAEVRWGGAKHDP

SEQ ID NO: 17303 - protein, 355 aa, Magnolia elegans
  misc_feature (151)..(151): Xaa can be any naturally occurring amino acid
  unsure (1)..(355): unsure at all Xaa locations
KAIARLQALSSGSMEKLVDTVVQEVFELTGYDRVMAYKFHEDDHGEVISEITKPGLEPYLGLHYPATDIPQAARFLFMKNKVRMICDCNAKPVKVYQDEKLTFDLTLCGSTLRAPHSCHSQYMENMSSIASLVMAVVINEGVDEEEGMEPXQQEQQQLKRKRLWGLVVCHNTTPRFVPFPLRYACEFLMQVFAIHVNKEFELENQIQEKNILRTQTLLCDMLLRDAPLGIMTQNPNIMDLVKCDGAALLYNNKIWRLGLTPTDSQMRDISVWLSEYHMDSTGLSTDSLYDAGYPGALALGDVVCGMAAVRINPKDMLFWFRSHTAAEVRWGGAKHDPSDKDDGRRMHPRSSFKAS

SEQ ID NO: 17304 - protein, 318 aa, Elmerrillia ovalis
TVVQEVFELTGYDRVMAYKFHEDDHGEVISEITKPGLEPYLGLHYPATDIPQAARFLFMKNKVRMICDCNAKPVKVCQDEKLTFDLTLCGSTLRAPHSCHSQYMENMSSIASLVMAVVINEGVDEEEGMEPAQQEQQQQLKRKRLWGLVVCHNTTPRFVPFPLRYACEFLMQVFAIHVNKEFELENQIQEKNILRTQTLLCDMLLRDAPLGIVTQNPNIMDLVKCEGAALLYNNKIWRLGLTPTDSQIRDISVWLSEYHTDSTGLSTDSLYDAGYPGALALGDVVCGMAAVRINPKDMLFWFRSHTAAEVRWGGAKHD

SEQ ID NO: 17305 - protein, 355 aa, Magnolia acuminata
  misc_feature (338)..(338): Xaa can be any naturally occurring amino acid
  misc_feature (340)..(341): Xaa can be any naturally occurring amino acid
  unsure (1)..(355): unsure at all Xaa locations
KAIARLQALSSGSMEKLVDTVVQEVFELTGYDRVMAYKFHEDDHGEVISEITKPGLEPYLGLHYPATDIPQAARFLFMKNKVRMICDCNAKPVKVYQDEKLTFDLTLCGSTLRAPHSCHSQYMENMSSIASLVMAVVINEGVDEEEGMEPAQEEQQQLKRKRLWGLVVCHNTTPRFVPFPLRYACEFLMQVFAIHVNKEFELENQIQEKNILRTQTLLCDMLLRDAPLGIVTQNPNIMDLVKCDGAALLYNNKIWRLGLTPTDSQMRDISVWLSEYHMDSTGLSTDSLYDAGYPGALALGDVVCGMAAVRINPKDMLFWFRSHTAAEVRWGGAKHDPXDXXDGRRMHPRSSFKAS

SEQ ID NO: 17306 - protein, 312 aa, Magnolia coco
  misc_feature (297)..(299): Xaa can be any naturally occurring amino acid
  unsure (1)..(312): unsure at all Xaa locations
DHGEVISEITKPGLEPYLGLHYPATDIPQAARFLFMKNKVRMICDCNAKPVKVYQDEKLTFDLTLCGSTLRAPHSCHSQYMDNMSSIASLVMAVVINEGVDEEEGMEPAQQEQQQSKRKRLWGLVVCHNTTPRFVPFPLRYACEFLMQVFAIHVNKEFELENQIQEKNILRTQTLLCDMLLRDAPLGIVTQNPNIMDLVKCDGAALLYNNKIWRLGLTPTDSQMRDISVWLSEYHMDSTGLSTDSLYDAGYPGALALGDVVCGMAAVRINLKDMLFWFRSHTAAEVRWGGAKHDPSXXXDGRRMHPRSSFKA

SEQ ID NO: 17307 - protein, 313 aa, Magnolia dawsoniana
VVQEVFELTGYDRVMAYKFHEDDHGEVISEITKPGLEPYLGLHYPATDIPQAARFLFMKNKVRMICDCNAKPVKVYQDEKLTFDLTLCGSTLRAPHSCHSQYMENMSSIASLVMAVVINEGVDEEEGMEPAQQEQQQLKRKRLWGLVVCHNTTPRFVPFPLRYACEFLMQVFAIHVNKEFELENQIQEKNILRTQTLLCDMLLRDAPLGIVTQNPNIMDLVKCDGAALLYNNKIWRLGLTPTDSQMRDISVWLSEYHMDSTGLSTDSLYDAGYPGALALGDVVCGMAAVRINPKDMLFWFRSHTAAEVRWGGA

SEQ ID NO: 17308 - protein, 304 aa, Magnolia fraseri var. fraseri
VMAYKFHEHDHGEVISEITKPGLEPYLGLHYPATDIPQAARFLFMKNKVRMICDCNAKPVKVYQDEKLTFDLTLCGSTLRAPHSCHSQYMENMSSIASLVMAVVINEGVDEEEGMEPAQQEQQQLKRKRLWGLVVCHNTTPRFVPFPLRYACEFLMQVFAIHVNKEFELENQIQEKNILRTQTLLCDMLLRDAPLGIVTQNPNIMDLVKCDGAALLYNNKIWRLGLTPTDSQMRDISVWLSEYHTDSTGLSTDSLHDAGYPGALALGDVVCGMAAVRINPKDMLFWFRSHTAAEVRWGGAKHDP

SEQ ID NO: 17309 - protein, 318 aa, Magnolia ashei
DTVVQEVFELTGYDRVMAYKFHEDDHGEVISEITKPGLEPYLGLHYPATDIPQAARFLFMKNKVRMICDCNAKPVKVYQDEKLTFDLTLCGSTLRAPHSCHSQYMENMSSIASLVMAVVINEGVDEEEGMEPAQQEQQQPKRKRLWGLVVCHNTTPRFVPFPLRYACEFLMQVFAIHVNKEFELENQIQEKNILRTQTLLCDMLLRDAPLGIVTQNPNIMDLVKCDGAALLYNNKIWRLGLTPTDSQMRDISVWLSEYHTDSTGLSTDSLYDAGYPGALAIGDVVCGMAAVRINPKDMLFWFRSHTAAEVRWGGAKHD

SEQ ID NO: 17310 - protein, 337 aa, Magnolia dealbata
  misc_feature (320)..(323): Xaa can be any naturally occurring amino acid
  unsure (1)..(337): unsure at all Xaa locations
DTVVQEVFELTGYDRVMAYKFHEDDHGEVISEITKPGLEPYLGLHYPATDIPQAARFLFMKNKVRMICDCNAKPVKVYQDEKLTFDLTLCGSTLRAPHSCHSQYMENMSSIASLVMAVVINEGVDEEEGMEPAQQEQQQPKRKRLWGLVVCHNTTPRFVPFPLRYACEFLMQVFAIHVNKEFELENQIQEKNILRTQTLLCDMLLRDAPLGIVTQNPNIMDLVKCDGAALLYNNKIWRLGLTPTDSQMRDISVWLSEYHTDSTGLSTDSLYDAGYPGALAIGDVVCGMAAVRINPKDMLFWFRSHTAAEVRWGGAKHDPXXXXDGRRMHPRSSFKAS

SEQ ID NO: 17311 - protein, 311 aa, Magnolia liliiflora
TVVQEVFELTGYDRVMAYKFHEDDHGEVISEITKPGLEPYLGLHYPATDIPQAARFLFMKNKVRMICDCNAKPVKVYQDEKLTFDLTLCGSTLRAPHSCHSQYMENMSSIASLVMAVVINEGVDEEEGMEPAQQEQQQLKRKRLWGLVVCHNTTPRFVPFPLRYACEFLMQVFAIHVNKEFELENQIQEKNILRTQTLLCDMLLRDAPLGIVTQNPNIMDLVKCDGAALLYNNKIWRLGLTPTDSQMRDISVWLSEYHMDSTGLSTDSLYDAGYPGALALGDVVCGMAAVRINPKDMLFWFRSHTAAEVRW

SEQ ID NO: 17312 - protein, 316 aa, Magnolia rostrata
VVQEVFELTGYDRVMAYKFHEDDHGEVISEITKPGLEPYLGLHYPATDIPQAARFLFMKNKVRMICDCNAKPVKVYQDEKLTFDLTLCGSTLRAPHSCHSQYMDNMSSIASLVMAVVINEGVDEEEGMEPAQQEQQQSKRKRLWGLVVCHNTTPRFVPFPLRYACEFLMQVFAIHVNKEFELENQIQEKNILRTQTLLCDMLLRDAPLGIVTQNPNIMDLVKCDGAALLYNNKIWRLGLTPTDSQMRDISVWLSEYHMDSTGLSTDSLYDAGYPGALALGDVVCGMAAVRINPKDMLFWFRSHTAAEVRWGGAKHD

SEQ ID NO: 17313 - protein, 307 aa, Magnolia salicifolia
EVFELTGYDRVMAYKFHEDDHGEVISEITKPGLEPYLGLHYPATDIPQAARFLFMKNKVRMICDCNAKPVKVYQDEKLTFDLTLCGSTLRAPHSCHSQYMENMSSIASLVMAVVINEGVDEEEGMEPAQQEQQQLKRKRLWGLVVCHNTTPRFVPFPLRYACEFLMQVFAIHVNKEFELENQIQEKNILRTQTLLCDMLLRDAPLGIVTQNPNIMDLVKCDGAALLYNNKIWRLGLTPTDSQMRDISVWLSEYHMDSTGLSTDSLYDAGYPGALALGDVVCGMAAVRINPKDMLFWFRSHTAAEVRW

SEQ ID NO: 17314 - protein, 323 aa, Magnolia sieboldii subsp. sinensis
LVDTVVQEVFELTGYDRVMAYKFHEDDHGEVISEITKPGLEPYLGLHYPATDIPQAARFLFMKNKVRMICDCNAKPVKVYQDEKLTFDLTLCGSTLRAPHSCHSQYMDNMSSIASLVMAVVINEGVDEEEGMEPAQQEQQQSKRKRLWGLVVCHNTTPRFVPFPLRYACEFLMQVFAIHVNKEFELENQIQEKNILRTQTLLCDMLLRDAPLGIVTQNPNIMDLVKCDGAALLYNNKIWRLGLTPTDSQMRDISVWLSEYHMDSTGLSTDSLYDAGYPGALALGDVVCGMAAVRINPKDMLFWFRSHTAAEVRWGGAKHDPSD

SEQ ID NO: 17315 - protein, 355 aa, Magnolia tamaulipana
  misc_feature (339)..(339): Xaa can be any naturally occurring amino acid
  unsure (1)..(355): unsure at all Xaa locations
KAIARLQALSSGSMEKLIDTVVQEVFELTGYDRVMAYKFHEDDHGEVISEITKPGLEPYLGLHYPATDIPQAARFLFMKNKVRMICDCNAKPVKVYQDEKLTFDLTLCGSTLRAPHSCHSQYMENMSSIASLVMAVVINEGVDEEEGMEPAQQEQQQPKRKRLWGLVVCHNTTPRFVPFPLRYACEFLMQVFAIHVNKEFELENQIQEKNILRTQTLLCDMLLRDAPLGIVTQNPNIMDLVKCDGAALLYNNKIWRLGSTPTDSQMRDISVWLSEYHMDSTGLSTDSLYDAGYPGALALGDVVCGMAAVRINPKDMLFWFRSHTAAEVRWGGAKHDPSXKDDGRRMHPRSSFKAS

SEQ ID NO: 17316 - protein, 317 aa, Manglietia moto
TVVQEVFELTGYDRVMAYKFHEDDHGEVISEITKPGLEPYLGLHYPATDIPQAARFLFMKNKVRMICDCNAKPVKVYQDEKLTFDLTLCGSTLRAPHSCHSQYMDNMSSIASLVMAVVINEGVDEEEGMEPAQQEQQQSKRKRLWGLVVCHNTTPRFVPFPLRYACEFLMQVFAIHVNKEFELENQIQEKNILRTQTLLCDMLLRDAPLGIVTQNPNIMDLVKCDGAALLYNNKIWRLGFTPTDSQMRDISVWLSEYHMDSTGLSTDSLYDAGYPGALALGDVVCGMAAVRINPKDMLFWFRSHTAAEVRWGGAKHD

SEQ ID NO: 17317 - protein, 316 aa, Manglietia fordiana
DTVVQEVFELTGYDRVMAYKFHEDDHGEVISEITKPGLEPYLGLHYPATDIPQAARFLFMKNKVRMICDCNAKPVKVYQDEKLTFDLTLCGSTLRAPHSCHSQYMDNMSSIASLVMAVVINEGVDEEEGMEPAQQEQQQSKRKRLWGLVVCHNTTPRFVPFPLRYACEFLMQVFAIHVNKEFELENQIQEKNILRTQTLLCDMLLRDAPLGIVTQNPNIMDLVKCDGAALLYNNKIWRLGSTPTDSQMRDISVWLSEYHMDSTGLSTDSLYDAGYPGALALGDVVCGMAAVRINPKDMLFWFRSHTAAEVRWGGAK

SEQ ID NO: 17318 - protein, 301 aa, Michelia alba
EVFELTGYDRVMAYKFHEDDHGEVISEITKPGLEPYLGLHYPATDIPQAARFLFMKNKVRMICDCNAKPVKVYQDEKLTFDLTLCGSTLRAPHSCHSQYMENMSSIASLVMAVVINEGVDEEEGMEPAQQEQQQLKRKRLWGLVVCHNTTPRFVPFPLRYACEFLMQVFAIHVNKEFELENQIQEKNILRTQTLLCDMLLRDAPLGIVTQNPNIMDLVKCEGAALLYNNKIWRLGLTPTDSQMRDISVWLSEYHTDSTGLSTDSLYDAGYPGALALGDVVCGMAAVRINAKDMLFWFRSHT

SEQ ID NO: 17319 - protein, 319 aa, Michelia champaca
TVVQEVFELTGYDRVMAYKFHEDDHGEVISEITKPGLEPYLGLHYPATDIPQAARFLFMKNKVRMICDCNAKPVKVYQDEKLTFDLTLCGSTLRAPHSCHSQYMENMSSIASLVMAVVINEGVDEEEGMEPAQQEQQQLKRKRLWGLVVCHNTTPRFVPFPLRYACEFLMQVFAIHVNKEFELENQIQEKNILRTQTLLCDMLLRDAPLGIVTQNPNIMDLVKCDGAALLYNNKIWRLGSTPTDSQMRDISVWLSEYHTDSTGLSTDSLYDAGYPGALALGDVVCGMAAVRINPKDMLFWFRSHTAAEVRWGGAKHDPS

SEQ ID NO: 17320 - protein, 355 aa, Magnolia sprengeri
  misc_feature (340)..(341): Xaa can be any naturally occurring amino acid
  unsure (1)..(355): unsure at all Xaa locations
KAIARLQALSSGSMEKLVDTVVQEVFELTGYDRVMAYKFHEDDHGEVISEITKPGLEPYLGLHYPATDIPQAARFLFMKNKVRMICDCNAKPVKVYQDEKLTFDLTLCGSTLRAPHSCHSQYMENMSSIASLVMAVVINEGVDEEEGMEPAQQEQQQLKRKRLWGLVVCHNTTPRFVPFPLRYACEFLMQVFAIHVNKEFELENQIQEKNILRTQTLLCDMLLRDAPLGIVTQNPNIMDLVKCDGAALLYNNKIWRLGLTPTDSQMRDISVWLSEYHMDSTGLSTDSLYDAGYPGALALGDVVCGMAAVRINPKDMLFWFRSHTAAEVRWGGAKHDPSDXXDGRRMHPRSSFKAS

SEQ ID NO: 17321 - protein, 321 aa, Magnolia virginiana
  misc_feature (135)..(135): Xaa can be any naturally occurring amino acid
  unsure (1)..(321): unsure at all Xaa locations
LVDTVVQEVFELTGYDRVMAYKFHEDDHGEVISEITKPGLEPYLGLHYPATDIPQAARFLFMKNKVRMICDCNAKPVKVYQDEKLTFDLTLCGSTLRAPHSCHSQYMENMSSIASLVMAVVINEGVDEEEGMEPXQQEQQQPKRKRLWGLVVCHNTTPRFVPFPLRYACEFLMQVFAIHVNKEFELENQIQEKNILRTQTLLCDMLLRDAPLGIVTQNPNIMDLVKCDGAALLYNNKIWRLGLTPTDSQMRDISVWLSEYHMDSTGLSTDSLYDAGYPGALALGDVVCGMAAVRINPKDMLFWFRSHTAAEVRWGGAKHDP

SEQ ID NO: 17322 - protein, 320 aa, Magnolia tripetala
VDTVVQEVFELTGYDRVMAYKFHEDDHGEVISEITKPGLEPYLGLHYPATDIPQAARFLFMKNKVRMICDCNAKPVKVYQDEKLTFDLTLCGSTLRAPHSCHSQYMDNMSSIASLVMAVVINEGVDEEEGMEPAQQEQQQSKRKRLWGLVVCHNTTPRFVPFPLRYACEFLMQVFAIHVNKEFELENQIQEKNILRTQTLLCDMLLRDAPLGIVTQNPNIMDLVKCDGAALLYNNKIWRLGLTPTDSQMRDISVWLSEYHMDSTGLSTDSLYDAGYPGALALGDVVCGMAAVRINPKDMLFWFRSHTAAEVRWGGAKHDP

SEQ ID NO: 17323 - protein, 322 aa, Magnolia delavayi
LVDTVVQEVFELTGYDRVMAYKFHEDDHGEVISEITKPGLEPYLGLHYPATDIPQAARFLFMKNKVRMICDCNAKPVKVYQDEKLTFDLTLCGSTLRAPHSCHSQYMDNMSSIASLVMAVVINEGVDEEEGMEPAQQEEQQQPKRKRLWGLVVCHNTTPRFVPFPLRYACEFLMQVFAIHVNKEFELENQIQEKNILRTQTLLCDMLLRDAPLGIVTQNPNIMDLVKCDGAALLYNNKIWRLGLTPTDSQMRDIFVWLSEYHMDSTGLSTDSLYDAGYPGALALGDVVCGMAAVRINPKDMLFWFRSHTAAEVRWGGAKHDP

SEQ ID NO: 17324 - protein, 321 aa, Magnolia grandiflora
LVDTVVQEVFELTGYDRVMAYKFHEDDHGEVISEITKPGLEPYLGLHYPATDIPQAARFLFMKNKVRMICDCNAKPVKVYQDEKLTFDLTLCGSTLRAPHSCHSQYMENMSSIASLVMAVVINEGVDEEEGMEPAQQEZQQPKRKRLWGLVVCHNTTPRFVPFPLRYACEFLMQVFAIHVNKEFELENQIQEKNILRTQTLLCDMLLRDAPLGIVTQNPNIMDLVKCDGAALLYNNKIWRLGSTPTDSQMRDISVWLSEYHMDSTGLSTDSLYDAGYPGALALGDVVCGMAAVRINPKDMLFWFRSHTAAEVRWGGAKHDP

SEQ ID NO: 17325 - protein, 316 aa, Magnolia sieboldii subsp. japonica
VQEVFELTGYDRVMAYKFHEDDHGEVISEITKPGLEPYLGLHYPATDIPQAARFLFMKNKVRMICDCNAKPVKVYQDEKLTFDLTLCGSTLRAPHSCHSQYMDNMSSIASLVMAVVINEGVDEEEGMEPAQQEQQQSKRKRLWGLVVCHNTTPRFVPFPLRYACEFLMQVFAIHVNKEFELENQIQEKNILRTQTLLCDMLLRDAPLGIVTQNPNIMDLVKCDGAALLYNNKIWRLGLTPTDSQMRDISVWLSEYHMDSTGLSTDSLYDAGYPGALALGDVVCGMAAVRINPKDMLFWFRSHTAAEVRWGGAKHDP

SEQ ID NO: 17326 - protein, 323 aa, Magnolia guatemalensis
LVDTVVQEVFELTGYDRVMAYKFHEDDHGEVISEITKPGLEPYLGLHYPATDIPQAARFLFMKNKVRMICDCNAKPVKVYQDEKLTFDLTLCGSTLRAPHSCHSQYMENMSSIASLVMAVVINEGVDEEEGMEPAQQEQQQPKRKRLWGLVVCHNTTPRFVPFPLRYACEFLMQVFAIHVNKEFELENQIQEKNILRTQTLLCDMLLRDAPLGIVTQNPNIMDLVKCNGAALLYNNKIWRLGLTPTDSQMRDISVWLSEYHMDSTGLSTDSLYDAGYPGALAIGDVVCGMAAVRINPKDMLFWFRSHTAAEVRWGGAKHDPSD

SEQ ID NO: 17327 - protein, 321 aa, Magnolia sieboldii subsp. sieboldii
VDTVVQEVFELTGYDRVMAYKFHEDDHGEVISEITKPGLEPYLGLHYPATDIPQAARFLFMKNKVRMICDCNAKPVKVYQDEKLTFDLTLCGSTLRAPHSCHSQYMDNMSSIASLVMAVVINEGVDEEEGMEPAQQEQQQSKRKRLWGLVVCHNTTPRFVPFPLRYACEFLMQVFAIHVNKEFELENQIQEKNILRTQTLLCDMLLRDAPLGIVTQNPNIMDLVKCDGAALLYNNKIWRLGLTPTDSQMRDISVWLSEYHMDSTGLSTDSLYDAGYPGALALGDVVCGMAAVRINPKDMLFWFRSHTAAEVRWGGAKHDPS

SEQ ID NO: 17328 - protein, 322 aa, Magnolia yoroconte
VDTVVQEVFELTGYDRVMAYKFHEDDHGEVISEITKPGLEPYLGLHYPATDIPQAARFLFMKNKVRMICDCNAKPVKVYQDEKLTFDLTLCGSTLRAPHSCHSQYMENMSSIASLVMAVVINEGVDEEEGMEPAQQEQQQPKRKRLWGLVVCHNTTPRFVPFPLRYACEFLMQVFAIHVNKEFELENQIQEKNILRTQTLLCDMLLRDAPLGIVTQNPNIMDLVKCNGAALLYNNKIWRLGLTPTDSQMRDISVWLSEYHMDSTGLSTDSLYDAGYPGALAIGDVVCGMAAVRINPKDMLFWFRSHTAAEVRWGGAKHDPSD

SEQ ID NO: 17329 - protein, 321 aa, Magnolia wilsonii
DTVVQEVFELTGYDRVMAYKFHEDDHGEVISEITKPGLEPYLGLHYPATDIPQAARFLFMKNKVRMICDCNAKPVKVYQDEKLTFDLTLCGSTLRAPHSCHSQYMDNMSSIASLVMAVVINEGVDEEEGMEPAQQEQQQSKRKRLWGLVVCHNTTPRFVPFPLRYACEFLMQVFAIHVNKEFELENQIQEKNILRTQTLLCDMLLRDAPLGIVTQNPNIMDLVKCDGAALLYNNKIWRLGSTPTDSQMRDISVWLSEYHMDSTGLSTDSLYDAGYPGALALGDVVCGMAAVRINPKDMLFWFRSHTAAEVRWGGAKHDPSD

SEQ ID NO: 17330 - protein, 239 aa, Gossypium hirsutum
MGRGKVELKRIENKINRQVTFAKRRNGLLKKAYELSILCDAEVALIIFSNRGKLYEFSSSNSIADILERYNRCTYGALEPGQTEIETQRNYQEYLKLKAKVEVLQHSQRHFLGEDLGDLGSEELEQLERQLDLSLKKIRSLKMEHMVEQLSKLERKEEMLLETNRNLRRRLDENASTLRSTWETGEQSVPCNLQHPRFLEPLQCTTSMQISYNFPADLTHENIATTTSAPSGFIPDWML

SEQ ID NO: 17331 - protein, 542 aa, Shewanella piezotolerans WP3
MESQRNILLIGLLFVSFLLWQQWQADKAPQPVAQTQSSVAPSTVADAHSSDVPDADSALPETVTASKELITVTTDQFVLKIDPVGGDIVHSALLSHKLEQDGDDPFVLLEQTNDIYYIAQSGLIGRDGIDSSTTGRAHFDSASREYDLAGQDTLEVPLTYLAANGVTYTKLFTFYRGKHNVDVDYQINNTSDAQLQVQMYGQIKHSIKKSESSMMMPTYRGAAFSTADTRYEKYSFDDMADKNLNKSTLGGWVAMLQHYFVSAWVPPENDKNIIFSSVSAGGLANIGFRGALYDIAPGTEQSIKAQFYVGPKDQEALSALSESLNLVVDYGFLWWLAIPIHWLLMFYQSFVGNWGVAIILITLTVRGMLYPLTKAQYTSMAKMRNLQPKLADMKERFGDDRQKMGQAMMELYKKEKVNPMGGCLPILLQMPIFIALYWVLLESYELRHAPFMLWITDLSVQDPYYVMPILMGVSMFIMQKMQPMAPTMDPMQVKMMQWMPVIFTVFFLWFPAGLVLYWLVGNLVAITQQKIIYAGLEKKGLK

SEQ ID NO: 17332 - protein, 387 aa, Shewanella piezotolerans WP3
MKNAVIVDCIRTPMGRSKAGVFRNVRAETLSAELMKSLLERNPKLDPNTIEDVMWGCVQQTLEQGFNIARNAALLAGIPKQVGAVTVNRLCGSSMDALHQAARAIMTGQGDTFIVGGVEHMGHVPMNHGVDFHPGLANNVAKASGMMGLTAEMLGKMHGITREQQDAFAVRSHQRAHAATVEGRFANEIVAIEGHDADGALIKVEHDEVIRPETSMESLSGLRPAFDPANGTVTAGTSSALSDGASAMLVMEEEKAKELGLTIRARIRSMAIAGCDAAIMGYGPVPATQKALKRAGLTVDDLDVIELNEAFAAQSLPCVKDLGLMDVVDEKINLNGGAIALGHPLGCSGTRISTTLINLMEAKDAKYGLATMCIGLGQGIATIFERP

SEQ ID NO: 17333 - protein, 369 aa, Shewanella piezotolerans WP3
MQPAINLFANPSSPNRYSVNSRAAISQARDNLADLLSTDAKKIFFTSGGSEANNWAIKGVLFKHLNNPGHIITSSMEHASVLDTVRYCVEELGFSATYLQPDAAGHIKISDFESALTIDTQLVSVMYANNETGAIQPIEQLCSIAAEHKIPVHVDAVQFVGKRLIDVELLGVDYLSLSAHKFYGPKGVGCLYIKDKDAIGPLIHGGGQEFSMRSGTENLVAMSGISVAAEEANRELVYWDSHCFRLKKQMMDLLEAAPIALAFNGATDYDSALSNTLNISIDGIRGEALALRLEMLHGFIISVGSACSNNKTKQLSHVLMAMGLTEERVLGAIRVSFGCFTNAQQVSKFVDALVTEVRQLLHISGGEAL

SEQ ID NO: 17334 - protein, 557 aa, Shewanella piezotolerans WP3
MEQGQMIRGADAVIKAIAAHGVTTVFGYPGGAIMPIYDALYGSPVEHLLSRHEQGAAFAAVGYARASGKTGVCFATSGPGATNLITSLADALLDSVPVVAITGQVSTAVIGTDAFQEIDVLGMSLSCTKHSFMVTSVEELVPTLYQAFEIAASGRPGPVLVDIPKDIQIALMEYKTPLQAAMPEPEHTASQIDAAKALLAESKQPMLYVGGGVGMASAVEPLRQFITATGIPSVATLKGLGAIRYDTAGYLGMLGMHGSKAANLAVQQCDLLIVVGARFDDRVTGRLASFAENAKVLHLDIDAAELGKLRMPDVAIAGDLRQILPALSQTMQITNWQAEVAALKVQHQWRYDRPGELIYAPAMLNRLAQKLPQDSVVACDVGQHQMWVAQHMYFRRPEDHLSSAGLGTMGFGLPAAIGAKVARPNAAVVAVSGDGSFMMNVQELTTIKRKRLPVKILLVDNQKLGMVKQWQQLFFEERYSETDLSDNPDFVKMASAFDIPGRNITQASEVEAGLDEMLNSEGPFLLHVSIDDAHNVWPLVPPGASNQDMMDEMEKQT

SEQ ID NO: 17335 - protein, 561 aa, Shewanella piezotolerans WP3
MQQITLATYILTRLKELNTNHVFGIPGDYVLPFFDEILDGNHGVKHIMPRNELNGTYAADGYSKMNGFGAMVVTFGVGSLSCTNAIAGAYADDTPIMVIAGTAAVEVLTTPTERRYHHVIENNFDTNIEMFKHITCASQRLVDLSTATFDVDQILRKAMQTKKPVYLEVPYDLQNAMVDAPTRPLDLMLEQSSAVNLNAALEASVALLEKSKTRSVLTGHLLQRENMIPQGMQLVDQLNAAVATTFSCKMGDFEAHPNSIGIYMGEVSEDYTKEMMDGADVAIALGVTFNEFDTGVFTTRLGQQQDVIWVRKDYVEINGERYDMVYLRDFVPALLGAIRHIDAGELTLQARRMFAFEQKDRFTATDNELTIDRLFIQFSNYLQAGDMLYGDTGGFINASQAEFPADIVMHGCGNWGSLGAGFGMFVGANFANEQHHRRSVSIQGEGAFTMSAQDLATLIEHKKDLALFILDNSGYGAERAIHPGKERSYNDIAVWKYEKLAEALGGTEGVDVHSYVAHTEKDIDAIFKALKEPEGVNIVRVMLDPNDSATFNLRFSQLLQH

SEQ ID NO: 17336 - protein, 325 aa, Shewanella piezotolerans WP3
MVNEQQLRQWGTKVIDIEKQALDNLHQYVDSSEFAQACQLILQCTGKVIVMGMGKSGHIGNKISATLASTGTPAFFVHPGEASHGDLGVLSENDIVLAISNSGESSEILTLMPVIKRMGLPMISVTGKPDSNMAKLAQLHLCIEVPEEACPLGLAPTSSTTATLVMGDALAVALLQARGFTKDDFALSHPGGSLGRKLLLKVSDVMHSGNELPLVKHDICITDALYEISKKGLGMTAIVDAANTLVGIFTDGDLRRVIDAEVNLRTTSIADVMSKGCVTITDNVLAAEALKVMEEKNINGLIVINSKQQPVGALNMLDMVKAGVI

SEQ ID NO: 17337 - protein, 395 aa, Shewanella piezotolerans WP3
MKLGIPKESHAGESRVALIPANVARLLKKNVQVLVESNAGSKAGFTDEDYIAAGATVASREQVLSDADVITVVNAKGEQLAELKTSIKPEQIIIGMMDPLAQPKNAQAIAETGATAVALELVPRITRAQSMDILSSMATIAGYKAVLLAAHKAPRLFPMMMTAAGTLKPARAFIMGVGVAGLQACATAKRLGAVVEAYDIRPAAREQIISVGAKPVELDLEAENTETKGGYAAEQSDDFLKRQQQAMANVLAQQDIVITTAAIPGRKAPILITKEMVDGMKSGTIIVDLAAETGGNCELTEVDKEVIYKGVTILGPSNVPGSAANHASQMYGTNIENLLKLIVDNDGVLHLDFDDEIVHDTVVAHKGEVASARLRDLLGLPAQEPTPEAATPEAK

SEQ ID NO: 17338 - protein, 70 aa, Shewanella piezotolerans WP3
MSNSTTGIVKWFNEDKGFGFITQDNGGADVFVHFRAIASDGFKTLAEGQKVSFDLEQGQKGPQAANVVAI

SEQ ID NO: 17339 - protein, 415 aa, Shewanella piezotolerans WP3
MGILESTPIDVYLGVSMFTAIVLVLVLVILFAKSKLVPSGDVTIGINDDADKAIKTAAGGKLLGALAESGIFVSSACGGGGTCGQCKVHVKSGGGDILPTEMDHISKGEAREGCRLSCQVNVKADMEIELEEEIFGVKKWECEVISNDSKATFIKELKLQIPDGDSVPFRAGGYIQIEAPAHHVKYADYDIPAEYRGDWEHFGFFNLESQVDDETIRAYSMANYPLEEGIIMLNVRIASPPPRNLSLPCGKMSSYIFSLKAGDKVTISGPFGEFFAKDTDAEMVFVGGGAGMAPMRSHIFDQLKRLNSKRKMSFWYGARSSREMFYVEDFDGLAADNDNFQWHVALSDPQPEDNWDGYTGFIHNVLYENYLRDHEAPEDCEFYMCGPPMMNAAVISMLKDLGVEDENILLDDFGG

SEQ ID NO: 17340 - protein, 641 aa, Shewanella piezotolerans WP3
MGRIIGIDLGTTNSCVAVLDGDKARVIENAEGDRTTPSIIAYTADETLVGQPAKRQAVTNPTNTVFAIKRLIGRRFKDDEVQRDVDIMPFKIIGADNGDAWVEAQGKKMAPPQISAEILKKMKKTAEDYLGEEVTEAVITVPAYFNDSQRQATKDAGRIAGLEVKRIINEPTAAALAYGIDKKQGDNIVAVYDLGGGTFDISIIEIDSVDGEQTFEVLATNGDTHLGGEDFDNRLINYLADEFKKEQSLDLRNDPLAMQRLKEAAEKAKIELSSTTQTEVNLPYITADATGPKHLVVKITRAKLESLVEDLITRSLEPLKVALADADLSVSDINEVILVGGQTRMPKVREEVSSFFGKELRQDVNPDEAVAIGAAVQAGVLSGDVKDVLLLDVTPLSLGIETMGSVMTKLIEKNTTIPTKASQTFSTADDNQAAVTIHVLQGERKQSSGNKSLGQFNLEGIEPAPRGMPQIEVAFDIDADGILHVSATDKKTGKAQNITIKASSGLSDEEVEAMVRDAEAHADEDAKFEELVTARNQADGMVHATKKQIEEAGEELPADEKEKIEAAMANVDTATKGSDKEAIEKATQELMEASSKLMEIAQAKAQAQQGQPEGAGEAQQDAHAADDVVDAEFEEVKDDKK

SEQ ID NO: 17341 - protein, 647 aa, Shewanella piezotolerans WP3
MAKNLILWVVIAVVLMSVFQGYSPSSSNKQKMDYSTFLDDVKAGQVSTVEVKSDQRTIEGTKRTGEKFVTIMPMPDLDLINDLDRKGIMMKGQEAEESGFLTQIFISWFPMLLLIGVWIFFMRQMQGGGGKGAMSFGKSKAKLMSEDQIKTTFADVAGCDEAKEDVKELVDYLKEPTRFQKLGGRIPTGVLLVGPPGTGKTLIAKAIAGEAKVPFFTISGSDFVEMFVGVGASRVRDMFEQAKKSAPCIIFIDEIDAVGRQRGAGVGGGHDEREQTLNQMLVEMDGFEGNEGVIVIAATNRPDVLDAALLRPGRFDRQVVVGLPDVRGREQILKVHMRKVPLADGVKASVIARGTPGFSGADLANLVNEAALFAARNSRRVVGMEEFESAKDKIMMGAERRTMVMSEEEKEMTAYHEAGHAIVGCLVPEHDPVHKVTIIPRGRALGVTFFLPEADAISQSRRKLESQISVAYGGRLAEEIIYGTEKVSTGASQDIKYATSIARNMVTQWGFSEKLGPVLYAEDENEVFLGRSMGKSQHMSDDTARIIDAEVKMLIDSNYERAQKYLTENMDILHAMKDALMKYETIDSNQIDDLMERREVRMPAEWEKDQQSDDNDSNGASSEKKENTDDTEERKTDVTDADESPAK

SEQ ID NO: 17342 - protein, 404 aa, Shewanella piezotolerans WP3
MKLPIYLDYAATTPVDPRVAEKMMQCMTMDGIFGNPASRSHRYGWQAEEAVDIARNQIAELINADPREIVFTSGATESDNLAIKGVAHFYQKKGKHIITSKTEHKAVLDTCRQLEREGYEVTYLQPEANGLIPVAMIEAAMREDTLLVSIMQVNNEIGVIQDIDAIGELCRSRKIVFHVDAAQSAGKMPIDVQKTKVDLMSISAHKMYGPKGIGALYVSRKPRIRLEAAMHGGGHERGMRSGTLATHQIVGFGEAAAIAKTDMDSDNERIRRLRDKLWNGINHIEETYINGDMEQRHCGSLNVSFNFVEGESLMMALKDLAVSSGSACTSASLEPSYVLRALGLNDEMAHSSIRFSIGRFTTDEEIEHAIETITESIGNLREMSPLWEMFKDGIDLDSVQWAHH

SEQ ID NO: 17343 - protein, 554 aa, Shewanella piezotolerans WP3
MCSIFAILDIQSDSTPLRQVALEMSKLLRHRGPDWSGIYSSDKAILAHERLAIVDIEHGAQPLLSQDETIVLAVNGEIYNHKELKAELGDKYSYQTNSDCEVILALYQEYGTEFLDKLNGIFAFVLYDKAKDTYLIGRDHMGIIPLYTGRDAEGNFYISSEMKALMPVCKTVETFTPGHYLSSKVGELTHYYQRDWREFAAVQSNPASSEEVRDALEAAVKRQLMSDVPYGVLLSGGLDSSVISAITQTFAKRRIEDDGETSAWWPQLHSFAVGLEGAPDLIAAKKVADAIGTIHHEITFTFQDGIDAIKDVIYHLETYDVTTIRAATPMYLMARKIKAMGIKMVLSGEGADELFGGYLYFHKAPNAQAFHEELVRKLDKLHLFDCLRANKAMAAWGLEARVPFLDKEFMDVAMRTNPEAKMSKNGKIEKHILREAFEHKLPKEVAWRQKEQFSDGVGYSWIDGLKDHAAANVDDLQLANAKFRFPYNTPETKEGYFYRTFFEELFPLASAAETVPGGKSVACSTPEALAWDESLQGIIDPSGRAVQSVHDSAY

SEQ ID NO: 17344 - protein, 714 aa, Shewanella piezotolerans WP3
MSRNIMLIPVGTGVGLTSISLGMVRALERHGVKVRFFKPIAQQRPNDRGPERSTTILSKSPTVNPLEPFEMDHAENLIRADKTDVLMEQIIARATEFADDTETLIVEGLVQTRNHPFSSDVNHAIAKALDADVIFVATPGNESATALMNRLEISHNSWGGNKNKRLIGAIINKIGAPVDDEGRARPDLSEVFDHDSVQRPDAASMFQLPGKSKLRILGSVPYNLDLVAPRASDLAKHLSAKIINAGEMNTRRMRKVTFCARSIPNMVTHIKTDSLLVTSGDRSDVIVSACLASMNGIKVGALLLTGGYEPEPQIMELCEQAFETGLPVFLIDTNTWQTSLNIQRFDHEVPVDDAVRIEQVQEFVAGHIDQSWVESITKNSPREHRLSPPAFRYKLTELARAARKTVVLPEGDEPRTIEAASICAERGIARCVLLGNREEIERIATLQGVTLGEGVEIIEPEAARGRYVEPMVELRRNKGLTEVVAKEQLEDNMVLGTMMLAQGEVDGIVSGAVNTTANTIRPPLQLIKTAPGSSLVSSIFFMLMPDQVLVYGDCAINPDPNAEQLADIAIQSAESAIAFGIDPRVAMISYSTGSSGTGSDVDKVREATRIAKQKRPDLVIDGPLQYDAAVMPNVARSKAPDSPVAGQATVFVFPDLNTGNTTYKAVQRSADLISIGPMLQGMRKPVNDLSRGALVDDIVYTIALTAIQASQNES

SEQ ID NO: 17345 - protein, 412 aa, Shewanella piezotolerans WP3
MNQTISLLIAKGLNMSNKLVLVLNCGSSSLKFAIIDALTGDDQISGLAECFGLEDSRIKWKVNGAKQDASLGAFTAHREAVEYIVNNILGAHPQIAEQIQAIGHRVVHGGEKFTHSVIIDESVVQGIEDCATLAPLHNPAHLIGIRAAQASFPDLPQVAVFDTAFHQTMPEKAFIYALPYKLYRENAIRRYGMHGTSHLFISRETAAALGKDEADTNLICAHLGNGASVTAIKGGKSVDTSMGLTPLEGLVMGTRCGDMDPSIIYHLVNRLGYTLDEVNNLLNKQSGLLGISELTNDCRGIEEGYEKGHKGATLALEIFCYRLAKYIASYTVPLERLDAVVFTGGIGENSDVIREKVLNSLAIFNFKVDKERNTAARFGKQGKITKDEGPVAMVIPTNEEWVIAQDAVALIK

SEQ ID NO: 17346 - protein, 520 aa, Shewanella piezotolerans WP3
MAENSQTKRLPIIEQVESHLSQKTALKPSMYQQAERYGADKVVKAHWQSFGLAVFAGAFIALAFVFYITVTTGSTGPWGLMRLAGGLAFSLGLMLVVICGGELFTSTVLSSVAWAQKQVSTLSLLKCWGRVYVGNFIGAMLMLLLIVVAGMQNLNESHWGLNALNIAQHKLHHGWWQAFVLGMLCNMLVCLVVWMTFSSKDALTKAILLMLPVAMFVSSGFEHSIANLFMVPLGIVLANISDPAWFAALNVTQEQFSDLTVTNFILNNLIPVTLGNIVGGGLFVGLGYWLIEKANPSPSLHVMTQHKQSALAEVISLADLEKNNQTHFVEQTFAEPSQAQSPKSAYLSSGVKNMPKTIQKLNVSDLMNPAPFTLTADISIYEGLKRLTESASRGAPVINEQQQLLGFVSQQDLLRSLWSEEFARGVSFKVADLMQTQVLTVSPSDAVADLIELMVVDREKLFPVNDSGMLIGNTFKSYEERLRGANASKPSVFPVVEGGILCGVITREDIAQKVCQVYKF

SEQ ID NO: 17347 - protein, 185 aa, Shewanella piezotolerans WP3
MKRAVFLDRDGVINIDHGYVHKVDDFEYVDGVFEACLSLKKAGYLLAVVTNQSGIARGMYTEEQFHTLTEWMDWNFADKGVELDGIYYCPHHSEKGVGEYKIDCDCRKPKPGMMLTAADFLKIDLSQSVMVGDKRDDMLAAKAAGIPTRVLVRTGKSVTDEAIAAATVVLDSVAELPAYLAAEES

SEQ ID NO: 17348 - protein, 409 aa, Shewanella piezotolerans WP3
MSAETKKTDVKKVVLAYSGGLDTSAIIPWLKETYDNCEIVAFCADVGQGSEELEGLHEKAIASGASECYIVDLKEELVADYIYPTIATGAIYEGTYLLGTSMARPIIAKAQVEVARKVGADAVCHGCTGKGNDQVRFEGCFAALAPDLKVIAPWREWEMVSREDLLDYLAERNIETTASATKIYSRDANAWHISHEGGELEDPWNEPTQGVWTMTVAPEDAPNTPEYVALELEQGKITKVNGEALSPYKALMLLNDLAGAHGVGRIDITENRLVGMKSRGCYETPGGTVMFAALRAIEELVLDKTSREWREQVGAQMAHLVYDGRWFTPLCESLLGASKPLADLVNGEVVIKLYKGQASAVKKRSPNSLYSEEFATFGEDDVYNQKDAEGFIRLYSLSSRIRALHGHNK

SEQ ID NO: 17349 - protein, 279 aa, Shewanella piezotolerans WP3
MIKKQRAFLKWAGGKFKLIEALKEHLPQGDRLVEPFVGAGSVFLNTDFDRYLLCDINQDLINLYKIVQSEPEKYIKAAKALFVPEMNQKDAYYKVRSSFNETKDPFKRSVYFLYMNRHGFNGLCRYNRKGGFNVPFGSYKKPYFPENEIRAFSEKAQRAEFRCIGYEEAIDMTKEGDVVYCDPPYAPLSSTASFTTYVGAGFSLDDQALLARKSRHTAIERGIPVLISNHDIPLTRELYHGATFGSIQVQRNISQKGSGRKKVDELMALYDDSYHSEND

SEQ ID NO: 17350 - protein, 607 aa, Shewanella piezotolerans WP3
MTTSPKSEVWTVFKRLLGYLKPLKAVLFFAVVGLTMYALVDATFIAVIKPFIDEGFGGQASQIPTGAGGLTNLDLGTSGGFNSGSDVLMMAPFVVIVLFSLRGLANFLSTYCISYMSARVIMDLRQEVFEHYLTLPVSYIDSENTGNLISRVTYDTEQIARASGSALITIVRDSITVVGMIAIMFYFSWKLSLVIFIIGPIIGVVITVVSRRFRKVSKNIQAAMGGVTAATEQMIKGHKNVLSFGGQETEAQRFAKVNDQNRYQTMKLATAQAISQPLVMIIGSFAIAFILYAASIDSMKAELTAGTFATILGAMLAMLQPIKNLTRVNAEFQRGIAACTTVFELLDTKPESDTGTLDVERVKGELAFNNVDFSYPGQEKLALNGIDFTVEQGKTLALVGRSGSGKSTIASLVTRFYTGLKAGEITLDGSNINDYTLASLRSQVALVSQQVTLFNDSIANNIAYAYPGEATKEQIINAATLAHAMEFIEPMPEGLDTQIGENGVMLSGGQRQRIAIARAILRNSPVLILDEATSALDTESEKAIQDGLDNLRHNRTSIVIAHRLSTIESADQILVVDQGEIVERGTHTSLLEKQGIYYNLYQMQFGS

SEQ ID NO: 17351 - protein, 371 aa, Shewanella piezotolerans WP3
MIIGVPKEIKNHEYRVGMVPSSVRELTLRGHEVFIETNAGSGIGFSDKDYVNVGAKILETAAEVFAQSEMIVKVKEPQAVERAMLREDQLLFTYLHLAPDLPQTEDLVKSGSVCIAYETVTDDRGALPLLAPMSEVAGRMSIQAGAMALEKSMGGRGMLLGGVPGVEPAKVVIIGGGMVGTNAAQMAVGLGADVVILDRSIDALRRLNAQFDNKVKAIYSTADAIEKHVLEADLVIGGVLVPGAAAPKLVTKEHIAAMKPGSAIVDVAIDQGGCIETSHATTHQEPTYIVDEVVHYCVANMPGAVARTSTFALNNATLPYIIKLAQLGYREALLQDKHLLNGLNVMHGKITCAEVAEALNLEFVDPTILLK

SEQ ID NO: 17352 - protein, 404 aa, Shewanella piezotolerans WP3
MRPIIKSTKLDSVCYDIRGPVHKEARRLEDEGHRILKLNIGNPAPFGFEAPEEIVRDVILNLPSAQGYCESKGLFSARKAIVQHYQSQGIFGVDIEDIYIGNGVSELIVMAMQGLLNSDDEVLIPSPDYPLWTAAVHLSGGKAQHYRCDEESDWFPDIDDIKSKITPRTRGIVLINPNNPTGAVYSKELILEVIELCRQNDMILFSDEIYDKILYDDAEHIPSASLSTDILTVTFNGLSKVYRAAGFRVGWMMLTGNLKSAKSYIEGLDMLASMRLCANVPNQHAIQTALGGYQSIKELVQPGGRLRVQRDTCVEMLNQIPGISVVKPKGALYAFAKLDQKKFNLRDDERLVLDLLKEKKILLVQGTAFNWPEPDHLRVVFLPYKDELTKALGEFGEFLDGYKQ

SEQ ID NO: 17353 - protein, 200 aa, Shewanella piezotolerans WP3
MDLVDFRLRFNLHSLPKAHHFPSTLSFEVKQPLRKAAVLVALSSYNDQLELILTRRPSHLRQHPGQISFPGGKVEKFDLSFEDTALREAQEEIGLPNKHVEVIGMLHDHKTFTGFDITPVVSIISKPFTPVIDPGEVDELFTIPLSFLLNSNNRHIQYFSRGGIEYPVHFIPYGRYFIWGATAAMIDQLCRLLSQDEPLC

SEQ ID NO: 17354 - protein, 637 aa, Brucella melitensis
MAKVIGIDMGTTNSCVAVMDGKNAKVIENAEGARTTPSIIAFTDGDERLAGQPAKRQAVTNPEGTLFAVKRLIGRRYDDPMVTKDKDLVPYKIVKGDNGDAWVEVHGKKYSPSQISAMILQKMKETAESYLGETVTQAVITVPAYFNDAQRQATKDAGKIAGLEVLRIINEPTAAALAYGLDKSEGKTIAVYDLGGGTFDVSVLEIGDGVFEVKSTNGDTFLGGEDFDIRLVEYLVAEFKKESGIDLKNDKLALQRLKEAAEKAKIELSSSQQTEINLPFITADQTGPKHLAIKLSRAKFESLVDDLVQRTVEPCKAALKDAGLKAGEIDEVVLVGGMTRMPKIQEVVKAFFGKEPHKGVNPDEVVAMGAAIQGGVLQGDVKDVLLLDVTPLSLGIETLGGVFTRLIERNTTIPTKKSQTFSTAEDNQSAVTIRVFQGEREMAADNKLLGQFDLVGIPPAPRGVPQIEVTFDIDANGIVNVSAKDKGTGKEHQIRIQASGGLSDADIEKMVKDAEANAEADKKRRESVEAKNQAESLVHSTEKSLAEYGDKVSADDKKAIEDAIAALKTSLEGEDAEDIKAKTQALAEVSMKLGQAMYEAAQAAEGAGAEGGEQASSSKDDVVDADYEEIDDNKKSS

SEQ ID NO: 17355 - protein, 115 aa, Shewanella piezotolerans WP3
METVDKIKQQIAENPIIVYMKGSPKLPSCGFSSQVAQIMINCEEQFAFVDILQHPDIRAELPKYANWPTFPQLWIEGELIGGCDILTEMFQKGELKTLIKETAAKYKTEDEQASS

SEQ ID NO: 17356 - protein, 573 aa, Shewanella piezotolerans WP3
MEKLSGASMVVRSLIDEGVKHIFGYPGGSVLDIYDALHEKSNIEHILVRHEQAAVHMADGYARATGDVGVVLVTSGPGATNTITGIATAYMDSIPMVVISGQVHSSLIGNDAFQECDMIGISRPVVKHSFLVTDPRDIPAIIKKAFFIAASGRPGPVVVDVPKDCMNPEILHEYQYPEDISMRSYNPTTTGHKGQIRRGLKALLAAKKPVLYVGGGAVISGCDSQILALSEKLGIPVVSTLMGLGAFPGTHPNSVGMLGMHGCYEANMTMHNSDLIFGIGVRFDDRTTNNVEKYCPNATILHIDIDPSSISKTIKVDIPIVGSADKVLDEMLAQIEANDFGISDPAANDHWWSDIAQWCGRKSLDYQTSKEKIKPQQVIEMMHKLTNGDAYVASDVGQHQMFAALYYPFNKPRRWINSGGLGTMGFGLPAAMGVKLAKPDETVICVTGDGSIQMNIQELSTALQYDIPVKIINLNNHFLGMVKQWQDMIYAGRHSQSYMDSVPDFAKISEAYGHVGMTISDPAELESGLEKAFAMKDKLVFVDIHVDETEHVYPMLIRGGAMNEMWLSKTEKS

SEQ ID NO: 17357 - protein, 390 aa, Shewanella piezotolerans WP3
MLVMVILFAKSKLVSTGDVNIRINDDAEKSISTAAGDKLLGALAGKNIFIPSACGGGGTCGQCRVTVKSGGGDILPTERDHISKKEAKEGCRLACQVSVKTDMELEVEEEIFGVKKWQCEVISNNNTATFIKELLLKLPEGEDVLFKAGGYIQIEAPAHTVNYADFDIPAEYRDDWEKYDLFKLVSKVDEDVLRAYSMANYPDEKGRIMLNVRIATPPNDKVAPGKMSSYIFNLKAGDKVTISGPFGEFFVKETDAEMIFVGGGAGMAPMRSHIFDQLKSKKTQRKMSFWYGARSTREVFYQEDFDMLAAENENFVWHVALSDPLPEDNWTGYTGFIHNVLFENYLRDHKAPEDCEFYMCGPPIMNSSVINLLESLGVEPENILLDDFGD

SEQ ID NO: 17358 - protein, 386 aa, Shewanella piezotolerans WP3
MNKNNHGLAIMVNAQSKKLKNLKGITAMKQKILFIDRDGTIIEEPVTDKQVDTLAKLVFEPNVIPALLKLQTAGYRLVMVSNQDGLGTPSFPKDDFDAPQDMMMQILSSQGVKFDDVLICPHFDDENCSCRKPKLGLVKEYLTTGRIDFTQSAVIGDRETDMGLADSMGIQGLQYNPHSLTWNDIAEKLLSKNRVATVVRTTKETDIKVTIDLDSGVKGSINTGIGFFDHMLEQISTHGNFKMDVNVDGDLEIDDHHSVEDTALAIGDALRQALGDKRGIARFGNAFEQAIPMDEASAECLLDLSGRPFIKFSAEFEREMVGAMATEMVPHFFRSFSDGLRCTLHLKTLGDNDHHKVESLFKVLGRTLRQAVAIEGDALPSSKGVL

SEQ ID NO: 17359 - protein, 309 aa, Shewanella piezotolerans WP3
MTTIADKPDYSLYSNAFGYLRLPLNFSPLESDADVVVLGLPFDMATTGRSGGRMGPGAIRQASVNLAWEESRWPWPFKLSDHIKVVDAGDLVYDCGDSADFTQRVEDFATAIVDSGKAMLSFGGDHFVTLPLLRAHYKKHGKMALLHFDAHTDTYSQGSKYDHGTMFYHAPKEGIIAAENSIQVGIRTEYDQPNHLFQVIDAAAANEQSAAQIIAQIKERVGDMPLYVTFDIDCLDPAFAPGTGTPVCGGLTSDKAMKIIRGLNGMNIVGMDVVEVAPAYDSAEITALAGATLGLELLHVWADSNGKVK

SEQ ID NO: 17360 - protein, 291 aa, Shewanella piezotolerans WP3
MAKVAFIGLGVMGYPMAGHLVKNGHKVTVYNRTEAKAKAWSEEFSGQYYSTPKAAAQGQDVVFVCVGNDDDLRQVTLTEDGVLAGMNSGAILVDHTTASADVARELGAAASEMNIGFIDAPVSGGQAGAENGVLTVMAGGNIEVFEKVKPVIDSYARCAELLGDVGAGQLTKMVNQICIAGVVQGLSEGLHFARSAGLDGEKVVEVISKGAAQSWQMENRYQTMWQGEYNFGFAIDWMRKDLGIALEEARRNGSHLPLTALVDQFYSEVQAMGGNRWDTSSLLAKLEKNRS

SEQ ID NO: 17361 - protein, 324 aa, Nostoc sp. PCC 7120
MTAELKVASIDNHISSLSGEVSIPQAPPEFKSGFIGIIGRPNVGKSTLMNQLVGQKIAITSPVAQTTRNRLRGIVTTPEAQLIFVDTPGIHKPHHQLGEVLVKNAKLAIESVDVVLFVVDGAVACGAGDRFIADLLIHSKTPVILGINKVDQQPPDSQKIDESYQQLASAYQWPTVKFSAKTGAELPQLQELLVEHLEHGPYYYPPDLVTDQPERFIMGELIREQILLLTREEVPHSVAIAIDLVEETPTITRVLATIHVERDSQKGILIGKGGSMLKSIGSAAREQIQKLIAGKVYLELFVKVQPKWRHSRVRLAELGYRVEE

SEQ ID NO: 17362 - protein, 556 aa, Shewanella piezotolerans WP3
MSHVDTEVRPSNFIRSIIDEDLASGKHSAVHTRFPPEPNGFLHIGHAKSICLNFGIAQDYQGQCNLRFDDTNPEKEDIDYVHSIQNDVQWLGFQWSGDIRYSSNYFDQLHQYAVELITKGLAYVCFLNAEQTREYRGTLKEPGKNSPYRDTTPEENLALFEKMRNGEFKEGECALRAKIDMASPFMCMRDPIIYRVRFAHHHQTGDKWCIYPMYDFTHCISDAIENISHSLCTLEFQDNRRLYDWVLDHLDDFQSPSRTRQYEFSRLNLEYTLMSKRKLNDLVAHNIVSGWDDARMPTIAGFRRRGYTAASIREFCKRIGVTKQENMIEVAMLDACIREELNEHAPRAMAVINPVKVVIENYPENQVETVQAPIHPSNEDMGKRPLSFGRELYIDADDFREEANKKFKRLVQGKEVRLRNAYVIKAERCDKDADGNVTTIYCTYDDETLGKNPSDGRKVKGVIHWVEATTAKPAEFRLYERLFNDANPAAAESVDEVLNPQSLTVKHGFVEAGLVNAEVEKAYQFEREGYFCADNKDSTKDHLVFNLTVPLRDTFA

SEQ ID NO: 17363 - protein, 525 aa, Shewanella piezotolerans WP3
MNIKKDKYSIDNTDYTVGQDNIQKWGFDVHNPVFGISASLIGLFLIAILLVDPETSKAALDGIKWKIIGAFDGLFMWSANIFVVFCLAMIISPFGKIRLGGDEAKTDYSMMSWVAMLFAAGMGIGLMFWGVAEPAAYFTGWYETPLNVTPNTPEAAKLALGATMYHWGLHPWAIYGVVSLSLAFFAYNKGLPLSMRSVFYPILGDRTWGWPGHVVDILAVLATLFGLATSLGLGAQQAASGFHHVFGMDNGLMLQIAIIFIVTLLAVVSVIRGIDGGVKIISNVNMLLAAALVLFVALVTFAVSMGTIPTTVMGYIENIIPLSNPSGREDEAWMHGWTVFYWAWWISWSPFVGMFIARISRGRTIREFMTAVLIVPTVVTTLWMSVFGGVAIDQITNKIGTLGEKGLTEVPLAMFQMFDALPMGNILSLLAVILVLVFFVTSSDSGSLVIDSITSGGKVDAPVPQRVFWAFIEGAIAAGLVWVGGTEAIEALQAGAISTALPFTIILLVMCVSLILGLRTEKRFR

SEQ ID NO: 17364 - protein, 662 aa, Shewanella piezotolerans WP3
MLIKSSINPPVFFSSVFLITVMVLFGAIWPTQAQEVFSITKSWFELKAGWLYILGVAIFLLFVIFVMVSRFGDIKLGPDHSEPDYSYKSWIAMLFSAGMGIGLMFFGVAEPVMHYLAPPDATPETIQAAKDAMKITFFHWGIHAWAIYAVVALSLAYFSYRHKLPLLPRSALYPLIGERIYGPIGHAVDTFAVLGTMFGVATSLGFGVLQVNSGLNYLLGVPVNAYVQVGLIVGISIIATLSVFSGLDKGVKRLSELNLGLAVLLLIVIMLLGPTVELLQSFVQNTGGYLSDIVGKTFNLYAYEQKNDWIGGWTLLYWGWWISWSPFVGTFIARVSRGRTIREFLIGVLFVPSAFTFLWMTVFGNTAIDAIMNQGATYLADAVSSDVSVALFVFFEHMPFSTLLSTIALCLVVTFFVTSSDSGSLVIDNLTSGGDHNAPVWQRIFWALLQGVVASVLLLAGGLQALQTAAVASALPFLIVMLLMCFGLFKALQDDWLKISSVQSHNTSVQFTKTNVSWEDHIDVLVSHPSEDEALGFLDNVAKPALNKACEAFNSKGVSAELLNFENRIRFIIANEEHNDFVYGLRIRAFSITNPIESEVAEVAEGGSEYYRVEVFLEHGGQHYDVMGFTQEQVLADVVTQYEKYLHYLHLSSSEYLGEEIK

SEQ ID NO: 17365 - protein, 377 aa, Hordeum vulgare
MAAMWRAAARQLVDRAVGSRAAHTSAGSKKIVGVFYQAGEYADKNPNFVGCVEGALGIRDWLESKGHHYIVTDDKEGFNSELEKHIEDMHVLITTPFHPAYVTAEKIKKAKTPELLLTAGIGSDHIDLPAAAAAGLTVARVTGSNTVSVAEDELMRILILLRNFLPGYQQVVKGEWNVAGIAHRAYDLEGKTVGTVGAGRYGRLLLQRLKPFNCNLLYHDRLQINPELEKEIGAKFEEDLDAMLPKCDVVVINTPLTEKTRGMFNKEKIAKMKKGVIIVNNARGAIMDTQAVADACSSGHIAGYGGDVWFPQPAPKDHPWRYMPNHAMTPHISGTTIDAQLRYAAGVKDMLDRYFKGEEFPVENYIVKEGELASQYK

SEQ ID NO: 17366 - protein, 301 aa, Shewanella piezotolerans WP3
MSTVAFIGLGNMGGPMAVNLIKAGFTVRVFDLVPAAMQALAEQGALTATSACGAAAGSDIVVTMLPAGKHVRSLYVGDADNKGLIDVVGKGTLLIDCSTIDADSARFVANHAADKGLEFIDAPVSGGTAGAAAGTLTFICGGTDNAFEQAQGVLTAMGANIFHAGGPGAGQVAKICNNMLLSVLMVATSESLQMGVDHGLDPKVLSDIMKVSSGGNWTLDKYNPCPGVMESVPSSNDYQGGFMVDLMVKDLGLSQEAALLSNSSTPMGALARSLYVNHARKGNGKRDFSSIFEQFAPSSSE

SEQ ID NO: 17367 - protein, 396 aa, Shewanella piezotolerans WP3
MSSDLSNQDIVIVAAKRTPMGGFQGALATVASPKLAATAIKGLMQHSGLAGEQVDEVLMGCVLPAGLGQAPARQATLGAELPLSVGATTVNKVCGSGMKTVMLAHDLIKAGSANVVIAGGMENMSQAPYLLDKARGGMRMGHGKVLDHMFLDGLEDAYTGGAMGTFAQNTADDFNLTREQMDGFALSSLEKANNAIAAGAFNAEITPVTVANRRGDVVVDTDEQPGNARPDKIPTLRAAFAKDGTITAANSSSISDGAAALMLMTRAQASELKLEVMATIKGHTTHAQEPSMFTTAPVGAMNKLLDKVSWSKDEVDLFEINEAFAMVTMLAVSELGLDINKVNVNGGACALGHPIGCSGARLLVTLIHALKARGLSKGVASLCIGGGEATAMAIEL

SEQ ID NO: 17368 - protein, 357 aa, Shewanella piezotolerans WP3
MSSLAMRPCGDFRTSYKADNTIFETKTIRLMTIALIAIACGAPLVLDGYFLTLFIQISYLGIAALGLNILVGFTGQISLGHGAFFGFGAFASAWLNTSFQIPVVLCIPLAGFLTMAVGMMFGMPAARIKGLYLAIATLAAQFIIEDFFARAEWFSGGSSGSMAAPVNLFGFDFDTDQSFYYIALFALVFMYIWGCNLMRSRDGRAFVAVRDHYLSAEIMGVKLNKYRLLSFGISSFYAGIGGALYAHYLGYVSAEGFTILMSIQFLAMVIIGGLGSIKGTLMGVVFMVLLPEMLESIVALMKYTDWGNIPMVTDGLAYIKEMAIGLVIILFLIFEPEGLAHRWAQIKNYWKFYPFAY

SEQ ID NO: 17369 - protein, 409 aa, Shewanella piezotolerans WP3
MEPQLVEIKDFVSFTLAIIALFIGKGIISRYELLRKYSIPEPVVGGFACAAAVGVLYYAFDIQIEFNLAVRDTLLLYFFAGIGLKADFATLLKGGKPLLILIVLASVFIFLQNFTGVTVATLFGLDPKAGLMSGSISLIGGVGTAMAWTPTFVEELGITNASELGIASNTLGLISACVIGGPIAAYLMKRHQVKANTNEELDIGTSHQNNTSHMKVDYFGVLRAWLWLNVTLIIGYFIDLAMQEAGLKLPMFVACLLAGIIIGNLGRAIINRRKKKDRTYIEDASRGLSLIQDICLGMFLTMALMSLKIWELEGSLLYISVIMTLQVLLSVVFTIFVVFRLMGKDYEAAVICSGFGGVTLGSTATAIVNMTAVTQQYGAAHRAFIIVPLVCGFFIDIINAMIINLFVYF

SEQ ID NO: 17370 - protein, 364 aa, Shewanella piezotolerans WP3
MNSRNTPVNAPFTAEQWQAGEHQLVCVEKWHETHDVISFRFQGVKPVKFHFKPGQFLTLLLEINGEKIGRSYTISSSPSRPFSIVLTVKQIEGGKVSNFLANSLEVGHVVRALGPDGAFNLIDIEADKYLFLSAGCGITPMYSMSRWLADTQIGPDISFLHSAKSTEDLIFKQSLEQMADRSDQFKLNYLLESLDSEPCAYVDAEAGRLSADNLKRLVPDFQTRTVFVCGPEPYMEAVKTLLESLTFNMAQFNQESFGSFKGDLGELAAAKEAAASDEMSGFMLQIGDRTRTLSSEQTLLDGVEAEGLPIIAACRSGVCGACKCKVVEGETESTSQMSLTADEIAQGYVLACSTKLKSNVTLEL

SEQ ID NO: 17371 - protein, 330 aa, Shewanella piezotolerans WP3
MSNEKDLPESNEPSLDDLLAQMNNPSSAVKYAVTYCGMVAIVGRPNVGKSTLLNKLLGQKISITSKKPQTTRHRIMGIHTDGPRQVVFIDTPGLHMEEKRAINRLMNRAAASSLAEVSLVVFVVDGMNWTADDEMVLRKLQSRNDGRKTVLAINKVDNIKDKEALFPHLEELSKKFEFDEILPISATQGTNVQRILDMSVESVPESPHFFPEDYVTDRSQKFMASEIVREKLMRFLGDELPYDCTVEIEQFKMMENGVYQINALVLVERETQKRMVIGNKGERIKKISSAARVDMEVLFDNKVFLEMWVKVKSGWADDERALRSLGYGEE

SEQ ID NO: 17372 - protein, 1482 aa, Shewanella piezotolerans WP3
MSLYHPSFERDNCGFGLIAQMDGEASHRIVRTAIHGLDRMKHRGGIAADGRTGDGCGLLMQLPTEFFKAIAAENDWHLSRRFAVGMLFLSQDEELASQTKHLLEQELQKETLSVAGWRDVPVNTDVLGPIGKASQPQIVQVLINAPIGWREKDLERRLYMARRRVEQQLHHDKDFYIASLSGQVIVYKGLMMPADLPAFYSDLADIRLQSAICLFHQRFSTNTSPKWPLAQPFRYLAHNGEINTITGNRQWAKARAYKFHAPLLPDLQQAAPFVNETGSDSSSLDNMLEMLLAGGMDLYRAMRLLIPPAWQSNPEMDPELKAFYDFNSMHMEPWDGPAGIVMTNGRHAACAVDRNGLRPSRYVITKDRILTLASEVGIWDYAPDEVIEKGRVGPGELLVLDTLNGQLYSSFEIDNDLKRRHPYKEWMAKNSKILKPAEDFGPNDQGTREFNDDQLLQYQKHFGYSREELEQVIWVLAQKGEEATGSMGDDTPMAVLSKKSRTIYDYFRQKFAQVTNPPIDPLREKHVMSLTTCAGREQNLFNETTGHAYRVMFNSPVLLFSDFNQLMALDSTYYRANTVDLNYDLAEGLEAAVKRICDEAERLARTGTTLLILSDRATAKSKQVIPAAMAVGAVQQILVTKSLRCDTNIIVETASARDPHHFAVLLGFGATAIYPYLVYECISDLAQRNGVENTRDLMLNFRQGIDKGLRKIMSKMGISTVASYRCSQQFEAVGLADEVVNLCFNGVISRIQGANFELIEKDQQLLHKHAFRAHQQLSQGGLLKYVEGGEYHCFNPDVVNTLQASLRDQDYVNYKRFTELVDDRPIATLRDLIKVEGDLSAVDIKDVEAANTLYTRFDSAAMSIGALSPEAHEALAVAMNRLGGRSNSGEGGEDPRRFNSEGNSAIKQIASGRFGVTAHYLVNAEVLQIKVAQGAKPGEGGQLPGDKVSVEIAALRNARPGVTLISPPPHHDIYSIEDLAQLIFDLKQINPKALVSVKLVSEPGVGTIATGVAKAYADMITISGYDGGTGASPITSVKYAGSPWELGLAEVHQSLVANGLRHKIRLQVDGGLKTGKDVIKAALLGAESFGFGTVPMIALGCKYLRICHLNNCATGVATQNKQLRNEHYHGLPERVMTYFEFVAQEIREYMADLGVTEFEQLVGRSDWLSAIEGDTAKQQALDLAPILYKPEVPATSAVTWRETNPPSDQGELNQRLVEDCKEAVLAGVPICEIFNINNTDRSVGASLSGFIATHVGRDGAKAPITLKFNGSAGQSFGVWNAPGLELMLCGDANDYVGKGMSGGKISVYPPLGSPFKTERSTILGNTCLYGASGGRLFASGQAGERFAVRNSGAIAVVEGLGDNGCEYMTGGIVVVLGQTGVNFGAGMTGGFAYIFDQFGHFNRRVNTEMVDTHKVQSPIQQQHLRELIEQHVKETNSEHAKMILNDFENWLDCFILVKPKNVAVDDLLKLAQPEPALAVRAG

SEQ ID NO: 17373 - protein, 324 aa, Shewanella piezotolerans WP3
MKHTPEVHTVPDIKLFAGNATPSLAKKIADRLFCKLGDAEVGVFSDGEISVQINENVRGADVFIIQSTCAPTNDNLMELIVMVDALRRASAGRITAVIPYFGYARQDRRVRSARVPITAKVVADFLSSVGVDRVLTCDLHAEQIQGFFDVPVDNVFGSPVLLEDMLAKNLENPVVVSPDIGGVVRARAVAKLLDDSDLAIIDKRRPQANVAQVMHIIGDVQGRDCIIVDDMIDTGGTLCKAAEALKEHGANRVFAYATHPVFSGNAAKNIAESVIDEVIVTDTIPLSPEIAALEKVSQLTMSTVMAEAIRRVSNEESISAMFKH

SEQ ID NO: 17374 - protein, 857 aa, Shewanella piezotolerans WP3
MRLDRMTNKFQIAISDAQSLALGRDHQFIEPVHLMMALLNQDGGSIHPLLTQAGIQVSSLRSLLSKELEQLPQVEGTGGDVQLSQALIRLLNVCDKLAQKRKDKFISSELFVLAALDGNDVLAKALKKSGADKALLENTIDQIRNGQNVDDPNAEDQRQALKKFTVDLTERAEQGKLDPVIGRDDEIRRTIQVLQRRSKNNPVLIGEPGVGKTAIVEGLAQRIINNEVPEGIKNKRVLSLDMGALVAGAKYRGEFEERLKAVLNELSQEEGQVILFIDELHTMVGAGKGDGAMDAGNMLKPALARGDLHCVGATTLDEYRQYIEKDAALERRFQKVLVDEPNVEDTIAILRGLKERYELHHHVEITDPAIVAAASMSNRYISDRKLPDKAIDLIDEAASSIRIQIDSKPESLDKLERRAIQLKLEEQAVSKEEDEASLRRLDVLRSELKEVEGKAGELNEIWHTEKAALAGTQHIKADLEQARMDLEVARRAGDLTRMSELQYGRIPELEKQLDLAAQAEMQDMTLLRNKVTDIEIAEVLSKATGIPVSKMLEGEREKLLQMEDALHERVIGQNEAVDSVSNAIRRSRAGLADPNRPIGSFLFLGPTGVGKTELCKSLAKFLFDTESALVRIDMSEFMEKHSVSRLVGAPPGYVGYEEGGYLTEAVRRKPYSVILLDEVEKAHPDVFNILLQVLDDGRLTDGQGRTVDFRNTVVIMTSNLGSDAIQAGFGSQNYDEMKSNVMQVVTQHFRPEFLNRVDESVVFHPLNKENIAHIASIQIDGLKQRLADKDYELSISDDALAIIAEAGYDPIYGARPLKRALQQEVENPLAQKILSGQLQPGKAINISVSENELTFTQ

SEQ ID NO: 17375 - protein, 416 aa, Shewanella piezotolerans WP3
MDDLTKLGLTVTELRFALDTFYFLISGALVMWMAAGFAMLEAGLVRSKNTTEILTKNVCLYSIACVMYLIVGYNIMYVDNGEGGWLPSFGSLIGSQADGADHALESDFFFQVVFVATAMSIVSGAVAERMKLWAFLAFSVFMTAVIYPVEGYWTWGGGFLSEAGFVDFAGSGIVHMAGAAAAISGVLLLGARKGKYGANGQVNPIPGSNLPMATLGMFILWMGWFGFNGGSQLLVSDAENASAVAKIFVNTNSAAAFGAISALIVCRLIWGKADLTMILNGALAGLVAITADPLSPSLAMAGVIGIVAGGVVVFSIVAFDRVKIDDPVGAISVHGVAGLLGLMLVPVSNADASFITQLYGAAVIFAWVFLASTVVWLGLKATMGIRVTEEEEYNGMDASDCGIDAYPEFVSVKSGS

SEQ ID NO: 17376 - protein, 626 aa, Shewanella piezotolerans WP3
MSQQASSVSSGTSETTAPNKAPLETASVTSSVSRRAVLPWIGAFLKPYRGRVIAAIIFLFIGSLAWLSLGQGVRLMVDEGFLQDNSSRLNEIILLVIGITALSSSAIFCRFYLMTWLGERVSADIRLKVYDHLLKLSPGFYAKLRTGEVISRFTADSTLLQSVVGQSLSMALRASVTVIGGIVMMAITSLKMTGLVLLAVPMVLGPIFFFGRKVRDLSRKSQDKVGDLGAYVDETLHEIHTVQAYSHEDRDRALFGERVESVMEAAKGRIKYRSILISLVMFLSILAIALVTWVGAHDVMNGSITGGELSAFMFYAVMVAGSVATISEVIGEIQRAAGATERLIELVETPIDIPTIAEPLSLPEVVKGELALKQVRFAYSNIREGGIEEQGEDDVIRGLDIHINPAERVALVGASGAGKSTLFELLQRFYVLNSGSIELDGVDISKLCPQTLRQQYALVPQESVIFASSVLENVRYGRLDATEAEVKQACIAARADEFITEFSDGYHTYLGERGVRLSGGQKQRIAIARAILADRPILLLDEATSALDAISEQKVKQALDSLMVNKTTLIIAHRLSTVINADRILVLDKGLLVASGTHNELMQSSELYREFASLQLLTEDLTAPTS

SEQ ID NO: 17377 - protein, 317 aa, Shewanella piezotolerans WP3
MRIVVLDGYALNPGDLSWQPLEEIAELDCFDRTPAQDVLARSKDAEVLFTNKTVLDAATLKQLPKLRYIGVLATGTNVVDIDAASALDIVVTNVPGYGPDAVAQMVFAHILNATQQVARHSDAVMQGKWSSSDDFCFTLSPLQSLKGKTLGLIGFGDIGRTVAQIALAFGMKVVVNTRHPNLELPKGCAWLPQDELFRIADIVSLHCPLTPATDKFINQGLLSKMKCSAMLINTARGGLVDEMALADALVKREIAFCGVDVLSTEPPEADNPLISAPNITISPHNAWATIEARQNLLNIAVNNLSTFLAGKTVNKIN

SEQ ID NO: 17378 - protein, 388 aa, Shewanella piezotolerans WP3
MKFVDEATIRVEAGNGGSGCVSFRREKYVPDGGPDGGDGGDGGSVYLQADENLNTLITYQFERFHNAERGKNGRGRDCTGHGGEDLVLKVPVGTRAVDAETEETLGDLTTHGQKMLVAKGGFHGLGNTRFKSSTNRAPRQKTLGTDGEVRSLRLELMLLADVGLLGMPNAGKSTFIRSVSKAKPKVADYPFTTLVPNLGVVNPRPGQSFVIADIPGLIEGAADGAGLGVQFLKHLERCRVLLHILDIEPIDGSNPVDSARAIVGELEKHSPKLAGKPRWLVINKADLMLEEELQEKIDKVVEELAWDGEVFTISAYNREGTAELALKLLDFIDTLPPEEEVDVEAEVEFKWDNYHQNANESVNEDYDDDLDDDDYDDDDYDVEVIYQR

SEQ ID NO: 17379 - protein, 400 aa, Shewanella piezotolerans WP3
MLSEKHISIVKSTIPLLESAGTAITEHFYKRMFSQNPELKHIFNLSHQHSGGQPAALFNAVAAYAKNIDNLGALTGAVERIAHKHTSFNIQPEHYPIVGHHLLETLRELAPDAFTPEVEEAWGAAYGVLAGIFIEREGALYHRSANETGGWQGARQFTITDKTKESELVTSFVLTPVDGQAVIDFEPGQYLGICVEPAEHEYREMRQYSLSDKPNGKQYRISVKREAQATPGVVSNYLHDHMNVGDSLDVYPPAGDFHYEEREAPVVLISAGVGVTPMQSMLEMLAAKSFAKPVFYLHACEGVEQHSFNQRVETLGLSLDLQHHTWYRDIAHSNEVADVSNIHQGFMNFATLRDALPIDSGDYYLCGPVAFMQFAKQQLIELGVDSCRIHYEVFGPHASL

SEQ ID NO: 17380 - protein, 454 aa, Shewanella piezotolerans WP3
MSIANGLTVAKFGGTSVADYDAMHRCADIIINNPATKVVVVSASSGVTNKLVALTQATTTSEQSKLLIKQIASIQYQILDRLGHPSEVAAKIDAVISHISVLAERLVLSRSKAVMDEMLSQGEMCSSVFFAAVLREKGAAAAAFDVRQVMRTDSHHGRAEPQIESIAQLAEEHLAPLLSSQVIVTQGFIGADEEGATTTLGRGGSDYSAALLAEALRATAVEIWTDVAGIYTTDPRLAPNAKPIAEISFNEAAEMATFGAKVLHPATILPAVRQKIQVFVGSSWTPEQGGTWIRHQVSDEPVYRAVAVRRDQTLLNLHSLQMLHAQGFLAQTFATLAKHKISVDLITTSEVNVALTLDKTGSDSSGHGLLSESLLQELSQHCRVRVEDGLALVAVIGNRIASTAGVCRRVFEVLEPHNVRMICQGASPHNLCVLVEEAQAADVIRALHENLFES

SEQ ID NO: 17381 - protein, 611 aa, Shewanella piezotolerans WP3
MSSSEKTFRELGLAEPLLRALDELGYEKPTPIQAASIDPLMAGKDILGQAQTGTGKTGAFALPLLNSIDPNTNSPQILVLAPTRELAVQVAEAFGSYAKFMKGLHVLPIYGGQSMHQQLNALRRGPQIIVGTPGRVMDHMRRGTLKLESLKAMVLDEADEMLKMGFIDDIEWILEHTPKQRQLALFSATMPEQIKRVANKYLSEPVHVKIAATTTTVETIEQRFVQVSQHNKLEALVRVLEVEKTEGIIIFVRTRNSCVELAEKLEARGYASSPLHGDMNQQARERAVDQLKRGKLDIIIATDVAARGLDVERIGHVVNYDIPYDTEAYVHRIGRTGRAGRTGMAILFVTHREMRMLRTIERATKSRISPMDIPSPETVTERRLSRLGEQIGEVIAKDSLDFMKGAVAKLCQELEVDTDVLAAALLQQVQKDRPLQLPSMNERQRDNRDDRNSRDRNDRNSRDRGDRPRRESRPTPANIGSADSLKDNPDVKMCRYIIDVGRDNGVGVGNIVGAVANEANIDSRYIGQIQLFDQVTAIDLPDGMPKDVLAHLKKVRVCGRPLNIREAAGEKFENTSGGDSRPPRRPRKPSGDRRPSGDRKPHRKGPAKDAE

SEQ ID NO: 17382 - protein, 797 aa, Shewanella piezotolerans WP3
MARCHLHKFGGSSLADADCYRRVAHILLTHGHSDDLVVVSAAGKSTNFLYRLLELSTTKQLWQEELQILISFQQKLIEQLLSNEQARSLRERLSNDKAQLISLLSLTAINDYQSSQVVSFGERWSSRLLAALLRESGVAASDVDARTLLIADEGAVPQIRLQQSRQRVQKLIAEHPNERLIITGFICANDKGDTLLLGRNGSDFSATLIASLADIERVTIWTDVEGVFNADPNKINDAKLLSSLSLDEANRLAHLGSPVLHNRTLQPLFDTQVSLAVRSSYASHTDFTLIAPKSSSASAPVVTNLNSVSLFNIQLNGVLSDLLSLLTDSGLYPLAHWSLAQKRIELTVTLENQKQVQALLDANSDALGITDLQIREDLGLVALVSADADLYRRGFARLLSRNARPLFNDGMSLVTLVPQTQVNLLTQKVHRRCAGPRKRIGVLLLGVGNIGEAWIDLFDGARAALNKELEASVDLVGLVSSRKALISDKGIALNTWKSAFEQDATPWQYSHLFEELQGLECDEVVALDISASADLTLQYPEFFARGIHVVSANKLAGSGPLPFYRELKLQLGNRRLFWRYNASCGAGLPVQHAINDLHNSGDSIEAVGGIFSGTLCWLFENYDAVKPFSELVVDARGLGITEPDPRDDLSGRDMQRKLLILAREIGLEIELEDIELKSLVPAHLAELPLEQFLSRINELDEDMLQQYLAAVEQDKVLRYVAALDRVDGKLKAEVSLQWVDNSHPYANLTPGDNVFVIRSKFYQDNPLIIRGPGAGRQVTAAAVQSDLAHICRDLLQE

SEQ ID NO: 17383 - protein, 761 aa, Shewanella piezotolerans WP3
MKNTTELTQIYLDANATTPVLPEAAAAALSAMENLFGNPSSSHITGLKAKNLMEQTRLRAQTLLGSGEGKIIFTSGATEGIQTSILSALIAAKSRMSADKNYSVLYGATEHKAVPESLKHWLTVLDIKAEVTAIPVDQFGLLDHDFIRQHAPSALMICTMAVNNETGVFQNLKSLEATIRSANSDIFWMVDCVQALGKTELDLKTTTIDYAPFSGHKLYAPKGIGFVYIRDSAPFTPFIAGGGQESGLRSGTENLPGLAALNVIFEMLLSQEGSPFSSSAQLTQYRQQIADTLTECFSDIVFNNSFEHSVATTINFAVPSFSSKEIMDLFDAANIRVSSGSACSSKVTRSFVLDAMGLPAWQSEAAIRMSFGPAITQAEVDTACARIKTASQALTQSCMILDDSSDISDRTDLDGLLQLRSGASCTWVFVDSLSKQALIIDPLPELKQRLETLLECQQLTLVAAIDTHGHADHVSGREALASRYLAEQESDHLGWPVTENRVQHLAQQLQVISIGTKQLLRLPTPGHTSDSISLLLCSAPSASNHTAEHTQYAFCGDTILMGSLGRTNFESSSSVALFNSLKLIRDSISSTALICASHDYNNEFTTSLKAEINRNDLLKGVLSNQLSMDDFQQRKAHLDTHLNDEVGTEIMCGALIGNCDKFKIKEYDAFSLAAAMKQDENVCIIDIREPHEYALNHSTQSSLNVPLTRLVQFIQEHQNQKNRQWVLVCRSGSRSMIAAQAMHRLGFEQVSHLKGGYALSS

SEQ ID NO: 17384 - protein, 241 aa, Shewanella piezotolerans WP3
MGQETSKILVVDDDMRLRALLERYLMEQGYQVRSAANAEQMDRLLERENFHLLVLDLMLPGEDGLSICRRLRQVGNPIPIVMLTAKGDEVDRIIGLELGADDYLPKPFNPRELLARIKAVMRRQTPEVPGAPTQQEEEITFGEFSLNLATREMHHGEEAIALTSGEFAVLKVLVSHPREPLSRDKLMNLARGRDYSALERSIDVQVSRLRRLIEVDAANPRYIQTVWGLGYVFVPDGASRK

SEQ ID NO: 17385 - protein, 518 aa, Shewanella piezotolerans WP3
MNDKTMDVNAKVGKKKVTIDPIIFFPSLIAVIILSYFTVKDLDAANLVIKEVFHYLTHSWGWAFEWYMIFMGAGWAWLTWGPYSKNRLGQEKPEFSTGSWIFLMFASCTSAAVLFWGSLEVYYYVTYPPFELESLSVPAKELGLAYSLFHWGPLPWMGYGFFTVALGYFLFVKKMDVVRPSGTLEPILGKHHKGFIGIFIDNVYVVALILAMGTSLGLATPLVTECIQWLFGIPRTPEVDTIVISSWIIFNAICVAFGLTKGVKIASDLRSYLSIIMLVWVFLIGATSFTVNYFTESVGVMLDLLPRMLFYTAAVSEGSFPQDWTVFYWAWWVVYGIQMCIFLAKISRGRTVRELCLTMVAGLTASTWFLWTILGSNTMNLMNENLVNMPLLIEQYGAARAIIETWAALPFSTITMWGFFILCFLATVTLVNACSYTLAMSTCKGADADNEPPIWVRVGWSILVGVIGIVLLSLGGLKPLQTAIIAGGAPLIIVNVMIIISFLKDARKNNWKPVDEKA

SEQ ID NO: 17386 - protein, 407 aa, Shewanella piezotolerans WP3
MNTVYSIGELESFLVAILVLFIGHSVNRHVGFFKKYNIPEPIIGGLVVAAITTLLHFQNITLKFSLPMQNTLMLMFFSTVGLAASYKLLAKGGKKVFIFLGIASVYIVIQNAVGVSLATALGLEPLMGLVAGSITLSGGHGTGAAWSQTFAENYGMSTLEFAMAAATFGLVMGGIIGGPVAQRLIDKHKLESSYGIGGNHHKDHPDLVTYDQLEEDRVTAKSVMETLFILLLCVAGARWIEHLVSVFNISWMKMPDFVYALFLGVVITNLTELTRGYKTNSECVDILGTVSLSLFLAMALMSLKLWEIFDLAIPLLIILLVQTAVLGFFAYFVTFKLMGSNYDAAVIAGGHCGFGMGATPTAVMNMGALVSRNGPSPQAFMVVPIVGAFFIDIVNLIVLQGYIGFIL

SEQ ID NO: 17387 - protein, 160 aa, Zea mays
MSDEEHQFESKADAGASKTYPQQAGTIRKNGYIVIKGRPCKVVEVSTSKTGKHGHAKCHFVGIDVFTGKKLEDIVPSSHNCDVPHVDRTEYQLIDITEDGFVSLLTDSGNTKDDLRLPTDEALEGQIKSGYDDGKDLLLTVMSSMGEEQICAVKEIGGKN

SEQ ID NO: 17388 - protein, 234 aa, Zea mays
MSANVGESTSGVSSSDAAGGSFECNICFELPQEPIVTLCGHLFCWPCLYRWLHIHAHSPECPVCKALVEEDKLVPLYGRGKDRVDPRSKNMPEGEIPHRPTGQRPATAPRADANSNFANANANPWFPGPGVPLANARWGNYAFSAAFGGLFPMLSFQVHGFPDAAAYAQPAGFHYGYGHGHGHGFHHGGHMGQAQAHGVHRQAPLGQQQQQADIYLKALLFMIVILVLASLLAF

SEQ ID NO: 17389 - protein, 196 aa, Zea mays
MAAQEQEQEQEKQQAKTSTTSSLPSSSERSSSSARNNLTEGGAESDEEIRRVPEMGGASASASSGAGADERPKGEDGKQGQVAAGAQPPAGGKKRGRTAGDKEQNRLKRLLRNRVSAQQARERKKAYLTELEAKAKGLELRNAELEQRVSTLQNENNTLRQILKNTTAHASKRSGGGGGGGGKGGDGGKKHHLAKS

SEQ ID NO: 17390 - protein, 347 aa, Zea mays
MGDSSGSVSVDVERIFFGGKEHRVRTRHGSLSVSVYGDEDKPALVTYPDVALNHMSCFQGLFFCPEAASLLLHSFCVYHITPQGHELGAAPISADVPVPSVDDLADQVADVLDFFSLGSVMCLGVTAGAYVLTLFATKYRERVLGLMLVSPVCKAPSWSEWLYNKVLSNLLYYYGTRGLVKESLLQRYFSMDVRGNGQDPESEIVQACRSLLDERQGANVWRFLQAISRRHDLTESLKKLKCRTLIFVGENSQFHADAVHMTIKLDRRYCALVEVQACGSLVTEEQPHAMVIPMEYFLMGYGLYRPSQQESSPRSTLSPFCISPELLSPESMGVKLKPIKTRISLNV

SEQ ID NO: 17391 - protein, 333 aa, Zea mays
MELALSLGETMADAGRDLMLGLGMGVGVRREEEAQRGRRDREVRRELEFTARSARSSPEPAVRLTLLHGLGLPWPPPPSSETNRHLEASARGFDVNRAPSLSAAGGAAEEDEEQDEAAAAAASSSPNNSASSFPTDFSAQGQVAPGADRACSRASDEDDGGSARKKLRLSKEQSAFLEDSFKEHATLNPKQKLALAKQLNLRPRQVEVWFQNRRARTKLKQTEVDCEYLKRCCETLTEENRRLQKELSELRSLKTVHPFYMHLPATTLSMCPSCERVASNSAPAPASSPSPATGIAAPAPEQRPSSFAALFSSPLNRPLAAQAQPQPQAPANS

SEQ ID NO: 17392 - protein, 397 aa, Zea mays
MNTTNGHGLMHHHHVQASMAPAQHQKQRPGLPPPAPAPAGAGSHSLHADMCVDDSSAPGRAQALGGLPPRKAHRRSRSDVVPYGYFQPLPPPSPSPKVEAGGWGLASGGGGGAGDDLLNAYMSMEGMDGLNHSDGDSRGSSGMRTNGADSSENESEDYGAGADSQFFLWGDGGKRRRNASGEPAAPPAAAAAAARHARSHSMDSLMGKLSFSANGEPGKFSLDFGGGEFTPAEMKRIMADEKLAEMALADPKRVKRVLANRQSAARSKERRMRYIAELEQKVQILQTEATTLSAQLTLLQRDSAGLATQNNELKFRLQAMEQQAQLRDALNEALTGEVQRLKLGDTASSGNNLPQQVQLRCQNQVAGLHKQQQQQGGEQIPFYQLEQNGAPRNDAPK

SEQ ID NO: 17393 - protein, 1135 aa, Zea mays
MSSPSNNRGTCSRSSSARSKHSARVVAQTPVDAQLHADFEGSQRHFDYSSSVGAANRPSASTSTVSTYLQNMQRGRYIQPFGCLLAVHPDTFALLAYSENAPEMLDLTPHAVPTIDQRDALTIGADVRTLFRSQSSVALHKAATFGEVNLLNPILVHARTSGKPFYAILHRIDVGLVIDLEPFNPADVPVTAAGALKSYKLAAKAISRLQSLPSGNLSLLCDVLVREVSELTGYDRVMAYKFHEDEHGEVISECRRSDLEPYLGLHYPATDIPQASRFLFMKNKMRMICDFSATPVLIIQDGSLAQPVSLCGSTLRASHGCHAQYMANMGSVASLVMSVTINDDEEEDGDTDSDQQPKGRKLWGLVVCHHTSPRFVPFPLRYACEFLLQVFGIQLSKEVELAAQAKERHILRTQTLLCDMLLRDALVGIFTQSPNVMDLVKCDGAALYYQNQVLVLGSTPSESEIKSIATWLQENHDGSTGLSTDSLVEAGYPGAAALREVVCGMVAIKISSKNFIFWFRSHTTKEIKWSGAKHEPFDADDNGRKMHPRSSFKAFLEVVKWRSVPWEDVEMDAIHSLQLILRDSLQGEDANRNNIRSIVKAPSDDMKKLQGLLELRTVTNEMVRLIETATAPVLAVDIAGNINGWNKKAAELTGLPVMEAIGRPLIDLVVADSVEVVKQILDSALQGIEEQNLEIKLKTFHEQECCGPVILMINSCCSRDLSEKVIGVCFVAQDLTRQKMIMDKYTRIQGDYVAIIKNPSELIPPIFMINDLGSCLEWNKAMQKITGMKREDAINKLLIGEVFTLHDYGCRVKDHATLTKLSILMNAVISGQDPEKLLFGFFGTGGKYIESLLTVNKRTNAEGKITGALCFLHVASPELQHALEVQKMSEQAATNSFKELTYIRQELRNPLNGMQFTYNLLKPSELTEDQRQLVSSNVLCQDQLKKILHDTDLESIEQCYMETNTVEFNLEEALNTVLMQGIPLGKEKRISIERDWPVEVSHMYIYGDNIRLQQVLADYLACALQFTQPAEGHIVLQVIPKKENIGSGMQIAHLEFRIVHPAPGVPEALIQEMFQHNPGVSREGLGLYISQKLVKTMSGTLQYLREADTSSFIILIEFPVAQLSSKRSKPSPSKF

SEQ ID NO: 17394 - protein, 250 aa, Zea mays
MAGEDCRSGAEMDALVRRLKLHRPSPSPYDPDPAAAPVPATAGDGELFRPRRAAVLVCLFRGDGGELRVILTKRSSSLSTHSGEVSLPGGKVEEGDADDVATALRESKEEIGLDPALVTVVASLEHFLSKHLLVVVPVVGILLDRQAFKPALNIAEVDEIFDVPLEMFLKDENRTSEEREKMGQTFTVHYFTYENGIQKYLIWGLTARVLIHAASVVYERPPDFTERRAHFKLPKFTKDCSSMLAGPAKH

SEQ ID NO: 17395 - protein, 334 aa, Zea mays
MEGAMTTRSKHRRHEEDQEMTMVELRRGPWTLEEDNLLMNYIACHGEGRWNLLARCSGLKRTGKSCRLRWLNYLKPDIKRGNLAPEEQLLILELHSKWGNRWSRIAQHLPGRTDNEIKNYWRTRLLEKTMAAAAASTSGEVLLPPLPPPPQLHPSRVAGLLASSSSSPVQRDTSDSDYLPQRYHHHPVDPSPSASSTVSSSAALAPVPCFSELSWVDQYGYGPYYSYGANLDDGAGVFDDSAALEEGLGLDALDLGPADDSDVAHSDATLLDYLNSACAGGGTMMMAVTGGGGGVQSSGCGATGGADADYRPSPCTWRTDELGDPRQHQWGGGI

SEQ ID NO: 17396 - protein, 300 aa, Zea mays
MPVILREMEDHSVHPMSKSNHGSLSGNGYEMKHSGHKVCDRDSSSESDRSHQEASAASESSPNEHTSTQSDNDEDHGKDNQDTMKPVLSLGKEGSAFLAPKLHYSPSFACIPYTSDAYYSAVGVLTGYPPHAIVHPQQNDTTNTPGMLPVEPAEEPIYVNAKQYHAILRRRQTRAKLEAQNKMVKNRKPYLHESRHRHAMKRARGSGGRFLNTKQLQEQNQQYQASSGSLCSKIIANSIISQSGPTCTPSSGTAGASTAGQDRSCLPSVGFRPTTNFSDQGRGGLKLAVIGMQQRVSTIR

SEQ ID NO: 17397 - protein, 347 aa, Zea mays
MAARDHRELSGDEDSVVAAGDLRRGPWTVEEDMLLVNYVAAHGEGRWNALARCAGTRCCMLVATLRDDDQTNNTMNCAYAGLRRTGKSCRLRWLNYLRPDLRRGNITAQEQLLILELHSRWGNRWSKIAQHLPGRTDNEIKNYWRTRVQKHARQLNCDVNSQRFKDLMRYIWMPRLLERIGSDDSGDGAFVIDAATPTPTPTLLTAATWCVDDVELSCTTAVSSSSSVSTDSMHQQQQQQQLVAVSPPPQPAAFGESNNDASHYGVHNSNAAMSMWGDTLCQPPHSATPHLAGAGTCSWSDESLLVPDAGGGVYADMGLPDLCDTDTMWAAGASADDDLWYTQIMGL

SEQ ID NO: 17398 - protein, 448 aa, Zea mays
MPFRSIVRDVRDGFGSLSRRGFEVRFLSHRRGKSHGAVHELHDPVLVVQSSCWASLPPELLRDVIERLETSEDTWPSRKHVVACAAVCRTWREMCREIVKSPEFSGKITFPVSLKQPGPRDGTIQCFIKRDTSTQIYSLYLSFSSAVPVENGKFLLSAKRNCRATYTEYIISINSGDTSRCTSNNTYIGKLRSNFLGTKFVIYDTHPPYNGTSQTVAGKTSQRFYSKKGSTKVSCRWYSIAQISYELNVLGTRGPRRMNCVMHSIPASCLEAGGSVPCQPDSIAAHSVGGSFSSVSLSKSSTMDHSMHFTSSRLSDAITGDGIVNRGQALNDADDEECKDMPLILRNKAPRWHEQLQCWCLNFRGRVTVASVKNFQLVAATQPAAGALTPSQAAPQSAPPPPPDQEKVILQFGKVGKDIFTMDYCYPLSAFQAFAICLSSFDTKLACE

SEQ ID NO: 17399 - protein, 250 aa, Zea mays
MASRRCLLRFLSIRLVPQRSQPLAPISTATRTLTSLSEALGSPAPRALASPRLYYPSRCHFATRSSGDEDDGEDEEEHYDDEGSDGEWGDDEEVVAAKKPSGKTEEEKVAEAAEIGYKVLGPLEADDKPFKPYEPVFAVVQIGSHQFKVSNGDSIFTERLKFCDVNDKLVLNRVLMLGSQAQTVIGRPILPDAAVHAVVEEHALDAKVIIFKKKRRKNYRRTKGHRQELTKLRITNIEGIDKPEAAAVAT

SEQ ID NO: 17400 - protein, 255 aa, Populus tomentosa
MDTSTQWPQGIGVVKPVEGPEMLERRARPQKEQALNCPRCTSTNTKFCYYNNYSLSQPRYFCKTCRRYWTEGGSLRNVPVGGGSRKNKRSSSNPSSSAAAASEKKFPLDLTQPNFHQSATDQNPKIHEGPDLNLAYPPSHISAMELLKSSGMNPRGFSAFMSIPAASDSNNMFSTGFSLQEFKPSTQNFSFEGFESGYSNIQGVHETGSSARLLFPIEDLKQQVPSNSEFERINARGQGDGAPGYWNGMLGGESW

SEQ ID NO: 17401 - protein, 255 aa, Populus tomentosa
MDTSTQWPQGIGVVKLVEGPEMLERRARPQKGQALNCPRCTSTNTKFCYYNNYSLSQPRYFCKTCRRYWTEGGSLRNVPVGGGSRKNKRSSSNPSSSAAAASEKKFPLDLTQPNFHQSATDQNPKIHEGPDLNLAYPPSHISAMELLKSSGMNPRGFSAFMSIPAASDSNNMFSTGFPLQEFKPSTQNFSFEGFESGYSNIQGVHETGSSARLLFPIEDLKQQVPSNSEFERINARGQGDGAPGYWNGMLGGESW

SEQ ID NO: 17402 - protein, 377 aa, Methanocaldococcus jannaschii
MFINGDVMLSKRLLNFESFEVMDILALAQKLESEGKKVIHLEIGEPDFNTPKPIVDEGIKSLKEGKTHYTDSRGILELREKISELYKDKYKADIIPDNIIITGGSSLGLFFALSSIIDDGDEVLIQNPCYPCYKNFIRFLGAKPVFCDFTVESLEEALSDKTKAIIINSPSNPLGEVIDREIYEFAYENIPYIISDEIYNGLVYEGKCYSAIEFDENLEKTILINGFSKLYAMTGWRIGYVISNDEIIEAILKLQQNLFISAPTISQYAALKAFEKETEREINSMIKEFDRRRRLVLKYVKDFGWEVNNPIGAYYVFPNIGEDGREFAYKLLKEKFVALTPGIGFGSKGKNYIRISYANSYENIKEGLERIKEFLNK

SEQ ID NO: 17403 - protein, 354 aa, Methanocaldococcus jannaschii
MVIIMSREANPFKKMPTILMPDELMAKALRRGEKVANEMRQKELPWLLKARFVEEHKVRTIASVVADNLQKVIDKTPPVRKLPKFYQEMVEVLVGIDDFKKSMGAFKWASELVRKLGNEYARKIRKARTPQQAGKLRKEFVGRVKSILEQIHPEMAFVAVAREKLKDLPTFKDLPTVVIAGYPNVGKSTLLKKLTGADVEINSYPFTTKGINVGYIGEIQMVDTPGLLDRPLYERNDIELQAILALNYLANLILFIIDASEFCGYTIEEQINLLKEIKDLFKAPIVVAINKIDLVDEERVKEIEEKLKEVGIEEILKISADKDIGLDELKERLKKIAIKEFLKDKDAENKELEC

SEQ ID NO: 17404 - protein, 437 aa, Rhodococcus erythropolis
EFGRNTADLSDRENVQFHWIEVENVPEIWKRLEAVGLKTTEACGDCPRVVLGSPLAGESLDEVLDPTPAIDEIVRRYIGDPKYSNLPRKFKTAISGQQDVVHEINDIAFIGVNHPEHGPGLDLWVGGGLSTNPMLAQRVGAWIPLDEVPDVWEGVVSIFRDYGYRRLRAKARLKFLIKDWGIEKFREVLETEYLERPLIDGPAPEKPKRPIDHVGIQKTRNGHNAVGFAPIAGRVSGDILAQVADAAEKAGSDRIRFTPYQKLIILDVADETLEPLIADLDALGLPARPSHWRKNLMACSGIEFCKLSFAETRKRSQVLVPELEQRLADINSQLDVPITININGCPNSCARSQIADIGFKGQLVDDGEGNQVEGFQVHLGGSLGFDSAFGRKLRQHKVTSVEMGDYIDRVVRQFVKNRNEGERFAEWAVRADEGDLR

SEQ ID NO: 17405 - protein, 546 aa, Staphylococcus aureus subsp. aureus MW2
MKQRIGAYLIDAIHRAGVDKIFGVPGDFNLAFLDDIISNPNVDWVGNTNELNASYAADGYARLNGLAALVTTFGVGELSAVNGIAGSYAERIPVIAITGAPTRAVEHAGKYVHHSLGEGTFDDYRKMFAHITVAQGYITPENATTEIPRLINTAIAERRPVHLHLPIDVAISEIEIPTPFEVTAAKDTDASTYIELLTSKLHQSKQPIIITGHEINSFHLHQELEDFVNQTQIPVAQLSLGKGAFNEENPYYMGIYDGKIAEDKIRDYVDNSDLILNIGAKLTDSATAGFSYQFNIDDVVMLNHHNIKIDDVTNDEISLPSLLKQLSNISYTNNATFPAYHRPTSPDYTVGTEPLTQQTYFKMMQNFLKPNDVIIADQGTSFFGAYDLALYKNNTFIGQPLWGSIGYTLPATLGSQLADKDRRNLLLIGDGSLQLTVQAISTMIRQHIKPVLFVINNDGYTVERLIHGMYEPYNEIHMWDYKALPAVFGGKNVEIHDVESSKDLQDTFNAINGHPDVMHFVEVKMSVEDAPKKLIDIAKAFSQQNK

SEQ ID NO: 17406 - protein, 394 aa, Staphylococcus aureus subsp. aureus MW2
MQEAYIVAYGRSAAAKAKQGALFHERPDDVAAKVLQGVLKRIDGKFNKNMIEDVIVGTAFPEGLQGQNIARTIALLTGLSDTVPGQTVNRYCSSGLQTIAIAANQIMAGQGDILVAGGVELMSAVPMGGNEPTNNPTLQYDDIGASYPMGLTAENVASQFDVSREDQDAYAVRSHQRAYEAQRDGRFNDEIIPIQVNSVEYTNAGPKVHTNIFDQDEFIRPDTTMEALAKLRTVFKADGTVTAGTSAPLSDGAGFVVLMSGDKVKELGVTPIARFVGYKAVGVDPKIMGIGPAYAIPEVLSLSNLSVEDIDLIELNEAFASQTIASIKEVGLDISRTNVNGGAIALGHPLGATGAMLTARLLNEMGRRPDSRYGMVTMCIGVGMGAAAIFEYVR

SEQ ID NO: 17407 - protein, 381 aa, Staphylococcus aureus subsp. aureus MW2
MLTEQEKDIIKQTVPLLKEKGTEITSIFYPKMFKAHPELLNMFNQTNQKRGMQSSALAQAVMAAAVNIDNLSVIKPVIMPVAYKHCALQVYAEHYPIVGENLLKAIQDVTGLEENDPVIQAWAKAYGVIADVFIQIEKEIYDQMMWIGFKPFKITNIKQESEDIKSFTVETEEYDFSEFTPGQYITVDVSSEKLPYRAKRHYSIVSGEKNHLTFGVKRDVTTEHEGEVSTILHDEIKEGDMINLAAPVGGFVLENTTEPQLFLGSGIGVTPLVAMYEAASAKGLDTQMVQVAENEQHLPFKDNFNSIASHHDNAKLYTHLKDKQGYIGAEELQAFLANKPEIYICGGTKFLQSMIEALKSLNYDMDRVHYETFIPRLSVAV

SEQ ID NO: 17408 - protein, 393 aa, Staphylococcus aureus subsp. aureus MW2
MTRVVLAAAYRTPIGVFGGAFKDVPAYDLGATLIEHIIKETGLNPSEIDEVIIGNVLQAGQGQNPARIAAMKGGLPETVPAFTVNKVCGSGLKSIQLAYQSIVTGENDIVLAGGMENMSQSPMLVNNSRFGFKMGHQSMVDSMVYDGLTDVFNQYHMGITAENLVEQYGISREEQDTFAVNSQQKAVRAQQNGEFDSEIVPVSIPQRKGEPILVTKDEGVRENVSVEKLSRLRPAFKKDGTVTAGNASGINDGAAMMLVMSEDKAKELNIEPLAVLDGFGSHGVDPSIMGIAPVGAVEKALKRSKKELSDIDVFELNEAFAAQSLAVDRELKLPPEKVNVKGGAIALGHPIGASGARVLVTLLHQLNDEVETGLTSLCIGGGQAIAAVVSKYK

SEQ ID NO: 17409 - protein, 1499 aa, Staphylococcus aureus subsp. aureus MW2
MHNEKLIKGLYDYREEHDACGIGFYANMDNKRSHDIIDKSLEMLRRLDHRGGVGADGITGDGAGIMTEIPFAFFKQHVTDFDIPGEGEYAVGLFFSKERILGSEHEAVFKKYFEGEGLSILGYRNVPVNKDAIAKHVADTMPVIQQVFIDIRDIEDVEKRLFLARKQLEFYSTQCDLELYFTSLSRKTIVYKGWLRSDQIKKLYTDLSDDLYQSKLGLVHSRFSTNTFPSWKRAHPNRMLMHNGEINTIKGNVNWMRARQHKLIETLFGEDQHKVFQIVDEDGSDSAIVDNALEFLSLAMEPEKAAMLLIPEPWLYNEANDANVRAFYEFYSYLMEPWDGPTMISFCNGDKLGALTDRNGLRPGRYTITKDNFIVFSSEVGVVDVPESNVAFKGQLNPGKLLLVDFKQNKVIENNDLKGAIAGELPYKAWIDNHKVDFDFENIQYQDSQWKDETLFKLQRQFAYTKEEIHKYIQELVEGKKDPIGAMGYDAPIAVLNERPESLFNYFKQLFAQVTNPPIDAYREKIVTSELSYLGGEGNLLAPDETVLDRIQLKRPVLNESHIAAIDQEHFKLTYLSTVYEGDLEDALEALGREAVNAVKQGAQILVLDDSGLVDSNGFAMPMLLAISHVHQLLIKADLRMSTSLVAKSGETREVHHVACLLAYGANAIVPYLAQRTVEQLTLTEGLQGTVVDNVKTYTDVLSEGVIKVMAKMGISTVQSYQGAQIFEAIGLSHDVIDRYFTGIQSKLSGISIDQIDAENKARQQSDDNYLASGSTFQWRQQGQHHAFNPESIFLLQHACKENDYAQFKAYSEAVNKNRTDHIRHLLEFKACTPIDIDQVEPVSDIVKRFNTGAMSYGSISAEAHETLAQAMNQLGGKSNSGEGGEDAKRYEVQVDGSNKVSAIKQVASGRFGVTSDYLQHAKEIQIKVAQGAKPGEGGQLPGTKVYPWIAKTRGSTPGIGLISPPPHHDIYSIEDLAQLIHDLKNANKDADIAVKLVSKTGVGTIASGVAKAFADKIVISGYDGGTGASPKTSIQHAGVPWEIGLAETHQTLKLNDLRSRVKLETDGKLLTGKDVAYACALGAEEFGFATAPLVVLGCIMMRVCHKDTCPVGVATQNKDLRALYRGKAHHVVNFMHFIAQELREILASLGLKRVEDLVGRTDLLQRSSTLKVNSKAASIDVEKLLCPFDGPNTKEIQQNHNLEHGFDLTNLYEVTKPYIAEGRRYTGSFTVNNEQRDVGVITGSEISKQYGEAGLPENTINVYTNGHAGQSLAAYAPKGLMIHHTGDANDYVGKGLSGGTVIVKAPFEERQNEIIAGNVSFYGATGGKAFINGSAGERFCIRNSGVDVVVEGIGDHGLEYMTGGHVINLGDVGKNFGQGMSGGIAYVIPSDVEAFVENNQLDTLSFTKIKHQEEKAFIKQMLEEHVSHTNSTRAIHVLKHFDRIEDVVVKVIPKDYQLMMQKIHLHKSLHDNEDEAMLAAFYDDSKTIDAKHKPAVVY

SEQ ID NO: 17410 - protein, 445 aa, Staphylococcus aureus subsp. aureus MW2
MKQPILNKLESLNQEEAISLHVPGHKNMTIGHLSQLSMTMDKTEIPGLDDLHHPEEVILESMKQVEKHSDYDAYFLVNGTTSGILSVIQSFSQKKGDILMARNVHKSVLHALDISQQEGHFIETHQSPLTNHYNKVNLSRLNNDGHKLAVLTYPNYYGETFNVEEVIKSLHQLNIPVLIDEAHGAHFGLQGFPDSTLNYQADYVVQSFHKTLPALTMGSVLYIHKNAPYRETIIEYLSYFQTSSPSYLIMASLESAAEFYKTYDSTVFFDKRAQLIECLEKKGFEMLQVDDPLKLLIKYEGFTGHDIQNWFMNAHIYLELADDYQVLAVLPLWHHDDTYLFDSLLRKIEDMILPKKSVSKVKQTQLLTTEGNYKPKRFEYVTWCDLKKAKGKVLARHIVPYPPGIPIIFKGETITENMIELVNEYLETGMIVEGIKNNKILVEDE

SEQ ID NO: 17411 - protein, 494 aa, Staphylococcus aureus subsp. aureus MW2
MEKKNKQIDRGDLKQNLSEKFVWAIAYGSCIGWGAFILPGDWIKQSGPIAASIGIVIGTLLMILIAVSYGALVERFPVSGGAFAFSFLSFGRYVSFFSSWFLTFGYVCVVALNATAFSLLVKFLLPDVLNNGKLYTIAGWDVYITEIIIATVLLLVFMLVTIRGASVSGSLQYYFCVAMVIVVLLMFFGSFFGNNFALENLQPLAEPSKGWLVSIVVIVSVAPWAYVGFDNIPQTAEEFNFAPNKTFKLIVYSLLAASLTYVVMILYTGWLSTSHQSLNGQLWLTGAVTQTAFGYIGLGVLAIAIMMGIFTGLNGFLMSSSRLLFSMGRSGIMPTMFSKLHSKYKTPYVAIIFLVGVSLIAPWLGRTALTWIVDMSSTGVSIAYFITCLSAAKLFSYNKQSNTYAPVYKTFAIIGSFVSFIFLALLLVPGSPAALTAPSYIALLGWLIIGLIFFVIRYPKLKNMDNDELSRLILNRSENEVDDMIEEPEKEKTK

SEQ ID NO: 17412 - protein, 328 aa, Staphylococcus aureus subsp. aureus MW2
MADLLNVLKDKLSGKNVKIVLPEGEDERVLTAATQLQATDYVTPIVLGDETKVQSLAQKLDLDISNIELINPATSELKAELVQSFVERRKGKATEEQAQELLNNVNYFGTMLVYAGKADGLVSGAAHSTGDTVRPALQIIKTKPGVSRTSGIFFMIKGDVQYIFGDCAINPELDSQGLAEIAVESAKSALSFGMDPKVAMLSFSTKGSAKSDDVTKVQEAVKLAQQKAEEEKLEAIIDGEFQFDAAIVPGVAEKKAPGAKLQGDANVFVFPSLEAGNIGYKIAQRLGGYDAVGPVLQGLNSPVNDLSRGCSIEDVYNLSIITAAQALQ

SEQ ID NO: 17413 - protein, 575 aa, Staphylococcus aureus subsp. aureus MW2
MKRENPLFFLFKKLSWPVGLIVAAITISSLGSLSGLLVPLFTGRIVDKFSVSHINWNLIALFGGIFVINALLSGLGLYLLSKIGEKIIYAIRSVLWEHIIQLKMPFFDKNESGQLMSRLTDDTKVINEFISQKLPNLLPSIVTLVGSLIMLFILDWKMTLLTFITIPIFVLIMIPLGRIMQKISTSTQSEIANFSGLLGRVLTEMRLVKISNTERLELDNAHKNLNEIYKLGLKQAKIAAVVQPISGIVMLLTIAIILGFGALEIATGAITAGTLIAMIFYVIQLSMPLINLSTLVTDYKKAVGASSRIYEIMQEPIEPTEALEDSENVLIDDGVLSFEHVDFKYDVKKILDDVSFQIPQGQVSAFVGPSGSGKSTIFNLIERMYEIESGDIKYGLESVYNIPLSKWRRKIGYVMQSNSMMSGTIRDNILYGINRHVSDEELINYAKLANCHDFIMQFDEGYDTLVGERGLKLSGGQRQRIDIARSFVKNPDILLLDEATANLDSESELKIQEALETLMEGRTTIVIAHRLSTIKKAGQIIFLDKGQVTGKGTHSELMASHAKYKNFVVSQKLTD

SEQ ID NO: 17414 - protein, 319 aa, Staphylococcus aureus subsp. aureus MW2
MVKIVVSRKIPDKFYQQLSKLGDVVMWQKSLVPMPKDQFVTALRDADACFITLSEQIDAEILAQSPNLKVIANMAVGYDNIDVESATANNVVVTNTPNVLTETTAELGFTLMLAIARRIVEAEKYVEADAWQSWGPYLLSGKDVFNSTIGIYGMGDIGKAFARRLQGFNTNILYHNQSRHKDAEADFNATYVSFETLLAESDFIICTAPLTKETHHKFNAEAFEQMKNDAIFINIGRGQIVDETALIDALDNKEILACGLDVLANEPIDHTHPLMGRDNVLITPHIGSASVTTRDNMIQLCINNIEAVMTNQVPHTPVN

SEQ ID NO: 17415 - protein, 401 aa, Staphylococcus aureus subsp. aureus MW2
MKEKIVLAYSGGLDTSVAVQWLIDKGYDVVACCLDVGEGKDLDIVYKKALDMGAVECHIIDATKEFSDEYVSYAIKGNLMYENAYPLVSALSRPLIAKKLVEIAEKTNSVGIAHGCTGKGNDQVRFEVAIKALNPSLKAFAPVREWAWSREEEIDYAIKHNIPVSINHDSPYSIDQNLWGRANECGILEDPYAAPPEDAFDLTNALEETPDAADEIILTFDKGIPVQIDGKTYELDDLILTLNALAGKHGIGRIDHVENRLVGIKSREIYEAPAAEVILKAHKALETITLTKDVAHFKPIIEKQFAEQLYNGLWFSPLTDSLKLFIDSTQQYVSGDVRIKLFKGNAIVNGRKSPYTLYDEKLATYTKEDAFNQDAAVGFIDIYGLPTQVNSMLHGGYSNEQ

SEQ ID NO: 17416 - protein, 869 aa, Staphylococcus aureus subsp. aureus MW2
MDINKMTYAVQSALQQAVELSQQHKLQNIEIEAILSAALNESESLYKSILERANIEVDQLNKAYEDKLNTYASVEGDNIQYGQYISQQANQLITKAESYMKEYEDEYISMEHILRSAMDIDQTTKHYINNKVEVIKEIIKKVRGGNHVTSQNPEVNYKALAKYGRDLVEEVRQGKMDPVIGRDEEIRNTIRILSRKTKNNPVLIGEPGVGKTAIVEGLAQRIVKKDVPESLLDKTVFELDLSALVAGAKYRGEFEERLKAVLKEVKESDGRIILFIDEIHMLVGAGKTDGAMDAGNMLKPMLARGELHCIGATTLNEYREYIEKDSALERRFQKVAVSEPDVEDTISILRGLKERYEVYHGVRIQDRALVAAAELSDRYITDRFLPDKAIDLVDQACATIRTEMGSNPTELDQVNRRVMQLEIEESALKNESDNASKQRLQELQEELANEKEKQAALQSRVESEKEKIANLQEKRAQLDESRQALEDAQTNNNLEKAAELQYGTIPQLEKELRELEDNFQDEQGEDTDRMIREVVTDEEIGDIVSQWTGIPVSKLVETEREKLLHLSDILHKRVVGQDKAVDLVSDAVVRARAGIKDPNRPIGSFLFLGPTGVGKTELAKSLAASLFDSEKHMIRIDMSEYMEKHAVSRLIGAPPGYIGHDEGGQLTEAVRRNPYSVILLDEVEKAHTDVFNVLLQILDEGRLTDSKGRSVDFKNTIIIMTSNIGSQVLLENVKETGEITESTEKAVMTSLNAYFKPEILNRMDDIVLFKPLSIDDMSMIVDKILTQLNIRLLEQRISIEVSDDAKAWLGQEAYEPQYGARPLKRFVQRQIETPLARMMIKEGFPEGTTIKVNLNSDNNLTFNVEKIHE

SEQ ID NO: 17417 - protein, 401 aa, Staphylococcus aureus subsp. aureus MW2
MVTRSVLKYGGSSVSDFTKIKRIAEMLKERVNQDEQLIVVVSAMGNTTDQLMTNVSTLTKAPKQQELALLLTTGEQQTVSYLSMVLNDIGVNAKAMTGYQAGIKTIGHHLKSKIAQINPQTFEQAFQENDILVVAGFQGINEHQELTTLGRGGSDTTAVALAVSNQIPCEIYTDVDGVYATDPRLLPKAKRLDIVSYEEMMEMSALGAGVLETRSVELAKNYNIPLYLGKTLSNVKGTWIMSNEEILEKKAVAGVALDKHMMHVTISYPLPDNQLLTQLFTELEEGAVNVDMISQIVNLDGLQLSFTIKDSDFHQISMILETLKNQYEALAYKINEHYVKISLIGSGMRDMSGVASKAFLTLIENNIPFYQTTTSEISISYVIDDFNGQQAVEKLYDAFNI

SEQ ID NO: 17418 - protein, 372 aa, Staphylococcus aureus subsp. aureus MW2
MLVAVVKELKQGEGRVACTPENVRKLTDAGHKVIVEKNAGIGSGFSNDMYEKEGAKIVTHEQAWEADLVIKVKEPHESEYQYFKKNQIIWGFLHLASSKEIVEKMQEVGVTAISGETIIKNGKAELLAPMSAIAGQRSAIMGAYYSEAQHGGQGTLVTGVHENVDIPGSTYVIFGGGVAATNAANVALGLNAKVIIIELNDDRIKYLQDMYAEKDVTVVKSTPENLAEQIKKADVFISTILIPGAKPPKLVTREMVKSMKKGSVLIDIAIDQGGTIETIRPTTISDPVYEEEGVIHYGVPNQPGAVPRTSTMALAQGNIDYILEICDKGLEQAIKDNEALSTGVNIYQGQVTNQGLASSHDLDYKEILNVIE

SEQ ID NO: 17419 - protein, 366 aa, Staphylococcus aureus subsp. aureus MW2
MSDILKCIGCGAPLQSEDKNKPGFVPEHNMFRDDVICRRCFRLKNYNEVQDVGLESEDFLKLLSGLADKKGIVVNVVDVFDFEGSFINAVKRIVGNKKIILAANKLDLLPKQINKRRVKEWLKRTARKYGLEADDVVLISAEKGWGIDDLLSSIANIRENEDVYIVGTTNVGKSTLINKLIEASVGEKDVVTTSRFPGTTLDMIDIPLDETSFMYDTPGIIQDHQMTHLVSEKELKIIMPKKEIKQRVYQLNEAQTLFFGGLARIDYVSGGKRPLVCFFSNDLNIHRTKTEKANDLWRNQLGDLLTPPGNPQNFDLNEVKAVRLETGKEKRDVMISGLGFITIGPGAKVIVRVPKNVDVVLRNSIL

SEQ ID NO: 17420 - protein, 380 aa, Staphylococcus aureus subsp. aureus MW2
MEIYADYAATTPVKPEVVDAMMMIYNSHYGNPSSIHAKGRDARKYLDESRRQIAQLLGADTHEIIFTSGATESNNTAIKGIVKANEQLGNHIITSKIEHHSVLHVFEQLEREGFDVTYLDVDDTGAIDLDQLEETITDKTILVSIMFVNNEVGTVQQIYDIQDIIAETNAYFHVDAVQAIGHLDVKFDEFEIDAMSITAHKFGGPKGVGALLVKDHVTLDYPQLGGEQELKRRAGTENLAQIVGMAKALQLAEKNRDDNNIHLMNLKEQFLVKLQERAIPFELNGSMTDATGHIVNLYFPFVEVETMLTLLDMAQIYVSSGSACTAGSTQPSHVLDAMFEDEERSNHSIRFSFNELTTENEINAIVAEIHKIYFKFKEES

SEQ ID NO: 17421 - protein, 372 aa, Staphylococcus aureus subsp. aureus MW2
MKIGIPREIKNNENRVGLSPSGVHALVESGHTVLVETNAGSGSFFEDVDYKEAGAEIVAEQAKVWDVDMVIKVKEPLESEYPYFKEGLVLFTYLHLANEEKLTQALIDRKVISIAYETVQLPDRSLPLLSPMSEVAGRMSAQVGAEFLQKLNGGMGILLGGVPGVPKGKVTIIGGGQAGTNAAKIALGLGADVTILDVNPKRLQQLDDLFGGRVHTIMSNPLNIELYVKQSDLVIGAVLIPGAKAPRLVTEDMIKQMKNGSVIIDIAIDQGGIFETTDKITTHDDPTYIKHGVVHYAVANMPGAVPRTSTLALNNATLPYALMLANKGYREAFKSNQPLSLGLNTYKGHVTNKGVAEAFEMEYKSVEEALQL

SEQ ID NO: 17422 - protein, 400 aa, Staphylococcus aureus subsp. aureus MW2
MSKLILAINAGSSSLKFQLIRMPEEELVTKGLVERIGLKDSIFTIEVNGEKVKTVQDIKDHVEAVDIMLDAFKAHNIINDINDIDGTGHRVVHGGEKFPESVAITDEVEKEIEELSELAPLHNPANLMGIRAFRKLLPNIPHVAIFDTAFHQTMPEKAYLYSLPYHYYKDYGIRKYGFHGTSHKFVSQRAAEMLDKPIEDLRIISCHIGNGASIAAIDGGKSIDTSMGFTPLAGVTMGTRSGNIDPALIPFIMEKTGKTAEQVLEILNKESGLLGLSGTSSDLRDLSEEAESGKARSQMALDVFASKIHKYIGSYAARMHGVDVIVFTAGIGENSVEIRAKVLEGLEFMGVYWDPKKNENLLRGKEGFINYPHSPVKVVVIPTDEESMIARDVMTFGGLK

SEQ ID NO: 17423 - protein, 379 aa, Staphylococcus aureus subsp. aureus MW2
MIYLDNAATTKAFEEVLDTYLKVNQSMYYNPNSPHKAGLQANQLLQQAKAQINAMINSKTNYDVVFTSGATESNNLALKGIAYRKFDTAKEIITSVLEHPSVLEVVRYLEAHEGFKVKYVDVKKDGSINLEHFKELMSDKVGLVTCMYVNNVTGQIQPIPQMAKVIKNYPKAHFHVDAVQAFGKISMDLNNIDSISLSGHKFNGLKGQGVLLVNHIQNVEPTVHGGGQEYGVRSGTVNLPNDIAMVKAMKIANENFEALNAFVTVLNNDVRQFLNKYHGVYINSSTSGSPFVLNISFPGVKGEVLVNAFSKYDIMISTTSACSSKRNKLNEVLAAMGLSDKSIEGSIRLSFGATTTKEDIARFKEIFIIIYEEIKELLK

SEQ ID NO: 17424 - protein, 534 aa, Staphylococcus aureus subsp. aureus MW2
MKQFNVLVADPISKDGIKALLDHEQFNVDIQTGLSEEALIKIIPSYHALIVRSQTTVTENIINAADSLKVIARAGVGVDNININAATLKGILVINAPDGNTISATEHTLAMLLSMARNIPQAHQSLTNKEWNRNAFKGTELYHKTLGVIGAGRIGLGVAKRAQSFGMKILAFDPYLTDEKAKSLSITKATVDEIAQHSDFVTLHTPLTPKTKGLINADFFAKAKPSLQIINVARGGIIDEKALIKALDEGQISRAAIDVFEHEPATDSPLVAHDKIIVTPHLGASTVEAQEKVAISVSNEIIEILIDGTVTHAVNAPKMDLSNIDDTVKSFINLSQTVGELAIQLMYNAPSSIKITYGGDLASIDSSLLTRTIITHILKDDLGPEVNIINALMLLNQQQVTLNIENNKAETGFSNYLEVELSNDSDSVKVGASVFTGFGPRIVRINNFSVDLKPNQYQIVSYHNDTPGMVGKTGALLGKYNINIASMTLGRTEAGGDALMILSVDQPVSNNIIDELKQVGEYNQIFTTELTVQS

SEQ ID NO: 17425 - protein, 416 aa, Staphylococcus aureus subsp. aureus MW2
MNLNDTIFMFLCTLLVWLMTPGLSLFYGGLVQSKNALNTVMQSMAAIVLVTFVWITVGFTISFGNGNLWFGNWEYTFLNHVGFATQEDISPHIPFALFMLFQMMFCTIAISILSGSIAEKMKFIPYLLFVVIWTALVYSPVAHWVWGGGWINKLGVLDFAGGTVVHITSGVSGLVLAIMIGKGNKHSESTPHNLIITLIGGIFVWIGWYGFNVGSAFTFDKIAMLAFTNTVISASAGSIGWLILEYIFKKTTSLLGLLLGALAGLVVITPAAGYVTYLSATIMALIGGICCYIVINYIKVKLKYHDALDAFGIHGVGGIIGAALTAVFQSKKANPDIENGFIYTGDIHIILVQILCVTAVVIFSIVMTFIIAKVIKLITPLSVTEQETNIGLDKIVHGEHAYFEGELNRFNKHIRY

SEQ ID NO: 17426 - protein, 302 aa, Staphylococcus aureus subsp. aureus MW2
MTKTKAIDIIGAPSTFGQRKLGVDLGPTAIRYAGLISRLKQLDLDVYDKGDIKVPVVNIEKFHSEQKGLRNYDEIIDVNQKLNKEVSASIENNRFPLVLGGDHSIAVGSVSAISKHYNNLGVIWYDAHGDLNIPEESPSGNIHGMPLRILTGEGPKELLELNSNVIKPENIVLIGMRDLDKGERQFIKDHNIKTFTMSDIDKLGIKEVIENTIEYLKSRNVDGVHLSLDVDALDPLETPGTGTRVLGGLSYRESHFALELLHQSHLISSMDLVEVNPLIDSNNHTAEQAVSLVGTFFGETLL

SEQ ID NO: 17427 - protein, 317 aa, Staphylococcus aureus subsp. aureus MW2
MEKVYVAGAIPEVGLKLLQEHFEVEMYEGKGLVDKDTLIKGVKNATALISLLSTNVDKDVIDAGKDLKIIANYGAGFNNIDIEYAREKSIDVTNTPKASTNATADLTIGLVLAVARRIVEGDQLSRTTGFDGWAPLFFRGREVSGKTIGIIGLGEIGSAVARRARAFDMDVLYTGPNRKEEKEREIGAKYVDLDTLLKNADFITINAAYNPKMHHLIDTEQFKMMKSTAYLINASRGPIVHEQALVQALKDNEIEGAALDVYEFEPDITDDLKSLNNVVLTPHIGNATFEARDMMSKIVANAAISAVQGEKPQFVVN

SEQ ID NO: 17428 - protein, 374 aa, Staphylococcus aureus subsp. aureus MW2
MKIAIIGAGIGGLTAAALLQEQGHTIKVFEKNESVKEIGAGIGIGDNVLKKLGNHDLAKGIKNAGQILSTMTVLDDKDRLLTTVKLKSNTLNVTLPRQTLIDIIKSYVKDDAIFTNHEVTHIDNETDKVTIHFAEQESEAFDLCIGADGIHSKVRQSVNADSKVLYQGYTCFRGLIDDIDLKHPDCAKEYWGRKGRVGIVPLLNNQAYWFITINSKENNHKYSSFGKPHLQAYFNHYPNEVREILDKQSETGILLHNIYDLKPLKSFVYGRTILLGDAAHATTPNMGQGAGQAMEDAIVLVNCFNTYDFEKALQRYDKIRVKHTAKVIKRSRKIGKIAQYRSRLVVAVRNRIMKMMPNALAAGQTKFLYKSKEK

SEQ ID NO: 17429 - protein, 459 aa, Staphylococcus aureus subsp. aureus MW2
MENNELQRGLSARQIQMIALGGTIGVGLFMGATSTIKWTGPSVILAYLIAGIFLFLIMRAMGEMIYLNPTTGSFATFASDYIHPAAGYMTAWSNIFQWIVVGMSEVIAVGEYMKFWFPELPTWIPGVIAILLLMAANLFSVKAFGEFEFWFALIKVVTIILMIIAGFGLIFFGFGNGGHAVGISNLWTNGGFMPNGIVGFFFALSIVIGSYQGVELIGITAGETKDPQKNIVKAVNGVIWRILIFYLGAIFVIVSVYPWNQLGDIGSPFVATFAKIGITFAAGLINFVVLTAAMSGCNSGIFSASRMIYTLAHKGEMPKIFTKIMRNGVPLYTVIAVSLGILIGALLNVILPLYIDGAKSIFVYVYSASILPGMIPWFMILFSHLRFRKLHPEELEGHPFKMPGGAVTNYLTILFLILVLVGMVFNVETRISVLIGVIFLTIVTIYYFIRYNKNNVKAK

SEQ ID NO: 17430 - protein, 402 aa, Staphylococcus aureus subsp. aureus MW2
MIELNAITTLCLACILYLLGKAIVNHVNFLKRICIPAPVIGGLIFAILVAALDSFGMVKIKLDASFIQDFFMLAFFTTIGLGASLKLFKLGGKLLLLYFMFCAIISVIQNIVGVSLAKVLNIKPLLGLTAGSMSMEGGHGNAAAYGKTIQDLGIDSALTAALAAATLGLVFGGLIGGPVVKFLIKRYNLKPQHSDDTFKDYSQVAYNEHLHSKFNATEVFFIQFTIVVFCMAVGSYFSHLFTSQTGINVPIYVGSLFVAVIVRNISESFNFNIVDLKITNQIGDVALGIFLSLALMSIQLIEIYKLAIPLIIIVLVQVVVMILFAVLILFRGLGKDYDAAVMVGGFIGHGLGATPNAMANLDVITKKYGNSPKAYLVVPIVGAFLIDLIGVIVIMGFIQWFS

SEQ ID NO: 17431 - protein, 545 aa, Staphylococcus aureus subsp. aureus MW2
MNKDKQLHNDKINLSQLVLLGLGSLIGSGWLFGAWEASSIAGPAAIISWVLGFLVIGTIAYNYIEIGTMFPQSGGMSNYAQYTHGSLLGFIAAWANWVSLVTIIPIEAVSAVQYMSSWPWHWAKPMRYLMENGSISTYGLLAVYLIIVIFSLLNYWSVKLLTSFTSLISVFKLGVPMLTIIMLMLSGFDTSNYGHSASTFMPYGSAPIFAATTASGIIFSFNSFQTIINMGSEIKNPEKNIARGIAISLSISAVLYIILQSTFITSMPQSMLQHSGWNGINFNSPFADLAILLGINWLAILLYIEAFVSPFGTGVSFVAVTGRVLRAMEKNGHIPKFLGKMNEKYHIPRVAIIFNAIISMIMVTLFRDWGTLAAVISTATLVAYLTGPTTVIALRKMGPTMTRPFRAKILKVMAPLSFVLASLAIYWAMWPTTAEVILIIILGLPIYFFYEYRMNWRNTKKQIGGSLWIIVYLIVLSILSFIGSKEFKGLNMIHYPFDFIVIIVVALIFYYIGTTSSFESVYFRRATRINTKMRESLNNESKSSH

SEQ ID NO: 17432 - protein, 525 aa, Staphylococcus aureus subsp. aureus MW2
MTFLTVMQFIVNIIVVGFLLTVIVIGLIWLIKDKRQSQHSVLRNYPLLARIRYISEKMGPELRQYLFSGDNEGKPFSRNDYKNIVLAGKYNSRMTSFGTTKDYQDGFYIQNTMFPMQRNEISVDNTTLLSTFIYKIANERLFSREEYRVPTKIDPYYLSDDHAIKLGERLKHPFILKRIVGQSGMSYGALGKNAITALSKGLAKAGTWMNTGEGGLSEYHLKGNGDIIFQIGPGLFGVRDKEGNFSEGLFKEVAQLSNVRAFELKLAQGAKTRGGHMEAEKVNEEIAKIRNVEPYKTINSPNRYEFIHNAEDLIRFVDQLQQLGQKPVGFKIVVSKVSEIETLVRTMVELDKYPSFITIDGGEGGTGATFQELQDGVGLPLFTALPIVSGMLEKYGIRDKVKLAASGKLVTPDKIAIALGLGADFVNIARGMMISVGCIMSQQCHMNTCPVGVATTDAKKEKALIVGEKQYRVTNYVTSLHEGLFNIAAAVGVSSPTEITADHIVYRKVDGELQTIHDYKLKLIS

SEQ ID NO: 17433 - protein, 127 aa, Staphylococcus aureus subsp. aureus MW2
MIRTMMNAKIHRARVTESNLNYVGSITIDSDILEAVDILPNEKVAIVNNNNGARFETYVIAGERGSGKICLNGAASRLVEVGDVVIIMTYAQLNEEEIQNHAPKVAVMNEDNVIIEMIHEKENTIVL

SEQ ID NO: 17434 - protein, 482 aa, Staphylococcus aureus subsp. aureus MW2
MGSFFNKIARKEDPAIYQNKDGHLKRTLRVRDFLALGVGTIVSTSIFTLPGIVAAEHAGPAVALSFLLAAIVAGLVAFTYAEMAAAMPFAGSAYSWVNVLFGEFFGWVAGWALLAEYFIAVAFVASGFSANLRGLVKPIGIELPAALSNPFGTNGGFIDIIAAIVILLTALLLSRGMSEAARMENILVILKVLAIILFVIVGLTAINVSNYVPFIPEHKVTATGDFGGWQGIYAGVSMIFLAYIGFDSIAANSAEALDPQKTMPRGILGSLSVAIVLFIAVALVLVGMFHYSQYANNAEPVGWALRQSGHGVVAAIVQAISVIGMFTALIGMMLAGSRLLYSFGRDGLLPSWLSHLNDKHLPNRALVILTIIGVLIGSMFPFAFLAQLISAGTLVAFMFVSLAMYRLRKREGKDLPIPAFKLPLYPVLPAVTFVLVLLVFWGLGFEAKLYTLIWFIVGIILYLSYGLRHSKKNDVAEYHPPK

SEQ ID NO: 17435 - protein, 544 aa, Oncidium Gower Ramsey
MLLRSLCSRRSFSPLRSSLCRSQTLNLNPQIDFFRQFSSSSSDSEFRKYAGYFILVLGCGVATYFSFPFSENAKHKKAQMFRYAPLPEDLHVVTNWSGTHEVYTRVFLQPESLEDLEKIVRDAHERGQKIRPVGSGLSPNGIGLQRVGMVNLALMDKVLEVDKDKKRVRVQAGARVSQLVDALKEHGLTLQNFASIREQQIGGIVQVGAHGTGARLPPIDEQVLSMKLVTPAKGTMEVSPEKDPELFYLARRGLGGLGVVAEVTIQCVDRHELVEHTFVSNLNEIRKNHKKWLSENKHLKYLWIPYTDTIVVVHCNPLSKWKKPKMARKFEEEEAIQSVRHLFRESLKKHRTSESPDEPDIDQLSFTELRDKLIALDPLNKDHVIEVNKAEAEYWKKSEGYQVGWSDEILGFDCGGQQWVSEICFPVGTLVSPSMADLEFMEELKKLIERENVPAPAPLEQRWTARSRSLMSPASSSQEDDIFSWVGIIMYLPTMDARQRKEITEEFFLYRDLVQSRLWDKYSAYEHWAKIEVPRTRRSSLICR

SEQ ID NO: 17436 - protein, 135 aa, Methanocaldococcus jannaschii
MIIMPGTKQVNVGSLKVGQYVMIDGVPCEIVDISVSKPGKHGGAKARVVGIGIFEKVKKEFVAPTSSKVEVPIIDRRKGQVLAIMGDMVQIMDLQTYETLELPIPEGIEGLEPGGEVEYIEAVGQYKITRVIGGK

SEQ ID NO: 17437 - protein, 394 aa, Staphylococcus aureus
MQEAYIVAYGRSAAAKAKQGALFHERPDDVAAKVLQGVLKRIDGKFNKNMIEDVIVGTAFPEGLQGQNIARTIALRTGLSDTVPGQTVNRYCSSGLQTIAIAANQIMAGQGDILVAGGVELMSAVPMGGNEPTNNPTLQYDDIGASYPMGLTAENVASQFDVSREDQDAYAVRSHQRAYDAQLDGRFKDEIIPIQVNSVEYTNAGPKVHTNIFDQDEFIRPDTTIEALAKLRTVFKADGTVTAGTSAPLSDGAGFVVLMSGDKVKELGVTPIARFVGYKAVGVDPKIMGIGPAYAIPEVLSLSNLSVEDIDLIELNEAFASQTIASIKEVGLDISRTNVNGGAIALGHPLGATGAMLTARLLNEMGRRPDSRYGMVTMCIGVGMGAAAIFEYVR

SEQ ID NO: 17438 - protein, 394 aa, Staphylococcus aureus
MQEAYIVAYGRSAAAKAKQGALFHERPDDVAAKVLQGVLKRIDGKFNKNMIEDVIVGTAFPEGLQGQNIARTIALRTGLSDTVPGQTVNRYCSSGLQTIAIAANQIMAGQGDILVAGGVELMSAVPMGGNEPTNNPTLQYDDIGASYPMGLTAENVASQFDVSREDQDAYAVRSHQRAYDAQRDGRFKNEIIPIQVNSVEYTNAGPKVHTNIFDQDEFIRPDTTMEALAKLRTVFKADGTVTAGTSAPLSDGAGFVVLMSGDKVKELGVTPIARFVGYKAVGVDPKIMGIGPAYAIPEVLSLSNLSVEDIDLIELNEAFASQTIASIKEVGLDISRTNVNGGAIALGHPLGATGAMLTARLLNEMGRRPDSRYGMVTMCIGVGMGAAAIFEYVR

SEQ ID NO: 17439 - protein, 394 aa, Staphylococcus aureus
MQEAYIVAYGRSAAAKAKQGALFHERPDDVAAKVLQGVLKRIDGKFNKNMIEDVIVGTAFPEGLQGQNIARTIALRTGLSDTVPGQTVNRYCSSGLQTIAIAANQIMAGQGDILVAGGVELMSAVPMGGNEPTNNPTLQYDDIGASYPMGLTAENVASQFDVSREDQDAYAVRSHQRAYDAQRDDRFKDEIIPIQVNSVEYTNAGPKVHTNIFDQDEFIRPDTTMEALAKLRTVFKADGTVTAGTSAPLSDGAGFVVLMSGDKVKELGVTPIARFVGYKAVGVDPKIMGIGPAYAIPEVLSLSNLSVEDIDLIELNEAFASQTIESIKEVGLDISRTNVNGGAIALGHPLGATGAMLTARLLNEMGRRPDSRYGMVTMCIGVGMAAAAIFEYVR

SEQ ID NO: 17440 - protein, 402 aa, Fusobacterium nucleatum subsp. nucleatum
MSKVYVVAAKRSATGSFLGTLSPLKPGDLGAQIVKNILEETKVDPANIDEVIVGNVLSAGQAQGVGRQVAIRAGIPYEVPAYSVNIICGSGMKSVITAFSNIKAGEADLVIAGGTESMSGAGFILPGAIRGGHKMADLTMKDHMILDALTDAYHNIHMGITAENIAERYGITREEQDAFALDSQLKAIAAVDSGRFKDEIAPVVIPNKKGDIIFDTDEYPNRKTDAEKLAKLKPAFKKDGSVTAGNASGLNDGASFLMLASEEAVKKYNLKPLVEIVATGTGGVDPLVMGMGPVPAIRKAFNKTDLKLKDMELIELNEAFAAQSLGVIKELCKEHGVTPEWIKERTNVNGGAIALGHPVGASGNRITVTLVYEMKKRGVEYGLASLCIGGGMGTALILKNVK

SEQ ID NO: 17441 - protein, 346 aa, Rhodococcus erythropolis
MTTVEVPHSSRSAVLTVSGVIEETSDARSLVFEIPAELKDKFDYKPGQFLTLRIPSDQTGSVARCYSLASSPFTDDAPKVTVKRTVDGYGSNWLCDKLQVGDTIEVLPPSGVFTPKSLDHDFLLFGAGSGITPVISILKSALTQGSGNVVLIYANRDEKSVIFGAELRELAAQHPGRLTVVHWIETVQGLPAVSQLATLAKPFVAYEAFMCGPGPFMDAVHKALAEAGMPRTQVHAEVFNSLAGDPFRDVEVAEVSDEEAADAATVEVELDGETHTLVWPRKQTLVDIMLAKGLDVPYSCKEGESGSCACTVTEGEVQMDNSEILDAEDVANGYILGCKRSRSPIA

SEQ ID NO: 17442 - protein, 223 aa, Corynebacterium glutamicum ATCC 13032
MWMHRLLDRIHTGRMANPLDGAETLGDTDSEKRAAVLMLFSGSETSFDLPNDASVLLTHRTPTMRSHAGQIAFPGGRIDPTDTNAVDCAFREAWEETGLDRRTATPLAQLNEVHIRATGYPVYPILGHWHTPSPVAVASPHETDEVFDAPLYDLIDPKNRLMVGWREWHGPAFRINDYIIWGFTGGLLSAILDTAGWATEWDTDRIFDLENTLSTSRNNERMR

SEQ ID NO: 17443 - protein, 403 aa, Corynebacterium glutamicum ATCC 13032
MNPLRTNQWGIKYSSCMSNDFVVSRLRPFGETIFATMTQRAVEAGAINLGQGFPDEDGPRRMLEIASEQILGGNNQYSAGRGDASLRAAVARDHLERFDLEYNPDSEVLITVGATEAITATVLGLVEPGDEVIVLEPYYDAYAAAIALAGATRVAVPLQEVENSWDVDVDKLHAAVTKKTRMIIVNSPHNPTGSVFSKKALKQLAGVARAYDLLVLSDEVYEHLVFDDQKHVSVAKLPGMWDRTVTVSSAAKTFNVTGWKTGWALAPEPLLEAVLKAKQFMSYVGATPFQPAVAHAIEHEQKWVSKMSKGLELKRDILRTALDKAGLKTHDSMGTYFIVADIGDRDGAEFCFELIEKVGVAAIPVQAFVDHPKKWSSKVRFAFCKKEETLREAAERLKGIKKL

SEQ ID NO: 17444 - protein, 434 aa, Corynebacterium glutamicum ATCC 13032
MKCHLFGKANTIVLDILIYPVSGVMKLWHLLLHNVAGLDDSLAWFFSLFGLVITIRAIIAPFTWQMYKSGRTAAHIRPHRAALREEYKGKYDEASIRELQKRQNDLNKEYGINPLAGCVPGLIQIPIVLGLYWALLRMARPEGGLENPVFQSIGFLTPEEVESFLAGRVSNVPLPAYVSMPTEQLKYLSTTQAEVLSFVLPLFITAAILTAINMAMSMYRSFQTNDYASGFSNGMLKFMIVMSILAPIFPLSLGLTGPFPTAIALYWVSNNLWTLLQTIIMMVILERKYPLTDDFKVHHLEQRDIYRAKQKEKRIFLWTRRKNRALMILTPWNASTLHATNVELTKTRTAEINEAKQARKEIANKRRETQREMNRAAMQRLKQRRAEVKAKKKGLIDASPNEDTPSENEETKLSSPQVEPTTTAEPNREPSQED

SEQ ID NO: 17445 - protein, 573 aa, Xanthomonas campestris pv. campestris
MNQTRVFLIFAWLMVAALLWMEWGKDKAAANAPTPIASQAVPAARDPDAAAPAANVPSAQAIPQAGSPAAVPATSTTTATPATTGAAPAITLTSDVLRLKLDGRSVLDAELLQFPQTKDGTEPVKLLTEDAAHSYNATSGWASERSPVPGVGGFRAEQPGTTFELAKGQNTLVVPFVWNGPNGVSIRRIFTLQRGSYAISIKDEVINKSDAAWNGYVFRKLSRVPTILSRGMTNPDSFSFNGATWYSPQEGYERRAFKDYMDDGGLNRQITGGWVALLQHHFFTAWIPQKDQASLYVLAQDGPRDVAELRGPAFTVAPGQSASTEARLWVGPKLVSLLAKEDVKGLDRVVDYSRFSIMAIIGQGLFWVLSHLHSFLHNWGWAIIGLVVLLRLALYPLSAAQYKSGAKMRRFQPRLAQLKERYGDDRQKYQQATMELFKKEKINPMGGCLPLLIQMPIFFALYWVLVESVELRQAPWLGWIQDLTARDPYFILPVLNIAIMWATQKLTPTPGMDPMQAKMMQFMPLVFGVMMAFMPAGLVLYWVVNGGLGLLIQWWMIRQHGEKPSKIIQANAK

SEQ ID NO: 17446 - protein, 647 aa, Saussurea medusa
MAGKGEGPAIGIDLGTTYSCVGVWQHDRVEIIANDQGNRTTPSYVAFTDSERLIGDAAKNQVAMNPTNTVFDAKRLIGRRFSDASVQSDIKLWPFKVTPGPAEKPMIAVMYKGEEKTFAAGEISSMVLIKMKEIAEAFLGSTVKNAVVTVPAYFNDSQRQATKDAGVISGLNVMRIINEPTAAATAYGLDKKATSVGEKNVLIFDLGGGTFDVSLLTIEEGIFEVKATAGDTHLGGEDFDNRMVNHFVQEFKRKHKKDITGNPRALRRLRTSCERAKRTLSSTAQTTIEIDSLYEGVDFYSTITRARFEELNMDLFRKCMEPVEKCLRDAKMDKSSIHDVVLVGGSTRIPKVQQLLQDFFNGKELCKSINPDEAVAYGAAVQAAILSGEGNEKVQDLLLLDVTPLSLGLETAGGVMTVLIPRNTTIPTKKEQVFSTYSDNQPGVLIQVYEGERTRTRDNNLLGKFELSGIPPAPRGVPQITVCFDIDANGILNVSAEDKTTGQKNKITITNDKGRLSKEEIEKMVQEAEKYKSEDEEHKKKVEAKNALENYAYNMRNTVKDEKIGEKLTPGDKKKIEDAIDEAISWLDSNQLAEADEFEDKMKELENVCNPIIAKMYQGGAGDAAGGMDEDAAPSGGGAGPKIEEVD

SEQ ID NO: 17447 - protein, 208 aa, Bradyrhizobium sp. PAC48
  misc_feature (202)..(202): Xaa can be any naturally occurring amino acid
  unsure (1)..(208): unsure at all Xaa locations
LDGYTPTPSLRGKTQIKEFASFPTLEQLPLWGFDGSSTQQAEGHSSDCVLKPVACYPDAARENGVLVMCEVMMPDGKTPHVSNKRATVLDDEGAWFGFEQEYFFYKDGRPLGFPEEGYPAPQGPYYTGVGYKNVGSVARKIVEEHLNLCLAAGINHEGINAEVAKGQWEFQIFGKGSKTAADQMWMARYLMLRLTESYGIDXEFHCKP

SEQ ID NO: 17448 - protein, 190 aa, Bradyrhizobium sp. PAC48
  misc_feature (189)..(189): Xaa can be any naturally occurring amino acid
  unsure (1)..(190): unsure at all Xaa locations
TQIKEFASFPTLEQLPLWGFDGSSTQQAEGHSSDCVLKPVACYPDAARENGVLVMCEVMMPDGKTPHVSNKRATVLDDEGAWFGFEQEYFFYKDGRPLGFPEEGYPAPQGPYYTGVGYKNVGSVARKIVEEHLNLCLAAGINHEGINAEVAKGQWEFQIFGKGSKTAADQMWMARYLMLRLTESYGIDXE

SEQ ID NO: 17449 - protein, 190 aa, Bradyrhizobium sp. PAC48
TQIKEFASFPTLEQLPLWGFDGSSTQQAEGHSSDCVLKPVACYPDAARENGVLVMCEVMMPDGKTPHVSNKRATVLDDEGAWFGFEQEYFFYKDGRPLGFPEEGYPAPQGPYYTGVGYKNVGSVARKIVEEHLNLCLAAGINHEGINAEVAKGQWEFQIFGKGSKTAADQMWMARYLMLRLTESYGIDIE

SEQ ID NO: 17450 - protein, 190 aa, Bradyrhizobium sp. PAC68
TQIKEFDKFPTLEQLPLWGFDGSSTMQAEGHSSDCVLKPVAVYPDAARENGALVMCEVMMPDGKTPHASNKRATILDDEGAWFGFEQEYFFYKDGRPLGFPSDGYPAPQGPYYTGVGYKNVGDVARKIVEEHLNLCLAAGINHEGINAEVAKGQWEFQIFGKGSKTAADQMWIARYLMLRLTESYGIDIE

SEQ ID NO: 17451 - protein, 191 aa, Bradyrhizobium elkanii
TQIKEFASFPTLEQLPLWGFDGSSTQQAEGHSSDCVLKPVACYPDAARENGVLVMCEVMMPDGKTPHPSNKRATILDDDGAWFGFEQEYFFYKDGRPLGFPEEGYPAPQGPYYTGVGYKNVGSVARKIVEEHLNLCLAAGINHEGINAEVAKGQWEFQIFGKGSKTAADQMWMARYLMLRLTESYGIDIEF

SEQ ID NO: 17452 - protein, 309 aa, Wolbachia endosymbiont of Nasonia longicornis
  misc_feature (9)..(9): Xaa can be any naturally occurring amino acid
  misc_feature (298)..(303): Xaa can be any naturally occurring amino acid
  unsure (1)..(309): unsure at all Xaa locations
TPDHIKKAXIQAISEGKTKYTAVDGTRELKEAIINKLRKDNNLEYTLNQICVGTGAKQVLFNLFMATINSGDEVIIPAPYWVSYVDMVSLFGGLPVVVECKQNFKLTAELLKSRITKKTKWLILNSPNNPAGAVYTCDELKDIAQILLEYPHMNVVTDDIYEHIIYDEKFFTIAQVEPKLYDRVFVVNGVSKAYAMTGWRIGYIAGRSDVVKAISTLQSQSTSNPNSIAQAAAAAALNGDHSFLKERTRIFKSRRDFMVKELNSAPGLSASVPQGAFYLFVSCEGLLSKSTKRGKIIXXXXXXFTEYLP

SEQ ID NO: 17453 - protein, 309 aa, Wolbachia endosymbiont of Nasonia vitripennis
TPDHIKKAAIQAISEGKTKYTAVDGTRELKEAIINKLRKDNKLEYTLNQICVGTGAKQVLFNLFMATINSGDEVIIPAPYWVSYVDMVSLFGGLPVVVECKQNFKLTAELLKSRITKKTKWLILNSPNNPAGAVYTCDELKDIAQILLEYPHMNVVTDDIYEHIIYDEKFFTIAQVEPKLYDRVFVVNGVSKAYAMTGWRIGYIAGRSDVVKAISTLQSQSTSNPNSIAQAAAAAALNGDHSFLKERTTIFKSRRDFMVKELNSVPGLSASVPQGAFYLFVSCEGLLSKSTKRGKIINNNDLDFTEYLP

SEQ ID NO: 17454 - protein, 311 aa, Wolbachia endosymbiont of Armadillidium vulgare
  misc_feature (97)..(97): Xaa can be any naturally occurring amino acid
  misc_feature (99)..(99): Xaa can be any naturally occurring amino acid
  misc_feature (111)..(111): Xaa can be any naturally occurring amino acid
  misc_feature (114)..(114): Xaa can be any naturally occurring amino acid
  misc_feature (117)..(117): Xaa can be any naturally occurring amino acid
  misc_feature (128)..(128): Xaa can be any naturally occurring amino acid
  misc_feature (308)..(308): Xaa can be any naturally occurring amino acid
  unsure (1)..(311): unsure at all Xaa locations
TPDHVKKVAIQAINEGKTKYTAVDGTRELKNAIINKLKRDNNLEYTLNQICVGAGAKQVLFNLFMATINSGDEAIIPAPYWVSYVDMVSLFGGLPIXVXCKQNFKLTPELXKSXITXKTKWLILNSPXNPAGIVYAYDELKSIAQVLLKHPHVNVVTDDIYEHIVYDEKFFTIAQVEPELYDRVFVVNGVSKAYAMTGWRIGYIAGRSDVINAISTLQSQSTSNPNSIAQAAAVEALNGDHSFLKERTKIFKDRRDFVVKKLNSAPGLSASIPQGAFYLFVSCEGLLGKSTKSGKVISNDLDFAEYLXEDH

SEQ ID NO: 17455 - protein, 316 aa, Wolbachia endosymbiont of Tribolium confusum
TPDHIKKAAIQSINEGKTKYTAVDGTHELKKAIINKLKRDNNLEYTLNQICVGAGAKQVLFNLFMATINPGDEAIIPAPYWVSYVDMVSLFGGLPVIVECKQNFKLTPELLESNITEKTKWLILNSPNNPAGIVYTYDELKSIARVLLKHPHVNVVTDDIYEHIVYDEKFFTIAKIEPKLYDRVFVVNGVSKAYAMTGWRIGYIAGRNDIVKAISTLQSQSTSNPNSIAQAAAVEALNGDHNFLKERTKIFKDRRDFVIKKLNSASGLSASIPQGAFYLFVSCEGLLGKSTKSGKVISNDLDFAEYLLEDYLVAVV

SEQ ID NO: 17456 - protein, 238 aa, Wolbachia endosymbiont of Onchocerca volvulus
TPGHIKKAAIQAINEGKTKYTAVDGTRELKGAIIDKLKRDNDLEYMPSQICVSAGAKQVLFNLLMATINPEDEAVIPAPCWVSYVDMVSFFGGLPVIAECKDNFKLTSELLRSKITEKTKWLILNSPNNPAGVVYTYDELKKIAQILLEYPHVNIITDDIYEHIVYDGKFFTIAQVEPRLYDRVFVVNGVSKAYAMAGWRIGYVAGRSDVVKAISILQSQSTSNPNSIAQAAAVEALN

SEQ ID NO: 17457 - protein, 400 aa, uncultured cyanobacterium
  misc_feature (148)..(148): Xaa can be any naturally occurring amino acid
  unsure (1)..(400): unsure at all Xaa locations
MKDCIYLDNNATTQIDSEVLTEMMPYLNFYYGNPSSMHSFGGQVGKAVRTGREQVASLLGAEPSEIIFTSCGTEGDNAAINAALIAQKNKRHIITTEVEHPAILSHCKQLERQGYQVTYLSVDQQGQLDLNELKTSLTGNTALVSVMXANNETGVIFPIEEIGQMVKEYGALFHVDAVQAVGKIPLNMKTSTIDMLTISGHKIHAPKGIGALYVRKGVRFRPLIIGGHQERGRRGGTENVSGIAALGKAAELAQLNLPHIHLEQELRDYLEDSILNLIPDTVVNGNKTNRLPNTTNIGFKYIEGEAILLSINKYGICASSGSACTSGSLEPSHVLRAMKVPYSVLHGSIRFSLSRYTTKSEIDRVIEILPDTIGRLRAISPFSSDNSTWLQEMEKEALAK

SEQ ID NO: 17458 - protein, 556 aa, Zymobacter palmae
MYTVGMYLAERLAQIGLKHHFAVAGDYNLVLLDQLLLNKDMEQVYCCNELNCGFSAEGYARARGAAAAIVTFSVGAISAMNAIGGAYAENLPVILISGSPNTNDYGTGHILHHTIGTTDYNYQLEMVKHVTCARESIVSAEEAPAKIDHVIRTALRERKPAYLEIACNVAGAECVRPGPINSLLRELEVDQTSVTAAVDAAVEWLQDRQNVVMLVGSKLRAAAAEKQAVALADRLGCAVTIMAAEKGFFPEDHPNFRGLYWGEVSSEGAQELVENADAILCLAPVFNDYATVGWNSWPKGDNVMVMDTDRVTFAGQSFEGLSLSTFAAALAEKAPSRPATTQGTQAPVLGIEAAEPNAPLTNDEMTRQIQSLITSDTTLTAETGDSWFNASRMPIPGGARVELEMQWGHIGWSVPSAFGNAVGSPERRHIMMVGDGSFQLTAQEVAQMIRYEIPVIIFLINNRGYVIEIAIHDGPYNYIKNWNYAGLIDVFNDEDGHGLGLKASTGAELEGAIKKALDNRRGPTLIECNIAQDDCTETLIAWGKRVAATNSRKPQA

SEQ ID NO: 17459 - protein, 353 aa, Gibberella fujikuroi
MATPITSRTETLQKYLKLDQKGMIMAEYVWVDADGGTRSKSRTLPEKEYKPEDLPVWNFDGSSTNQAPGDNSDVYLRPCAVYPDPFRGSPNIIVLAECWNADGTPNKYNFRHDCVKVMDTYADDEPLFGLEQEYTLLGSDNRPYGWPAGGFPAPQGEYYCGVGTGKVVQRDIVEAHYKACLYAGIQISGTNAEVMPAQWEYQVGPCTGIAMGDQLWISRFFLHRVAEEFGAKVSLHPKPIAGDWNGGLHSNFSTKAMREEGGMKVIEEALKKLEPHHVECIAEYGEDNELRLTGRHETGSIDSFSWGVANRGTSIRVPRETAAKGYGYFEDRRPASNADPYRVTKVLLQFSMA

SEQ ID NO: 17460 - protein, 336 aa, Pseudomonas stutzeri
MLPKLVITHRVHDEILQLLAPHCELMTNQTDSTLTREEILRRCRDAQAMMAFMPDRVDADFLQACPELRVVGCALKGFDNFDVDACTARGVWLTFVPDLLTVPTAELAIGLAVGLGRHLRAADAFVRSGEFQGWQPQFYGTGLDNATVGILGMGAIGLAMADRLQGWGATLQYHEAKALDTQTEQRLGLRQVACSELFASSDFILLALPLNADTQHLVNAELLALVRPGALLVNPCRGSVVDEAAVLAALERGQLGGYAADVFEMEDWARADRPRLIDPALLAHPNTLFTPHIGSAVRAVRLEIERCAAQNIIQVLAGARPINAANRLPKAEPAAC

SEQ ID NO: 17461 - protein, 392 aa, Sulfolobus tokodaii
MSDELDSYRAKHYNSDDPIVRLLEEKIESLTKELEKLRQDLNWYKGELEKLLAPPYIEAIVLDILPDGKVIVRSSSGPNLIVNVSSNIDIKKLKPGSLVALTQRGSTIVEVLPEREDAYVKSFEVIEKPNVHYSDIGGLNEQINEIREVIELPLKNPELFKEIGIDPPKGVLLYGPPGTGKTLLAKAVATESNATFIQVVASEFAQKFVGEGARIVREVFELARRKAPSIVFIDEIDAIGAKRVDMGTSGEREIQRTLMQLLAEIDGFKPLDNVKIIAATNRLDILDPALLRPGRFDRLIEVPLPNFEGRKEIFRIYLQKMKTDGNIRYDILASMTEGFSGAEIKNVCTEAGYIAIRNGRKYVNMTDLITAIEKIKAKNNKAKNTDRTEKYV

SEQ ID NO: 17462 - protein, 324 aa, Sphingobium chlorophenolicum
MTNPVSTIDMTVTQITRVAKDINSYELRPEPGVILPEFTAGAHIGVSLPNGIQRSYSLVNPQGERDRYVITVNLDRNSRGGSRYLHEQLRVGQRLSIVPPANNFALVETAPHSVLFAGGIGITPIWSMIQRLRELGSTWELHYACRGKDFVAYRQELEQAAAEAGARFHLHLDEEADGKFLDLAGPVAQAGQDSIFYCCGPEAMLQAYKAATADLPSERVRFEHFGAALTGEPADDVFTVVLARRSGQEFTVEPGMTILETLLQNGISRNYSCTQGVCGTCETKVLEGEPDHRDWVLSDEKKASNSTMLICCSLSKSPRLVLDI

SEQ ID NO: 17463 - protein, 475 aa, Pichia angusta
MVKGNVIVVSNRIPVTIKKTEDDENGKSRYDYTMSSGGLVTALQGLKNPFRWFGWPGMSVDSEQGRQTVERDLKEKFNCYPIWLSDEIADLHYNGFSNSILWPLFHYHPGEMNFDEIAWAAYLEANKLFCQTILKEIKDGDVIWVHDYHLMLLPSLLRDQLNSKGLPNVKIGFFLHTPFPSSEIYRILPVRKEILEGVLSCDLIGFHTYDYVRHFLSSVERILKLRTSPQGVVYNDRQVTVSAYPIGIDVDKFLNGLKTDEVKSRIKQLETRFGKDCKLIIGVDRLDYIKGVPQKLHAFEIFLERHPEWIGKVVLIQVAVPSRGDVEEYQSLRAAVNELVGRINGRFGTVEFVPIHFLHKSVNFQELISVYAASDVCVVSSTRDGMNLVSYEYIACQQDRKGSLVLSEFAGAAQSLNGALVVNPWNTEELSEAIYEGLIMSEEKRRGNFQKMFKYIEKYTASYWGENFVKELTRV

SEQ ID NO: 17464 - protein, 485 aa, Zygosaccharomyces rouxii
MTVSKKDSGKTSPGNIVVVSNRLPVTISKNAMGKYEYKFSSGGLVTALQGLKKTSTFQWYGWPSLEIPDDEKPVVKKDLLEKFNAIPIFLSDEIADLHYNGFSNSILWPLFHYHPGEINFDENAWLAYNEANATFASEICGNLQDNDLVWVHDYHLMLLPEMLSAHIQRKGLKNIKLGWFLHTPFPSSEIYRILPVRQEILNGVLSCDLIGFHTYDYARHFLSSIQRCLNVNTLPNGVEYQGRFVNVGAFPIGIDVDTFKEGLQKENVKQRIRTLQERFKGCKIMVGVDRLDYIKGVPQKLHAMEVFLNEHPEWIGKVVLVQLAIPSRGDVEEYQYLRSVVNELVGRINGQFGTIEFVPIHFMHKSIPFEELISLYAVSDACIVSSTRDGMNLVSYEYIACRKKGSLILSEFTGAAQSLNGALIVNPWNTDELSDSINEALTLPDEKKDSNWEKLYKYISKYTSAYWGENFVHELNATGTIKTGQ

SEQ ID NO: 17465 - protein, 96 aa, Nicotiana benthamiana
MLQTEEDKKPSGDQAAHINLKVKGQDGNEVFFRIKRSTQLKKLMNAYCDRQSVDFNSIAFLFDGRRLRAEQTPDELEMEDGDEIDAMLHQTGGSTV

SEQ ID NO: 17466 - protein, 316 aa, Rhodococcus sp. YK2
MADSRTVRVYQKTWQAEGVVGVTLIDPNGAELPAWEPGAHISLHLRDGLVREYSLCSDPDDRRAWSVAVLRDPKSRGGSTYVHDELPVGALIEVSGPRNAFSLESDASRYVLVAGGIGITPILAMTRDLDKRGRNWSLIYTGRSRSTMAFLNELEAHPRDRVTVHADDEAGTVADIAALLADVDSETLVYCCGPEPLLEACRSALVDPSRLRLERFKAPTVDVEQGPQESFDVVVVSTGQRITVDANTSVLDALQSGGVDVESSCTEGICGTCEIGVVKGDIDHRDFVLTPAEQAGGTTMIACVSRCRSAELVLDL

SEQ ID NO: 17467 - protein, 671 aa, Hypocrea jecorina
MARADQPQDKTKTEQRIGAYTVVRTLGEGSFGKVRLAIHNGTGQKVALKIITRKKLISRDMAGRVEREIEYLQLLRHPHIIKLYTVIKTPSEIIMVLEYAGGELFDYIVQNGRMKEAEARRFFQQMICAVEYCHRHKIVHRDLKPENLLLDENLNVKIADFGLSNIMTDGNFLKTSCGSPNYAAPEVIGGKLYAGSEVDVWSCGVILYVLLVGRLPFDDEHIPSLFAKIARGTYSMPQWMPPGAAALIKGMLVVNPVQRMTIDEIRADPWFNTDLPAYLQPPVEEFFNTGVDPNKAIKKSDIAPNAPEKVQEKLHNEVTEKISKTMGYGKDDVEEALQSDEPSAIKDAYMIVRENKLMLANNPDAGLTGDEGSPMMSISSTRSAISPGGASPRPYVTKIGILPSSLPAYHKDYMEREKNGTGHDPVTPAITINDELPVTRTEVEKEEAARRLNPHSRSALRLDESSKRPQGMTPITAPVKKPKPVRWQFGIRSRNAPWEALLCIHKALNKLGASHLRDEGYDEAQRRGVEDATSRDSSFANGAPLERDPNGHDKDPTKRYKLPADPWHIQVRWPSTSMQAGADRRDELGSKAGSPDSFVYTRGDAASRKDFVALHMDIQIYEMEQGVYLVDFKCSGYETQDGRLLEEKEVTSPFPFLDRAAKLIMQLAEAD

SEQ ID NO: 17468 - protein, 582 aa, Fragaria x ananassa
MQRALTLKRTLQSLPRITKNPLISGRAFCNASTPSPSPASASELRKYMGYTALVLFCGAATYYSFPFPEDAKHKKAQIFRYAPLPEELHTVSNWSGTHEVQTRVFHQPETLEELEKVVKEANARKYRIRPVGSGLSPNGIGLSRAGMVNLALMDEVLEVDREKKRVRVQAGIRVQQLVDGIKDQGLTLQNFASIREQQIGGILQVGAHGTGARLPPIDEQVISMKLVTPAKGTIEVSKEKDPELFYLARCGLGGLGVVAEVTLQCVERQELVEHTTVSNMEENKKNHKKLFSENKHVKYLYIPYTDTVVIVTCNPVSKWKGPPKFKPKFTTDEAIQHVRDLYRDCLRKYRVVPDNSVDVDEPSFTELRGKLIALNPLNKDHIVKMNQAEAEFWRKSEGYRVGWSDEILGFDCGGQQWVSETCFPAGTIAKPSMKDLEYIEDLKQLIEKEEIPAPAPIEQRWTASSKSPMSPASSLKGDNIFSWVGIIMYLPTTDARQRKDITEEFFHYRHLTQTRLWDTYSSYEHWAKIEVPKDKEQLTALRARLRKRYPVDAYNKARSELDPSRILSNVKLGKLFPSSDTI

SEQ ID NO: 17469 - protein, 234 aa, Lycopodium annotinum
MGRGKIEIKRIENSTSRQVTFSKRRGGLLKKAHELAVLCDAQVALIIFSNTGKLFEYASTSMKEILDRYRKYPDGIQTGRVMEYDNDVMVQHWSREVMRMKQQIERSYQTQRHMMGEDLGLLPLKELQHLEQQLDTGLNRVRARKDQVLREQIDSLRIKELQWHEENEILRRKIAGAHGMTEVAVRSFSSQNIVNPLETREPPSIGQVSVPFSLHVNQKNLRENQNLQTSLQLG

SEQ ID NO: 17470 - protein, 185 aa, Populus tremula x Populus tremuloides
MADTLTNLTPALLLKSSRTLSSLRGLPICSTPLSNNSSSSLKTTSTSSRILSINGPKRYRPMAVRATDSSSPSSSFGSRLEDAVKKTVAENPVVVYSKTWCSYSSEVKSLFKRLNVDPLVVELDELGAQGPQIQKVLERLTGQHTVPNVFIGGKHIGGCTDTVKLYRKGELEPLLSEANAKKSQG

SEQ ID NO: 17471 - protein, 342 aa, Aspergillus fumigatus
MEDNFASVVESLSGTSAPALPLLTVSPADTSLKAPETKVQETKTEEKKPPKKRKSWGQELPIPKTNLPPRKRAKTEDEKEQRRIERVLRNRAAAQTSRERKRLEMEKLENEKIQMEQQNQFLLQRLSQMEAENNRLSQQLAQLTAEVRNSRNSTPKPGSPATASPTLTPTLFKQEGDELPLERIPFPTPSITDYSPTLKPSSLAESSDVTQHPAVSVGGLEGPGSALPLFDLGSGVEHDAANDIAAPLSDDDFHRLFNGDSSTEPDSSVIEDGFSFDILDSGDLSAFPFDSMVNFDSEPVALEGIEPAHGLPNETPYQTSGLQPSLGASTSRCDGQGIAAGC

SEQ ID NO: 17472 - protein, 591 aa, Bacillus subtilis
MTDTLSKRGPDDSNVWGEHHVLFGHKRLAVVDIEGGRQPMACTYKGDTYTIIYNGELYNTEDLRKELRARGHQFERTSDTEVLLHSYIEWQEDCVDHLNGIFAFAVWDEKRNLLFAARDRLGVKPFFYTKEGSSFLFGSEIKAILAHPDIKARVDRTGLSEIFGLGPSRTPGTGIFKGIKEIRPAHALTFSKDGLNIWRYWNVESEKHTDSFDDTVANVRSLFQDAVTRQLVSDVPVCTFLSGGLDSSAITAIAAGHFEKEGKAPLHTYSIDYEENDKYFQASAFQPNDDGPWIEKMTEAFGTTHHKCVISQKDLVDHLEEAVLVKDLPGMADVDSSLLWFCREIKKDFVVSLSGECADEIFGGYPWFHTADVESGFPWMRSTEERIKLLSDSWQKKLNLKEYVNAKYEETLAETPLLDGETGVDKARRQLFYLNMLWFMTNLLDRKDRMSMGASLEVRVPFADHRLVEYVWNIPWEMKMHDNREKGILRKALEGILPDDILYRKKSPYPKTHHPEYTKGVSEWLKTIRSQKDSVLHTLLDRKQLDQLLETEGSSFKVPWFGQLMKGPQLIAHLAQIHTWFEAYRIDIDER

SEQ ID NO: 17473 - protein, 325 aa, Bacillus subtilis
MRLANGLPWSLPITLPVGEKTARQLSAGDHVKLVKDGVTYGMITVTDIYQPDKTQEALSVFKTNDPAHPGVKKLLARPDYYIGGPITVSSLPDKSFEQFYATPAETRAAFQKLGWKTIVGFQTRNPVHRAHEYIQKTALETVDGLLLHPLVGETKSDDIPSDIRMESYQALLNHYYPKDRVMLSVFPAAMRYAGPREAIFHALVRKNYGCTHFIVGRDHAGVGSYYGTYDAQNIFQSFTEEELGIKPLFFEHSFYCRKCGNMGTSKTCPHSPRDHIHLSGTKVRELLRQGKKPPKEFSRPEVAAVLIKGLHQQPVAIKQNSGELQ

SEQ ID NO: 17474 - protein, 338 aa, Acinetobacter sp.
MSNHQVALQFEDGVTRFICIAQGETLSDAAYRQQINIPMDCREGECGTCRAFCESGNYDMPEDNYIEDALTPEEAQQGYVLACQCRPTSDAVFQIQASSEVCKTKIHHFEGTLARVENLSDSTITFDIQLDDGQPDIHFLAGQYVNVTLPGTTETRSYSFSSQPGNRLTGFVVRNVPQGKMSEYLSVQAKAGDKMSFTGPFGSFYLRDVKRPVLMLAGGTGIAPFLSMLQVLEQKGSEHPVRLVFGVTQDCDLVALEQLDALQQKLPWFEYRTVVAHAESQHERKGYVTGHIEYDWLNGGEVDVYLCGPVPMVEAVRSWLDTQGIQPANFLFEKFSAN

SEQ ID NO: 17475 - protein, 197 aa, Ralstonia eutropha JMP134
MMQTNELLDKIFRGARSQNGWLPTPVPDSKLRELYDLMKFGPTSVNCSPARLVFVRTEEGREKLRPALAPGNVEKTMAAPVVAIVGYDTRFYEQLPDLFPHNPAVKAWFEGDEKVDFANTTAFRNGTLQGGYLIAAARALGLDCGPMSGFNNQAIDQAFFAGTSIRSNFICGLGHGDPEKVFARSPRLSFEQACQLA

SEQ ID NO: 17476 - protein, 440 aa, Synechococcus elongatus PCC 7942
MLRALAAEAGGLDQAFAAAFGPQAGRFFSNIQASGGVSRRVFLRNLVVGAALVTLTNCAQQAQQPDSPTTTGSGNLEKTDLKVGFIPITCATPIIMSDPLGFYQKYGLKVQVVKMPSWGAVRDSAIAGELDAYHMLAPMPIAMTLGLGSAPFSVKLASIENINGQAITVAKRHLGKVKEAKDFKGFVIGVPFPFSMHNLLLRYYLAAGGLNPDTDVQIRPVPPPDSIAQLVAGDIDAMLMPDPFNQRAVYEDAGFIHLLTKEIWNGHPCCAFAAGEPWIQENPNTFRALNKAIIEATGYASKAENRAEIAKAISSRQYLNQPPEVVEAVLTGKFPNGQGQELDVPDRIDFNPYPWQSFANWIQSQLVRWDLGKAAGVIQPDQYDKNGQAIYLTTEAQTLEKEVGLQPPTEIYREEKLAYDTFNPQDPVAYLASQKQKYGR

SEQ ID NO: 17477 - protein, 271 aa, Antirrhinum majus
MNIDELLKTVSSAQANNQVMGSSEYATASQPPPGQPGSGSSLNRQSSVTFSRDISQKTVDEVWQDIQQGQKMSSLDRKTTFGEMTLEDFLVKAGVVVESFAGKGNPGTVIGGIDPMGLPQQAQWMNYQVPAVHSQQQSVMPVFMPPGHPVQQAIPLTGNPIMDMGHPETQTNALMGTLSDIQTPGRKRVASGEIVEKSVERRQKRMIKNRESAARSRARKQAYTHELENKVWRLEEENERLKKQKEWENALPTIPPPEPKRQLRRTSSAPI

SEQ ID NO: 17478 - protein, 603 aa, Arabidopsis thaliana
MSATAAASSSIAVATNSLRNVTLSSRSPLPSAISVAFPSRGRNTLQRRLVLVSCSTGDGSKPTILVAEKLGDAGIKLLEDVANVDCSYNMTPEELNIKISLCDALIVRSGTKVGREVFESSHGRLKVVGRAGVGIDNVDLSAATEFGCLVVNAPTANTIAAAEHGIALMAAMARNVAQADASVKAGEWKRNKYVGVSLVGKTLAVLGFGKVGTEVARRAKGLGMRVIAHDPYAPADRAHAIGVDLVSFDEALATADFISLHMPLTPTTSKILNDETFANMKKGVRIVNVARGGVIDEDALVRALDAGIVAQAALDVFTKEPPAKDSKLVQHERVTVTPHLGASTMEAQEGVAIKIAEAVVGALNGELAATAVNAPMVSAEVLTELKPYVVLAEKLGRLAVQLVAGGSGVKNAKITYASARATDDLDTRLLRAMITKGIIEPISDVYVNLVNADFTAKQRGLRLSEERVLLDGSPESPLETITVQLSNVESKFASSLSESGEVKVEGKVKDGVPHLTKVGSFEVDVTLEGSIILCRQVDQPGMIGTVGSILGESNVNVNFMSVGRIAPRKQAIMAIGVDDIPSKETLKKIGEIPAVEEFVFLKL

SEQ ID NO: 17479 - protein, 475 aa, Arabidopsis thaliana
  misc_feature (441)..(441): Xaa can be any naturally occurring amino acid
  unsure (1)..(475): unsure at all Xaa locations
MASQSSVAVISSAAARGESFPDSKKPIGSVRFQQPLRLSFSYCKSGNMSSRICAMAKPNDAETLSSSVDMSLSPRVQSLKPSKTMVITDLAATLVQSGVPVIRLAAGEPDFDTPKVVAEAGINAIREGFTRYTLNAGITELREAICRKLKEENGLSYAPDQILVSNGAKQSLLQAVLAVCSPGDEVIIPAPYWVSYTEQARLADATPVVIPTKISNNFLLDPKDLESKLTEKSRLLILCSPSNPTGSVYPKSLLEEIARIIAKHPRLLVLSDEIYEHIIYAPATHTSFASLPDMYERTLTVNGFSKAFAMTGWRLGYLAGPKHIVAACSKLQGQVSSGASSIAQKAGVAALGLGKAGGETVAEMVKAYRERRDFLVKSLGDIKGVKISEPQGAFYLFIDFSAYYGSEAEGFGLINDSSSLALYFLDKFQVAMVPGDAFGDXSCIRISYATSLDVLQAAVEKIRKALEPLRATVSV

SEQ ID NO: 17480 - protein, 336 aa, Arabidopsis thaliana
MDGSISFGGSSQSKADFSFDLKLGRNIGNSSSVFGDTEQVISLSKWKDSALAKPEGSRSSSSKRTRGNGVGTNQMPICLVDGCDSDFSNCREYHKRHKVCDVHSKTPVVTINGHKQRFCQQCSRFHALEEFDEGKRSCRKRLDGHNRRRRKPQPEHIGRPANFFTGFQGSKLLEFSGGSHVFPTTSVLNPSWGNSLVSVAVAANGSSYGQSQSYVVGSSPAKTGIMFPISSSPNSTRSIAKQFPFLQEEESSRTASLCERMTSCIHDSDCALSLLSSSSSSVPHLLQPPLSLSQEAVETVFYGSGLFENACAVSDGSVISGNEAVRLPQTFPFHWE

SEQ ID NO: 17481 - protein, 135 aa, Arabidopsis thaliana
MTMFRSISMVMLLVALVTFISMVSSAASSPEADFVKKTISSHKIVIFSKSYCPYCNKAKSVFRELDQVPYVVELDEREDGWSIQTALGEIVGRRTVPQVFINGKHLGGSDDTVDAYESGELAKLLGVSGNKEAEL

SEQ ID NO: 17482 - protein, 338 aa, Arabidopsis thaliana
MARIGSFLIILYLTYALTLCVCDDDESNYGGDKGNLFPGFYRSSCPRAEEIVRSVVAKAVARETRMAASLMRLHFHDCFVQGCDGSLLLDTSGSIVTEKNSNPNSRSARGFEVVDEIKAALENECPNTVSCADALTLAARDSSVLTGGPSWMVPLGRRDSTSASLSGSNNNIPAPNNTFNTIVTRFNNQGLDLTDVVALSGSHTIGFSRCTSFRQRLYNQSGNGSPDRTLEQSYAANLRQRCPRSGGDQNLSELDINSAGRFDNSYFKNLIENMGLLNSDEVLFSSNEQSRELVKKYAEDQEEFFEQFAESMIKMGNISPLTGSSGEIRKNCRKINNS

SEQ ID NO: 17483 - protein, 396 aa, Arabidopsis thaliana
MASATSVIAWGSGEDGQLGLGTDEEKELASVVDALEPFNVRSVVGGSRNSLAICDDGKLFTWGWNQRGTLGHPPETKTESTPSLVKSLANVKIVQAAIGAWHCLAVDDQGRAYAWGGNEYGQCGEEPSKDETGRPVRRDIVIPKRCAQQLTVRQVAAGGTHSVVLTREGYVWTWGQPWPPGDIKQISVPVRVQGLENVRLIAVGAFHNLALKEDGTLWAWGNNEYGQLGTGDTQPRSYPIPVQGLDDLTLVDIAAGGWHSTALTNEGEVYGWGRGEHGRLGFGDNDKSSKMLPQKVNLLPGEDIIQVSCGGTHSVALTRDGRIFSFGRGDHGRLGYGRKVTTGQPLELPIHIPPPEGRFNHTDEEDDGKWIAKHVACGGRHTLAIVEWKYDQEETE

SEQ ID NO: 17484 - protein, 384 aa, Arabidopsis thaliana
  misc_feature (106)..(106): Xaa can be any naturally occurring amino acid
  misc_feature (225)..(225): Xaa can be any naturally occurring amino acid
  unsure (1)..(384): unsure at all Xaa locations
MSGSLMNLFSLCFKPFGHVCDNSEAGSGGGGGVSGGTGREGKDGLLWFRDLGKYCGGDFSMAVIQANQVLEDQSQVESGNFGTFVGVYDGHGGPEAARYVCDHLFXHFREISAETQGVVTRETIERAFHATEEGFASIVSELWQEIPNLATVGTCCLVGVIYQNTLFVASLGDSRVVLGKKGNCGGLSAIQLSTEHNANNEDIRWELKDLHPDDPQIVVFRHGVXRVKGIIQVSRSIGDMYMKRPEFNKEPISQKFRIAEPMKRPLMSATPTILSHPLHPNDSFLIFASDGLWEHLTNEKAVEIVHNHPRAGSAKRLIKAALHEAARKREMRYSDLRKIDKKVRRHFHDDITVIVVFLNHDLISRGHINSTQDTTVSIRSALEH

SEQ ID NO: 17485 - protein, 373 aa, Chrysanthemum x morifolium
MLKQESNDIGSGENNRARPCDTCRSNACTVYCHADSAYLCTSCDAQVHSANRVASRHKRVRVCESCERAPAAFLCEADDASLCTACDSEVHSANPLARRHQRVPILPISGNSFSSMTTTHHQSEKTMTDPEKRLVVDQEEGEEGDKDAKEVASWLFPNSDKNNNNQNNGLLFSDEYLNLVDYNSSMDYKFTGEYSQHQQNCSVPQTSYGGDRVVPLKLEESRGHQCHNQQNFQFNIKYGSSGTHYNDNGSINHNAYISSMETGVVPESTACVTTASHPRTPKGTVEQQPDPASQMITVTQLSPMDREARVLRYREKRKTRKFEKTIRYASRKAYAEIRPRVNGRFAKREIEAEEQGFNTMLMYNTGYGIVPSF

SEQ ID NO: 17486 - protein, 590 aa, Vaucheria litorea
MQNFQNNKCIGAFALIDGLVRNGTTSIFGYPGGAILPIYDELYSWEKYNLIKHYLVRHEQGAAHAADGYARSSGNVGICFATSGPGATNLITGIATAQVDSVPIIVITGQVGKTFIGTDAFQEIDTYGITLPIVKHSYVIWNAARIPEIISEAFYIALNGRPGPVLIDLPKDIGLEKILDYIPIQQKHIFKILGHRFEYKTTQNHFQQIEKLILSSLQPLAYVGGGVIISDASAELTEFVNYYYLPVTTTLMGKGSFDENHPLALGMLGMHGTAYANFAVSNCDLLLAIGARFDDRVTGKLENFASNAVIIHIDIDPAEISKNKNSQLSILGDVKKILPQILEHSKIDPILNLFDTDLMGVKNEEIVINAWLKKINLWKEFYPLSIPIPTKSLSPQEVINYIGILAPDAYYTTDVGQHQMWAAQFIKCGPRKWLSSSGLGTMGYGVPAAIGAQIAFPKESIICISGDSSFQMNLQELGTISQYNLPIKIFVINNYWQGMVRQWQESFYEKRYSHSYMKKGAPDLIKLGEAYKIKSFRIKTQKELKSMLPEILYLNEPILVDFCVIEQENCYPMVTPGQSNEQMEGLPKYI

SEQ ID NO: 17487 - protein, 624 aa, Vaucheria litorea
MNKILGIDLGTTNSVVAVMEGGTPTVIPNSEGLRTTPSIVAYTKKEELLVGQIAKRQSVINPENTFFSIKRFIGSKFNEVKQESTQVSYKITEDNKGNIKVICPILNKEFSPEEISAQILRKLTADANKYLGQSLDKAVITVPAYFNDSQRQATKDAGKIAGLEVLRIINEPTAASLAYGLDKKNNETILVFDLGGGTFDVSLLEVGDGVFEVLSTSGDTHLGGDDFDRKIVNFLIEDFEKQHGINLSKDPQALQRLTEASEKAKVELSTLTETVINLPFITATDTGPKHIEVSITKSKFEQLCEDLILRSKIPVENALKDARVDKNKIDEVVMVGGSTRIPAVQELVKELTGKIPNQTVNPDEVVAIGAAVQGGVLSGEVKDILLLDVTPLSLGVETLGGVMTKVIPRNSTIPTKKSEVFSTAVDNQTNVEIHVLQGEREFVQDNKSLGNFRLDGIPLAPRGVPQIEVTFDIDVNGILSVRAKDKGTGKEQSITIKNASTLEKTDIERMVKEAEIAANEDKEKRAKIDLKNQADLLCYQSEKQLKELDTKVDKTKKEIVENLIKTLRNAIQIEDFNQIKQKTIELEKLISEIGQDIYNNQRSNLQNESSKLDEDNIIDTDIVE

SEQ ID NO: 17488 - protein, 250 aa, Vaucheria litorea
MKTLKMLEVKNLHVTIDNIEILKGVNFSLNSGEIHAIMGPNGSGKSTFSKILAGHPSYKITSGEILYNGENICDFDPDIRAHKGIFLAFQYPVEIPGVNNEDFLRLAYNSRQKALQQNELEPLKFLEVLVEKLKLVNLDPIFLSRNVNEGFSGGEKKRNEILQFALLNSELGILDEMDSGLDIDALKTISEAVNLLKTKDKSIILITHYKRLLEYIKPDFIHVMMNGKIIKTGDITLANLLEKNGYEWLN

SEQ ID NO: 17489 - protein, 862 aa, Vaucheria litorea
MFDRFTEKALQAIILGQEESRRLGHNFVGTEQILLGLIGENTGVAYRALKSFRVTLKDARLEVERMLGRGRGTTFPAGEIPFTPRAKKILEMSMEQGRKYNHSYINTEHLLLAIIEDTNGAANNILIQLGVNLLRLKTKVLELMGEIVEATATLLTSPPKSNDKNKKVGEIFVLHGQNQTDEDGVIKRPTLEEFTTNLTDAALKGNLDPVIGREKEIERVIQILSRRRKNNPILIGEPGVGKTAVAEGLAQRIVQKEAPATLHDKKIIVLDVGLLLAGTKYRGEFEERLKRIVEEIQSSDDIIIVIDEVHTLIGAGASEGALDAANILKPVLARGELQCIGATTLDEYRQHIEKDAALERRFQPVQVDEPSITETIEILKGLRQRYEHHHQLTISTAALVAAANLGAQYIADRFLPDKAIDLIDEAGSRVRLNNYYVPESARELDKELREILQAKDDAVRAQNFEKAGELRDREMETRSMITAIIKSQKLIKKPVNVEKPTVEEEDIAHVVGAWTGIPVNKITKNETAKLLDMENILHQRVVGQSQAVTAVSRAIRRARVGLRNPNRPIASFLFAGPTGVGKTELTKALASYFFGSEDSMIRLDMSEYMEKHTVAKLIGSPPGYIGYNEGGQLTEAVRRKPYTVILFDEVEKGHPDIFNLLLQILEDGRLTDSKGRVINFKNTIIIMTSNLGSSAIEQQSRLEEDLGFDAITNIEETRYSMLCNLVNEELKEFFRPEFLNRIDEMIVFQQLTKDEIEDIAKIMINDLVKRSEQQKLELEVSDKVKNKLIEEGYNPAYGARPLRRAVMRLIEDNIASKFLEESPEDQVRIFVDVNEFGEIVVTLGPLQNTKSNAIKENDVSFD

SEQ ID NO: 17490 - protein, 104 aa, Vaucheria litorea
MIYGIIEASSRQYWIEPGKIIDINNLPIKSGSTILLNQILFARNQDQIFIGRPYLNKITVKATIEKHFLGPKIIVYKMKPKKKYKRKNGHRQHLTRLMIQKINF

SEQ ID NO: 17491 - protein, 391 aa, Musa acuminata AAA Group
GLVSGILLIVFFAFFTEQSIDMLIRSSRAGKTVSYGGVMGDAFGKTGKVLIQLCIIVNNVGVLIVYMIIIGDVLSGTSSSGYHHSGVLEGWFGQHWWTSRFVILLVSMLAVFAPLACFKRVDSLRYTSALSVALAVVFVVITAGIAVVKLLAGSIAMPKLFPDVPDLASVWNFFTVVPIIVTAYICHYNVHPIENELDDPSQIKPVVRTSLALCSTVYITTSFFGFLLFGESTLDDVLANFDSNLGIPYSSVLNDAVRVSYAVHLMLVFPMIFHALRVNVDGLLFASASPLASDNRRFAIITVVLLSIIFLASNFIPSIWDAFQFTGATAAVCIGFIFPAAITLRDPHGIATKWGKILAVFMIILAVLSNAIAIYSDAYSLFKKTDASPES

SEQ ID NO: 17492 - protein, 420 aa, Lepidium latifolium
MEKKGSVLMLRYEVGKLLGQGTFAKVYHARNLKTGDNVAVKVIDKDRVLKVGMNEQTKREISVMKLLKHPNIVELHEVMATKSNIYFVMEYVKGGELFNKVSSGKLKEEVARKYFQQLVHAVDYCHSRGVCHRDLKPENLLVDEEGNLKVSDFGLSALADSRRQDGLLHTTCGTPAYVAPEVISRKGYDGFKADVWSCGVILFVLLAGYLPFRDSNLMELYKKIGKAEVKFPSGFAPGARRLLKRILDPNPNTRISTEEIMQSSWFRKGLQEQKESVDEETEVDVETIANVSGEKEKKRCINLNAFEIISLSTGFDLSGLFEKEEEKEEMRFTSNREASEITEELVEIGKERKMKVIKKEQGWKVKMVAGAAVVEAEVFEIAPSFHVVVLKKSGGDTAEYKRVVRESMRPALKDIVLAWH

SEQ ID NO: 17493 - protein, 421 aa, Streptomyces clavuligerus
MALVVQKYGGSSLESADRIKRVAERIVATKKAGNEVVVVCSAMGDTTDELLDLAQQVNPVPPEREMDMLLTAGERISNALVAMAISAQGAQAWSFTGSQAGVVTTAVHGNARIIDVTPSRVSEALEQGYVALVAGFQGVAQDTKDITTLGRGGSDTTAVALAAALNADVCEIYSDVDGVYSADPRIVPDARKLDSVPYEEMLELAASGSKILHLRSVEYARRYGVPIRVRSSYSDKPGTTVTGSIEEIPVEQALITGVAHDRSEAKITVTGVPDHAGAAARIFRVIADAEIDIDMVLQNVSNTSSGRTDITFTLSKANGPKAVASLEKIKEELGFSSVLYDDHVGKVSLVGAGMRSHPGVTATFCEALSKVGVNIEIINTSEIRISVLIRDAQLDDAVRAIHDAFELGGDEEAVVYAGSGR

SEQ ID NO: 17494 - protein, 222 aa, Arabidopsis thaliana
MSSTTTDSTELQNLIKLFQNCQTHPRQHFPAKSSAVLVCLYQEQREDINQLRVILTKRSSTLSSHPGEVALPGGKRDQEDKDDIATALREAREEIGLDPSLVTIISVLEPFVNKKGMSVAPVIGFLHDKKAFKPLPNPAEVEEIFDVPLEMFLKDRNRRAEEREHEGERYLLQYFDYYSEDKERSFIIWALTAGILIRVASIVYQRLPEFQERKPSFLNQPN

SEQ ID NO: 17495 - protein, 353 aa, Arabidopsis thaliana
MTSPLSDLLNLDLSDTKKIIAEYIWIGGSGMDIRSKARTLPGPVSDPTKLPKWNYDGSSTDQAAGDDSEVILYPQAIFKDPFRKGNNILVMCDAYRPAGDPIPTNNRHKAVKIFDHPNVKAEEPWFGIEQEYTLLKKDVKWPLGWPLGGFPGPQGPYYCAVGADKAFGRDIVDAHYKACLYSGLSIGGANGEVMPGQWEFQISPTVGIGAGDQLWVARYILERITEICGVIVSFDPKPIQGDWNGAAAHTNFSTKSMRKDGGLDLIKEAIKKLEVKHKQHIAAYGEGNERRLTGKHETADINTFSWGVADRGASVRVGRDTEKEGKGYFEDRRPSSNMDPYLVTSMIAETTIL

SEQ ID NO: 17496 - protein, 379 aa, Arabidopsis thaliana
MCGGAIISDFIPPPRSLRVTNEFIWPDLKNKVKASKKRSNKRSDFFDLDDDFEADFQGFKDDSAFDCEDDDDVFVNVKPFVFTATTKPVASAFVSTGIYLVGSAYAKKTVESAEQAEKSSKRKRKNQYRGIRQRPWGKWAAEIRDPRKGSREWLGTFDTAEEAARAYDAAARRIRGTKAKVNFPEEKNPSVVSQKRPSAKTNNLQKSVAKPNKSVTLVQQPTHLSQQYCNNSFDNSFGDMSFMEEKPQMYNNQFGLTNSFDAGGNNGYQYFSSDQGSNSFDCSEFGWSDHGPKTPEISSMLVNNNEASFVEETNAAKKLKPNSDESDDLMAYLDNALWDTPLEVKAMLGADAGAVTQEEENPVELWSLDEINFMLEGDF

SEQ ID NO: 17497 - protein, 227 aa, Arabidopsis thaliana
MVNGESSTSTSYSDNNNDTNDQGGDFECNICFELAQDPIVTLCGHLFCWPCLYRWLHHHSHSQECPVCKAVVQDDKLVPLYGRGKNQTDPRSKRYPGLRIPNRPTGQRPETAAPPPQPEAASNFFNYGIGLMGGIMPMMATTRFGNFSMGFGGLLPSLFNFQFHGFHDATLYGSTPGYPYGGYHNGFRGVPPRGQERPMARGGNQSDAFLKNILFFVGICVVIFLIW

SEQ ID NO: 17498 - protein, 299 aa, Arabidopsis thaliana
MNGVGGGGGGGGRFFGGGIGGGGGGDRRMRAHQNNILNHHQSLKCPRCNSLNTKFCYYNNYNLSQPRHFCKNCRRYWTKGGVLRNVPVGGGCRKAKRSKTKQVPSSSSADKPTTTQDDHHVEEKSSTGSHSSSESSSLTASNSTTVAAVSVTAAAEVASSVIPGFDMPNMKIYGNGIEWSTLLGQGSSAGGVFSEIGGFPAVSAIETTPFGFGGKFVNQDDHLKLEGETVQQQQFGDRTAQVEFQGRSSDPNMGFEPLDWGSGGGDQTLFDLTSTVDHAYWSQSQWTSSDQDQSGLYLP

SEQ ID NO: 17499 - protein, 476 aa, Arabidopsis thaliana
MSLMIRSSYVSHITLFQPRNSKPSSFTNQISFLSSSNNNPFLNLVYKRNLTMQSVSKMTVKSSLIDPDGGELVELIVPETEIGVKKAESETMPKVKLNQIDLEWVHVISEGWASPLKGFMREDEYLQSLHFNSLRLKNGTFVNMSLPIVLAIDDDTKEQIGSSENVALVCPQGDIIGSLRSVEIYKHNKEERIARTWGTTSPGLPYVEEYITPSGNWLIGGDLEVFEPIKYNDGLDHYRLSPKQLREEFDNRQADAVFAFQLRNPVHNGHALLMNDTRKRLLEMGYKNPVLLLHPLGGFTKADDVPLDVRMEQHSKVLEDGVLDPKTTIVSIFPSPMHYAGPTEVQWHAKARINAGANFYIVGRDPAGMGHPTEKRDLYDPDHGKRVLSMAPGLEKLNILPFRVAAYDTIEKKMAFFDPSRAKEFLFISGTKMRTYARTGENPPDGFMCPSGWNVLVKYYESLQEKEAKQQAVVSA

SEQ ID NO: 17500 - protein, 200 aa, Arabidopsis thaliana
MVTMMRPTLLILLFSTFLPQILTVDPPLPPSNGSDFIRLACNTTLYPDLCFSTLSSFANSIQNDSNRLARVAISLTLHNTLQLLSYLQNAYNRDHPTPVLRDCFENLKDAVDGMRGSMKQMKELVSASGSIESFRFQMSNVKTWLSAALTDEYTCTDGFKDVHEDDSIKDDVCSRVDDVKKLTSNALALVNRYADESIIN

SEQ ID NO: 17501 - protein, 182 aa, Arabidopsis thaliana
MSNGTDQAQPPPENPATPVDSKSRKRATPGDDNWLPPDWRTEIRVRTSGTKAGTVDKFYYEPITGRKFRSKNEVLYYLEHGTPKKKSVKTAENGDSHSEHSEGRGSARRQTKSNKKVTEPPPKPLNFDFLNVPEKVTWTGINGSEETWLPFIGDYKIQESVSQDWDRVFTLVTSQNAGKTMF

SEQ ID NO: 17502 - protein, 356 aa, Arabidopsis thaliana
MSLLADLVNLDISDNSEKIIAEYIWVGGSGMDMRSKARTLPGPVTDPSKLPKWNYDGSSTGQAPGQDSEVILYPQAIFKDPFRRGNNILVMCDAYTPAGEPIPTNKRHAAAEIFANPDVIAEVPWYGIEQEYTLLQKDVNWPLGWPIGGFPGPQGPYYCSIGADKSFGRDIVDAHYKASLYAGINISGINGEVMPGQWEFQVGPSVGISAADEIWIARYILERITEIAGVVVSFDPKPIPGDWNGAGAHTNYSTKSMREEGGYEIIKKAIEKLGLRHKEHISAYGEGNELRLTGHHETADINTFLWGVANRGASIRVGRDTEKEGKGYFEDRRPASNMDPYVVTSMIAETTLLWNP

SEQ ID NO: 17503 - protein, 206 aa, Arabidopsis thaliana
  misc_feature (180)..(180): Xaa can be any naturally occurring amino acid
  unsure (1)..(206): unsure at all Xaa locations
MEPKLTHLCYCLLLFLPILCQSTIAKPSSSPNPSSSINFIVSSCRVTRYQTLCVKCLAAFADKIRRNENQLAQTALAVTLVRVQSTTIYVGKLTKARRIKRREYLAVKDCVENLGDGLEMLAQSMRELKQVGRSGRDRDEFLWRLSNVETWVSAALTDETTCLDGFDGKVMDGVVKSAIXRRVVHVARVTSNALALVNRFAARHKS

SEQ ID NO: 17504 - protein, 234 aa, Oryza sativa Japonica Group
MELFVMIDACRRASARSITVVIPYFGYARADRKAQGREAITAKLSANLLTEAGSDRVIVCDIHSTQALGYFDIPVDHIHGQPVILDYLASKTISKDLVVVSPDVGGVVRARAFAKKLSDAPLAIVDKRRQGHNMSEVMHLIGDVKGKVAIMVDDMIDTAGTITSAAALLKQEGAEAVYACSTHAVFRFGSWFIVTSMIHVIVLIHWLVAKEPCYGMIRQIGFMFDQYKNDRVEQ

SEQ ID NO: 17505 - protein, 581 aa, Oryza sativa Japonica Group
MGEVAEDIYTQDGTVDVKGNPATKKNTGNWRACPYILANECCERLAYYGMSTNLVNYMKTRLGQESAIAANNVTNWSGTCYITPLLGAFLADAYMGRFWTIASFMIIYILGLALLTMASSVKGLVPACDGGACHPTEAQTGVVFLALYLIALGTGGIKPCVSSFGADQFDENDEGEKRSKSSFFNWFYFSINIGALVASSVLVYVQTHVGWGWGFGIPAVVMAVAVASFFVGTPLYRHQRPGGSPLTRIAQVLVASARKWGVEVPADGSRLHETLDRESGIEGSRKLEHTGQFACLDRAAVETPEDRSAANASAWRLCTVTQVEELKSVVRLLPIWASGIVFATVYGQMSTMFVLQGNTLDASMGPHFSIPAASLSIFDTLSVIVWVPVYDRLIVPAVRAVTGRPRGFTQLQRMGIGLVISVFSMLAAGVLDVVRLRAIARHGLYGDKDVVPISIFWQVPQYFIIGAAEVFTFVGQLEFFYDQAPDAMRSMCSALSLTTVALGNYLSTLLVTIVTHVTTRNGAVGWIPDNLNRGHLDYFFWLLAVLSLINFGVYLVIASWYTYKKTADSPDDKAEHAGANC

SEQ ID NO: 17506 - protein, 189 aa, Oryza sativa Japonica Group
MAGGGRADDERRIGVAMDYSASSKRALDWAIANLLRRGDHLVVLHVLHHGGEEAKHALWGKSGSPLIPLSEFRDPTAMQQYGVHCDAEVLDMLDTAARQLELTVVAKLYWGDAREKLCDAVEEQKIDTLVMGSRGLGSIQRYNSYFCLQCCCLINQESKLQALTIELAFGPVANIPVQIDKLCRERCTA

SEQ ID NO: 17507 - protein, 637 aa, Oryza sativa Japonica Group
MSDGNDFAELLWENGQAVVHGRKKHPQPAFPPFGFFGGTGGGGGGSSSRAQERQPGGIDAFAKVGGGFGALGMAPAVHDFASGFGATTQDNGDDDTVPWIHYPIIDDEDAAAPAALAAADYGSDFFSELQAAAAAAAAAAPPTDLASLPASNHNGATNNRNAPVATTTTREPSKESHGGLSVPTTRAEPQPQPQLAAAKLPRSSGSGGGEGVMNFSLFSRPAVLARATLESAQRTQGTDNKASNVTASNRVESTVVQTASGPRSAPAFADQRAAAWPPQPKEMPFASTAAAPMAPAVNLHHEMGRDRAGRTMPVHKTEARKAPEATVATSSVCSGNGAGSDELWRQQKRKCQAQAECSASQDDDLDDEPGVLRKSGTRSTKRSRTAEVHNLSERRRRDRINEKMRALQELIPNCNKIDKASMLDEAIEYLKTLQLQVQMMSMGTGLCIPPMLLPTAMQHLQIPPMAHFPHLGMGLGYGMGVFDMSNTGALQMPPMPGAHFPCPMIPGASPQGLGIPGTSTMPMFGVPGQTIPSSASSVPPFASLAGLPVRPSGVPQVSGAMANMVQDQQQGIANQQQQCLNKEAIQGANPGDSQMQIIMQGDNENFRIPSSAQTKSSQFSDGTGKGTNARERDGAET

SEQ ID NO: 17508 - protein, 368 aa, Oryza sativa Japonica Group
MSMLAIKHGAINLGQGFPNFDGPDFVKEAAIQAINAGKNQYARGYGVPELNSAIAERFLKDSGLQVDPEKEVTVTSGCTEAIAATILGLINPGDEVILFAPFYDSYEATLSMAGANVKAITLRPPDFSVPLEELKAAVSKNTRAIMINTPHNPTGKMFTREELEFIATLCKENDVLLFADEVYDKLAFEADHISMASIPGMYERTVTMNSLGKTFSLTGWKIGWAIAPPHLTWGVRQAHSFLTFATCTPMQAAAAAALRAPDSYYEELRRDYGAKKALLVNGLKDAGFIVYPSSGTYFVMVDHTPFGFDNDIEFCEYLIREVGVVAIPPSVFYLNPEDGKNLVRFTFCKDDETLRAAVERMKTKLRKK

SEQ ID NO: 17509 - protein, 167 aa, Saccharomyces cerevisiae
MRGSHHHHHHMSDEEHTFETADAGSSATYPMQCSALRKNGFVVIKSRPCKIVDMSTSKTGKHGHAKVHLVAIDIFTGKKLEDLSPSTHNMEVPVVKRNEYQLLDIDDGFLSLMNMDGDTKDDVKAPEGELGDSLQTAFDEGKDLMVTIISAMGEEAAISFKEAARTD

SEQ ID NO: 17510 - protein, 525 aa, Coxiella burnetii RSA 493
MKTRKEVMMKRSVGAPALLFAAIGGIVGSGWLFGPYFASRLVGPSAILAWAVGGGLMMLIALTFAELGSSFPFTGGSVRYLQLSHGPLVGFTMAWIAWISSIAVAPVETLALLHYASNYLPWLMHNVDGQSVLTLPGLITAGFLLAFLCVINSIGVRYLTKTNAIIVGAKLAVPIFTAIVLLFFDFHATNFSSHGFATQGIKGILTALPAAGVIFSFIGYSPVIQLAGEAKNPQRSIPIAIIGALIICIVLYILLQVAFIGALNPASLQHGWQALSFKGDAGPFAGIAMTLGMVWFAKLLYLDAAISPFGTALIYTASTARLGFAMSEGGYLPSSLRKLNRLGVPHRMILLNFVIGLFLFLPFPTWQHMMSFLVSLLVFAYAVGPLSLVVLRKTLPDHARPFRLPMAKTISFLAFYICNLIVYWSGWDVVFKMIIAILVGYVLLGSYLLFKHDKSFNWQWRRFWWMVCYIAGLALISHYGSFGGNHLIPFGWDFIVIASFSASIFGLALYCGVEVRKGEISAAVV

SEQ ID NO: 17511 - protein, 646 aa, Coxiella burnetii RSA 493
MAIFSSSDNVFQRHTSSNVRPQPMHTASPKAVALQMPMQGESVRLRLPAMFMGEILMYREDFHQTKTNVAHMKRSGIRDFFTSHFASCGSHDKVISFFQVDKEVIKLSLVHWKADMKLKRIFSPLIILLISINGMIGSAWLFGPYFAAKTAGPAALVSWLVGGGLVLIVAFTFAELSTMFPVAGGIARIPQYSHGMATGFMMSWIAWLSCVAMPPIEVLATLQYTSFFFPRLTCLHGNQHVLTHEGLVGAALLMFFLSWLNIASVKHLVRSNVLMTVFKIGIILVIAITLIAVGFHGKNFFAYGGFAPSGWHGIVSAVSMGGIAFAFTGFRHGVELAAETKNPKQAIPLAIIGSIVFCLLLYWLLQLAFIGALHSPSLSKGWAQLAYQGDVGPFSGIAALLGLGWLSWMIYANAVISPLGGALVYVTSTSRIVYGMSKNAYFPAFFMRLNKKAIPVWCIALNGLTGFVLFFVLSGWQSMINFLVSAVVISYGTGPISLITLRYQMPNANRPFKLPQGILLSTLAFYVCNLMVFWCGWESIKKLFAAILIGILFFIVFQKTKQQRLREIHLKYSLWLIIYLGGLTLISYLGSMGGGMGIIPFGWDFIVIALFSLVSLYLAVKSRLPQISAQTHQANTLDSVDSEASA

SEQ ID NO: 17512 - protein, 423 aa, Coxiella burnetii RSA 493
MTFQKPCFPHCLPVYFPLLYHSNHKELRKMNDVLSVRAQQLEPSVTLAVSDLARELLNKGHDVISLSAGEPDFDTPDFIKQSAIKAIQEGFTKYTNVDGTPALKAAIVHKLKRDNHLNYEPSEILVSGGAKQSIYNVLMGTLNAGDEAIIPAPYWVSYPPMVQLAEAKPIIISATIDQNFKLTPGQLSQAITPQSRLLILNSPNNPSGVAYTESELKALADVLMEHPQILILSDEIYEYILWGQNRFVNILNVCPELRDRTIIINGASKAYAMTGWRIGYAAGPKSIIQAMKKIQSQSTSSPNSIAQVAATTALGAQRGDFAYMYEAYKTRHDLVLKALNQMKGVHCIPADGAFYLFPDVSAAIQQLGLEDDIKLGTYLLDKTKVAVVPGSAFGSPGHVRLSCATSTEKLQEALERLASVLDY

SEQ ID NO: 17513 - protein, 585 aa, Coxiella burnetii RSA 493
MGYLFIIINNKGLTKVEKSSQQKNHYKDSLPTMRSLILNPWQLCDLEMLFNGGFAPLNGFLSKADYYCVIETMRLVDGSLWPIPITLDVKSEFATKLIIGEPLALRDDQGSLLGILEVEEIWEPDKYKEAHCVFGTLDEAHPGVKQLLRHKGSFYLNGKLTKINAPKHYDFIQYRLSPQQLKDKLKGLHKNLVGFQTRNPMHRAHFELTRCAAEICNANLLIQPVVGITKLGDMDYVTRARCYEIMLSYYPPGTTFLNFLPLAMRMGGPREALWHMLIRKNYGCTHFIIGRDHASPGVDSRGKPFYEPYAAQALAQKYQTEAGIQIVPFHEMVYSQAKQKYIPVNQIQQNETTLKISGTEIRRRLREGLEIPEWFSYPEVIAELRKSFPPKNKQGITLFLTGLSGAGKSTISKALIAKLQEMDERKITLLDGDVVRKNLSHGLGFSREDRDANVARIAFVASEVTKHGGMAICAQIAPYADTRKRAREIVESQGIFIEVYISAPLEICEQRDPKGLYGKARMGIIKIFTGISDPYEPPASPEIIIETNQITIEESVAKIIFYLFEKGYLTPKVDRVRNSVLSVNA

SEQ ID NO: 17514 - protein, 596 aa, Coxiella burnetii RSA 493
MAIIQLKMKTLTSQGIRTYGRLLQATKQYWPIFLIGVVGMIAVSLSDAGFTWLIKPIINRGFIARDLVFIRWLPFIIVLVFLFRGAANFLSTYFINRVARNIVMDFRRAIFSHLLRLPAEFYDRHSSGHLLSTVIYNVEQVAQASSDALIITLQASSLVVGLLVVMFLVSWKLTLFFLVITPLIAWVMRVCSARLRHLSTSVQKSVGEVTHIASEAIEAYKIVRLYGGQKYENEKFRHATKLNQQRELKVVVTNSVGTSLVQLLIAIPIAIVLFFATQPSFHVTAGSFASIVSAMIMMLRPVRRLTMVNSYIQKGIAAAESIFKLLDEDVEKDRGERHLVRARGAIEYQGVSFAYDNSKKTILSEISFSIEPGQMVAIVGRSGAGKSTLINLLPRFYDASTGVIKIDDINIKEFRLQELRNQFGLVSQHTTLFNDTILNNIAYGQAGSIDKRKIIEAARAAHAMEFIEQLPEGLDTVIGENGVRLSGGQRQRIAIARALFKNAPIHILDEATSSLDTHSERHIQAALDNLMDQCTTLVIAHRLSTIERADWIMVLEEGRLIEKGTHQQLLTLNGAYAELYRMQFAEKPAAMTALDE

SEQ ID NO: 17515 - protein, 441 aa, Coxiella burnetii RSA 493
MVVLMHSRFQKGKIPNSVLKRDLGLIGATMMGLGSIVGTGIFVSIGVAAGVTGPSVVLAIVLAALVATCNALSSAQLAASHPVSGGTHEYGYRYLHPALGFTAGWMFLCAKIASAATAALGFAGYLLHLLGITSISMIPIAVSIAILLTLLVLSGLKKSNLANLIIVSIILISLITFVLSGLPHLFSMGLPHFKPFFPTAAPSGLRNFLYATALMFVAYTGYARIATLGEEVKNPKRFIPQAIILTLIISAVLYIAVAVVAISIVGADHLSQAAQNRATPLETAARALNRRGLDIILAFGACTAMLGVLLNLMLGLSRMALAMGRKRDLPSMFGTLSKKQRTPSAAILGVGLAIIGLSLIGNVEITWAFSAFTVLIYYFITNLAALQLPKADRLYPRIFPVGGLIACLFLAFWVPLMIWSIGIGLIAVGLAWKYFMARLWI

SEQ ID NO: 17516 - protein, 419 aa, Coxiella burnetii RSA 493
MVRHSSSLIINSILDLERTKQYDTNFNQERTTMAITIAVTREWNEEEKRVAITPTLAPRLIQRDIEIRLQAGAGEGAGFSDSAYSNVSLCKNLTECYRDAAIIFRVTPPSIADIKKMPRDALVIGLLAPHADEKRIKAFEEQNITAFALELLPRITRAQAMDVLSSQASIVGYKAVLVAANTVGNYFPMLTTAASTIRPIKVLVIGAGVAGLQAIATAKRLGAIVSAYDVRPEAKEQVESLGAQMVKLSISGSGSGGYARELTPEERQQQQIELTKHIASAQVIITTAAVPGKKAPLIISKDAVAQMQSGSVIVDVAAPMGGNCELTEAGKSVDYQGVKIIGPTNLPSGLARDASQLFGSNLIHFLELLLNEKNEIAIDWQDEILNKTAIAKGATRYSTKTNPDAVPAQTHRRQLKGAR

SEQ ID NO: 17517 - protein, 243 aa, Arabidopsis thaliana
MYGQCNIESDYALLESITRHLLGGGGENELRLNESTPSSCFTESWGGLPLKENDSEDMLVYGLLKDAFHFDTSSSDLSCLFDFPAVKVEPTENFTAMEEKPKKAIPVTETAVKAKHYRGVRQRPWGKFAAEIRDPAKNGARVWLGTFETAEDAALAYDIAAFRMRGSSALLNFPLRVNSGEPDPVRITSKRSSSSSSSSSSSTSSSENGKLKRRRKAENLTSEVVQVKCEVGDETRVDELLVS

SEQ ID NO: 17518 - protein, 282 aa, Arabidopsis thaliana
MSVIGSKSCIFSVARYTRENEKSSCFTSINKKSSLDLSLPRNLAGVSCKFSGENPGTNGVSLSSKNKMEDYNTAMKRLMRSPYEYHHDLGMNYTLIRDELIVGSQPQKPEDIDHLKQEQNVAYILNLQQDKDIEYWGIDLDSIVRRCKELGIRHMRRPAKDFDPLSLRSQLPKAVSSLEWAVSEGKGRVYVHCSAGLGRAPGVSIAYMYWFCDMNLNTAYDTLVSKRPCGPNKGAIRGATYDLAKNDPWKEPFESLPENAFEDIADWERKLIQERVRALRGT

SEQ ID NO: 17519 - protein, 179 aa, Arabidopsis thaliana
MVAATVNLANMTWTSLNSNPAISFSMLSGIRNLGMLPFRRCLKPTVIGIASWPPLRCSSVKAMSSSSSSSGSTLEETVKTTVAENPVVVYSKTWCSYSSQVKSFFKSLQVEPLVVELDQLGSEGSQLQNVLEKITGQYTVPNVFIGGKHIGGCSDTLQLHNKGELEAILAEANGKNGQT

SEQ ID NO: 17520 - protein, 462 aa, Arabidopsis thaliana
MARVLVSSPSSFFGSPLIKPSSSLRHSGVGGGGTAQFLPYRSNNNKLFTTSTTVRFSLNEIPPFHGLDSSVDIGSIFTRAESLLYTIADAAVVGADSVVTTDSSAVQKSGGWFGFISDAMELVLKILKDGLSAVHVPYAYGFAIILLTIIVKAATYPLTKQQVESTLAMQNLQPKIKAIQQRYAGNQERIQLETSRLYKQASVNPLAGCLPTLATIPVWIGLYQALSNLANEGLFTEGFFWIPSLGGPTSIAARQSGSGISWLFPFVDGHPPLGWYDTVAYLVLPVLLIASQYVSMEIMKPPQTDDPAQKNTLLVFKFLPLMIGYFALSVPSGLSIYWLTNNVLSTAQQVYLRKLGGAKPNMDENASKIISAGRAKRSIAQPDDAGETFRQLKEQEKRSKKNKAVAKDTVELVEESQSESEEGSDDEEEEAREGALASSTTSKPLPEVGQRRSKRSKRKRTV

SEQ ID NO: 17521 - protein, 169 aa, Arabidopsis thaliana
MAASLSSRLIKGIANLKAVRSSRLTSASVYQNGMMRFSSTVPSDSDTHDDFKPTQKVPPDSTDSLKDIVENDVKDNPVMIYMKGVPESPQCGFSSLAVRILQQYNVPISSRNILEDQELKNAVKSFSHWPTFPQIFIKGEFIGGSDIILNMHKEGELEQKLKDVSGNQD

SEQ ID NO: 17522 - protein, 344 aa, Arabidopsis thaliana
MWKIGQRGVPYFQRLIAAPFTTLRSLPTSLVETGQNRVIDASLTLIRERAKLKGELVRLIGGAKATTALLGVPLGHNSSFLEGPALAPTHVREAIWCGSTNSTTEEGKELKDPRVLSDVGDIPVQEIREMGVDDDRLMNVVSESVKLVMEEEPLRPLVIGGDHSISYPVVRAVSEKLGGPVDILHLDAHPDIYDRFEGNYYSHASSFARIMEGGYARRLLQVGIRSINKEGREQGKRFGVEQYEMRTFSKDRQMLENLKLGEGVKGVYISIDVDCLDPGFAHGVSHFEPGGLSFRDVLNILHNLQGDLVGADVVGYNPQRDTADDMTAMVAAKFVRELAAKMSK

SEQ ID NO: 17523 - protein, 282 aa, Arabidopsis thaliana
MMMGKEDLGLSLSLGFAQNHPLQLNLKPTSSPMSNLQMFPWNQTLVSSSDQQKQQFLRKIDVNSLPTTVDLEEEIGVSSPNSTISSTVSGKRRSTEREGTSGGGCGDDLDITLDRSSSRGTSDEEEDYGGETCRKKLRLSKDQSAVLEDTFKEHNTLNPKQKLALAKKLGLTARQVEVWFQNRRARTKLKQTEVDCEYLKRCVEKLTEENRRLEKEAAELRALKLSPRLYGQMSPPTTLLMCPSCERVAGPSSSNHNQRSVSLSPWLQMAHGSTFDVMRPRS

SEQ ID NO: 17524 - protein, 456 aa, Arabidopsis thaliana
MSPAPSTDPQPISGKKNGGDGGRIPVEEWLPITESRKGNVYTATFHLLCSGIGLQVILLPAAFAALGWVWGTIILTVGFVWKLYTTWLLVQLHEAVPGIRISRYVRLAIASFGVKLGKLLGIFPVMYLSGGACTILVITGGKSIQQLLQIMSDDNTAPLTSVQCFLVFSCIAMIMSQFPNLNSLFGVSLIGAFMGIAYCTVIWILPVASDSQRTQVSVSYATMDKSFVHIFNAIGLIALVYRGNNLVLEIQGTLPSDSKNPSCKTMWRAVMISHALVAICMFPLTFVVYWAYGDKIPATGGPVGNYLKLYTQEHSKRAACFIHLTFIFSCLCSYPINLMPACDNIEMVYITKKKKPASIIVRMMLRVFLSLVCFTIAVGFPFLPYLAVLIGAIALLVTFTYPCFMWISIKKPQRKSPMWLFNVLVGCLGASLSVLLLVASAMRLAQKGLHANFFRP

SEQ ID NO: 17525 - protein, 434 aa, Arabidopsis thaliana
MYSNFKEQAIEYVKQAVHEDNAGNYNKAFPLYMNALEYFKTHLKYEKNPKIREAITQKFTEYLRRAEEIRAVLDEGGSGPGSNGDAAVATRPKTKPKDGEGGGKDGEDPEQSKLRAGLNSAIVREKPNIKWSDVAGLESAKQALQEAVILPVKFPQFFTGKRRPWRAFLLYGPPGTGKSYLAKAVATEADSTFFSVSSSDLVSKWMGESEKLVSNLFEMARESAPSIIFVDEIDSLCGTRGEGNESEASRRIKTELLVQMQGVGHNDEKVLVLAATNTPYALDQAIRRRFDKRIYIPLPEAKARQHMFKVHLGDTPHNLTEPDFEYLGQKTEGFSGSDVSVCVKDVLFEPVRKTQDAMFFFKSPDGTWMPCGPRHPGAIQTTMQDLATKGLAEIIPPPITRTDFEKVLARQRPTVSKSDLDVHERFTQEFGEEG

SEQ ID NO: 17526 - protein, 297 aa, Arabidopsis thaliana
MSNKDGRVKEDGFIYMVLEYGEIDLAHMLSQKWREIEGSDRTIDENWLRFYWQQILQAVNTIHEERIVHSDLKPANFLLVRGFLKLIDFGIAKAINSDTTNIQRDSQVGTLSYMSPEAFMCNESDENGNTIKCGRPSDIWSLGCILYQMVYGRTPFADYKTFWAKFKVITDPNHEITYNQLSNPWLIDLMKKCLAWDRNQRWRIPELLQHPFLAPPIPHEPQVKTIKLFSLIAESCGSDDDKANSMISQLEQLLSNPAPLPRNDVLDSRDQNQQLLSRVSELCIQLQDRLQGLEGEN

SEQ ID NO: 17527 - protein, 586 aa, Arabidopsis thaliana
MDSVNSFKGYGKVDEAQDLALKKKTRKRLLLLSISVVVLIAVIIAAVVATVVHKNKNESTPSPPPELTPSTSLKAICSVTRFPESCISSISKLPSSNTTDPETLFKLSLKVIIDELDSISDLPEKLSKETEDERIKSALRVCGDLIEDALDRLNDTVSAIDDEEKKKTLSSSKIEDLKTWLSATVTDHETCFDSLDELKQNKTEYANSTITQNLKSAMSRSTEFTSNSLAIVSKILSALSDLGIPIHRRRRLMSHHHQQSVDFEKWARRRLLQTAGLKPDVTVAGDGTGDVLTVNEAVAKVPKKSLKMFVIYVKSGTYVENVVMDKSKWNVMIYGDGKGKTIISGSKNFVDGTPTYETATFAIQGKGFIMKDIGIINTAGAAKHQAVAFRSGSDFSVYYQCSFDGFQDTLYPHSNRQFYRDCDVTGTIDFIFGSAAVVFQGCKIMPRQPLSNQFNTITAQGKKDPNQSSGMSIQRCTISTNGNVIAPTYLGRPWKEFSTTVIMETVIGAVVRPSGWMSWVSGVDPPASIVYGEYKNTGPGSDVTQRVKWAGYKPVMSDAEAAKFTVATLLHGADWIPATGVINQLS

SEQ ID NO: 17528 - protein, 382 aa, Arabidopsis thaliana
MPINDQFPSGLRILVVDDDTSCLFILEKMLLRLMYQVTICSQADVALTILRERKDSFDLVLSDVHMPGMNGYNLLQQVGLLEMDLPVIMMSVDGRTTTVMTGINHGACDYLIKPIRPEELKNIWQHVVRRKCVMKKELRSSQALEDNKNSGSLETVVVSVSECSEESLMKCRNKKKKKKRSVDRDDNEDDLLLDPGNSKKSRVVWSIELHQQFVNAVNKLGIDKAVPKRILELMNVPGLSRENVASHLQKFRLYLKRLSGEASQSNDSESTKRYENIQALVSSGQLHPQTLAALFGQPIDNHHSASFGVWIPNDNLGRSQNEHFSVDVSSASNRPVSVAVHGLSSSANFRQRGNVNNNRIRQGYGSNVNEESWILERSSRQR

SEQ ID NO: 17529 - protein, 358 aa, Arabidopsis thaliana
MCGGAIISDFIPPPRSRRVTSEFIWPDLKKNLKGSKKSSKNRSNFFDFDAEFEADFQGFKDDSSIDCDDDFDVGDVFADVKPFVFTSTPKPAVSAAAEGSVFGKKVTGLDGEAEKSANRKRKNQYRGIRQRPWGKWAAEIRDPREGARIWLGTFKTAEEAARAYDAAARRIRGSKAKVNFPEENLKANSQKRSVKANLQKPVAKPNPNPSPALVQNSNISFENMCFMEEKHQVSNNNNNQFGMTNSVDAGCNGYQYFSSDQGSNSFDCSEFGWSDQAPITPDISSAVINNNNSALFFEEANPAKKLKSMDFETPYNNTEWDASLDFLNEDAVTTQDNGANPMDLWSIDEIHSMIGGVF

SEQ ID NO: 17530 - protein, 226 aa, Arabidopsis thaliana
MSSSDSVNNGVNSRMYFRNPSFSNVILNDNWSDLPLSVDDSQDMAIYNTLRDAVSSAWTPSVPPVTSPAEEDKPPATKASGSHAPRQKGMQYRGVRRRPWGKFAAEIRDPKKNGARVWLGTYETPEDAAVAYDRAAFQLRGSKAKLNFPHLIGSCKYEPVRIRPRRRSPEPSVSDQLTSEQKRESHVDDGKSSLVVPELDFTVDQFYFDGSLLMDQSECSYSDNRI

SEQ ID NO: 17531 - protein, 566 aa, Emericella nidulans
MADIATRDVRQPIDIAEYLFRRLHEVGIRSVHGVPGDYNLAALDYLPKCGLHWVGNCNELNAGYAADGYARVNGIAALVTTFGVGELSAINAIAGRYSEFVPIIHIVGQPHSRSQKDGLLLHHTLGNGDYNVFSSMNKGISVTTANLNDTYDAATLIDNAIRECWIHSRPVYLALPTDMITKKIEGERLKTPIDLSLPANDPEKEDYVLVDARAQVFARSAKNPVILVDDSCVFDDSTGLSLEEVHDLIEVSGLPTFVAPMGKGAVNETHRCYGGVYAGTGSNPGVREQVESSDLILSIGAIKSDFNTAGFSYRIGQLNTIDFHTTYVRVRYSEYPDTNMKGVLRKVIQRLGFIKADPVPHISNALPEHEKNSSEQRITHAWMWPMVGQWLKENDIVITETGTANFGICWNLLPSELQPISQVLWGSIGYSVGACQGAALAAKEQGNRRTVLWVGDGSLQLTLQEISTMIRNNLNPIIFVICGEGYTIERFIHGWDESYNDIQTWDIKGLPVAFGGKGRYKGYKVTTRDELTKLFASEEFSSTPCLQVSLCDLTHYLSDANFEQLG

SEQ ID NO: 17532 - protein, 204 aa, Arabidopsis thaliana
MELKNTIFLVILLSITILQSSSATPNRSESDQFIVSSCQTTQYPSLCVHTLSAYATKIRHNNDQDLAQTALIISLARAKSVTIFVAKLTKETPRFKRREYLAIKDCIEVLGNSVDRLAQSVKELARAGHAVASEDFMWKMSNVQTWVSAALTDETTCLDGFSERAMGGKVKRLIRYKVVHVAQVTSNALALVNQFAEKRSVKFP

SEQ ID NO: 17533 - protein, 206 aa, Arabidopsis thaliana
METTMKKKGRVKATITSQKEEEGTVRKGPWTMEEDFILFNYILNHGEGLWNSVAKASGLKRTGKSCRLRWLNYLRPDVRRGNITTEEQLLIIQLHAKLGNRWSKIAKHLPGRTDNEIKNFWRTKIQRHMKVSSENMMNHQHHCSGNSQSSGMTTQGSSGKAIDTAESFSQAKTTTFNVVEQQSNENYWNVGDLWPVHLLNGDHHVI

SEQ ID NO: 17534 - protein, 155 aa, Arabidopsis thaliana
MSAVAINHFFGLPETIEKLILPISRSGESNNESRGRGSSNNIPIDILESPKKYIFYLDIPGISKSDIQVTVEEERTLVIKSNGKRKRDDDESEEGSKYIRLERRLAQNLVKKFRLPEDADMASVTAKYQEGILTVVIKKLPPQPPKPKTVQIAVS

SEQ ID NO: 17535 - protein, 343 aa, Arabidopsis thaliana
MERYEIVKDIGSGNFGVAKLVRDKFSKELFAVKFIERGQKIDEHVQREIMNHRSLIHPNIIRFKEVLLTATHLALVMEYAAGGELFGRICSAGRFSEDEARFFFQQLISGVNYCHSLQICHRDLKLENTLLDGSEAPRVKICDFGYSKSGVLHSQPKTTVGTPAYIAPEVLSTKEYDGKIADVWSCGVTLYVMLVGAYPFEDPSDPKDFRKTIGRILKAQYAIPDYVRVSDKCRHLLSRIFVANPEKRITIEEIKNHSWFLKNLPVEMYEGSLMMNGPSTQTVEEIVWIIEEARKPITVATGLAGAGGSGGSSNGAIGSSSMDLDDLDTDFDDIDTADLLSPL

SEQ ID NO: 17536 - protein, 404 aa, Arabidopsis thaliana
MTTVSTQNESTQKPVQVAKRLEKFKTTIFTQMSILAVKHGAINLGQGFPNFDGPDFVKEAAIQAIKDGKNQYARGYGIPQLNSAIAARFREDTGLVVDPEKEVTVTSGCTEAIAAAMLGLINPGDEVILFAPFYDSYEATLSMAGAKVKGITLRPPDFSIPLEELKAAVTNKTRAILMNTPHNPTGKMFTREELETIASLCIENDVLVFSDEVYDKLAFEMDHISIASLPGMYERTVTMNSLGKTFSLTGWKIGWAIAPPHLTWGVRQAHSYLTFATSTPAQWAAVAALKAPESYFKELKRDYNAKKETLVKGLKEVGFTVFPSSGTYFVVADHTPFGMENDVAFCEYLIEEVGVVAIPTSVFYLNPEEGKNLVRFAFCKDEETLRGAIERMKQKLKRKVLSLN

SEQ ID NO: 17537 - protein, 843 aa, Neurospora crassa
MATPAKKKDFNKTPQELVTEFWDQFFVKKPGKVTRIFPRSLYETLLPPSQPQGVSSSRNATDSYQAAVKECKEKVKRIVKECERTNEKFTDPDFDIEGDFEVRNCLHGLTHDADLNEFFGELQELYDLGAGKGAKKGIKSRGAPRSADDAPEAPAPEGSKGRREGVKAGWRETFTPGSVHRLDWIFESPQWTKDGYSSSDIKQGCDGDCWWLAAVATIAHRKDLMEKVCVARDEEIGVYGFVFFKDGEWISTVVDDNLYLTEEDYRHYYDEYDPTGKKGRKHRKDKQTGSGALYFSQCSDPNETWLPLLEKAYAKVHGDYEAISGGWPGEGVEDMTGGVSSMLQSNRVLRKDKLWKELVNSNGDFVFSCSAHGYASTRGSMANGHAYSILKATEEVDEDGKKVRLVKIRNPWGERTSAGQGEWDGPWSDGSKEWTPYWLKKLDHKFGDDGEFWMSYQDMLDNFLYLYRTRLFDDKWTVVQQWTTVTVGWIAGYLNKKFVIEIKKGGTVVIVLSQDKDGKEQLCRVRPTLNWSSRSVSCELDLEPGRYEVLPKITVERDTSQRMVEDVVTRWAEENPAKLRQIGMQYDLAHAKGGVPDEDEIITQRKEEKKKKEEKKKTKAKAKREKERREKRKQKQVQITINMPEGSTVDTSGTGTESDKKEEKKETAEDKKEEEEKFEDAVEEKAKDDEKKKEEQPKRVSAPSSSSKSAGDAAAGEGKNTEKKDGEQKEDTAAAEEKKIEEKVTGEEKKQEEKEKIEVVGESKPTAAATEEVEEDLSEDEEEEEEEPKIEYEEGKIPWNAVCVVGLRVYAQDADVTVTLATPNTAEEGASLVMDQHAVGATI

SEQ ID NO: 17538 - protein, 923 aa, Lotus japonicus
MMELPATRILSQAVTCFLCLYIFIGSASATEGFESIACCADLNYTDPLTTLNYTTDYTWFSDKRSCRKIPETELRNRSNENVRLFDIDEGKRCYNLPTIKNGVYLIRGTFPFDSLNSSFNASIGVTQLGAVRSSRLQDLEIEGVFRATKDYIDFCLLKGEVYPFISQLELRPSPEEYLQDFPTSVLKLISRNNLGDTKDDIRFPVDQSDRIWKASSISSSAVPLSSNVSNVDLNANVTPPLTVLQTALTDPERLEFIHTDLETEDYGYRVFLYFLELDRTLQAGQRVFDIYVNSEIKKESFDVLAGGSNYRYDVLDISASGSLNVTLVKASKSEFGPLLNAYEILQVRPWIEETNQTDVGVIQKMREELLLQNSGNRALESWSGDPCILLPWKGIACDGSNGSSVITKLDLSSSNLKGLIPSSIAEMTNLETLNISHNSFDGSVPSFPLSSLLISVDLSYNDLMGKLPESIVKLPHLKSLYFGCNEHMSPEDPANMNSSLINTDYGRCKGKESRFGQVIVIGAITCGSLLITLAFGVLFVCRYRQKLIPWEGFAGKKYPMETNIIFSLPSKDDFFIKSVSIQAFTLEYIEVATERYKTLIGEGGFGSVYRGTLNDGQEVAVKVRSATSTQGTREFDNELNLLSAIQHENLVPLLGYCNESDQQILVYPFMSNGSLQDRLYGEPAKRKILDWPTRLSIALGAARGLAYLHTFPGRSVIHRDIKSSNILLDHSMCAKVADFGFSKYAPQEGDSYVSLEVRGTAGYLDPEYYKTQQLSEKSDVFSFGVVLLEIVSGREPLNIKRPRTEWSLVEWATPYIRGSKVDEIVDPGIKGGYHAEAMWRVVEVALQCLEPFSTYRPSMVAIVRELEDALIIENNASEYMKSIDSLGGSNRYSIVIEKRVLPSTTSTAESTITTQSLSHPQPR

SEQ ID NO: 17539 - protein, 398 aa, Butyrivibrio fibrisolvens
MGKKVVIASACRTAIGTMGGSLSGISAPDLGAIVIKEAVKRAGIKPEDVEHVYMGCVIQAGLGQNVARQASIKAGLPNETTAVTTNVVCGSGLNCVNQAAQMIIAGDADVVVAGGMENMSQAPFALPNGRFGYRMTWPSNSQGALVDTMVKDALWDAYNDYHMIKTADNVAEQWKLTREELDEFAVNSQNKACAAIEKGAFKDEIVPVEIKKKKETVIFDTDEGPRPGTTIEGLAKLKALYPDGVVTAGNASGINDGAAALVVMSEEKAKELGVKPLATWVAGALGGCAPEIMGVGPVPATKKALAKAGLTIDDLDVYEANEAFAAQSVAVGKELGFDLNKLNPNGGAIALGHPVGASGARILVTLIYDMLHNDNYNKGLATLCIGGGMGCATIIEKY

SEQ ID NO: 17540 - protein, 573 aa, Aegilops tauschii
MVVVVDERMVVVMMVMMGVAMCMAVPLSCSPRLHLGRATTILLPPTFRGLASPPPDGAATSKAQQRQLCPGPPSHESSSRTTAASPRNWPTRNRPDRAPAQRALCRHCPTHSAVTRRHRPAGRAAPHRHRLRATRRARAPRSADVPEEEPPAAPDTGEGEEIPPPPAPLRLCLAAPADGGGGRGRGWGLDVCWEKAVAEHGVAGVKCARSGSWRCDRRRCVQLVGSMGWVTAVAVRISERERARLGSAPTMAASRRVLVLVRLSPASLAVLGARFHLLDLHASPLPMDAFLAAAAADNDDPPRAALIPGHGSVRVDAAFLDAVPSLRCVLFNSAGLDHVDLLECERRGVAVANATGVYSADVADYAVGLLIDVLRRVSASDRHVRRGHWPERGGHGFTLGRKRVGIIGLGSIGSAIATRLEAFNCAVSYHSRRQKSNVPYCYYPTARDLAECSDVLVVTCPLTAETRHIVDRRVLDALGSGGVVVNVARGANVDEVELVRALAEGRIAGAGLDVFEHEPNVPPELLAMENVVLTHHQAAFTPESVADLDRLFVDNLEAFFRGSPLLTPVVVYD

SEQ ID NO: 17541 - protein, 345 aa, Micromonospora echinospora
MQRQRPPSRAGGDMDRLQSALALYEEAMGYTYAAALRAAAAVGVADHLVDGPRTPAELAAATGTDADALRRVLRLLAVRDVVRESDGRFALTDKGAALRSDSPVPARAGILMFTDTMFWTMSHRVASALGPERPAFADIFGSSLDAYFDGDAEVEALYYEGMETVSAAEHLILARAGDFPATGTVADVGGGRGGFLLTVLREHPGLQGVLLDRAEVVARHRLDAPDVAGRWKVVEGDFLREVPHADVHVLKRILHNWGDEDSVRILTNCRRVMPAHGRVLVIDAVVPEGNDAHQSKEMDFMMLAARTGQERTAAELEPLFTAAGLRLDRVVGTSSVMSIAVGVPA

SEQ ID NO: 17542 - protein, 356 aa, Micromonospora echinospora
MELTTTAARPGLRHRMQQLIYGFFTAQTLHVAVRLRIPDLLADGARDVGDLASATGADAPSLRRLLRALVFLEVLDEPAPGTFALTEQGEVLRADVTGSMRELVLLLSGPESWAAWGQLEHSVRTGEVAWEHVHGRSCFDHLMADPQRQAAFNAAMAEGSRAFVPTLLSAYDFGDLRTVVDVGGGSGALLAGVLAAHPHLRGTVFDTPDGVADAARTVAEQGVADRCGVETGDFFVSVPPGADAYVLKSVLHDWDDEQCVEVLRTVRRAVRPDSRVILVESLMPTTVTTAPSVAQVVMNDLNMMVCHGGRERTVAEFRELLRVAGFRLESVTPCPAPSVVGILEAAPAPATGPDGS

SEQ ID NO: 17543 - protein, 95 aa, Oxalis humbertii
LYAGINISGTNGEVMPGQWEYQVGPSVGIEAGDHIWASRYILERITEQAGVVLTLDPKPIDGDWNGAGCHTNYSTKRMRDEGGFEVIKKAILNLS

SEQ ID NO: 17544 - protein, 95 aa, Oxalis lucumayensis subsp. lucumayensis
  misc_feature (93)..(93): Xaa can be any naturally occurring amino acid
  unsure (1)..(95): unsure at all Xaa locations
LYAGINISGTNGEVMPGQWEYQVGPSVGIEAGDHIWASRYILERITEQAGVVLTLDPKPIDGDWNGAGCHTNYSTKSMRDEGGFEVIKKAILXLS

SEQ ID NO: 17545 - protein, 95 aa, Oxalis tuberosa
LYAGINISGTNGEVMPGQWEYQVGPSVGIEAGDHVWASRYILERITEQAGVVLTLDPKPIEGDWNGAGCHTNYSTKSMRDEGGFEVIKKAILNLS

SEQ ID NO: 17546 - protein, 95 aa, Oxalis tuberosa
LYAGINISGTNGEVMPGQWEYQVGPSVGIEAGDHIWASRYILERITEQAGVVLTLDPKPIDGDWNGAGCHTNYSTKSMRDEGGFEVTKKAILNLS

SEQ ID NO: 17547 - protein, 95 aa, Oxalis tuberosa
LYAGIDISGTNGEVMPGQWEYQVGPSVGIEAGDHIWASRYILERITEQAGVVLTLDPKPIDGDWNGAGCHTNYSTKSMRDEGGFEVIKKAIFNLS

SEQ ID NO: 17548 - protein, 401 aa, Escherichia coli
MFHLDTLATLVAATLTLLLGRKLVHSVSFLKKYTIPEPVAGGLLVALALLVLKKSMGWEVNFDMSLRDPLMLAFFATIGLNANIASLRAGGRVVGIFLIVVVGLLVMQNAIGIGMASLLGLDPLMGLLAGSITLSGGHGTGAAWSKLFIERYGFTNATEVAMACATFGLVLGGLIGGPVARYLVKHSTTPNGIPDDQEVPTAFEKPDVGRMITSLVLIETIALIAICLTVGKIVAQLLAGTAFELPTFVCVLFVGVILSNGLSIMGFYRVFERAVSVLGNVSLSLFLAMALMGLKLWELASLALPMLAILVVQTIFMALYAIFVTWRMMGKNYDAAVLAAGHCGFGLGATPTAIANMQAITERFGPSHMAFLVVPMVSAFFIDIVNALVIKLYLMLPIFAG

SEQ ID NO: 17549 - protein, 76 aa, Hordeum vulgare subsp. vulgare
REAKLMRYKEKRKRRRYEKQIRYASRKAYAEMRPRVKGRFAKVPDGGEGAAPSPPQQPTQAAGYEPSRLDLGWFRS

SEQ ID NO: 17550 - protein, 520 aa, Suaeda salsa
MAALEELKKKLTPLFDAEKGFSAGTTLECGDSDMLSDSGTINLLSRSYGVYNFNEQGLQKCTSSPVDENSPSEKTYRISSREMRVFGAIGSGASSIVQRAIHIPTHRIIALKKINIFEKEKRQQLLTEIRTLCEAPCSEGLVEFYGAFYIPDSGQISIALEYMDGGSLADVIQVQKCIPESVLSAIVRKLLHGLNYLHGVRHLVHRDIKPANLLMDLKGEPKITDFGISAGLENSMAMCATFIGTVTYMSPERIRNESYSYPADIWSLGLALFECGTGEFPYIANDGPVNLMLQILDDPSPSPSKEKFSSEFCSFVDVCLQKDPEARPTAEQLLSHPFITKYKDSQVDLATFVQSIFDPVQRLKDLADMLTIHYYLLFDGPDEEEWQQAKSLYNEGSVFSFSGKQYAGTNDIFSVLSDVRRKLAGKWPPEKLIHVVEKLQCKAHGQGGIAIRVSGSFIAGNQFIICGDGMQVEGLPNFRDLNVDIASKRMGTFKEQFIIEPGDAIGCYNISNQELYIMSQ

SEQ ID NO: 17551 - protein, 648 aa, Oryza sativa Indica Group
MAGKGEGPAIGIDLGTTYSCVGVWQHDRVEIIANDQGNRTTPSYVGFTDSERLIGDAAKNQVAMNPINTVFAKRLIGRRFSDASVQSDIKLWPFKVIAGPGDKPMIVVQYKGEEKQFAAEEISSMVLIKMREIAEAYLGTTIKNAVVTVPAYFNDSQRQATKDAGVIAGLNVMRIINEPTAAAIAYGLDKKATSVGEKNVLIFDLGGGTFDVSLLTIEEGIFEVKATAGDTHLGGEDFDNRMVNHFVQEFKRKNKKDITGNPRALRRLRTACERAKRTLSSTAQTTIEIDSLYEGIDFYSTITRARFEELNMDLFRKCMEPVEKCLRDAKMDKSSVHDVVLVGGSTRIPRVQQLLQDFFNGKELCKNINPDEAVAYGAAVQAAILSGEGNEKVQDLLLLDVTPLSLGLETAGGVMTVLIPRNTTIPTKKEQVFSTYSDNQPGVLIQVYEGERTRTRDNNLLGKFELSGIPPAPRGVPQITVCFDIDANGILNVSAEDKTTGQKNKITITNDKGRLSKEEIEKMVQGAEKYKSEDEEHKKKVESKNALENYAYNMRNTIKDEKIASKLPAADKKKIEDAIDQAIQWLDGNQLAEADEFDDKMKELEGICNPIIAKMYQGAGADMAGGMDEDDAPPAGGSGAGPKIEEVD

SEQ ID NO: 17552 - protein, 560 aa, Rhizopus oryzae
MPSIKIGQHLLNRLKEINIDVVFGVPGDFNMPLLDIIEDDPELTWGNNANELNASYAADGYARIRGAGAVVTTFGVGELSAVNGIAGSYSEMLPVIHIVGTPSTKSQAAGAMLHHSLGDGNFDVFFNMSSMIACASAHLKKQTAIAEIDRVISQAVLSKRTGYIGIPIDLIKTEVEVPEPIPALKTELPKNPADVQAIALRVVTDAIAKAQFPVIIVDGCVLRQRCQKAVQAFIERSGFPTYVAPMGKGAVDESSVSYRGCYSGNVTLEAVNEEIKQADLIIEVGSIKSDFNTGNFSYSLDRSKTITLHSFATIVFCAEYQKVSMLEFVPLLTQALPEQPRQFNLGPRPRPVPIQPGTEITHNYFWHKVPEFMDENAIVCAETGTAEFASLNMDGPKGTTYITQFLWGSIGFSVGAAVGAAIAARDRRVYLFVGDGSFQLTCQEISGFLRHGLTPVVFLLNNDGYLIEKLIHGPERAYNNYQMWNYSKSLDYFGAHLEHNKSMGVPPVGFEGKVATRDEFESAMRQVQANPDKIHFLEVIMPQFDSPRELELLVANSENR

SEQ ID NO: 17553 - protein, 560 aa, Rhizopus oryzae
MPSIQIGQHLLNRLKEINIDVVFGVPGDFNMPLLDIIEDDPKLTWGNNANELNASYAADGYARIRGAGAVVTTFGVGELSAVNGVAGSYAEMLPVIHIVGTPSTKSQAAGAMLHHSLGDGNFDVFFNMSSMIACASTHLRKQTAIAEIDRVISQAVLSKRTGYIGIPIDLIKTEVEIPEELGPFQTTLPKNNPEVQAIALKVVAEAIQSAKHPVIIVDGCVLRHRCQKPVQEFITRSGFPTYVAPMGKGAVDESIENFRGCYSGNVTLEAVNEEIKLADLIIEIGSIKSDFNTGNFSYSLDRSKTITLHSFATVVFCAEYQKVSMMEFIPLLTEALPQQPRTFNLGPRAKPVPIQPGTEITHNYFWHKVPEYMEENAIVCAETGTAEFASLNMDGPKGTTYITQILWGSIGFTVGASVGAAIAARDRRVYLFVGDGSFQLTCQEIAVFLRHGLTPVIFLLNNDGYLIEKLIHGPERAYNNYQMWNYSKSLDYFGAHLEHNKSMGVPPVGFEGKVATRDEFESAMKQVQANPDKIHFLEVIMPQFDAPRELELLVANSENR

SEQ ID NO: 17554 - protein, 462 aa, Azospirillum brasilense
MIRLPASPRTALLSAAATLALMLGSAQAAPLDVEKDQLKLGFIKLTDMAPLAIAAEKGFFEDEGLSVTLEPQANWKVLLDRVISGELDGAHMLAGQPLGATIGFGTQANVVTAFSMDLNGNGITLSNEVWERMKPNLPKGPDGKPLHPIKADALKPVIAQYRAEGKPFTMGMVFPVSTHNYELRYWLAAGGINPGYYAPNDVSGQIQADALLSVTPPPQMPATLEAGTIFGYSVGEPWNQQAVMKGIGVPVITDTEIWKNNPEKVFGVTEGWAAKNPKTHLALVKALIRAAMWLDENGNANRAEAVKILAKSEYVGADAKVIANSMTGTFEYEKGDKRAVPDFNVFFRYNATYPFYSDAVWYLTQMRRWGQIAEAKPDAWYDETARKVYKPEIYLKAARLLVEEGKAKEADFPWTSDGYKPLDNGFIDGIAYDGRKPNEYLTKLPIGLKGGQAVQGGQLVGG

SEQ ID NO: 17555 - protein, 516 aa, Cryptococcus neoformans var. neoformans
MFQKVSDKFHRKQQSTTLPGKTQQVPNPTSPVLAKANSQAQQAYSLPQDHSPMEGIQRDSPPIQQPMATEKAPIVGSSASTSLPTLSVQDGTLPLTPGAQGMQTGTIDGHRQLQSPVSRSSSAGEDKMREKARDAQEQAAQSQANLHHATQQARVAAINAAATQAALETAAQLPATARVPVSGGGVEQGQARRKTAGRYALSDFLIERTLGTGSFGRVHLVRSRHNGRFYAVKVLNKEKVIKMKQVEHTNSEREMLVRVRHPFLVNLWGTFQDVNNLYMVMDFVAGGELFSLLRKSQRFPNSVAKFYAAEVALALDYLHSLDIIYRDLKPENLLLGADGHVKVTNFGFAKYVPDITWTLCGTPDYLAPEVVQSKGYNKSVDWYALGVLIFEMLAGYPPFFTEDGNPMKLYEKIIAGKVRYPTYFDALAKELLKNLLIGDLTKRYGNLRAGSSDIFAHGWFAEVDWDKLYRREIPAPYVPKIDGEGDASQFDRYQEADVSAYGKVGNGPYDHFFTEF

SEQ ID NO: 17556 - protein, 368 aa, Hordeum vulgare subsp. vulgare
MNCNFNSDLLEKEAGRTSFPWARPCDGCHAAPSAVYCCADAAYLCSSCDTQVHSANRVASRHERVRVCETCESTPAVLACHADAAALCTACDAQVHSANPIAQRHQRVPVLPLPAVAIPAASGFAEAEASVTAHGDKEGGEEVDSWLLRRNSDDNNCANKIDRYFNLVGYNMYYDNITCDPRPQEQYRMQEQQHVQNRYREKEGCECVVPPQVVMASEQQGSNYGTIGAGQAASVTAMASTYTASISNDISFSSMEVGIVPDNTRPNISNRNILTSSEAIELSGHSLQMPVHFSSMDREARVLRYKEKKQARKFQKTIRYATRKAYAEARPRIKGRFAKRSDIEHEENHMLSPPALPDTSSYNTVPWF

SEQ ID NO: 17557 - protein, 537 aa, Buchnera aphidicola str. Sg (Schizaphis graminum)
MMELQRNFFIFAFLFVSFLLWQAWQSQSLKKNKKNEETNSFFHLNHKKEDKNQIIIKNDVLRLVINMYGGDIEEASLLDYKTQLNSPENLKLLETKSDFVYQAQSGLIGKDGLDNSINKIRPLYSAKKNFFELGHNEKELRVPITFIAKNGITYIKNFILKPGKYNVEVEYDINNLSNKKLELNIFGQLKQTVKLPKNRDIYSGNFALQTFRGAAYSSSDAKYEKYKFDNIANHEHLHIITHHGWIAMLQQYFVVAWVPDTNISSSNIIYTSYLDNDGIAIIGYKSSLINIPSNSRYIIKSKLWIGPEKQQEMALVAPNLDLTVDYGFLWFLSQPLFKLLSTIHNFIGNWGFSIILITFMMKAITYPLTKAQYTSMSKMRELQPKINELKKNFGHDKQRMSKEIMALYKKEKINPLGGCLPVFIQMPIFLSLYYMLIGSVELRHAPFLFWIKDLSDQDPYYVLPIFMGLTMFFIQRTSSNNISDPFQQKIMHFMPFIFTVFFLWFPSGLVLYYIVSNLVTIIQQKYILSNFKKNQKR

SEQ ID NO: 17558 - protein, 401 aa, Buchnera aphidicola str. Sg (Schizaphis graminum)
MNNFKKVVLAYSGGLDTSAIIPWLKENYHVDVVAFVADIGQSKKDLNGIEKKALQSGAIDCRVFDLKEEFIKDYVYPVLKTGSLYEGNYLLGTAIARPIIAKKQVEFASSIGAKFLCHGATGKGNDQVRFEIAYAALAPYMKVIAPWREWNLNSRESLLEYLREKNIPTSATLEKIYSRDENSLHISTEGGLLEDLWNKPNADCWNWTVELEDAPEQPEYISLIVKNGSVVSVNNEFLTPLKCIEKLNKIGSKHAIGRIDIVENRLVGIKSRGCYETPGGTIMHIALRAIEQLVFDRESFKWREKIGLEMSSVVYDGRWFTPIRKSLQASADSLSSEVNGEVVLKLYKGSVIPVQKKSSNSLYSKEYATFGEDEVYKHSDAEGFIRLFSLSSRIRAQNKLK

SEQ ID NO: 17559 - protein, 355 aa, Buchnera aphidicola str. Sg (Schizaphis graminum)
MKQKILFIDRDGTLIHEPSNDCQVDAINKLEFKKYIISSLCQLMNFGYKFVMVTNQDGLGSKSFPRENFNIPHFFMLNIFRSEGIIFEDVLICPHFLDDNCDCRKPQTKLLKPWLKKNKIDKQRSYVIGDRETDMELAKNINLTGIQYKEKEFNWIDITKEIIKRNRYREVIRETKETYIHIKLWLDLEHHSCIQTGINFFDHMLEQLSIHSGISMYILAKGDLQIDDHHTIEDTGIVLGEALSQALNNKNGLSRYGFVLPMDESQAKCIIDLSNRPYLSFNAHFKHKMVGDMNTDMVEHFFYSLCCSMKITLHIDVKGKNDHHCIESLFKAFGRALRKAVKIEGNTLPTSKGIL

SEQ ID NO: 17560 - protein, 638 aa, Buchnera aphidicola str. Sg (Schizaphis graminum)
MGKIIGIDLGTTNSCVAIMDGNKPRVLENSEGDRTTPSIIAYTEKGEVLVGQPAKRQAITNPKNTLFAIKRLIGRKFRDDEVQRDIKIMPYSIINSENGDAWIDVKKQKMAPPQISAEVLKKMKKTAEDYLGESIKEAVITVPAYFNDAQRQATKDAGRIAGLEVKRIINEPTAAALAYGLDKGEGNRTIAVYDLGGGTFDISIIEIDDVDKEKTFEVLATNGDTHLGGEDFDSRLINYLVQEFKKEQGIDLRNDSLAMQRLKEAAEKAKIELSSAQQTDVNLPYITADSNGPKHLNIKVTRSKLESLVEDLVMRSIEPLKVALKDAGLSVGDINDVILVGGQTRMPMVQSKVADFFGKEPRKDVNPDEAVAVGAAVQGGVLSGDVKDVLLLDVTPLSLGIETMGGIMTSLINKNTTIPTKHSQVFSTAEDNQSAVTIHILQGERKRALDNKSLGQFNLDGIEPAPRGTAQIEVTFDIDSDGILHVSAKDKKTGKEQKITIKASSGLNEEEIKKMINDAEANSEADRKFEELIQVRNQGDQLIHSIRKQLDENKNQIEKKELEKIKSALDELERSLKGENKSEIEKNIQNLLNISSKLTEINQKKSEENLKKEDTSSESKKDENVVDAEFEEIKDPKK

SEQ ID NO: 17561 - protein, 315 aa, Buchnera aphidicola str. Sg (Schizaphis graminum)
MPDMKLFAGNSIPKLAKFIAHRLYINLGNAAVGRFSDGEISVQINENVRGSDVFIIQSTCSPTNDNIMELVVMVDALRRASAGRITAVIPYFGYSRQDRRVRSARVPITAKVVADFLSSIGVDRVLTVDLHAEQIQGFFDVPVDNVFGSLILLEDMLQRELKNPIVVSPDIGGVVRARAIAKLLYDTDMAIIDKRRPRPNISQIMHIIGDVANRDCILVDDMIDTGGTLCKAAEALKERGAKRVFAYATHPIFSGKASENLKKSVIDEVVVCDTIPLEEKIRLLPNVRTLTLAGMLAEAIRRISNEESISAMFEH

SEQ ID NO: 17562 - protein, 403 aa, Buchnera aphidicola str. Sg (Schizaphis graminum)
MVKILNNLIFVLNCGSSSVKFAILNPDNKKKYLSGLVECLFLSKTYMKWKDLTTEHKKCIGSNLSHKDALNFIFNKFFLEKKDIYKNIVGIGHRVVHGGNKIKSSTLIDDNIIQLIQKAISFAPLHNPANLIGIKTAIEKFPIFAKKNVAVFDTSFYQNMPETSFLYAIPYFFYKEHHIRRYGAHGTSHHYVASEVALILNKNFNSLNVITCHLGNGASVSAVCNGICVDTSMGLTPLEGLVMGTRSGDIDPSIIFFMYQKLGMSIDEIHTILTKESGLLGLSGISSDFRYFEKKYYFEKKARLAVDIFCHRLSKYIASYMSLMENNLDAIVFTGGIGENVPLIREITLSKLLLIGFKIDTQRNLGIKNGKHGLITTDKSRPAFVIPTDEELAIAQETIKIIK

SEQ ID NO: 17563 - protein, 709 aa, Buchnera aphidicola str. Sg (Schizaphis graminum)
MSRIIMLIPLNKKVSLTTISLSILYFFNKKEQKNCFKSFSYLPLIKSDNINFIRAYFSKKINVLDDINFFKKNFNSDEYSYLLDKIIKECFNKKKINEFILIKGISRKEHDDADQINFDIAQNIDAEVIFIDNLKDFSLGCFKRKERKINVFLQQKKYKNFLGLIFSDINSPFIFNKMKYNFFDKLIILKNTKKNTCIHAIKKNIFFNSFFRVIAFIPWNKKLVKSSVINIFKFLNATLVNTISIKDAFIKNITIFDEDSSVILKKSYANTLVLISSSRMETFFKTLYLVCKSKKIGAILLTGVLKLSENSIKLLKFLTNQGVPVFFIKENTVETLSQLQKFNFNINVQNKYFINKLLEYTSSFFNKNHLISLKKKTTNFYKKTYSPKEFCYRLKILSKSKHKRIILPESYEPRILKAASICHRLGIAECILLGDPKKIYNIANENKIDLNKNIEIKDPILIRDQYVPRLLEIRKNKKIDEIFARKQLKDNVILATLILESGKVDGLVSGTINTTANTIRPALQIIKTDPIYSLVSSIFFILLPNEVLIYGDCAINIEPNSKELAEIAIQSANSAKMFGIEPRIAMLSYSTGFSGTGWQVEKIRDATSIVKSKRPDLLIDGPIQYDAAISKEVAKLKIPYSSILGSANIFIFPDLNSGNITYKAVQRSADLICIGPMLQGLKKPVNDLSRGASVEDIVYTIALTSIQSL

SEQ ID NO: 17564 - protein, 107 aa, Buchnera aphidicola str. Sg (Schizaphis graminum)
MNVIEKIERQIKDNIILIYMKGTPQSPSCGFSAQAVQALSICGEKFAYVDILENLDIRKELPRYANWPTFPQLWIKGELIGGCSIILEMLENGELKKIISNAVLNSK
